United States Patent Application Publication US 2007/0042392 A1 - sequence listing, part 2

SEQ ID NO: 1494 - protein, 883 aa, Homo sapiens
MKKAKVALMKQMREEQQRRRLVETKRNREIAQLKKEQRRQEFQIRALESQKRQQEMVLRRKTQEVSALRRLAKPMSERVAGRAGLKPPMLDSGAEVSASTTSSEAESGARSVSSIVRQWNRKINHFLGDHPAPTVNGTRPARKKFQKKGASQSFSKAARLKWQSLERRIIDIVMQRMTIVNLEADMERLIKKREELFLLQEALRRKRERLQAESPEEEKGLQELAEEIEVLAANIDYINDGITDCQATIVQLEETKEELDSTDTSVVISSCSLAEARLLLDNFLKASIDKGLQVAQKEAQIRLLEGRLRQTDMAGSSQNHLLLDALREKAEAHPELQALIYNVQQENGYASTDEEISEFSEGSFSQSFTMKGSTSHDDFKFKSEPKLSAQMKAVSAECLGPPLDISTKNITKSLASLVEIKEDGVGFSVRDPYYRDRVSRTVSLPTRGSTFPRQSRATETSPLTRRKSYDRGQPIRSTDVGFTPPSSPPTRPRNDRNVFSRLTSNQSQGSALDKSDDSDSSLSEVLRGIISPVGGAKGARTAPLQCVSMAEGHTKPILCLDATDELLFTGSKDRSCKMWNLVTGQEIAALKGHPNNVVSIKYCSHSGLVFSVSTSYIKVWDIRDSAKCIRTLTSSGQVISGDACAATSTRAITSAQGEHQINQIALSPSGTMLYAASGNAVRIWELSRFQPVGKLTGHIGPVMCLTVTQTASQHDLVVTGSKDHYVKMFELGECVTGTIGPTHNFEPPHYDGIECLAIQGDILFSGSRDNGIKKWDLDQQELIQQIPNAHKDWVCALAFIPGRPMLLSACRAGVIKVWNVDNFTPIGEIKGHDSPINAICTNAKHIFTASSDCRVKLWNYVPGLTPCLPRRVLAIKGRATTLP

SEQ ID NO: 1495 - protein, 970 aa, Homo sapiens [sequence omitted]

SEQ ID NO: 1496 - protein, 67 aa, Homo sapiens
MEEWDVPQMKKEVESLKYQLAFQREMASKTIPELLKWIEDGIPKDPFLNPDLMKNNPWVEKGKCTIL

SEQ ID NO: 1497 - protein, 1951 aa, Homo sapiens
MNALASLGPGDRLSVAQRLSIHLQDTHLQRYPEHRCGLRDFLPSGNSPEKLKVLGASHQMSLGDAQESCSMRCGALDRPCSCHPTCSGLGTCCLDFQDFCLEILPYSVSMMGGKDFVVRHFKMSSPTDTSPQVCMPQESIQTLGHVDSSGQVHFVSPLLYESGHVPFTISLDDGHSFPRAGTWLAVHPNKVLMKEKSELMNEMHWQYYGTANTSGNLSLTWHVEALPTQTPSSCGAMRRQVRKLDRERVGAWWRGAWARHPRQEAGEHAKRRKGHAETPRGRRKGRAGRSAAAVGELRPARRSLETSRAAAAMAKDSPSPLGASPKKPGCSSPAAAVLENQRRELEKLRAELEAERAGWRAERRRFAARERQLREEAERERRQLADRLRSKWEAQRSRELRQLQEEMQREREAEIRQLLRWKEAEQRQLQQLLHRERDGVVRQARELQRQLAEELVNRGHCSRPGASEVSAAQCRCRLQEVLAQLRWQTDGEQAARIRYLQAALEVERQLFLKYILAHFRGHPALSGSPDPQAVHSLEEPLPQTSSGSCHAPKPACQLGSLDSLSAEVGVRSRSLGLVSSACSSSPDGLLSTHASSLDCFAPACSRSLDSTRSLPKASKSEERPSSPDTSTPGSRRLSPPPSPLPPPPPPSAHRKLSNPRGGEGSESQPCEVLTPSPPGLGHHELIKLNWLLAKALWVLARRCYTLQAENKQLRRAGCPYQADEKVKRLKVKRAELTGLARRLADRARKLQETNLRAVSAPIPGESCAGLELCQVFARQRARDLSEQASAPLAKDKQIEELRQECHLLQARVASGPCSDLHTGRGGPCTQWLNVRDLDRLQRESQREVLRLQRQLMLQQGNGGAWPEAGGQSATCEEVRRQMLALERELDQRRRECQELGAQAAPARRRGEEAETQLQAALLKNAWLAEENGRLQAKTDWVRKVEAENSEVRGHLGRACQERDASGLIAEQLLQQAARGQDRQQQLQRDPQKALCDLHPSWKEIQALQCRPGHPPEQPWETSQMPESQVKGSRRPKFHARPEDYAVSQPNRDIQEKREASLEESPVALGESASVPQVSETVPASQPLSKKTSSQSNSSSEGSMWATVPSSPTLDRDTASEVDDLEPDSVSLALEMGGSAAPAAPKLKIFMAQYNYNPFEGPNDHPEGELPLTAGDYIYIFGDMDEDGFYEGELEDGRRGLVPSNFVEQIPDSYIPGCLPAKSPDLGPSQLPAGQDEALEEDSLLSGKAQGVVDRGLCQMVRVGSKTEVATEILDTKTEACQLGLLQSMGKQGLSRPLLGTKGVLRMAPMQLHLQNVTATSANITWVYSSHRHPHVVYLDDREHALTPAGVSCYTFQGLCPGTHYRARVEVRLPRDLLQVYWGTMSSTVTFDTLLAGPPYPPLDVLVERHASPGVLVVSWLPVTIDSAGSSNGVQVTGYAVYADGLKVCEVADATAGSTLLEFSQLQVPLTWQKVSVRTMSLCGESLDSVPAQIPEDFFMCHRWPETPPFSYTCGDPSTYRVTFPVCPQKLSLAPPSAKASPHNPGSCGEPQAKFLEAFFEEPPRRQSPVSNLGSEGECPSSGAGSQAQELAEAWEGCRKDLLFQKSPQNHRPPSVSDQPGEKENCSQHMGTSKSPAPGFIHLRTECGPRKEPCQEKAALERVLRQKQDAQGFTPPQLGASQQYASDFHNVLKEEQEALCLDLWGTERREERREPEPHSRQGQALGVKRGCQLHEPSSALCPAPSAKVIKMPRGGPQQLGTGANTPARVFVALSDYNPLVMSANLKAAEEELVFQKRQLLRVWGSQDTHDFYLSECNRQVGNIPGRLVAEMEVGTEQTDRRWRSPAQGHLPSVAHLEDFQGLTIPQGSSLVLQGNSKRLPLWTPKIMIAALDYDPGDGQMGGQGKGRLALRAGDVVMVYGPMDDQGFYYGELGGHRGLVPAHLLDHMSLHGH

SEQ ID NO: 1498 - protein, 353 aa, Homo sapiens
MSKPPDLLLRLLRGAPRQRVCTLFIIGFKFTFFVSIVIYWHVVGEPKEKGQLYNLPAEIPCPTLTPPTPPSHGPTPGNIFFLETSDRTNPNFLFMCSVESAARTHPESHVLVLMKGLPGGNASLPRHLGISLLSCFPNVQMLPLDLRELFRDTPLADWYAAVQGRWEPYLLPVLSDASRIALMWKFGGIYLDTDFIVLKNLRNLTNVLGTQSRYVLNGAFLAFERRHEFMALCMRDFVDHYNGWIWGHQGPQLLTRVFKKWCSIRSLAESRACRGVTTLPPEAFYPIPWQDWKKYFEDINPEELPRLLSATYAVHVWNKKSQGTRFEATSRALLAQLHARYCPTTHEAMKMYL

SEQ ID NO: 1499 - protein, 528 aa, Homo sapiens
MAKVILKQSKQCKNLLTCKVAQVCPVCGCLHCYFWWLSGLESRRPSSPLIDIKPIEFGVLSAKKEPIQPSVLRRTYNPDDYFRKFEPHLYSLDSNSDDVDSLTDEEILSKYQLGMLHFSTQYDLLHNHLTVRVIEARDLPPPISHDGSRQDMAHSNPYVKICLLPDQKNSKQTGVKRKTQKPVFEERYTFEIPFLEAQRRTLLLTVVDFDKFSRHCVIGKVSVPLCEVDLVKGGHWWKAHDSQFSAPGLPADQQFFADLFSGLVLNPQLLGRVWFASQPASLPVGSLCIDFPRLDIVLRGEYGNLLEAKQQRLVEGEMLFIPARAANLPVNNKPVMLLSLVFAPTWLGLSFYDSRTTSLLHPARQIQLPSLQRGEGEAMLTALTHLSRSPLEQNIIQPLVLSLLHLCRSVVNMPPGNSQPRGDFLYHSICNWVQDNYAQPLTRESVAQFFNITPNHLSKLFAQHGTMRFIEYVRWVRMAKARMILQKYHLSIHEVAQRCGFPDSDYFCRVFRRQFGLTPGEYSARFQG

SEQ ID NO: 1500 - protein, 1007 aa, Homo sapiens
MSRRKQRKPQQLISDCEGPSASENGDASEEDHPQVCAKCCAQFTDPTEFLAHQNACSTDPPVMVIIGGQENPNNSSASSEPRPEGHNNPQVMDTEHSNPPDSGSSVPTDPTWGPERRGEESSGHFLVAATGTAAGGGGGLILASPKLGATPLPPESTPAPPPPPPPPPPPGVGSGHLNIPLILEELRVLQQRQIHQMQMTEQICRQVLLLGSLGQTVGAPASPSELPGTGTASSTKPLLPLFSPIKPVQTSKTLASSSSSSSSSSGAETPKQAFFHLYHPLGSQHPFSAGGVGRSHKPTPAPSPALPGSTDQLIASPHLAFPSTTGLLAAQCLGAARGLEATASPGLLKPKNGSGELSYGEVMGPLEKPGGRHKCRFCAKVFGSDSALQIHLRSHTGERPYKCNVCGNRFTTRGNLKVHFHRHREKYPHVQMNPHPVPEHLDYVITSSGLPYGMSVPPEKAEEEAATPGGGVERKPLVASTTALSATESLTLLSTSAGTATAPGLPAFNKFVLMKAVEPKNKADENTPPGSEGSAISGVAESSTATLMQLSKLMTSLPSWALLTNHFKSTGSFPLPLCARALGASPSETSKLQQLVEKIDRQGAVAVTSAASGAPTTSAPAPSSSASSGPNQCVICLRVLSCPRALRLHYGQHGGERPFKCKVCGRAFSTRGNLRAHFVGHKASPAARAQNSCPICQKKFTNAVTLQQHVRMHLGGQIPNGGTALPEGGGAAQENGSEQSTVSGAGSFPQQQSQQPSPEEELSEEEEEEDEEEEEDVTDEDSLAGRGSESGGEKAISVRGDSEEASGAEEEVGTVAAAATAGKEMDSNEKTTQQSSLPPPPPPDSLDQPQPMEQGSSGVLGGKEEGGKPERSSSPASALTPEGEATSVTLVEELSLQEAMRKEPGESSSRKACEVCGQAFPSQAALEEHQKTHPKEGPLFTCVFCRQGFLERATLKKHMLLAHHQVQPFAPHGPQNIAALSLVPGCSPSITSTGLSPFPRKDDPTIP

SEQ ID NO: 1501 - protein, 1885 aa, Homo sapiens
MRPLSFALFLGDPNMANLEESFPRGGTRKIHKPEKAFQQSVEQDNLFDISTEEGSTKRKKSQKGPAKTKKLKIEKRESSKSAREKFEILSVESLCEGMRILGCVKEVNELELVISLPNGLQGFVQVTEICDAYTKKLNEQVTQEQPLKDLLHLPELFSPGMLVRCVVSSLGITDRGKKSVKLSLNPKNVNRVLSAEALKPGMLLTGTVSSLEDHGYLVDIGVDGTRAFLPLLKAQEYIRQKNKGAKLKVGQYLNCIVEKVKGNGGVVSLSVGHSEVSTAIATEQQSWNLNNLLPGLVVKAQVQKVTPFGLTLNFLTFFTGVVDFMHLDPKKAGTYFSNQAVRACILCVHPRTRVVHLSLRPIFLQPGRPLTRLSCQNLGAVLDDVPVQGFFKKAGATFRLKDGVLAYARLSHLSDSKNVFNPEAFKPGNTHKCRIIDYSQMDELALLSLRTSIIEAQYLRYHDIEPGAVVKGTVLTIKSYGMLVKVGEQMRGLVPPMHLADILMKNPEKKYHIGDEVKCRVLLCDPEAKKLMMTLKKTLIESKLPVITCYADAKPGLQTHGFIIRVKDYGCIVKFYNNVQGLVPKHELSTEYIPDPERVFYTGQVVKVVVLNCEPSKERMLLSFKLSSDPEPKKEPAGHSQKKGKAINIGQLVDVKVLEKTKDGLEVAVLPHNIRAFLPTSHLSDHVANGPLLHHWLQAGDILHRVLCLSQSEGRVLLCRKPALVSTVEGGQDPKNFSEIHPGMLLIGFVKSIKDYGVFIQFPSGLSGLAPKAIMSDKFVTSTSDHFVEGQTVAAKVTNVDEEKQRMLLSLRLSDCGLGDLAITSLLLLNQCLEELQGVRSLMSNRDSVLIQTLAEMTPGMFLDLVVQEVLEDGSVVFSGGPVPDLVLKASRYHRAGQEVESGQKKKVVILNVDLLKLEVHVSLHQDLVNRKARKLRKGSEHQAIVQHLEKSFAIASLVETGHLAAFSLTSHLNDTFRFDSEKLQVGQGVSLTLKTTEPGVTGLLLAVEGPAAKRTMRPTQKDSETVDEDEEVDPALTVGTIKKHTLSIGDMVTGTVKSIKPTHVVVTLEDGIIGCIHASHILDDVPEGTSPTTKLKVGKTVTARVIGGRDMKTFKYLPISHPRFVRTIPELSVRPSELEDGHTALNTHSVSPMEKIKQYQAGQTVTCFLKKYNVVKKWLEVEIAPDIRGRIPLLLTSLSFKVLKHPDKKFRVGQALRATVVGPDSSKTFLCLSLTGPHKLEEGEVAMGRVVKVTPNEGLTVSFPFGKIGTVSIFHMSDSYSETPLEDFVPQKVVRCYILSTADNVLTLSLRSSRTNPETKSKVEDPEINSIQDIKEGQLLRGYVGSIQPHGVFFRLGPSVVGLARYSHVSQHSPSKKALYNKHLPEGKLLTARVLRLNHQKNLVELSFLPGDTGKPDVLSASLEGQLTKQEERKTEAEERDQKGEKKNQKRNEKKNQKGQEEVEMPSKEKQQPQKPQAQKRGGRECRESGSEQERVSKKPKKAGLSEEDDSLVDVYYREGKEEAEETNVLPKEKQTKPAEAPRLQLSSGFAWNVGLDSLTPALPPLAESSDSEEDEKPHQATIKKSKKERELEKQKAEKELSRIEEALMDPGRQPESADDFDRLVLSSPNSSILWLQYMAFHLQATEIEKARAVAERALKTISFREEQEKLNVWVALLNLENMYGSQESLTKVFERAVQYNEPLKVFLHLADIYAKSEKFQEAGELYNRMLKRFRQEKAVWIKYGAFLLRRSQAAASHRVLQRALECLPSKEHVDVIAKFAQLEFQLGDAERAKAIFENTLSTYPKRTDVWSVYIDMTIKHGSQKDVRDIFERVIHLSLAPKRMKFFFKRYLDYEKQHGTEKDVQAVKAKALEYVEAKSSVLED

SEQ ID NO: 1502 - protein, 358 aa, Homo sapiens
MDDATVLRKKGYIVGINLGKGSYAKVKSAYSERLKFNVAVKIIDRKKTPTDFVERFLPREMDILATVNHGSIIKTYEIFETSDGRIYIIMELGVQGDLLEFIKCQGALHEDVARKMFRQLSSAVKYCHDLDIVHRDLKCENLLLDKDFNIKLSDFGFSKRCLRDSNGRIILSKTFCGSAAYAAPEVLQSIPYQPKVYDIWSLGVILYIMVCGSMPYDDSDIRKMLRIQKEHRVDFPRSKNLTCECKDLIYRMLQPDVSQRLHIDEILSHSWLQPPKPKATSSASFKREGEGKYRAECKLDTKTGLRPDHRPDHKLGAKTQHRLLVVPENENRMEDRLAETSRAKDHHISGAEVGKAST

SEQ ID NO: 1503 - protein, 68 aa, Homo sapiens [sequence omitted]

SEQ ID NO: 1504 - protein, 443 aa, Homo sapiens
MHPAAEDNYGYDACAVLCLPCVPNILVIATESGMLYHCVVLEGEEEDDHTSEKSWDSRIDLIPSLYVFECVELELALKLASGEDDPFDSDFSCPVKLHRDPKCPSRYHCTHEAGVHSVGLTWIHKLHKFLGSDEEDKDSLQELSTEQKCFVEHILCTRPLPCRQPAPIRGFWIVPDILGPTMICITSTYECLIWPLLSTVHPASPPLLCTREDVEVAESPLRVLAETPDSFEKHIRSILQRSVANPAFLKASEKDIAPPPEECLQLLSRATQVFREQYILKQDLAKEEIQRRVKLLCDQKKKQLEDLSYCREERKSLREMAERLADKYEEAKEKQEDIMNRMKKLLHSFHSELPVLSDSERDMKKELQLIPDQLRHLGNAIKQVTMKKDYQQQKMEKVLSLPKPTIILSAYQRKCIQSILKEEGEHIREMVKQINDIRNHVNF

SEQ ID NO: 1505 - protein, 303 aa, Homo sapiens
MAAAEGPVGDGELWQTWLPNHVVFLRLREGLKNQSPTEAEKPASSSLPSSPPPQLLTRNVVFGLGGELFLWDGEDSSFLVVRLRGPSGGGEEPALSQYQRLLCINPPLFEIYQVLLSPTQHHVALIGIKGLMVLELPKRWGKNSEFEGGKSTVNCSTTPVAERFFTSSTSLTLKHAAWYPSEILDPHVVLLTSDNVIRIYSLREPQTPTNVIILSEAEEESLVLNKGRAYTASLGETAVAFDFGPLAAVPKTLFGQNGKDEVVAYPLYILYENGETFLTYISLLHSPGNIWKAVGSIAHASCG

SEQ ID NO: 1506 - protein, 578 aa, Homo sapiens
MLRRLDKIRFRGHKRDDFLDLAESPNASDTECSDEIPLKVPRTSPRDSEELRDPAGPGTLIMATGVQDFNRTEFDRLNEIKGHLEIALLEKHFLQEELRKLREETNAEMLRQELDRERQRRMELEQKVQEVLKARTEEQMAQQPPKGQAQASNGAERRSQGLSSRLQKWFYERFGEYVEDFRFQPEENTVETEEPLSARRLTENMRRLKRGAKPVTNFVKNLSALSDWYSVYTSAIAFTVYMNAVWHGWAIPLFLFLAILRLSLNYLIARGWRIQWSIVPEVSEPVEPPKEDLTVSEKFQLVLDVAQKAQNLFGKMADILEKIKNLFMWVQPEITQKLYVALWAAFLASCFFPYRLVGLAVGLYAGIKFFLIDFIFKRCPRLRAKYDTPYIIWRSLPTDPQLKERSSAAVSRRLQTTSSRSYVPSAPAGLGKEEDAGRFHSTKKGNFHEIFNLTENERPLAVCENGWRCCLINRDRKMPTDYIRNGVLYVTENYLCFESSKSGSSKRNKVIKLVDITDIQKYKVLSVLPGSGMGIAVSTPSTQKPLVFGAMVHRDEAFETILSQYIKITSAAASGGDS

SEQ ID NO: 1507 - protein, 339 aa, Homo sapiens
MESRKDITNQEELWKMKPRRNLEEDDYLHKDTGETSMLKRPVLLHLHQTAHADEFDCPSELQHTQELFPQWHLPIKIAAIIASLTFLYTLLREVIHPLATSHQQYFYKIPILVINKVLPMVSITLLALVYLPGVIAAIVQLHNGTKYKKFPHWLDKWMLTRKQFGLLSFFFAVLHAIYSLSYPMRRSYRYKLLNWAYQQVQQNKEDAWIEHDVWRMEIYVSLGIVGLAILALLAVTSIPSVSDSLTWREFHYIQSKLGIVSLLLGTIHALIFAWNKWIDIKQFVWYTPPTFMIAVFLPIVVLIFKSILFLPCLRKKILKIRHGWEDVTKINKTEICSQL

SEQ ID NO: 1508 - protein, 950 aa, Homo sapiens
MFLHPVDYGRKAEELLWRKVYYEVIQLIKTNKKHIHSRSTLECAYRTHLVAGIGFYQHLLLYIQSHYQLELQCCIDWTHVTDPLIGCKKPVSASGKEMDWAQMACHRCLVYLGDLSRYQNELAGVDTELLAERFYYQALSVAPQIGMPFNQLGTLAGSKYYNVEAMYCYLRCIQSEVSFEGAYGNLKRLYDKAAKMYHQLKKCETRKLSPGKKRCKDIKRLLVNFMYLQSLLQPKSSSVDSELTSLCQSVLEDFNLCLFYLPSSPNLSLASEDEEEYESGYAFLPDLLIFQMVIICLMCVHSLERAGSKQYSAAIAFTLALFSHLVNHVNIRLQAELEEGENPVPAFQSDGTDEPESKEPVEKEEEPDPEPPPVTPQVGEGRKSRKFSRLSCLRRRRHPPKVGDDSDLSEGFESDSSHDSARASEGSDSGSDKSLEGGGTAFDAETDSEMNSQESRSDLEDMEEEEGTRSPTLEPPRGRSEAPDSLNGPLGPSEASIASNLQAMSTQMFQTKRCFRLAPTFSNLLLQPTTNPHTSASHRPCVNGDVDKPSEPASEEGSESEGSESSGRSCRNERSIQEKLQVLMAEGLLPAVKVFLDWLRTNPDLIIVCAQSSQSLWNRLSVLLNLLPAAGELQESGLALCPEVQDLLEGCELPDLPSSLLLPEDMALRNLPPLRAAHRRFNFDTDRPLLSTLEESVVRICCIRSFGHFIARLQGSILQFNPEVGIFVSIAQSEQESLLQQAQAQFRMAQEEARRNRLMRDMAQLRLQLEVSQLEGSLQQPKAQSAMSPYLVPDTQALCHHLPVIRQLATSGRFIVIIPRTVIDGLDLLKKEHPGARDGIRYLEAEFKKGNRYIRCQKEVGKSFERHKLKRQDADAWTLYKILDSCKQLTLAQGAGEEDPSGMVTIITGLPLDNPSVLSGPMQAALQAAAHASVDIKNVLDFYKQWKEIG

SEQ ID NO: 1509 - protein, 1358 aa, Homo sapiens
MVFGTKFPESKIVLALRTKREGPGEVRIQVYALRIGENENTDRERDPTPTPCPQGHRMMTEPRERRGYSVPPRPEVRTQATEWRVEESNFNKIFLKKDAELGRSNHLPTWDKPEDASWLPQSCLGGDAVATTGEIHEEKAWKTRALEVGQPAQRDIRRGELWGKEHGADQAIQETLEDLSSLERTLVVSESSPLGGDCQEVTTLTVKYQVSEEVPSGTVIGKLSQELGREERRRQAGAAFQVLQLPQALPIQVDSEEGLLSTGRRLDREQLCRQWDPCLVSFDVLATGDLALIHVEIQVLDINDHQPRFPKGEQELEISESASLRTRIPLDRALDPDTGPNTLHTYTLSPSEHFALDVIVGPDETKHAELIVVKELDREIHSFFDLVLTAYDNGNPPKSGTSLVKVNVLDSNDNSPAFAESSLALEIQEDAAPGTLLIKLTATDPDQGPNGEVEFFLSKHMPPEVLDTFSIDAKTGQVILRRPLDYEKNPAYEVDVQARDLGPNPIPAHCKVLIKVLDVNDNIPSIHVTWASQPSLVSEALPKDSFIALVMADDLDSGHNGLVHCWLSQELGHFRLKRTNGNTYMLLTNATLDREQWPKYTLTLLAQDQGLQPLSAKKQLSIQISDINDNAPVFEKSRYEVSTRENNLPSLHLITIKAHDADLGINGKVSYRIQDSPVAHLVAIDSNTGEVTAQRSLNYEEMAGFEFQVIAEDSGQPMLASSVSVWVSLLDANDNAPEVVQPVLSDGKASLSVLVNASTGHLLVPIETPNGLGPAGTDTPPLATHSSRPFLLTTIVARDADSGANGEPLYSIRSGNEAHLFILNPHTGQLFVNVTNASSLIGSEWELEIVVEDQGSPPLQTRALLRVMFVTSVDHLRDSARKPGALSMSMLTVICLAVLLGIFGLILALFMSICRTEKKDNRAYNCREAESTYRQQPKRPQKHIQKADIHLVPVLRGQAGEPCEVGQSHKDVDKEAMMEAGWDPCLQAPFHLTPTLYRTLRNQGNQGAPAESREVLQDTVNLLFNHPRQRNASRENLNLPEPQPATGQPRSRPLKVAGSPTGRLAGDQGSEEAPQRPPASSATLRRQRHLNGKVSPEKESGPRQILRSLVRLSVAAFAERNPVEELTVDSPPVQQISQLLSLLHQGQFQPKPNHRGNKYLAKPGGSRSAIPDTDGPSARAGGQTDPEQEEGPLDPEEDLSVKQLLEEELSSLLDPSTGLALDRLSAPDPAWMARLSLPLTTNYRDNVISPDAAATEEPRTFQTFGKAEAPELSPTGTRLASTFVSEMSSLLEMLLEQRSSMPVEAASEALRRLSVCGRTLSLDLATSAASGMKVQGDPGGKTGTEGKSRGSSSSSRCL

SEQ ID NO: 1510 - protein, 341 aa, Homo sapiens
MEFSGRKRRKLRLAGDQRNASYPHCLQFYLQPPSENISLTEFENLAIDRVKLLKSVENLGVSYVKGTEQYQSKLESELRKLKFSYREKLEDEYEPRRRDHISHFILRLAYCQSEELRRWFIQQEMDLLRFRFSILPKDKIQDFLKDSQLQFEAISDEEKTLREQEIVASSPSLSGLKLGFESIYKIPFADALDLFRGRKVYLEDGFAYVPLKDIVAIILNEFRAKLSKALALTARSLPAVQSDERLQPLLNHLSHSYTGQDYSTQGNVGKISLDQIDLLSTKSFPPCMRQLHKALRENHHLRHGGRMQYGLFLKGIGLTLEQALQFWKQEFIKGKMGSRQV

SEQ ID NO: 1511 - protein, 80 aa, Homo sapiens
MAATEPILAATGSPAAVHRRNWKEPVRAQPLSVTVWAPRCQRPHRLPLSLPVPTPRSLKPSLRPELRPPRPWSCLSGPHP

SEQ ID NO: 1512 - protein, 671 aa, Homo sapiens
MAVGLCKAMSQGLVTFRDVALDFSQEEWEWLKPSQKDLYRDVMLENYRNLVWLGLSISKPNMISLLEQGKEPWMVERKMSQGHCADWESWCEIEELSPKWFIDEDEISQEMVMERLASHGLECSSFREAWKYKGEFELHQGNAERHFMQVTAVKEISTGKRDNEFSNSGRSIPLKSVFLTQQKVPTIQQVHKFDIYDKLFPQNSVIIEYKRLHAEKESLIGNECEEFNQSTYLSKDIGIPPGEKPYESHDFSKLLSFHSLFTQHQTTHFGKLPHGYDECGDAFSCYSFFTQPQRIHSGEKPYACNDCGKAFSHDFFLSEHQRTHIGEKPYECKECNKAFRQSAHLAQHQRIHTGEKPFACNECGKAFSRYAFLVEHQRIHTGEKPYECKECNKAFRQSAHLNQHQRIHTGEKPYECNQCGKAFSRRIALTLHQRIHTGEKPFKCSECGKTFGYRSHLNQHQRIHTGEKPYECIKCGKFFRTDSQLNRHHRIHTGERPFECSKCGKAFSDALVLIHHKRSHAGEKPYECNKCGKAFSCGSYLNQHQRIHTGEKPYECSECGKAFHQILSLRLHQRIHAGEKPYKCNESQRVRRSELAVSRGLTTKPADTGPDSTLNAAKVAEPARAGTEAALRPALSVAESATSLGPLHQGRRFPEAPAAHPGGTGFTVCAS

SEQ ID NO: 1513 - protein, 501 aa, Homo sapiens
MTPGALLMLLGALGPPLAPGVRGSEAEGRLREKLFSGYDSSVRPAREVGDRVRVSVGLILAQLISLNEKDEEMSTKVYLDLEWTDYRLSWDPAEHDGIDSLRITAESVWLPDVVLLNNNDGNFDVALDISVVVSSDGSVRWQPPGIYRSSCSIQVTYFPFDWQNCTMVFSSYSYDSSEVSLQTGLGPDGQGHQEIHIHEGTFIENGQWENIHKPSRLIQPPGDPRGGREGQRQEVIFYLIIRRKPLFYLVNVIAPCILITLLAIFVFYLPPDAGEKMGLSIFALLTLTVFLLLLADKVPETSLSVPIIIKYLMFTMVLVTFSVILSVVVLNLHHRSPHTHQMPLWVRQIFIHKLPLYLRLKRPKPERDLMPEPPHCSSPGSGWGRGTDEYFIRKPPSDFLFPKPNRFQPELSAPDLRRFIDGPNRAVALLPELREVVSSISYIARQLQEQEDHDALKEDWQFVAMVVDRLFLWTFIIFTSVGTLVIFLDATYHLPPPDPFP

SEQ ID NO: 1514 - protein, 354 aa, Homo sapiens [sequence omitted]

SEQ ID NO: 1515 - protein, 1120 aa, Homo sapiens
MARVESPVPAARASLTGSCVLGQAMPLRGGAGPSPASHGPTHGPSDPRTCLPGRGAGGMRPHGRGALGCCGLCSFYTCHGAAGDEIMHQDIVPLCAADIQDQLKKRFAYLSGGRGQDGSPVITFPDYPAFSEIPDKEFQNVMTYLTSIPSLQDAGIGFILVIDRRRDKWTSVKASVLRIAASFPANLQLVLVLRPTGFFQRTLSDIAFKFNRDDFKMKVPVIMLSSVPDLHGYIDKSQLTEDLGGTLDYCHSRWLCQRTAIESFALMVKQTAQMLQSFGTELAETELPNDVQSTSSVLCAHTEKKDKAKEDLRLALKEGHSVLESLRELQAEGSEPSVNQDQLDNQATVQRLLAQLNETEAAFDEFWAKHQQKLEQCLQLRHFEQGFREVKAILDAASQKIATFTDIGNSLAHVEHLLRDLASFEEKSGVAVERARALSLDGEQLIGNKHYAVDSIRPKCQELRHLCDQFSAEIARRRGLLSKSLELHRRLETSMKWCDEGIYLLASQPVDKCQSQDGAEAALQEIEKFLETGAENKIQELNAIYKEYESILNQDLMEHVRKVFQKQASMEEVFHRRQASLKKLAARQTRPVQPVAPRPEALAKSPCPSPGIRRGSENSSSEGGALRRGPYRRAKSEVSESRQGRGSAGEEEESLAILRRHVMSELLDTERAYVEELLCVLEGYAAEMDNPLMAHLLSTGLHNKKDVLFGNMEEIYHFHNRIFLRELENYTDCPELVGRCFLERMEDFQIYEKYCQNKPRSESLWRQCSDCPFFQECQRKLDHKLSLDSYLLKPVQRITKYQLLLKEMLKYSRNCEGAEDLQEALSSILGILKAVNDSMHLIAITGYDGNLGDLGKLLMQGSFSVWTDHKRGHTKVKELARFKPMQRHLFLHEKAVLFCKKREENGEGYEKAPSYSYKQSLNMAAVGITENVKGDAKKFEIWYNAREEVYIVQAPTPEIKAAWVNEIRKVLTSQLQACREASQHRALEQSQSLPLPAPTSTSPSRGNSRNIKKLEERKTDPLSLEGYVSSAPLTKPPEKGKGWSKTSHSLEAPEDDGGWSSAEEQINSSDAEEDGGLGPKKLVPGKYTVVADHEKGGPDALRVRSGDVVELVQEGDEGLW

SEQ ID NO: 1516 - protein, 1960 aa, Homo sapiens
MAQQAADKYLYVDKNFINNPLAQADWAAKKLVWVPSDKSGFEPASLKEEVGEEAIVELVENGKKVKVNKDDIQKMNPPKFSKVEDMAELTCLNEASVLHNLKERYYSGLIYTYSGLFCVVINPYKNLPIYSEEIVEMYKGKKRHEMPPHIYAITDTAYRSMMQDREDQSILCTGESGAGKTENTKKVIQYLAYVASSHKSKKDQGELERQLLQANPILEAFGNAKTVKNDNSSRFGKFIRINFDVNGYIVGANIETYLLEKSRAIRQAKEERTFHIFYYLLSGAGEHLKTDLLLEPYNKYRFLSNGHVTIPGQQDKDMFQETMEAMRIMGIPEEEQMGLLRVISGVLQLGNIVFKKERNTDQASMPDNTAAQKVSHLLGINVTDFTRGILTPRIKVGRDYVQKAQTKEQADFAIEALAKATYERMFRWLVLRINKALDKTKRQGASFIGILDIAGFEIFDLNSFEQLCINYTNEKLQQLFNHTMFILEQEEYQREGIEWNFIDFGLDLQPCIDLIEKPAGPPGILALLDEECWFPKATDKSFVEKVMQEQGTHPKFQKPKQLKDKADFCIIHYAGKVDYKADEWLMKNMDPLNDNIATLLHQSSDKFVSELWKDVDRIIGLDQVAGMSETALPGAFKTRKGMFRTVGQLYKEQLAKLMATLRNTNPNFVRCIIPNHEKKAGKLDPHLVLDQLRCNGVLEGIRICRQGFPNRVVFQEFRQRYEILTPNSIPKGFMDGKQACVLMIKALELDSNLYRIGQSKVFFRAGVLAHLEEERDLKITDVIIGFQACCRGYLARKAFAKRQQQLTAMKVLQRNCAAYLKLRNWQWWRLFTKVKPLLQVSRQEEEMMAKEEELVKVREKQLAAENRLTEMETLQSQLMAEKLQLQEQLQAETELCAEAEELRARLTAKKQELEEICHDLEARVEEEEERCQHLQAEKKKMQQNIQELEEQLEEEESARQKLQLEKVTTEAKLKKLEEEQIILEDQNCKLAKEKKLLEDRIAEFTTNLTEEEEKSKSLAKLKNKHEAMITDLEERLRREEKQRQELEKTRRKLEGDSTDLSDQIAELQAQIAELKMQLAKKEEELQAALARVEEEAAQKNMALKKIRELESQISELQEDLESERASRNKAEKQKRDLGEELEALKTELEDTLDSTAAQQELRSKREQEVNILKKTLEEEAKTHEAQIQEMRQKHSQAVEELAEQLEQTKRVKANLEKAKQTLENERGELANEVKVLLQGKGDSEHKRKKVEAQLQELQVKFNEGERVRTELADKVTKLQVELDNVTGLLSQSDSKSSKLTKDFSALESQLQDTQELLQEENRQKLSLSTKLKQVEDEKNSFREQLEEEEEAKHNLEKQIATLHAQVADMKKKMEDSVGCLETAEEVKRKLQKDLEGLSQRHEEKVAAYDKLEKTKTRLQQELDDLLVDLDHQRQSACNLEKKQKKFDQLLAEEKTISAKYAEERDRAEAEAREKETKALSLARALEEAMEQKAELERLNKQFRTEMEDLMSSKDDVGKSVHELEKSKRALEQQVEEMKTQLEELEDELQATEDAKLRLEVNLQAMKAQFERDLQGRDEQSEEKKKQLVRQVREMEAELEDERKQRSMAVAARKKLEMDLKDLEAHIDSANKNRDEAIKQLRKLQAQMKDCMRELDDTRASREEILAQAKENEKKLKSMEAEMIQLQEELAAAERAKRQAQQERDELADEIANSSGKGALALEEKRRLEARIAQLEEELEEEQGNTELINDRLKKANLQIDQINTDLNLERSHAQKNENARQQLERQNKELKVKLQEMEGTVKSKYKASITALEAKIAQLEEQLDNETKERQAACKQVRRTEKKLKDVLLQVDDERRNAEQYKDQADKASTRLKQLKRQLEEAEEEAQRANASRRKLQRELEDATETADAMNREVSSLKNKLRRGDLPFVVPRRMARKGAGDGSDEEVDGKADGAEAKPAE

SEQ ID NO: 1517 - protein, 522 aa, Homo sapiens
MSLRVHTLPTLLGAVVRPGCRELLCLLMITVTVGPGASGVCPTACICATDIVSCTNKNLSKVPGNLFRLIKRLDLSYNRIGLLDSEWIPVSFAKLNTLILRHNNITSISTGSFSTTPNLKCLDLSSNKLKTVKNAVFQELKVLEVLLLYNNHISYLDPSAFGGLSQLQKLYLSGNFLTQFPMDLYVGRFKLAELMFLDVSYNRIPSMPMHHINLVPGKQLRGIYLHGNPFVCDCSLYSLLVFWYRRHFSSVMDFKNDYTCRLWSDSRHSRQVLLLQDSFMNCSDSIINGSFRALGFIHEAQVGERLMVHCDSKTGNANTDFIWVGPDNRLLEPDKEMENFYVFHNGSLVIESPRFEDAGVYSCIAMNKQRLLNETVDVTINVSNFTVSRSHAHEAFNTAFTTLAACVASIVLVLLYLYLTPCPCKCKTKRQKNMLHQSNAHSSILSPGPASDASADERKAGAGKRVVFLEPLKDTAAGQNGKVRLFPSEAVIAEGILKSTRGKSDSDSVNSVFSDTPFVAST

SEQ ID NO: 1518 - protein, 358 aa, Homo sapiens
MPEDVREKKENLLLNSERSTRLLTKTSHSQGGDQALSKSTGSPTEKLIEKRQGAKTVFNKFSNMNWPVDIHPLNKSLVKDNKWKKTEETQEKRRSFLQEFCKKYGGVSHHQSHLFHTVSRIYVEDKHKILYCEVPKAGCSNWKRILMVLNGLASSAYNISHNAVHYGKHLKKLDSFDLKGIYTRLNTYTKAVFVRDPMERLVSAFRDKFEHPNSYYHPVFGKAIIKKYRPNACEEALINGSGVKFKEFIHYLLDSHRPVGMDIHWEKVSKLCYPCLINYDFVGKFETLEEDANYFLQMIGAPKELKFPNFKDRHSSDERTNAQVVRQYLKDLTRTERQLIYDFYYLDYLMFNYTTPFL

SEQ ID NO: 1519 - protein, 645 aa, Homo sapiens
MPLKSPVPFLPGTSPSADGPDSFSCVFEAILESHRAKGTSYTSLASLEALASPGPTQSPFFTFELPPQPPAPRPDPPAPAPLAPLEPDSGTSSAADGPWTQRGEEEEAEARAKLAPGREPPSPCHSEDSLGLGAAPLGSEPPLSQLVSDSDSELDSTERLALGSTDTLSNGQKADLEAAQRLAKRLYRLDGFRKADVARHLGKNNDFSKLVAGEYLKFFVFTGMTLDQALRVFLKELALMGETQERERVLAHFSQRYFQCNPEALSSEDGAHTLTCALMLLNTDLHGHNIGKRMTCGDFIGNLEGLNDGGDFPRELLKALYSSIKNEKLQWAIDEEELRRSLSELADPNPKVIKRISGGSGSGSSPFLDLTPEPGAAVYKHGALVRKVHADPDCRKTPRGKRGWKSFHGILKGMILYLQKEEYKPGKALSETELKNAISIHHALATRASDYSKRPHVFYLRTADWRVFLFQAPSLEQMQSWITRINVVAAMFSAPPFPAAVSSQKKFSRPLLPSAATRLSQEEQVRTHEAKLKAMASELREHRAAQLGKKGRGKKAEEQRQKEAYLEFEKSRYSTYAALLRVKLKAGSEELDAVEAALAQAGSTEDGLPPSHSSPSLQPKPSSQPRAQRHSSEPRPGAGSGRRKP

SEQ ID NO: 1520 - protein, 523 aa, Homo sapiens
MSFPHFGHPYRGASQFLASASSSTTCCESTQRSVSDVASGSTPAPALCCAPYDSRLLGSARPELGAALGIYGAPYAAAAAAQSYPGYLPYSPEPPSLYGALNPQYEFKEAAGSFTSSLAQPGAYYPYERTLGQYQYERYGAVELSGAGRRKNATRETTSTLKAWLNEHRKNPYPTKGEKIMLAIITKMTLTQVSTWFANARRRLKKENKMTWAPKNKGGEERKAEGGEEDSLGCLTADTKEVTASQEARGLRLSDLEDLEEEEEEEEEAEDEEVVATAGDRLTEFRKGAQSLPGPCAAAREGRLERRECGLAAPRFSFNDPSGSEEADFLSAETGSPRLTMHYPCLEKPRIWSLAHTATASAVEGAPPARPRPRSPECRMIPGQPPASARRLSVPRDSACDESSCIPKAFGNPKFALQGLPLNCAPCPRRSEPVVQCQYPSGAEGSGPPAALGVSMQKTPTYRPARQLHTLCHSSLPRGDSLVPAVLLREFTRVGQAPGLLEKSKTVGQTHTTDLRGPSSRPR

SEQ ID NO: 1521 - protein, 439 aa, Homo sapiens
MVRTDGHTLSEKRNYQVTNSMFGASRKKFVEGVDSDYHDENMYYSQSSMFPHRSEKDMLASPSTSGQLSQFGASLYGQQSALGLPMRGMSNNTPQLNRSLSQGTQLPSHVTPTTGVPTMSLHTPPSPSRGILPMNPRNMMNHSQVGQGIGIPSRTNSMSSSGLGSPNRSSPSIICMPKQQPSRQPFTVNSMSGFGMNRNQAFGMNNSLSSNIFNGTDGSENVTGLDLSDFPALADRNRREGSGNPTPLINPLAGRAPYVGMVTKPANEQSQDFSIHNEDFPALPGSSYKDPTSSNDDSKSNLNTSGKTTSSTDGPKFPGDKSSTTQNNNQQKKGIQVLPDGRVTNIPQGMVTDQFGMIGLLTFIRAAETDPGMVHLALGSDLTTLGLNLNSPENLYPKFASPWASSPCRPQDIDFHVPSEYLTNIHIRDKLFFFFSWLQ

SEQ ID NO: 1522 - protein, 939 aa, Homo sapiens
MATSQYFDFAQGGGPQYSTQAPTLPLPTVGASYTGQPTPGMDPAVNPAFPPAAPAGYGGYQPHSGQDFAYGSRPQEPVPTATTMATYQDSYSYGQSAAARSYEDRPYFQSAALQSGRMTAADSGQPGTQEACGQPSPHGSHSHAQPPQQAPIVESGQPASTLSSGYTYPTATGVQPESSASIVTSYPPPSYNPTCTAYTAPSYPNYDASVYSAASPFYPPAQPPPPPGPPQQLPPPPAPAGSGSSPRADSKPPLPSKLPRPKAGPRQLQLHYCDICKISCAGPQTYREHLGGQKHRKKEAAQKTGVQPNGSPRGVQAQLHCDLCAVSCTGADAYAAHIRGSKHQKVFKLHAKLGKPIPTLEPALATESPPGAEAKPTSPTGPSVCASSRPALAKRPVASKALCEGPPEPQAAGCRPQWGKPAQPKLEGPGAPTQGGSKEAPAGCSDAQPVGPEYVEEVFSDEGRVLRFHCKLCECSFNDLNAKDLHVRGRRHRLQYRKKVNPDLPIATEPSSRARKVLEERMRKQRHLAEERLEQLRRWHAERRRLEEEPPQDVPPHAPPDWAQPLLMGRPESPASAPLQPGRRPASSDDRHVMCKHATIYPTEQELLAVQRAVSHAERALKLVSDTLAEEDRGRREEEGDKRSSVAPQTRVLKGVMRVGILAKGLLLRGDRNVRLALLCSEKPTHSLLRRIAQQLPRQLQMVTEDEYEVSSDPEANIVISSCEEPRMQVTISVTSPLMREDPSTDPGVEEPQADAGDVLSPKKCLESLAALRHARWFQARASGLQPCVIVIRVLRDLCRRVPTWGALPAWAMELLVEKAVSSAAGPLGPGDAVRRVLECVATGTLLTDGPGLQDPCERDQTDALEPMTLQEREDVTASAQHALRMLAFRQTHKVLGMDLLPPRHRLGARFRKRQRGPGEGEEGAGEKKRGRRGGEGLV

SEQ ID NO: 1523 - protein, 418 aa, Homo sapiens
MAGSLPPCVVDCGTGYTKLGYAGNTEPQFIIPSCIAIRESAKVVDQAQRRVLRGVDDLDFFIGDEAIDKPTYATKWPIRHGIIEDWDLMERFMEQVVFKYLRAEPEDHYFLMTEPPLNTPENREYLAEIMFESFNVPGLYIAVQAVLALAASWTSRQVGERTLTGIVIDSGDGVTHVIPVAEGYVIGSCIKHIPIAGRDITYFIQQLLREREVGIPPEQSLETAKAIKEKYCYICPDIVKEFAKYDVDPRKWIKQYTGINAINQKKFVIDVGYERFLGPEIFFHPEFANPDFMESISDVVDEVIQNCPIDVRRPLYKNVVLSGGSTMFRDFGRRLQRDLKRVVDARLRLSEELSGGRIKPKPVEVQVVTHHMQRYAVWFGGSMLASTPEFFQVCHTKKDYEEYGPSICRHNPVFGVMS

SEQ ID NO: 1524 - protein, 652 aa, Homo sapiens [sequence omitted]

SEQ ID NO: 1525 - protein, 597 aa, Homo sapiens
MFQDALGGRSRGSREESPAPSRAPASASLWRRLVVVEAKMAAQAAAAAQAAAAQAAQAEAADSWYLALLGFAEHFRTSSPPKIRLCVHCLQAVFPFKPPQRIEARTHLQLGSVLYHHTKNSEQARSHLEKAWLISQQIPQFEDVKFEAASLLSELYCQENSVDAAKPLLRKAIQISQQTPYWHCRLLFQLAQLHTLEKDLVSACDLLGVGAEYARVVGSEYTRALFLLSKGMLLLMERKLQEVHPLLTLCGQIVENWQGNPIQKESLRVFFLVLQVTHYLDAGQVKSVKPCLKQLQQCIQTISTLHDDEILPSNPADLFHWLPKEHMCVLVYLVTVMHSMQAGYLEKAQKYTDKALMQLEKLKMLDCSPILSSFQVILLEHIIMCRLVTGHKATALQEGLYCVSVNCMDNAEAQFTTALRLYSLLERINPDHSFPVSSHCLRAAAFYVRGLFSFFQGRYNEAKRFLRETLKMSNAEDLNRLTACSLVLLGHIFYVLGNHRESNNMVVPAMQLASKIPDMSVQLWSSALLRDLNKACGNAMDAHEAAQMHQNFSQQLLQDHIEACSLPEHNLITWTDGPPPVQFQAQNGPNTSLASLL

SEQ ID NO: 1526 - protein, 567 aa, Homo sapiens
MASHVDLLTELQLLEKVPTLERLRAAQKRRAQQLKKWAQYEQDLQHRKRKHERKRSTGGRRKKVSFEASVALLEASLRNDAEEVRYFLKNKVSPDLCNEDGLTALHQCCIDNFEEIVKLLLSHGANVNAKDNELWTPLHAAATCGHINLVKILVQYGADLLAVNSDGNMPYDLCEDEPTLDVIETCMAYQGITQEKINEMRVAPEQQMIADIHCMIAAGQDLDWIDAQGATLLHIAGANGYLRAAELLLDHGVRVDVKDWDGWEPLHAAAFWGQMQMAELLVSHGASLSARTSMDEMPIDLCEEEEFKVLLLELKHKHDVIMKSQLRHKSSLSRRTSSAGSRGKVVRRASLSDRTNLYRKEYEGEAILWQRSAAEDQRTSTYNGDIRETRTDQENKDPNPRLEKPVLLSEFPTKIPRGELDMPVENGLRAPVSAYQYALANGDVWKVHEVPDYSMAYGNPGVADATPPWSSYKEQSPQTLLELKRQRAAAKLLSHPFLSTHLGSSMARTGESSSEGKAPLIGGRTSPYSSNGTSVYYTVTSGDPPLLKFKAPIEEMEEKVHGCCRIS

SEQ ID NO: 1527 - protein, 247 aa, Homo sapiens
MADTTPNGPQGAGAVQFMMTNKLDTAMWLSRLFTVYCSALFVLPLLGLHEAASFYQRALLANALTSALRLHQRLPHFQLSRAFLAQALLEDSCHYLLYSLIFVNSYPVTMSIFPVLLFSLLHAATYTKKVLDARGSNSLPLLRSVLDKLSANQQNILKFIACNEIFLMPATVFMLFSGQGSLLQPFIYYRFLTLRYSSRRNPYCRTLFNELRIVVEHIIMKPACPLFVRRLCLQSIAFISRLAPTVP

SEQ ID NO: 1528 - protein, 999 aa, Homo sapiens
MGWGDGGSSAVGRHPGLLLAAPPWPAPPRPRKKGRVAMTSWGPGRPSRTREMEEKEILRRQIRLLQGLIDDYKTLHGNAPAPGTPAASGWQPPTYHSGRAFSARYPRPSRRGYSSHHGPSWRKKYSLVNRPPGPSDPPADHAVRPLHGARGGQPPVPQQHVLERQVQLSQGQNVVIKVKPPSKSGSASASGAQRGSLEEYEDTPWSDQRPREGEGEPPRGQLQPSRPTRARGTCSVEDPLLVCQKEPGKPRMVKSVGSVGDSPWEPRRTVSESVIAVKASFPSSALPPRTGVALGRKLGSHSVASCAPQLLGDRRVDAGHTDQPVPSGSVGGPARPASGPRQAREASLVVTCRTNKFRKNNYKWVAASSKSPRVARRALSPRVAAENVCKASAGMANKVEKPQLIADPEPKPRKPATSSKPGSAPSKYKWKASSPSASSSSSFRWQSEAGSKDHASQLSPVLSRSPSGDRPAVGHSGLKPLSGETPLSAYKVKSRTKIIRRRGSTSLPGDKKSGTSPAATAKSHLSLRRRQALRGKSSPVLKKTPNKGLVQVTKHRLCRLPPSRAHLPTKEASSLHAVRTAPTSKVIKTRYRIVKKTPASPLSAPPFPLSLPSWRARRLSLSRSLVLNRLRPVASGGGKAQPGSPWWRSKGYRCIGGVLYKVSANKLSKTSGQPSDAGSRPLLRTGRLDPAGSCSRSLASRAVQRSLAIIRQARQRREKRKEYCMYYNRFGRCNRGERCPYIHDPEKVAVCTRFVRGTCKKTDGTCPFSHHVSKEKMPVCSYFLKGICSNSNCPYSHVYVSRKAEVCSDFLKGYCPLGAKCKKKHTLLCPDFARRGACPRGAQCQLLHRTQKRHSRRAATSPAPGPSDATARSRVSASHGPRKPSASQRPTRQTPSSAALTAAAVAAPPHCPGGSASPSSSKASSSSSSSSSPPASLDHEAPSLQEAALAAACSNRLCKLPSFISLQSSPSPGAQPRVRAPRAPLTKDSGKPLHIKPRL

SEQ ID NO: 1529 - protein, 462 aa, Homo sapiens
MESTPSRGLNRVHLQCRNLQEFLGGLSPGVLDRLYGHPATCLAVFRELPSLAKNWVMRMLFLEQPLPQAAVALWVKKEFSKAQEESTGLLSGLRIWHTQLLPGGLQGLILNPIFRQNLRIALLGGGKAWSDDTSQLGPDKHARDVPSLDKYAEERWEVVLHFMVGSPSAAVSQDLAQLLSQAGLMKSTEPGEPPCITSAGFQFLLLDTPAQLWYFMLQYLQTAQSRGMDLVEILSFLFQLSFSTLGKDYSVEGMSDSLLNFLQHLREFGLVFQRKRKSRRYYPTRLAINLSSGVSGAGGTVHQPGFIVVETNYRLYAYTESELQIALIALFSEMLYRFPNMVVAQVTRESVQQAIASGITAQQIIHFLRTRAHPVMLKQTPVLPPTITDQIRLWELERDRLRFTEGVLYNQFLSQVDFELLLAHARELGVLVFENSAKRLMVVTPAGHSDVKRFWKRQKHSS

SEQ ID NO: 1530 - protein, 190 aa, Homo sapiens
MTASASSFSSSQGVQQPSIYSFSQITRSLFLSNGVAANDKLLLSSNRITAIVNASVEVVNVFFEGIQYIKVPVTDARDSRLYDFFDPIADLIHTIDMRQGRTLLHCMAGVSRSASLCLAYLMKYHSMSLLDAHTWTKSRRPIIRPNNGFWEQLINYEFKLFNNNTVRMINSPVGNIPDIYEKDLRTMISM

SEQ ID NO: 1531 - protein, 508 aa, Homo sapiens
MQRLLTPVKRILQLTRAVQETSLTPARLLPVAHQRFSTASAVPLAKTDTWPKDVGILALEVYFPAQYVDQTDLEKYNNVEAGKYTVGLGQTRMGFCSVQEDINSLCLTVVQRLMERIQLPWDSVGRLEVGTETIIDKSKAVKTVLMELFQDSGNTDIEGIDTTNACYGGTASLFNAANWMESSSWDGRYAMVVCGDIAVYPSGNARPTGGAGAVAMLIGPKAPLALERGLRGTHMENVYDFYKPNLASEYPIVDGKLSIQCYLRALDRCYTSYRKKIQNQWKQAGSDRPFTLDDLQYMIFHTPFCKMVQKSLARLMFNDFLSASSDTQTSLYKGLEAFGGLKLEDTYTNKDLDKALLKASQDMFDKKTKASLYLSTHNGNMYTSSLYGCLASLLSHHSAQELAGSRIGAFSYGSGLAASFFSFRVSQDAAPGSPLDKLVSSTSDLPKRLASRKCVSPEEFTEIMNQREQFYHKVNFSPPGDTNSLFPGTWYLERVDEQHRRKYARRPV

SEQ ID NO: 1532 - protein, 891 aa, Homo sapiens
MLPTEVPQSHPGPSALLLLQLLLPPTSAFFPNIWSLLAAPGSITHQDLTEEAALNVTLQLFLEQPPPGRPPLRLEDFLGRTLLADDLFAAYFGPGSSRRFRAALGEVSRANAAQDFLPTSRNDPDLHFDAERLGQGRARLVGALRETVVAARALDHTLARQRLGAALHALQDFYSHSNWVELGEQQPHPHLLWPRQELQNLAQVADPTCSDCEELSCPRNWLGFTLLTSGYFGTHPPKPPGKCSHGGHFDRSSSQPPRGGINKDSTSPGFSPHHMLHLQAAKLALLASIQAFSLLRSRLGDRDFSRLLDITPASSLSFVLDTTGSMGEEINAAKIQARHLVEQRRGSPMEPVHYVLVPFHDPGFGPVFTTSDPDSFWQQLNEIHALGGGDEPEMCLSALQLALLHTPPLSDIFVFTDASPKDAFLTNQVESLTQERRCRVTFLVTEDTSRVQGRARREILSPLRFEPYKAVALASGGEVIFTKDQHIRDVAAIVGESMAALVTLPLDPPVVVPGQPLVFSVDGLLQKITVRIHGDISSFWIKNPAGVSQGQEEGGGPLGHTRRFGQFWMVTMDDPPQTGTWEIQVTAEDTPGVRVQAQTSLDFLFHFGIPMEDGPHPGLYPLTQPVAGLQTQLLVEVTGLGSRANPGDPQPHFSHVILRGVPEGAELGQVPLEPVGPPERGLLAASLSPTLLSTPRPFSLELIGQDAAGRRLHRAAPQPSTVVPVLLELSGPSGFLAPGSKVPLSLRIASFSGPQDLDLRTFVNPSFSLTSNLSRAHLELNESAWGRLWLEVPDSAAPDSVVMVTVTAGGREANPVPPTHAFLRLLVSAPAPQDRHTTPTGSSDPILTTATPAFSPFTLVTQGRAGAGLAAGSPWWGTVGGVLLLLGLASW

SEQ ID NO: 1533 - protein, 1327 aa, Homo sapiens
MTVFSGLFVGGLPPELRAAALKLTLASVREREPFKGWIRDVRVNSSQVLPVDSGEVKLDDEPPNSGGGSPCEAGEEGEGGVCLNGGVCSVVDDQAVCDCSRTGFRGKDCSQEDNNVEGLAHLMMGDQGKEEYIATFKGSEYFCYDLSQNPIQSSSDEITLSFKTLQRNGLMLHTGKSADYVNLALKNGAVSLVINLGSGAFEALVEPVNGKFNDNAWHDVKVTRNLRQHSGIGHAMVTISVDGILTTTGYTQEDYTMLGSDDFFYVGGSPSTADLPGSPVSNNFMGCLKEVVYKNNDVRLELSRLAKQGDPKMKIHGVVAFKCENVATLDPITFETPESFISLPKWNAKKTGSISFDFRTTEPNGLILFSHGKPRHQKDAKHPQMIKVDFFAIEMLDGHLYLLLDMGSGTIKIKALLKKVNDGEWYHVDFQRDGRSGTISVNTLRTPYTAPGESEILDLDDELYLGGLPENKAGLVFPTEVWTALLNYGYVGCIRDLFIDGQSKDIRQMAEVQSTAGVKPSCSKETAKPCLSNPCKNNGMCRDGWNRYVCDCSGTGYLGRSCEREATVLSYDGSMFMKIQLPVVMHTEAEDVSLRFRSQRAYGILMATTSRDSADTLRLELDAGRVKLTVNLDCIRINCNSSKGPETLFAGYNLNDNEWHTVRVVRRGKSLKLTVHDQQAMTGQMAGDHTRLEFHNIETGIITERRYLSSVPSNFIGHLQSLTFNGMAYIDLCKNGDIDYCELNARFGFRNIIADPVTFKTKSSYVALATLQAYTSMHLFFQFKTTSLDGLILYNSGDGNDFIVVELVKGYLHYVFDLGNGANLIKGSSNKPLNDNQWHNVMISRDTSNLHTVKIDTKITTQITAGARNLDLKSDLYIGGVAKETYKSLPKLVHAKEGFQGCLASVDLNGRLPDLISDALFCNGQIERGCEGPSTTCQEDSCSNQGVCLQQWDGFSCDCSMTSFSGPLCNDPGTTYIFSKGGGQITYKWPPNDRPSTRADRLAIGFSTVQKEAVLVRVDSSSGLGDYLELHIHQGKIGVKFNVGTDDIAIEESNAIINDGKYHVVRFTRSGGNATLQVDSWPVIERYPAGRQLTIFNSQATIIIGGKEQGQPFQGQLSGLYYNGLKVLNMAAENDANIAIVGNVRLVGEVPSSMTTESTATAMQSEMSTSIMETTTTLATSTARRGKPPTKEPISQTTDDILVASAECPSDDEDIDPCEPSSGGLANPTRAGGREPYPGSAEVIRESSSTTGMVVGIVAAAALCILILLYAMYKYRNRDEGSYHVDESRNYISNSAQSNGAVVKEKQPSSAKSSNKNKKNKDKEYYV

SEQ ID NO: 1534 - protein, 54 aa, Homo sapiens
MPKRKPSEGAMSDKVKASLSYRGDQQDYFLNLPLQNQRPGLRRTLQIRDRSCLK

SEQ ID NO: 1535 - protein, 975 aa, Homo sapiens
MEVAEVESPLNPSCKIMTFRPSMEEFREFNKYLAYMESKGAHRAGLAKVIPPKEWKPRQCYDDIDNLLIPAPIQQMVTGQSGLFTQYNIQKKAMTVKEFRQLANSGKYCTPRYLDYEDLERKYWKNLTFVAPIYGADINGSIYDEGVDEWNIARLNTVLDVVEEECGISIEGVNTPYLYFGMWKTTFAWHTEDMDLYSINYLHFGEPKSWYAIPPEHGKRLERLAQGFFPSSSQGCDAFLRHKMTLISPSVLKKYGIPFDKITQEAGEFMITFPYGYHAGFNHGFNCAESTNFATVRWIDYGKVAKLCTCRKDMVKISMDIFVRKFQPDRYQLWKQGKDIYTIDHTKPTPASTPEVKAWLQRRRKVRKASRSFQCARSTSKRPKADEEEEVSDEVDGAEVPNPDSVTDDLKVSEKSEAAVKLRNTEASSEEESSASRMQVEQNLSDHIKLSGNSCLSTSVTEDIKTEDDKAYAYRSVPSISSEADDSIPLSTGYEKPEKSDPSELSWPKSPESCSSVAESNGVLTEGEESDVESHGNGLEPGEIPAVPSGERNSFKVPSIAEGENKTSKSWRHPLSRPPARSPMTLVKQQAPSDEELPEVLSIEEEVEETESWAKPLIHLWQTKSPNFAAEQEYNATVARMKPHCAICTLLMPYHKPDSSNEENDARWETKLDEVVTSEGKTKPLIPEMCFIYSEENIEYSPPNAFLEEDGTSLLISCAKCCVRVHASCYGIPSHEICDGWLCARCKRNAWTAECCLCNLRGGALKQTKNNKWAHVMCAVAVPEVRFTNVPERTQIDVGRIPLQRLKLKCIFCRHRVKRVSGACIQCSYGRCPASFHVTCAHAAGVLMEPDDWPYVVNITCFRHKVNPNVKSKACEKVISVGQTVITKHRNTRYYSCRVMAVTSQTFYEVMFDDGSFSRDTFPEDIVSRDCLKLGPPAEGEVVQVKWPDGKLYGAKYFGSNIAHMYQVELKMDPR

SEQ ID NO: 1536 - protein, 170 aa, Homo sapiens [sequence omitted]

SEQ ID NO: 1537 - protein, 939 aa, Homo sapiens
MAAQPPRGIRLSALCPKFLHTNSTSHTWPFSAVAELIDNAYDPDVNAKQIWIDKTVINDHICLTFTDNGNGMTSDKLHKMLSFGFSDKVTMNGHVPVGLYGNGFKSGSMRLGKDAIVFTKNGESMSVGLLSQTYLEVIKAEHVVVPIVAFNKHRQMINLAESKASLAAILEHSLFSTEQKLLAELDAIIGKKGTRIIIWNLRSYKNATEFDFEKDKYDIRIPEDLDEITGKKGYKKQERMDQIAPESDYSLRAYCSILYLKPRMQIILRGQKVKTQLVSKSLAYIERDVYRPKFLSKTVRITFGFNCRNKDHYGIMMYHRNRLIKAYEKVGCQLRANNMGVGVVGIIECNFLKPTHNKQDFDYTNEYRLTITALGEKLNDYWNEMKVKKNTEYPLNLPVEDIQKRPDQTWVQCDACLKWRKLPDGMDQLPEKWYCSNNPDPQFRNCEVPEEPEDEDLVHPTYEKTYKKTNKEKFRIRQPEMIPRINAELLFRPTALSTPSFSSPKESVPRRHLSEGTNSYATRLLNNHQVPPQSEPESNSLKRRLSTRSSILNAKNRRLSSQFENSVYKGDDDDEDVIILEENSTPKPAVDHDIDMKSEQSHVEQGGVQVEFVGDSEPCGQTGSTSTSSSRCDQGNTAATQTEVPSLVVKKKKTVEDEIDVRNDAVILPSCVEAEAKIHETQETTDKSADDAGCQLQELRNQLLLVTEEKENYKRQCHMFTDQIKVLQQRILEMNDKYVKKETCHQSTETDAVFLLESINGKSESPDHMVSQYQQALEEIERLKKQCSALQHVKAECSQCSNNESKSEMDEMAVQLDDVFRQLDKCSIERDQYKSEVELLEMEKSQIRSQCEELKTEVEQLKSTNQQTATDVSTSSNIEESVNHMDGESLKLRSLRVNVGQLLAMIVPDLDLQQVNYDVDVVDEILGQVVEQMSEISST

SEQ ID NO: 1538 - protein, 665 aa, Homo sapiens
MDRPAAAAAAGCEGGGGPNPGPAGGRRPPRAAGGATAGSRQPSVETLDSPTGSHVEWCKQLIAATISSQISGSVTSENVSRDYKALRDGNKLAQMEEAPLFPGESIKAIVKDVMYICPFMGAVSGTLTVTDFKLYFKNVERDPHFILDVPLGVISRVEKIGAQSHGDNSCGIEIVCKDMRNLRLAYKQEEQSKLGIFENLNKHAFPLSNGQALFAFSYKEKFPINGWKVYDPVSEYKRQGLPNESWKISKINSNYEFCDTYPAIIVVPTSVKDDDLSKVAAFRAKGRVPVLSWIHPESQATITRCSQPLVGPNDKRCKEDEKYLQTIMDANAQSHKLIIFDARQNSVADTNKTKGGGYESESAYPNAELVFLEIHNIHVMRESLRKLKEIVYPSIDEARWLSNVDGTHWLEYIRMLLAGAVRIADKIESGKTSVVVHCSDGWDRTAQLTSLAMLMLDSYYRTIKGFETLVEKEWISFGHRFALRVGHGNDNHADADRSPIFLQFVDCVWQMTRQFPSAFEFNELFLITILDHLYSCLFGTFLCNCEQQRFKEDVYTKTISLWSYINSQLDEFSNPFFVNYENHVLYPVASLSHLELWVNYYVRWNPRMRPQMPIHQNLKELLAVRAELQKRVEGLQREVATRAVSSSSERGSSPSHSATSVHTSV

SEQ ID NO: 1539 - protein, 335 aa, Homo sapiens
MEEPAPYTDSTGAAAGGGNCRFVESPSQDQRLQAQRLRNPDVRGSLQTPQNRPHGHQSPELPEGYEQRTTVQGQVYFLHTQTGVSTWHDPRIPRDLNSVNCDELGPLPPGWEVRSTVSGRIYFVDHNNRTTQFTDPRLHHIMNHQCQLKEPSQPLPLPSEGSLEDEELPAQRYERDLVQKLKVLRHELSLQQPQAGHCRIEVSREEIFEESYRQIMKMRPKDLKKRLMVKFRGEEGLDYGGVAREWLYLLCHEMLNPYYGLFQYSTDNIYMLQINPDSSINPDHLSYFHFVGRIMGLGCVPWTLHQRGLHSALLQAAAGEAHPALRSGICGPRAA

SEQ ID NO: 1540 - protein, 2067 aa, Homo sapiens
MVQMVCHLLECLLTTEDIPADCPKEIYEHYFVFAAIWAFGGAMVQDQLVDYRAEFSKWWLTEFKTVKFPSQGTIFDYYIDPETKKFEPWSKLVPQFEFDPEMPLQACLVHTSETIRVCYFMERLMARQRPVMLVGTAGTGKSVLVGAKLASLDPEAYLVKNVPFNYYTTSAMLQAVLEKPLEKKAGRNYGPPGNKKLIYFIDDMNMPEVDAYGTVQPHTIIRQHLDYGHWYDRSKLSLKEITNVQYVSCMNPTAGSFTINPRLQRHFSVFVLSFPGADALSSIYSIILTQHLKLGNFPASLQKSIPPLIDLALAFHQKIATTFLPTGIKFHYIFNLRDFANIFQGILFSSVECVKSTWDLIRLYLHESNRVYRDKMVEEKDFDLFDKIQTEVLKKTFDDIEDPVEQTQSPNLYCHFANGIGEPKYMPVQSWELLTQTLVEALENHNEVNTVMDLVLFEDAMRHVCHINRILESPRGNALLVGVGGSGKQSLTRLAAFISSMDVFQITLRKGYQIQDFKMDLASLCLKAGVKNLNTVFLMTDAQVADERFLVLINDLLASGEIPDLYSDDEVENIISNVRNEVKSQGLVDNRENCWKFFIDRIRRQLKVTLCFSPVGNKLRVRSRKFPAIVNCTAIHWFHEWPQQALESVSLRFLQNTEGIEPTVKQSISKFMAFVHTSVNQTSQSYLSNEQRYNYTTPKSFLEFIRLYQSLLHRHRKELKCKTERLENGLLKLHSTSAQVDDLKAKLAAQEVELKQKNEDADKLIQVVGVETDKVSREKAMADEEEQKVAVIMLEVKQKQKDCEEDLAKAEPALTAAQAALNTLNKTNLTELKSFGSPPLAVSNVSAAVMVLMAPRGRVPKDRSWKAAKVTMAKVDGFLDSLINFNKENIHENCLKAIRPYLQDPEFNPEFVATKSYAAAGLCSWVINIVRFYEVFCDVEPKRQALNKATADLTAAQEKLAAIKAKIAHLNENLAKLTARFEKATADKLKCQQEAEVTAVTISLANRLVGGLASENVRWADAVQNFKQQERTLCGDILLITAFISYLGFFTKKYRQSLLDRTWRPYLSQLKTPIPVTPALDPLRMLMDDADVAAWQNEGLPADRMSVENATILINCERWPLMVDPQLQGIKWIKNKYGEDLRVTQIGQKGYLQIIEQALEAGAVVLIENLEESIDPVLGPLLGREVIKKGRFIKIGDKECEYNPKFRLILHTKLANPHYQPELQAQATLINFTVTRDGLEDQLLAAVVSMERPDLEQLKSDLTKQQNGFKITLKTLEDSLLSRLSSASGNFLGETVLVENLEITKQTAAEVEKKVQEAKVTEVKINEAREHYRPAAARASLLYFIMNDLSKIHPMYQFSLKAFSIVFQKAVERAAPDESLRERVANLIDSITFSVYQYTIRGLFECDKLTYLAQLTFQILLMNREVNAVELDFLLRSPVQTGTASPVEFLSHQAWGAVKVLSSMEEFSNLDRDIEGSAKSWKKFVESECPEKEKLPQEWKNKTALQRLCMLRAMRPDRMTYALRDFVEEKLGSKYVVGRALDFATSFEESGPATPMFFILSPGVDPLKDVESQGRKLGYTFNNQNFHNVSLGQGQEVVAEAALDLAAKKGHWVILQNTLEMCSRETEFKSILFALCYFHAVVAERRKFGPQGWNRSYPFNTGDLTISVNVLYNFLEANAKVPYDDLRYLFGEIMYGGHITDDWDRRLCRTYLGEFIRPEMLEGELSLAPGFPLPGNMDYNGYHQYIDAELPPESPYLYGLHPNAEIGFLTQTSEKLFRTVLELQPRDSQARDGAGATREEKVKALLEEILERVTDEFNIPELMAKVEERTPYIVVAFQECGRMNILTREIQRSLRELELGLKGELTMTSHMENLQNALYFDMVPESWARRAYPSTAGLAAWFPDLLNRIKELEAWTGDFTMPSTVWLTGFFNPQSFLTAIMQSTARKNEWPLDQMALQCDMTKKNREEFRSPPREGAYIHGLFMEGACWDTQAGIITEAKLKDLTPPMPVMFIKAIPADKQDCRSVYSCPVYKTSQRGPTYVWTFNLKTKENPSKWVLAGVALLLQI

SEQ ID NO: 1541 - protein, 2143 aa, Homo sapiens
MVQMVCHLLECLLTTEDIPADCPKEIYEHYFVFAAIWAFGGAMVQDQLVDYRAEFSKWWLTEFKTVKFPSQGTIFDYYIDPETKKFEPWSKLVPQFEFDPEMPLQACLVHTSETIRVCYFMERLMARQRPVMLVGTAGTGKSVLVGAKLASLDPEAYLVKNVPFNYYTTSAMLQAVLEKPLEKKAGRNYGPPGNKKLIYFIDDMNMPEVDAYGTVQPHTIIRQHLDYGHWYDRSKLSLKEITNVQYVSCMNPTAGSFTINPRLQRHFSVFVLSFPGADALSSIYSIILTQHLKLGNFPASLQKSIPPLIDLALAFHQKIATTFLPTGIKFHYIFNLRDFANIFQGILFSSVECVKSTWDLIRLYLHESNRVYRDKMVEEKDFDLFDKIQTEVLKKTFDDIEDPVEQTQSPNLYCHFANGIGEPKYMPVQSWELLTQTLVEALENHNEVNTVMDLVLFEDAMRHVCHINRILESPRGNALLVGVGGSGKQSLTRLAAFISSMDVFQITLRKGYQIQDFKMDLASLCLKAGVKNLNTVFLMTDAQVADERFLVLINDLLASGEIPDLYSDDEVENIISNVRNEVKSQGLVDNRENCWKFFIDRIRRQLKVTLCFSPVGNKLRVRSRKFPAIVNCTAIHWFHEWPQQALESVSLRFLQNTEGIEPTVKQSISKFMAFVHTSVNQTSQSYLSNEQRYNYTTPKSFLEFIRLYQSLLHRHRKELKCKTERLENGLLKLHSTSAQVDDLKAKLAAQEVELKQKNEDADKLIQVVGVETDKVSREKAMADEEEQKVAVIMLEVKQKQKDCEEDLAKAEPALTAAQAALNTLNKTNLTELKSFGSPPLAVSNVSAAVMVLMAPRGRVPKDRSWKAAKVTMAKVDGFLDSLINFNKENIHENCLKAIRPYLQDPEFNPEFVATKSYAAAGLCSWVINIVRFYEVFCDVEPKRQALNKATADLTAAQEKLAAIKAKIAHLNENLAKLTARFEKATADKLKCQQEAEVTAVTISLANRLVGGLASENVRWADAVQNFKQQERTLCGDILLITAFISYLGFFTKKYRQSLLDRTWRPYLSQLKTPIPVTPALDPLRMLMDDADVAAWQNEGLPADRMSVENATILINCERWPLMVDPQLQGIKWIKNKYGEDLRVTQIGQKGYLQIIEQALEAGAVVLIENLEESIDPVLGPLLGREVIKKGRFIKIGDKECEYNPKFRLILHTKLANPHYQPELQAQATLINFTVTRDGLEDQLLAAVVSMERPDLEQLKSDLTKQQNGFKITLKTLEDSLLSRLSSASGNFLGETVLVENLEITKQTAAEVEKKVQEAKVTEVKINEAREHYRPAAARASLLYFIMNDLSKIHPMYQFSLKAFSIVFQKAVERAAPDESLRERVANLIDSITFSVYQYTIRGLFECDKLTYLAQLTFQILLMNREVNAVELDFLLRSPVQTGTASPVEFLSHQAWGAVKVLSSMEEFSNLDRDIEGSAKSWKKFVESECPEKEKLPQEWKNKTALQRLCMLRAMRPDRMTYALRDFVEEKLGSKYVVGRALDFATSFEESGPATPMFFILSPGVDPLKDVESQGRKLGYTFNNQNFHNVSLGQGQEVVAEAALDLAAKKGHWVILQNIHLVAKWLSTLEKKLEEHSENSHPEFRVFMSAEPAPSPEGHIIPQGILENSIKITNEPPTGMHANLHKALDNFTQDTLEMCSRETEFKSILFALCYFHAVVAERRKFGPQGWNRSYPFNTGDLTISVNVLYNFLEANAKVPYDDLRYLFGEIMYGGHITDDWDRRLCRTYLGEFIRPEMLEGELSLAPGFPLPGNMDYNGYHQYIDAELPPESPYLYGLHPNAEIGFLTQTSEKLFRTVLELQPRDSQARDGAGATREEKVKALLEEILERVTDEFNIPELMAKVEERTPYIVVAFQECGRMNILTREIQRSLRELELGLKGELTMTSHMENLQNALYFDMVPESWARRAYPSTAGLAAWFPDLLNRIKELEAWTGDFTMPSTVWLTGFFNPQSFLTAIMQSTARKNEWPLDQMALQCDMTKKNREEFRSPPREGAYIHGLFMEGACWDTQAGIITEAKLKDLTPPMPVMFIKAIPADKQDCRSVYSCPVYKTSQRGPTYVWTFNLKTKENPSKWVLAGVALLLQI

SEQ ID NO: 1542 - protein, 963 aa, Homo sapiens
MADLAECNIKVMCRFRPLNESEVNRGDKYIAKFQGEDTVVIASKPYAFDRVFQSSTSQEQVYNDCAKKIVKDVLEGYNGTIFAYGQTSSGKTHTMEGKLHDPEGMGIIPRIVQDIFNYIYSMDENLEFHIKVSYFEIYLDKIRDLLDVSKTNLSVHEDKNRVPYVKGCTERFVCSPDEVMDTIDEGKSNRHVAVTNMNEHSSRSHSIFLINVKQENTQTEQKLSGKLYLVDLAGSEKVSKTGAEGAVLDEAKNINKSLSALGNVISALAEGSTYVPYRDSKMTRILQDSLGGNCRTTIVICCSPSSYNESETKSTLLFGQRAKTIKNTVCVNVELTAEQWKKKYEKEKEKNKILRNTIQWLENELNRWRNGETVPIDEQFDKEKANLEAFTVDKDITLTNDKPATAIGVIGNFTDAERRKCEEEIAKLYKQLDDKDEEINQQSQLVEKLKTQMLDQEELLASTRRDQDNMQAELNRLQAENDASKEEVKEVLQALEELAVNYDQKSQEVEDKTKEYELLSDELNQKSATLASIDAELQKLKEMTNHQKKRAAEMMASLLKDLAEIGIAVGNNDVKQPEGTGMIDEEFTVARLYISKMKSEVKTMVKRCKQLESTQTESNKKMEENEKELAACQLRISQHEAKIKSLTEYLQNVEQKKRQLEESVDALSEELVQLRAQEKVHEMEKEHLNKVQTANEVKQAVEQQIQSHRETHQKQISSLRDEVEAKAKLITDLQDQNQKMMLEQERLRVEHEKLKATDQEKSRKLHELTVMQDRREQARQDLKGLEETVAKELQTLHNLRKLFVQDLATRVKKSAEIDSDDTGGSAAQKQKISFLENNLEQLTKVHKQLVRDNADLRCELPKLEKRLRATAERVKALESALKEAKENASRDRKRYQQEVDRIKEAVRSKNMARRGHSAQIAKPIRPGQHPAASPTHPSAIRGGGAFVQNSQPVAVRGGGGKQV

SEQ ID NO: 1543 - protein, 584 aa, Homo sapiens
MASVQASRRQWCYLCDLPKMPWAMVWDFSEAVCRGCVNFEGADRIELLIDAARQLKRSHVLPEGRSPGPPALKHPATKDLAAAAAQGPQLPPPQAQPQPSGTGGGVSGQDRYDRATSSGRLPLPSPALEYTLGSRLANGLGREEAVAEGARRALLGSMPGLMPPGLLAAAVSGLGSRGLTLAPGLSPARPLFGSDFEKEKQQRNADCLAELNEAMRGRAEEWHGRPKAVREQLLALSACAPFNVRFKKDHGLVGRVFAFDATARPPGYEFELKLFTEYPCGSGNVYAGVLAVARQMFHDALREPGKALASSGFKYLEYERRHGSGEWRQLGELLTDGVRSFREPAPAEALPQQYPEPAPAALCGPPPRAPSRNLAPTPRRRKASPEPEGEAAGKMTTEEQQQRHWVAPGGPYSAETPGVPSPIAALKNVAEALGHSPKDPGGGGGPVRAGGASPAASSTAQPPTQHRLVARNGEAEVSPTAGAEAVSGGGSGTGATPGAPLCCTLCRERLEDTHFVQCPSVPGHKFCFPCSREFIKAQGPAGEVYCPSGDKCPLVGSSVPWAFMQGEIATILAGDIKVKKERDP

SEQ ID NO: 1544 - protein, 582 aa, Homo sapiens
MPPGVVFKAPGYLEISSMRRILEAAEFIKFTVIRPLPGLELSNGEYSTVGKRKIDQEGRVFQEKWERAYFFVEVQNIPTCLICKQSMSVSKEYNLRRHYQTNHSKHYDQYMERMRDEKLHELKKGLRKYLLGSSDTECPEQKQVFANPSPTQKSPVQPVEDLAGNLWEKLREKIRSFVAYSIAIDEITDINNTTQLAIFIRGVDENFDVSEELLDTVPMTGTKSGNEIFSRVEKSLKKFCIDWSKLVSVASTGTPAMVDANNGLVTKLKSRVATFCKGAELKSICCIIHPESLCAQKLKMDHVMDVVVKSVNWICSRGLNHSEFTTLLYELDSQYGSLLYYTEIKWLSRGLVLKRFFESLEEIDSFMSSRGKPLPQLSSIDWIRDLAFLVDMTMHLNALNISLQGHSQIVTQMYDLIRAFLAKLCLWETHLTRNNLAHFPTLKLVSRNESDGLNYIPKIAELKTEFQKRLSDFKLYESELTLFSSPFSTKIDSVHEELQMEVIDLQCNTVLKTKYDKVGIPEFYKYLWGSYPKYKHHCAKILSMFGSTYICEQLFSIMKLSKTKYCSQLKDSQWDSVLHIAT

SEQ ID NO: 1545 - protein, 361 aa, Homo sapiens
MAGGRHRRVVGTLHLLLLVAALPWASRGVSPSASAWPEEKNYHQPAILNSSALRQIAEGTSISEMWQNDLQPLLIERYPGSPGSYAARQHIMQRIQRLQADWVLEIDTFLSQTPYGYRSFSNIISTLNPTAKRHLVLACHYDSKYFSHWNNRVFVGATDSAVPCAMMLELARALDKKLLSLKTVSDSKPDLSLQLIFFDGEEAFLHWSPQDSLYGSRHLAAKMASTPHPPGARGTSQLHGMDLLVLLDLIGAPNPTFPNFFPNSARWFERLQAIEHELHELGLLKDHSLEGRYFQNYSYGGVIQDDHIPFLRRGVPVLHLIPSPFPEVWHTMDDNEENLDESTIDNLNKILQVFVLEYLHL

SEQ ID NO: 1546 - protein, 312 aa, Homo sapiens
MAGGRHRRVVGTLHLLLLVAALPWASRGVSPSASAWPEEKHIMQRIQRLQADWVLEIDTFLSQTPYGYRSFSNIISTLNPTAKRHLVLACHYDSKYFSHWNNRVFVGATDSAVPCAMMLELARALDKKLLSLKTVSDSKPDLSLQLIFFDGEEAFLHWSPQDSLYGSRHLAAKMASTPHPPGARGTSQLHGMDLLVLLDLIGAPNPTFPNFFPNSARWFERLQAIEHELHELGLLKDHSLEGRYFQNYSYGGVIQDDHIPFLRRGVPVLHLIPSPFPEVWHTMDDNEENLDESTIDNLNKILQVFVLEYLHL

SEQ ID NO: 1547 - protein, 171 aa, Homo sapiens
MSSKRTKTKTKKRPQRATSNVFAMFDQSQIQEFKEAFNMIDQNRDGFIDKEDLHDMLASLGKNPTDEYLDAMMNEAPGPINFTMFLTMFGEKLNGTDPEDVIRNAFACFDEEATGTIQEDYLRELLTTMGDRFTDEEVDELYREAPIDKKGNFNYIEFTRILKHGAKDKDD

SEQ ID NO: 1548 - protein, 1720 aa, Homo sapiens
MAAAPSALLLLPPFPVLSTYRLQSRSRPSAPETDDSRVGGIMRGEKNYYFRGAAGDHGSCPTTTSPLASALLMPSEAVSSSWSESGGGLSGGDEEDTRLLQLLRTARDPSEAFQALQAALPRRGGRLGFPRRKEALYRALGRVLVEGGSDEKRLCLQLLSDVLRGQGEAGQLEEAFSLALLPQLVVSLREENPALRKDALQILHICLKRSPGEVLRTLIQQGLESTDARLRASTALLLPILLTTEDLLLGLDLTEVIISLARKLGDQETEEESETAFSALQQIGERLGQDRFQSYISRLPSALRRHYNRRLESQFGSQVPYYLELEASGFPEDPLPCAVTLSNSNLKFGIIPQELHSRLLDQEDYKNRTQAVEELKQVLGKFNPSSTPHSSLVGFISLLYNLLDDSNFKVVHGTLEVLHLLVIRLGEQVQQFLGPVIAASVKVLADNKLVIKQEYMKIFLKLMKEVGPQQVLCLLLEHLKHKHSRVREEVVNICICSLLTYPSEDFDLPKLSFDLAPALVDSKRRVRQAALEAFAVLASSMGSGKTSILFKAVDTVELQDNGDGVMNAVQARLARKTLPRLTEQGFVEYAVLMPSSAGGRSNHLAHGADTDWLLAGNRTQSAHCHCGDHVRDSMHIYGSYSPTICTRRVLSAGKGKNKLPWENEQPGIMGENQTSTSKDIEQFSTYDFIPSAKLKLSQGMPVNDDLCFSRKRVSRNLFQNSRDFNPDCLPLCAAGTTGTHQTNLSGKCAQLGFSQICGKTGSVGSDLQFLGTTSSHQEKVYASLNFGSKTQQTFGSQTECTSSNGQNPSPGAYILPSYPVSSPRTSPKHTSPLIISPKKSQDNSVNFSNSWPLKSFEGLSKPSPQKKLVSQKSSDPTGRNHGENSQEKPPVQLTPALVRSPSSRRGLNGTKPVPPIPRGISLLPDKADLSTVGHKKKEPDDIWKCEKDSLPIDLSELNFKDKDLDQEEMHSSLRSLRNSAAKKRAKLSGSTSDLESPDSAMKLDLTMDSPSLSSSPNINSYSESGVYSQESLTSSLSTTPQGKRIMSDIFPTFGSKPCPTRLSSAKKKISHIAEQSPSAGSSSNPQQISSFDFTTTKALSEDSVVVVGKGVFGSLSSAPATCSQSVISSVENGDTFSIKQSIEPPSGIYGRSVQQNISSYLDVENEKDAKVSISKSTYNKMRQKKKEKKELFHNKDCEKKEKNSWERMRHTGTEKMASESETPTGAISQYKERMPSVTHSPEIMDLSELRPFSKPEIALTEALRLLADEDWEKKIEGLNFIRCLAAFHSEILNTKLHETNFAVVQEVKNLRSGVSRAAVVCLSDLFTYLKKSMDQELDTTVKVLLHKAGESNTFIREDVDKALRAMVNNVTPARAVVSLINGGQRYYGRKMLFFMMCHPNFEKMLEKYVPSKDLPYIKDSVRNLQQKGLGEIPLDTPSAKGRRSHTGSVGNTRSSSVSRDAFNSAERAVTEVREVTRKSVPRNSLESAEYLKLITGLLNAKDFRDRINGIKQLLSDTENNQDLVVGNIVKIFDAFKSRLHDSNSKVNLVALETMHKMIPLLRDHLSPIINMLIPAIVDNNLNSKNPGIYAAATNVVQALSQHVDNYLLLQPFCTKAQFLNGKAKQDMTEKLADIVTELYQRKPHATEQKVLVVLWHLLGNMTNSGSLPGAGGNIRTATAKLSKALFAQMGQNLLNQAASQPPHIKKSLEELLDMTILNEL

SEQ ID NO: 1549 - protein, 340 aa, Homo sapiens
MVFFTCNACGESVKKIQVEKHVSVCRNCECLSCIDCGKDFWGDDYKNHVKCISEDQKYGGKGYEGKTHKGDIKQQAWIQKISELIKRPNVSPKVRELLEQISAFDNVPRKKAKFQNWMKNSLKVHNESILDQVWNIFSEASNSEPVNKEQDQRPLHPVANPHAEISTKVPASKVKDAVEQQGEVKKNKRERKEERQKKRKREKKELKLENHQENSRNQKPKKRKKGQEADLEAGGEEVPEANGSAGKRSKKKKQRKDSASEEEARVGAGKRKRRHSEVETDSKKKKMKLPEHPEGGEPEDDEAPAKDPWQMLLIKCSIYFPLTARWKPQNPEEHRKITAS

SEQ ID NO: 1550 - protein, 186 aa, Homo sapiens
MASPSKAVIVPGNGGGDVTTHGWYGWVKKELEKIPGFQCLAKNMPDPITARESIWLPFMETELHCDEKTIIIGHSSGAIAAMRYAETHRVYAIVLVSAYTSDLGDENERASGYFTRPWQWEKIKANCPYIVQFGSTDDPFLPWKEQQEVADRLETKLHKFTDCGHFQNTEFHELITVVKSLLKVPA

SEQ ID NO: 1551 - protein, 725 aa, Homo sapiens
MAMAMSDSGASRLRRQLESGGFEARLYVKQLSQQSDGDRDLQEHRQRIQALAEETAQNLKRNVYQNYRQFIETAREISYLESEMYQLSHLLTEQKSSLESIPLTLLPAAAAAGAAAASGGEEGVGGAGGRDHLRGQAGFFSTPGGASRDGSGPGEEGKQRTLTTLLEKVEGCRHLLETPGQYLVYNGDLVEYDADHMAQLQRVHGFLMNDCLLVATWLPQRRGMYRYNALYSLDGLAVVNVKDNPPMKDMFKLLMFPENRIFQAENAKIKREWLEVLEDTKRALSEKRRREQEEAAAPRGPPQVTSKATNPFEDDEEEEPAVPEVEEEKVDLSMEWIQELPEDLDVCIAQRDFEGAVDLLDKLNHYLEDKPSPPPVKELRAKVEERVRQLTEVLVFELSPDRSLRGGPKATRRAVSQLIRLGQCTKACELFLRNRAAAVHTAIRQLRIEGATLLYIHKLCHVFFTSLLETAREFEIDFAGTDSGCYSAFVVWARSAMGMFVDAFSKQVFDSKESLSTAAECVKVAKEHCQQLGDIGLDLTFIIHALLVKDIQGALHSYKEIIIEATKHRNSEEMWRRMNLMTPEALGKLKEEMKSCGVSNFEQYTGDDCWVNLSYTVVAFTKQTMGFLEEALKLYFPELHMVLLESLVEIILVAVQHVDYSLRCEQDPEKKAFIRQNASFLYETVLPVVEKRFEEGVGKPAKQLQDLRNASRLIRVNPESTTSVV

SEQ ID NO: 1552 - protein, 353 aa, Homo sapiens
MEDGVLKEGFLVKRGHIVHNWKARWFILRQNTLVYYKLEGGRRVTPPKGRILLDGCTITCPCLEYENRPLLIKLKTQTSTEYFLEACSREERDAWAFEITGAIHAGQPGKVQQLHSLRNSFKLPPHISLHRIVDKMHDSNTGIRSSPNMEQGSTYKKTFLGSSLVDWLISNSFTASRLEAVTLASMLMEENFLRPVGVRSMGAIRSGDLAEQFLDDSTALYTFAESYKKKISPKEEISLSTVELSGTVVKQGYLAKQGHKRKNWKVRRFVLRKDPAFLHYYDPSKEENRPVGGFSLRGSLVSALEDNGVPTGVKGNVQGNLFKVITKDDTHYYIQASSKAERAEWIEAIKKLT

SEQ ID NO: 1553 - protein, 1008 aa, Homo sapiens
MGRNSKHTSQSRAEEVDYGEENEDGTQVSPGAHYCSPTGAGCPRPCADTPGPQPQPMDLRVGQRPPVEPPPEPTLLALQRPQRLHHHLFLAGLQQQRSVEPMRLSMDTPMPELQVGPQEQELRQLLHKDKSKRSAVASSVVKQKLAEVILKKQQAALERTVHPNSPGIPYRTLEPLETEGATRSMLSSFLPPVPSLPSDPPEHFPLRKTVSEPNLKLRYKPKKSLERRKNPLLRKESAPPSLRRRPAETLGDSSPSSSSTPASGCSSPNDSEHGPNPILGSEALLGQRLRLQETSVAPFALPTVSLLPAITLGLPAPARADSDRRTHPTLGPRGPILGSPHTPLFLPHGLEPEAGGTLPSRLQPILLLDPSGSHAPLLTVPGLGPLPFHFAQSLMTTERLSGSGLHWPLSRTRSEPLPPSATAPPPPGPMQPRLEQLKTHVQVIKRSAKPSEKPRLRQIPSAEDLETDGGGPGQVVDDGLEHRELGHGQPEARGPAPLQQHPQVLLWEQQRLAGRLPRGSTGDTVLLPLAQGGHRPLSRAQSSPAAPASLSAPEPASQARVLSSSETPARTLPFTTGLIYDSVMLKHQCSCGDNSRHPEHAGRIQSIWSRLQERGLRSQCECLRGRKASLEELQSVHSERHVLLYGTNPLSRLKLDNGKLAGLLAQRMFVMLPCGGVGVDTDTIWNELHSSNAARWAAGSVTDLAFKVASRELKNGFAVVRPPGHHADHSTAMGFCFFNSVAIACRQLQQQSKASKILIVDWDVHHGNGTQQTFYQDPSVLYISLHRHDDGNFFPGSGAVDEVGAGSGEGFNVNVAWAGGLDPPMGDPEYLAAFRIVVMPIAREFSPDLVLVSAGFDAAEGHPAPLGGYHVSAKCFGYMTQQLMNLAGGAVVLALEGGHDLTAICDASEACVAALLGNRVDPLSEEGWKQKPNLNAIRSLEAVIRVHSKYWGCMQRLASCPDSWVPRVPGADKEEVEAVTALASLSVGILAEDRPSEQLVEEEEPMNL

SEQ ID NO: 1554 - protein, 197 aa, Homo sapiens
MAALGEPVRLERDICRAIELLEKLQRSGEVPPQKLQALQRVLQSEFCNAVREVYEHVYETVDISSSPEVRANATAKATVAAFAASEGHSHPRVVELPKTEEGLGFNIMGGKEQNSPIYISRIIPGGIADRHGGLKRGDQLLSVNGVSVEGEHHEKAVELLKAAQGKVKLVVRYTPKVLEEMESRFEKMRSAKRRQQT

SEQ ID NO: 1555 - protein, 271 aa, Homo sapiens
MAETSLLEAGASAASTAAALENLQVEASCSVCLEYLKEPVIIECGHNFCKACITRWWEDLERDFPCPVCRKTSRYRSLRPNRQLGSMVEIAKQLQAVKRKIRDESLCPQHHEALSLFCYEDQEAVCLICAISHTHRAHTVVPLDDATQEYKEKLQKCLEPLEQKLQEITRCKSSEEKKPGELKRLVESRRQQILREFEELHRRLDEEQQVLLSRLEEEEQDILQRLRENAAHLGDKRRDLAHLAAEVEGKCLQSGFEMLKVRPLPLHSPSG

SEQ ID NO: 1556 - protein, 275 aa, Homo sapiens
MFTLRGLGGPGAIAWISQAFDDDSALLKHELAYCLGQMQDARAIPMLVDVLQDTRQEPMVRHEAGEALGAIGDPEVLEILKQYSSDPVIEVAETCQLAVRRLEWLQQHGGEPAAGPYLSVDPAPPAEERDVGRLREALLDESRPLFERYRAMFALRNAGGEEAALALAEGLHCGSALFRHEVGYVLGQLQHEAAVPQLAAALARCTENPMVRHECAEALGAIARPACLAALQAHADDPERVVRESCEVALDMYEHETGRAFQYADGLEQLRGAPS

SEQ ID NO: 1557 - protein, 186 aa, Homo sapiens
MTDGQLRSKRDEFWDTAPAFEGRKEIWDALKAAAYAAEANDHELAQAILDGASITLPHGTLCECYDELGNRYQLPIYCLSPPVNLLLEHTEEESLEPPEPPPSVRREFPLKVRLSTGKDVRLSASLPDTVGQLKRQLHAQEGIEPSWQRWFFSGKLLTDRTRLQETKIQKDFVIQVIINQPPPPQD

SEQ ID NO: 1558 - protein, 1077 aa, Homo sapiens
MAPRKRSHHGLGFLCCFGGSDIPEINLRDNHPLQFMEFSSPIPNAEELNIRFAELVDELDLTDKNREAMFALPPEKKWQIYCSKKKEQEDPNKLATSWPDYYIDRINSMAAMQSLYAFDEEETEMRNQVVEDLKTALRTQPMRFVTRFIELEGLTCLLNFLRSMDHATCESRIHTSLIGCIKALMNNSQGRAHVLAQPEAISTIAQSLRTENSKTKVAVLEILGAVCLVPGGHKKVLQAMLHYQVYAAERTRFQTLLNELDRSLGRYRDEVNLKTAIMSFINAVLNAGAGEDNLEFRLHLRYEFLMLGIQPVIDKLRQHENAILDKHLDFFEMVRNEDDLELARRFDMVHIDTKSASQMFELIHKKLKYTEAYPCLLSVLHHCLQMPYKRNGGYFQQWQLLDRILQQIVLQDERGVDPDLAPLENFNVKNIVNMLINENEVKQWRDQAEKFRKEHMELVSRLERKERECETKTLEKEEMMRPLNKMKDKLARESQELRQARGQVAELVAQLSELSTGPVSSPPPPGGPLTLSSSMTTNDLPPPPPPLPFACCPPPPPPPLPPGGPPTPPGAPPCLGMGLPLPQDPYPSSDVPLRKKRVPQPSHPLKSFNWVKLNEERVPGTVWNEIDDMQVFRILDLEDFEKMFSAYQRHQELITNPSQQKELGSTEDIYLASRKVKELSVIDGRRAQNCIILLSKLKLSNEEIRQAILKMDEQEDLAKDMLEQLLKFIPEKSDIDLLEEHKHEIERMARADRFLYEMSRIDHYQQRLQALFFKKKFQERLAEAKPKVEAILLASRELVRSKRLRQMLEVILAIGNFMNKGQRGGAYGFRVASLNKIADTKSSIDRNISLLHYLIMILEKHFPDILNMPSELQHLPEAAKVNLAELEKEVGNLRRGLRAVEVELEYQRRQVREPSDKFVPVMSDFITVSSFSFSELEDQLNEARDKFAKALMHFGEHDSKMQPDEFFGIFDTFLQAFSEARQDLEAMRRRKEEEERRARMEAMLKEQRERERWQRQRKVLAAGSSLEEGGEFDDLVSALRSGEVFDKDLCKLKRSRKRSGSQALEVTRERAINRLNY

SEQ ID NO: 1559 - protein, 259 aa, Homo sapiens
MTQGEKERLRVLLTLSLGLGPSAHTDGVGGLHSSVPIALPFPTRMLAGQLEARDPKEGTHPEDPCPGAGAVMEKTAVAAEVLTEDCNTGEMPPLQQQIIRLHQELGRQKSLWADVHGKLRSHIDALREQNMELREKLRALQLQRWKARKKSAASPHAGQESHTLALEPAFGKISPLSADEETIPKYAGHKNQSATLLGQRSSSNNSAPPKPMSLKIERISSWKTPPQENRDKNLSRRRQDRRATPTGRPTPCAERRGGV

SEQ ID NO: 1560 - protein, 414 aa, Homo sapiens
MNPTLGLAIFLAVLLTVKGLLKPSFSPRNYKALSEVQGWKQRMAAKELARQNMDLGFKLLKKLAFYNPGRNIFLSPLSISTAFSMLCLGAQDSTLDEIKQGFNFRKMPEKDLHEGFHYIIHELTQKTQDLKLSIGNTLFIDQRLQPQRKFLEDAKNFYSAETILTNFQNLEMAQKQINDFISQKTHGKINNLIENIDPGTVMLLANYIFFRARWKHEFDPNVTKEEDFFLEKNSSVKVPMMFRSGIYQVGYDDKLSCTILEIPYQKNITAIFILPDEGKLKHLEKGLQVDTFSRWKTLLSRRVVDVSVPRLHMTGTFDLKKTLSYIGVSKIFEEHGDLTKIAPHRSLKVGEAVNKAELKMDERGTEGAAGTGAQTLPMETPLVVKIDKPYLLLIYSEKIPSVLFLGKIVNPIGK

SEQ ID NO: 1561 - protein, 1792 aa, Homo sapiens
MQCCLEYVQQFLTRLINLYIIQNNSFSQSLATEHQGDLGREQGETSKWDRNSQGDVKEKNISKQKTSKEYLSAFLAACQLFLECSSFPVYIAEGNHTSELRSEKLETDCEHVQPPQWLQTLMNACSQASDFSVQSVAISLVMDLVGLTQSVAMVTGENINSVEPAQPLSPNQGRVAVVIRPPLTQGNLRYIAEKTEFFKHVALTLWDQLGDGTPQHHQKSVELFYQLHNLVPSSSICEDVISQQLTHKDKKIRMEAHAKFAVLWHLTRDLHINKSSSFVRSFDRSLFIMLDSLNSLDGSTSSVGQAWLNQVLQRHDIARVLEPLLLLLLHPKTQRVSVQRVQAERYWNKSPCYPGEESDKHFMQNFACSNVSQVQLITSKGNGEKPLTMDEIENFSLTVNPLSDRLSLLSTSSETIPMVVSDFDLPDQQIEILQSSDSGCSQSSAGDNLSYEVDPETVNAQEDSQMPKESSPDDDVQQVVFDLICKVVSGLEVESASVTSQLEIEAMPPKCSDIDPDEETIKIEDDSIRQSQNALLSNESSQFLSVSAEGGHECVANGISRNSSSPCISGTTHTLHDSSVASIETKSRQRSHSSIQFSFKEKLSEKVSEKETIVKESGKQPGAKPKVKLARKKDDDKKKSSNEKLKQTSVFFSDGLDLENWYSCGEGDISEIESDMGSPGSRKSPNFNIHPLYQHVLLYLQLYDSSRTLYAFSAIKAILKTNPIAFVNAISTTSVNNAYTPQLSLLQNLLARHRISVMGKDFYSHIPVDSNHNFRSSMYIEILISLCLYYMRSHYPTHVKVTAQDLIGNRNMQMMSIEILTLLFTELAKVIESSAKGFPSFISDMLSKCKVQKVILHCLLSSIFSAQKWHSEKMAGKNLVAVEEGFSEDSLINFSEDEFDNGSTLQSQLLKVLQRLIVLEHRVMTIPEENETGFDFVVSDLEHISPHQPMTSLQYLHAQPITCQGMFLCAVIRALHQHCACKMHPQWIGLITSTLPYMGKVLQRVVVSVTLQLCRNLDNLIQQYKYETGLSDSRPLWMASIIPPDMILTLLEGITAIIHYCLLDPTTQYHQLLVSVDQKHLFEARSGILSILHMIMSSVTLLWSILHQADSSEKMTIAASASLTTINLGATKNLRQQILELLGPISMNHGVHFMAAIAFVWNERRQNKTTTRTKVIPAASEEQLLLVELVRSISVMRAETVIQTVKEVLKQPPAIAKDKKHLSLEVCMLQFFYAYIQRIPVPNLVDSWASLLILLKDSIQLSLPAPGQFLILGVLNEFIMKNPSLENKKDQRDLQDVTHKIVDAIGAIAGSSLEQTTWLRRNLEVKPSPKIMVDGTNLESDVEDMLSPAMETANITPSVYSVHALTLLSEVLAHLLDMVFYSDEKERVIPLLVNIMHYVVPYLRNHSAHNAPSYRACVQLLSSLSGYQYTRRAWKKEAFDLFMDPSFFQMDASCVNHWRAIMDNLMTHDKTTFRDLMTRVAVAQSSSLNLFANRDVELEQRAMLLKRLAFAIFSSEIDQYQKYLPDIQERLVESLRLPQVPTLHSQVFLFFRVLLLRMSPQHLTSLWPTMITELVQVFLLMEQELTADEDISRTSGPSVAGLETTYTGGNGFSTSYNSQRWLNLYLSACKFLDLALALPSENLPQFQMYRWAFIPEASDDSGLEVRRQGIHQREFKPYVVRLAKLLRKRAKKNPEEDNSGRTLGWEPGHLLLTICTVRSMEQLLPFFNVLSQVFNSKVTSRCGGHSGSPILYSNAFPNKDMKLENHKPCSSKARQKIEEMVEKDFLEGMIKT

SEQ ID NO: 1562 - protein, 1742 aa, Homo sapiens
MQCCLEYVQQFLTRLINLYIIQNNSFSQSLATEHQGDLGREQGETSKWDRNSQGDVKEKNISKQKTSKEYLSAFLAACQLFLECSSFPVYIAEGNHTSELRSEKLETDCEHVQPPQWLQTLMNACSQASDFSVQSVAISLVMDLVGLTQSVAMVTGENINSVEPAQPLSPNQGRVAVVIRPPLTQGNLRYIAEKTEFFKHVALTLWDQLGDGTPQHHQKSVELFYQLHNLVPSSSICEDVISQQLTHKDKKIRMEAHAKFAVLWHLTRDLHINKSSSFVRSFDRSLFIMLDSLNSLDGSTSSVGQAWLNQVLQRHDIARVLEPLLLLLLHPKTQRVSVQRVQAERYWNKSPCYPGEESDKHFMQNFACSNVSQVQLITSKGNGEKPLTMDEIENFSLTVNPLSDRLSLLSTSSETIPMVVSDFDLPDQQIEILQSSDSGCSQSSAGDNLSYEVDPETVNAQEDSQMPKESSPDDDVQQVVFDLICKVVSGLEVESASVTSQLEIEAMPPKCSDIDPDEETIKIEDDSIRQSQNALLSNESSQFLSVSAEGGHECVANGISRNSSSPCISGTTHTLHDSSVASIETKSRQRSHSSIQFSFKEKLSEKVSEKETIVKESGKQPGAKPKVKLARKKDDDKKKSSNEKLKQTSVFFSDGLDLENWYSCGEGDISEIESDMGSPGSRKSPNFNIHPLYQHVLLYLQLYDSSRTLYAFSAIKAILKTNPIAFVNAISTTSVNNAYTPQLSLLQNLLARHRISVMGKDFYSHIPVDSNHNFRSSMYIEILISLCLYYMRSHYPTHVKVTAQDLIGNRNMQMMSIEILTLLFTELAKVIESSAKGFPSFISDMLSKCKVQKVILHCLLSSIFSAQKWHSEKMAGKNLVAVEEGFSEDSLINFSEDEFDNGSTLQSQLLKVLQRLIVLEHRVMTIPEENETGFDFVVSDLEHISPHQPMTSLQYLHAQPITCQGMFLCAVIRALHQHCACKMHPQWIGLITSTLPYMGKVLQRVVVSVTLQLCRNLDNLIQQYKYETGLSDSRPLWMASIIPPDMILTLLEGITAIIHYCLLDPTTQYHQLLVSVDQKHLFEARSGILSILHMIMSSVTLLWSILHQADSSEKMTIAASASLTTINLGATKNLRQQILELLGPISMNHGVHFMAAIAFVWNERRQNKTTTRTKVIPAASEEQLLLVELVRSISVMRAETVIQTVKEVLKQPPAIAKDKKHLSLEVCMLQFFYAYIQRIPVPNLVDSWASLLILLKDSIQLSLPAPGQFLILGVLNEFIMKNPSLENKKDQRDLQDVTHKIVDAIGAIAGSSLEQTTWLRRNLEVKPSPKIMVDGTNLESDVEDMLSPAMETANITPSVYSVHALTLLSEVLAHLLDMVFYSDEKERVIPLLVNIMHYVVPYLRNHSWRAIMDNLMTHDKTTFRDLMTRVAVAQSSSLNLFANRDVELEQRAMLLKRLAFAIFSSEIDQYQKYLPDIQERLVESLRLPQVPTLHSQVFLFFRVLLLRMSPQHLTSLWPTMITELVQVFLLMEQELTADEDISRTSGPSVAGLETTYTGGNGFSTSYNSQRWLNLYLSACKFLDLALALPSENLPQFQMYRWAFIPEASDDSGLEVRRQGIHQREFKPYVVRLAKLLRKRAKKNPEEDNSGRTLGWEPGHLLLTICTVRSMEQLLPFFNVLSQVFNSKVTSRCGGHSGSPILYSNAFPNKDMKLENHKPCSSKARQKIEEMVEKDFLEGMIKT

SEQ ID NO: 1563 - protein, 573 aa, Homo sapiens
MLENYQNLLALGPPLHKPDVISHLERGEEPWSMQREVPRGPCPEWELKAVPSQQQGICKEEPAQEPIMERPLGGAQAWGRQAGALQRSQAAPWAPAPAMVWDVPVEEFPLRCPLFAQQRVPEGGPLLDTRKNVQATEGRTKAPARLCAGENASTPSEPEKFPQVRRQRGAGAGEGEFVCGECGKAFRQSSSLTLHRRWHSREKAYKCDECGKAFTWSTNLLEHRRIHTGEKPFFCGECGKAFSCHSSLNVHQRIHTGERPYKCSACEKAFSCSSLLSMHLRVHTGEKPYRCGECGKAFNQRTHLTRHHRIHTGEKPYQCGSCGKAFTCHSSLTVHEKIHSGDKPFKCSDCEKAFNSRSRLTLHQRTHTGEKPFKCADCGKGFSCHAYLLVHRRIHSGEKPFKCNECGKAFSSHAYLIVHRRIHTGEKPFDCSQCWKAFSCHSSLIVHQRIHTGEKPYKCSECGRAFSQNHCLIKHQKIHSGEKSFKCEKCGEMFNWSSHLTEHQRLHSEGKPLAIQFNKHLLSTYYVPGSLLGAGDAGLRDVDPIDALDVAKLLCVVPPRAGRNFSLGSKPRN

SEQ ID NO: 1564 - protein, 1072 aa, Homo sapiens
MPLRHWGMARGSKPVGDGAQPMAAMGGLKVLLHWAGPGGGEPWVTFSESSLTAEEVCIHIAHKVGITPPCFNLFALFDAQAQVWLPPNHILEIPRDASLMLYFRIRFYFRNWHGMNPREPAVYRCGPPGTEASSDQTAQGMQLLDPASFEYLFEQGKHEFVNDVASLWELSTEEEIHHFKNESLGMAFLHLCHLALRHGIPLEEVAKKTSFKDCIPRSFRRHIRQHSALTRLRLRNVFRRFLRDFQPGRLSQQMVMVKYLATLERLAPRFGTERVPVCHLRLLAQAEGEPCYIRDSGVAPTDPGPESAAGPPTHEVLVTGTGGIQWWPVEEEVNKEEGSSGSSGRNPQASLFGKKAKAHKAFGQPADRPREPLWAYFCDFRDITHVVLKEHCVSIHRQDNKCLELSLPSRAAALSFVSLVDGYFRLTADSSHYLCHEVAPPRLVMSIRDGIHGPLLEPFVQAKLRPEDGLYLIHWSTSHPYRLILTVAQRSQAPDGMQSLRLRKFPIEQQDGAFVLEGWGRSFPSVRELGAALQGCLLRAGDDCFSLRRCCLPQPGETSNLIIMRGARASPRTLNLSQLSFHRVDQKEITQLSHLGQGTRTNVYEGRLRVEGSGDPEEGKMDDEDPLVPGRDRGQELRVVLKVLDPSHHDIALAFYETASLMSQVSHTHLAFVHGVCVRGPENIMVTEYVEHGPLDVWLRRERGHVPMAWKMVVAQQLASALSYLENKNLVHGNVCGRNILLARLGLAEGTSPFIKLSDPGVGLGALSREERVERIPWLAPECLPGGANSLSTAMDKWGFGATLLEICFDGEAPLQSRSPSEKEHFYQRQHRLPEPSCPQLATLTSQCLTYEPTQRPSFRTILRDLTRLQPHNLADVLTVNPDSPASDPTVFHKRYLKKIRDLGEGHFGKVSLYCYDPTNDGTGEMVAVKALKADCGPQHRSGWKQEIDILRTLYHEHIIKYKGCCEDQGEKSLQLVMEYVPLGSLRDYLPRHSIGLAQLLLFAQQICEGMAYLHAQHYIHRDLAARNVLLDNDRLVKIGDFGLAKAVPDATSTTACARMGTAPCSGMPQSA

SEQ ID NO: 1565 - protein, 1071 aa, Homo sapiens
MTSPAKFKKDKEIIAEYDTQVKEIRAQLTEQMKCLDQQCELRVQLLQDLQDFFRKKAEIEMDYSRNLEKLAERFLAKTCSTKDQQFKKDQNVLSPVNCWNLLLNQVKRESRDHTTLSDIYLNNIIPRFVQVSEDSGRLFKKSKEVGQQLQDDLMKVLNELYSVMKTYHMYNADSISAQSKLKEAEKQEEKQIGKSVKQEDRQTPRSPDSTANVRIEEKHVRRSSVKKIEKMKEKRQAKYTENKLKAIKARNEYLLALEATNASVFKYYIHDLSDLIDQCCDLGYHASLNRALRTFLSAELNLEQSKHEGLDAIENAVENLDATSDKQRLMEMYNNVFCPPMKFEFQPHMGDMASQLCAQQPVQSELLQRCQQLQSRLSTLKIENEEVKKTMEATLQTIQDIVTVEDFDVSDCFQYSNSMESVKSTVSETFMSKPSIAKRRANQQETEQFYFTKMKEYLEGRNLITKLQAKHDLLQKTLGESQRTDCSLARRSSTVRKQDSSQAIPLVVESCIRFISRHGLQHEGIFRVSGSQVEVNDIKNAFERGEDPLAGDQNDHDMDSIAGVLKLYFRGLEHPLFPKDIFHDLMACVTMDNLQERALHIRKVLLVLPKTTLIIMRYLFAFLNHLSQFSEENMMDPYNLAICFGPSLMSVPEGHDQVSCQAHVNELIKTIIIQHENIFPSPRELEGPVYSRGGSMEDYCDSPHGETTSVEDSTQDVTAEHHTSDDECEPIEAIAKFDYVGRTARELSFKKGASLLLYQRASDDWWEGRHNGIDGLIPHQYIVVQDTEDGVVERSSPKSEIEVISEPPEEKVTARAGASCPSGGHVADIYLANINKQRKRPESGSIRKTFRSDSHGLSSSLTDSSSPGVGASCRPSSQPIMSQSLPKEGPDKCSISGHGSLNSISRHSSLKNRLDSPQIRKTATAGRSKSFNNHRPMDPEVIAQDIEATMNSALNELRELERQSSVKHTPDVVLDTLEPLKTSPVVAPTSEPSSPLHTQLLKDPEPAFQRSASTAGDIACAFRPVKSVKMAAPVKPPATRPKPTVFPKTNATSPGVNSSTSPQSTDKSCTV

SEQ ID NO: 1566 - protein, 854 aa, Homo sapiens
MASEGPREPESEGIKLSADVKPFVPRFAGLNVAWLESSEACVFPSSAATYYPFVQEPPVTEQKIYTEDMAFGASTFPPQYLSSEITLHPYAYSPYTLDSTQNVYSVPGSQYLYNQPSCYRGFQTVKHRNENTCPLPQEMKALFKKKTYDEKKTYDQQKFDSERADGTISSEIKSARGSHHLSIYAENSLKSDGYHKRTDRKSRIIAKNVSTSKPEFEFTTLDFPELQGAENNMSEIQKQPKWGPVHSVSTDISLLREVVKPAAVLSKGEIVVKNNPNESVTANAATNSPSCTRELSWTPMGYVVRQTLSTELSAAPKNVTSMINLKTIASSADPKNVSIPSSEALSSDPSYNKEKHIIHPTQKSKASQGSDLEQNEASRKNKKKKKKSTSKYEVLTVQEPPRIEDAEEFPNLAVASERRDRIETPKFQSKQQPQDNFKNNVKKSQLPVQLDLGGMLTALEKKQHSQHAKQSSKPVVVSVGAVPVLSKECASGERGRRMSQMKTPHNPLDSSAPLMKKGKQREIPKAKKPTSLKKIILKERQERKQRLQENAVSPAFTSDDTQDGESGGDDQFPEQAELSGPEGMDELISTPSVEDKSEEPPGTELQRDTEASHLAPNHTTFPKIHSRRFRDYCSQMLSKEVDACVTDLLKELVRFQDRMYQKDPVKAKTKRRLVLGLREVLKHLKLKKLKCVIISPNCEKIQSKGGLDDTLHTIIDYACEQNIPFVFALNRKALGRSLNKAVPVSVVGIFSYDGAQDQFHKMVELTVAARQAYKTMLENVQQELVGEPRPQAPPSLPTQGPSCPAEDGPPALKEKEEPHYIEIWKKHLEAYSGCTLELEESLEASTSQMMNLNL

SEQ ID NO: 1567 - protein, 115 aa, Homo sapiens
MKVYIYSSGSVEAQKLLFGHSTEGDILELVDGHFDTKIGHKVESESYRKIADSIGCSTNNILFLTDVTREASAAEEADVHVAVVVRPGNAGLTDDEKTYYSLITSFSELYLPSST

SEQ ID NO: 1568 - protein, 344 aa, Homo sapiens
MVRARHQPGGLCLLLLLLCQFMEDRSAQAGNCWLRQAKNGRCQVLYKTELSKEECCSTGRLSTSWTEEDVNDNTLFKWMIFNGGAPNCIPCKETCENVDCGPGKKCRMNKKNKPRCVCAPDCSNITWKGPVCGLDGKTYRNECALLKARCKEQPELEVQYQGRCKKTCRDVFCPGSSTCVVDQTNNAYCVTCNRICPEPASSEQYLCGNDGVTYSSACHLRKATCLLGRSIGLAYEGKCIKAKSCEDIQCTGGKKCLWDFKVGRGRCSLCDELCPDSKSDEPVCASDNATYASECAMKEAACSSGVLLEVKHSGSCNSISEDTEEEEEDEDQDYSFPISSILEW

SEQ ID NO: 1569 - protein, 649 aa, Homo sapiens
MISAAWSIFLIGTKIGLFLQVAPLSVMAKSCPSVCRCDAGFIYCNDRFLTSIPTGIPEDATTLYLQNNQINNAGIPSDLKNLLKVERIYLYHNSLDEFPTNLPKYVKELHLQENNIRTITYDSLSKIPYLEELHLDDNSVSAVSIEEGAFRDSNYLRLLFLSRNHLSTIPWGLPRTIEELRLDDNRISTISSPSLQGLTSLKRLVLDGNLLNNHGLGDKVFFNLVNLTELSLVRNSLTAAPVNLPGTNLRKLYLQDNHINRVPPNAFSYLRQLYRLDMSNNNLSNLPQGIFDDLDNITQLILRNNPWYCGCKMKWVRDWLQSLPVKVNVRGLMCQAPEKVRGMAIKDLNAELFDCKDSGIVSTIQITTAIPNTVYPAQGQWPAPVTKQPDIKNPKLTKDHQTTGSPSRKTITITVKSVTSDTIHISWKLALPMTALRLSWLKLGHSPAFGSITETIVTGERSEYLVTALEPDSPYKVCMVPMETSNLYLFDETPVCIETETAPLRMYNPTTTLNREQEKEPYKNPNLPLAAIIGGAVALVTIALLALVCWYVHRNGSLFSRNCAYSKGRRRKDDYAEAGTKKDNSILEIRETSFQMLPISNEPISKEEFVIHTIFPPNGMNLYKNNHSESSSNRSYRDSGIPDSDHSHS

SEQ ID NO: 1570 - protein, 1539 aa, Homo sapiens
MTTDAPKKIVAAKYEVIHSKTKVNVKSVKRNTDVPESQQNLHRPVKVRKKQIDKEPKIQSCNSGVKSVKNQAHSVLKKTLQDQTLVQIFKPLTHSLSDKSHAHPGCLKEPHHPAQTGHVSHSSQKQCHKPQQQAPAMKTNSHVKEELEHPGVEHFKEEDKLKLKKPEKNLQPRQRRSSKSFSLDEPPLFIPDNIATIRREGSDHSSSFESKYMWTPSKQCGFCKKPHGNRFMVGCGRCDDWFHGDCVGLSLSQAQQMGEEDKEYVCVKCCAEEDKKTEILDPDTLENQATVEFHSGDKTMECEKLGLSKHTTNDRTKYIDDTVKHKVKILKRESGEGRNSSDCRDNEIKKWQLAPLRKMGQPVLPRRSSEEKSEKIPKESTTVTCTGEKASKPGTHEKQEMKKKKVEKGVLNVHPAASASKPSADQIRQSVRHSLKDILMKRLTDSNLKVPEEKAAKVATKIEKELFSFFRDTDAKYKNKYRSLMFNLKDPKNNILFKKVLKGEVTPDHLIRMSPEELASKELAAWRRRENRHTIEMIEKEQREVERRPITKITHKGEIEIESDAPMKEQEAAMEIQEPAANKSLEKPEGSEKQKEEVDSMSKDTTSQHRQHLFDLNCKICIGRMAPPVDDLSPKKVKVVVGVARKHSDNEAESIADALSSTSNILASEFFEEEKQESPKSTFSPAPRPEMPGTVEVESTFLARLNFIWKGFINMPSVAKFVTKAYPVSGSPEYLTEDLPDSIQVGGRISPQTVWDYVEKIKASGTKEICVVRFTPVTEEDQISYTLLFAYFSSRKRYGVAANNMKQVKDMYLIPLGATDKIPHPLVPFDGPGLELHRPNLLLGLIIRQKLKRQHSACASTSHIAETPESAPPIALPPDKKSKIEVSTEEAPEEENDFFNSFTTVLHKQRNKPQQNLQEDLPTAVEPLMEVTKQEPPKPLRFLPGVLIGWENQPTTLELANKPLPVDDILQSLLGTTGQVYDQAQSVMEQNTVKEIPFLNEQTNSKIEKTDNVEVTDGENKEIKVKVDNISESTDKSAEIETSVVGSSSISAGSLTSLSLRGKPPDVSTEAFLTNLSIQSKQEETVESKEKTLKRQLQEDQENNLQDNQTSNSSPCRSNVGKGNIDGNVSCSENLVANTARSPQFINLKRDPRQAAGRSQPVTTSESKDGDSCRNGEKHMLPGLSHNKEHLTEQINVEEKLCSAEKNSCVQQSDNLKVAQNSPSVENIQTSQAEQAKPLQEDILMQNIETVHPFRRGSAVATSHFEVGNTCPSEFPSKSITFTSRSTSPRTSTNFSPMRPQQPNLQHLKSSPPGFPFPGPPNFPPQSMFGFPPHLPPPLLPPPGFGFAQNPMVPWPPVVHLPGQPQRMMGPLSQASRYIGPQNFYQVKDIRRPERRHSDPWGRQDQQQLDRPFNRGKGDRQRFYSDSHHLKRERHEKEWEQESERHRRRDRSQDKDRDRKSREEGHKDKERARLSHGDRGTDGKASRDSRNVDKKPDKPKSEDYEKDKEREKSKHREGEKDRDRYHKDRDHTDRTKSKR

SEQ ID NO: 1571 - protein, 394 aa, Homo sapiens [sequence omitted]

SEQ ID NO: 1572 - protein, 406 aa, Homo sapiens
MAPARCFSARLRTVFQGVGHWALSTWAGLKPSRLLPQRASPRLLSVGRADLAKHQELPGKKLLSEKKLKRYFVDYRRVLVCGGNGGAGASCFHSEPRKEFGGPDGGDGGNGGHVILRVDQQVKSLSSVLSRYQGFSGEDGGSKNCFGRSGAVLYIRVPVGTLVKEGGRVVADLSCVGDEYIAALGGAGGKGNRFFLANNNRAPVTCTPGQPGQQRVLHLELKTAAHAGMGGFPNAGKSSLLRAISNARPAVASYPFTTLKPHVGIVHYEGHLQIAVADIPGIIRGAHQNRGLGSAFLRHIERCRFLLFVVDLSQPEPWTQVDDLKYELEMYEKGLSARPHAIVANKIDLPEAQANLSQLRDHLGQEVIVLSALTGENLEQLLLHLKVLYDAYAEAELGQGRQPLRW

SEQ ID NO: 1573 - protein, 2473 aa, Homo sapiens
MLGLLVQFCTSHKEMDVVSQHKSALLDFYMKNILMSKVKPPKYLLDSCAPLLRYLSHSEFKDLILPTIQKSLLRSPENVIETISSLLASVTLDLSQYAMDIVKGLAGHLKSNSPRLMDEAVLALRNLARQCSDSSAMESLTKHLFAILGGSEGKLTVVAQKMSVLSGIGSVSHHVVSGPSSQVLNGIVAELFIPFLQQEVHEGTLVHAVSVLALWCNRFTMEVPKKLTEWFKKAFSLKTSTSAVRHAYLQCMLASYRGDTLLQALDLLPLLIQTVEKAASQSTQVPTITEGVAAALLLLKLSVADSQAEAKLSSFWQLIVDEKKQVFTSEKFLVMASEDALCTVLHLTERLFLDHPHRLTGNKVQQYHRALVAVLLSRTWHVRRQAQQTVRKLLSSLGGFKLAHGLLEELKTVLSSHKVLPLEALVTDAGEVTEAGKAYVPPRVLQEALCVISGVPGLKGDVTDTEQLAQEMLIISHHPSLVAVQSGLWPALLARMKIDPEAFITRHLDQIIPRMTTQSPLNQSSMNAMGSLSVLSPDRVLPQLISTITSSVQNPALRLVTREEFAIMQTPAGELYDKSIIQSAQQDSIKKANMKRENKAYSFKEQIIELELKEEIKKKKGIKEEVQLTSKQKEMLQAQLDREAQVRRRLQELDGELEAALGLLDIILAKKSTGLTQYIPVLVDSFLPLLKSPLAAPRIKNPFLSLAACVMPSRLKALGTLVSHVTLRLLKPECVLDKSWCQEELSVAVKRAVMLLHTHTITSRVGKGEPGAAPLSAPAFSLVFPFLKMVLTEMPHHSEEEEEWMAQILQILTVQAQLRASPNTPPGRVDENGPELLPRVAMLRLLTWVIGTGSPRLQVLASDTLTTLCASSSGDDGCAFAEQEEVDVLLCALQSPCASVRETVLRGLMELHMVLPAPDTDEKNGLNLLRRLWVVKFDKEEEIRKLAERLWSMMGLDLQPDLCSLLIDDVIYHEAAVRQAGAEALSQAVARYQRQAAEVMGRLMEIYQEKLYRPPPVLDALGRVISESPPDQWEARCGLALALNKLSQYLDSSQVKPLFQFFVPDALNDRHPDVRKCMLDAALATLNTHGKENVNSLLPVFEEFLKNAPNDASYDAVRQSVVVLMGSLAKHLDKSDPKVKPIVAKLIAALSTPSQQVQESVASCLPPLVPAIKEDAGGMIQRLMQQLLESDKYAERKGAAYGLAGLVKGLGILSLKQQEMMAALTDAIQDKKNFRRREGALFAFEMLCTMLGKLFEPYVVHVLPHLLLCFGDGNQYVREAADDCAKAVMSNLSAHGVKLVLPSLLAALEEESWRTKAGSVELLGAMAYCAPKQLSSCLPNIVPKLTEVLTDSHVKVQKAGQQALRQIGSVIRNPEILAIAPVLLDALTDPSRKTQKCLQTLLDTKFVHFIDAPSLALIMPIVQRAFQDRSTDTRKMAAQIIGNMYSLTDQKDLAPYLPSVTPGLKASLLDPVPEVRTVSAKALGAMVKGMGESCFEDLLPWLMETLTYEQSSVDRSGAAQGLAEVMAGLGVEKLEKLMPEIVATASKVDIAPHVRDGYIMMFNYLPITFGDKFTPYVGPIIPCILKALADENEFVRDTALRAGQRVISMYAETAIALLLPQLEQGLFDDLWRIRFSSVQLLGDLLFHISGVTGKMTTETASEDDNFGTAQSNKAIITALGVERRNRVLAGLYMGRSDTQLVVRQASLHVWKIVVSNTPRTLREILPTLFGLLLGFLASTCADKRTIAARTLGDLVRKLGEKILPEIIPILEEGLRSQKSDERQGVCIGLSEIMKSTSRDAVLYFSESLVPTARKALCDPLEEVREAAAKTFEQLHSTIGHQALEDILPFLLKQLDDEEVSEFALDGLKQVMAIKSRVVLPYLVPKLTTPPVNTRVLAFLSSVAGDALTRHLGVILPAVMLALKEKLGTPDEQLEMANCQAVILSVEDDTGHRIIIEDLLEATRSPEVGMRQAAAIILNIYCSRSKADYTSHLRSLVSGLIRLFNDSSPVVLEESWDALNAITKKLDAGNQLALIEELHKEIRLIGNESKGEHVPGFCLPKKGVTSILPVLREGVLTGSPEQKEEAAKALGLVIRLTSADALRPSVVSITGPLIRILGDRFSWNVKAALLETLSLLLAKVGIALKPFLPQLQTTFTKALQDSNRGVRLKAADALGKLISIHIKVDPLFTELLNGIRAMEDPGVRDTMLQALRFVIQGAGAKVDAVIRKNIVSLLLSMLGHDEDNTRISSAGCLGELCAFLTEEELSAVLQQCLLADVSGIDWMVRHGRSLALSVAVNVAPGRLCAGRYSSDVQEMILSSATADRIPIAVSGVRGMGFLMRHHIETGGGQLPAKLSSLFVKCLQNPSSDIRLVAEKMIWWANKDPLPPLDPQAIKPILKALLDNTKDKNTVVRAYSDQAIVNLLKMRQGEEVFQSLSKILDVASLEVLNEVNRRSLKKLASQADSTEQVDDTILT

SEQ ID NO: 1574 - protein, 355 aa, Homo sapiens
MEGIPGFPGNRGLMGQKGEIGPPGQQGKKGAPGMPGLMGSNGSPGQPGTPGSKGSKGEPGIQGMPGASGLKGEPGATGSPGEPGYMGLPGIQGKKGDKGNQGEKGIQGQKGENGRQGIPGQQGIQGHHGAKGERGEKGEPGVRGAIGSKGESGVDGLMGPAGPKGQPGDPGPQGPPGLDGKPGREFSEQFIRQVCTDVIRAQLPVLLQSGRIRNCDHCLSQHGSPGIPGPPGPIGPEGPRGLPGLPGRDGVPGLVGVPGRPGVRGLKGLPGRNGEKGSQGFGYPGEQGPPGPPGPEGPPGISKEGPPGDPGLPGKDGDHGKPGIQGQPGPPGICDPSLCFSVIARRDPFRKGPNY

SEQ ID NO: 1575 - protein, 146 aa, Homo sapiens
MKASVVLSLLGYLVVPSGAYILGRCTVAKKLHDGGLDYFEGYSLENWVCLAYFESKFNPMAIYENTREGYTGFGLFQMRGSDWCGDHGRNRCHMSCSALLNPNLEKTIKCAKTIVKGKEGMGAWPTWSRYCQYSDTLARWLDGCKL

SEQ ID NO: 1576 - protein, 378 aa, Homo sapiens
MLRAGWLRGAAALALLLAARVVAAFEPITVGLAIGAASAITGYLSYNDIYCRFAECCREERPLNASALKLDLEEKLFGQHLATEVIFKALTGFRNNKNPKKPLTLSLHGWAGTGKNFVSQIVAENLHPKGLKSNFVHLFVSTLHFPHEQKIKLYPDQLQKWIRGNVSACANSVFIFDEMDKLHPGIIDAIKPFLDYYEQVDGVYYRKAIFIFLSNAGGDLITKTALDFWRAGRKREDIQLKDLEPVLSVGVFNNKHSGLWHSGLIDKNLIDYFIPFLPLEYRHVKMCVMAEMRARGSAIDEDIVTRVAEEMTFFPQRRENLLRQGLQDCAVAAGFPLSSYPDGVGDSWEAPHARGLAFQKNPEDRFGVLPVCTLDFWV

SEQ ID NO: 1577 - protein, 87 aa, Homo sapiens
MAGASLGARFYRQIKRHPGIIPMIGLICLGMGSAALYLLRLALRSPDVCWDRKNNPEPWNRLSPNDQYKFLAVSTDYKKLKKDRPDF

SEQ ID NO: 1578 - protein, 142 aa, Homo sapiens [sequence omitted]

SEQ ID NO: 1579 - protein, 151 aa, Homo sapiens
MRRLLLVTSLVVVLLWEAGAVPAPKVPIKMQVKHWPSEQDPEKAWGARVVEPPEKDDQLVVLFPVQKPKLLTTEEKPRGQGRGPILPGTKAWMETEDTLGRVLSPEPDHDSLYHPPPEEDQGEERPRLWVMPNHQVLLGPEEDQDHIYHPQ

SEQ ID NO: 1580 - protein, 528 aa, Homo sapiens
MAAVLNAERLEVSVDGLTLSPDPEERPGAEGAPLLPPPLPPPSPPGSGRGPGASGEQPEPGEAAAGGAAEEARRLEQRWGFGLEELYGLALRFFKEKDGKAFHPTYEEKLKLVALHKQVLMGPYNPDTCPEVGFFDVLGNDRRREWAALGNMSKEDAMVEFVKLLNRCCHLFSTYVASHKIEKEEQDKKRKEEEERRHREEEERERLQKEEEKRRREEEERLRREEEERRRIEEERLRLEQQKQQIMAALNSQTAVQFQQYAAQQYPGNYEQQQILIRQLQEQHYQQYMQQLYQVQLAQQQAALQKQQEVVVAGSSLPTSSKVNATVPSNMMSVNGQAKTHTDSSEKELEPEAAEEALENGPKESLPVIAAPSMWTRPQIKDFKEKIQQDADSVITVGRGEVVTVRVPTHEEGSYLFWEFATDNYDIGFGVYFEWTDSPNTAVSVHVSESSDDDEEEEENIGCEEKAKKNANKPLLDEIVPVYRRDCHEEVYAGSHQYPGRGVYLLKFDNSYSLWRSKSVYYRVYYTR

SEQ ID NO: 1581 - protein, 2464 aa, Homo sapiens
MEELEKDPRIAQKIKRFRNKQAQMKHIFTEDSVRDFAKPEGSCKRTVMVGMGHRWRADCTMPDEDLFNPDYVEVDRILEVAHTKDAETGEEVTHYLVKWCSLPYEESTWELEEDVDPAKVKEFESLQVLPEIKHVERPASDSWQKLEKSREYKNSNQLREYQLEGMNWLLFNWYNRKNCILADEMGLGKTIQSITFLSEIFLRGIHGPFLIIAPLSTITNWEREFRTWTEMNAIVYHGSQISRQMIQQYEMVYRDAQGNPLSGVFKFHVVITTFEMILADCPELKKIHWSCVIIDEAHRLKNRNCKLLEGLKLMALEHKVLLTGTPLQNSVEELFSLLNFLEPSQFPSETAFLEEFGDLKTEEQVKKLQSILKPMMLRRLKDDVEKNLAPKQETIIEVELTNIQKKYYRAILEKNFSFLTKGANQHNMPNLINTMMELRKCCNHPYLINGAEEKILEDFRKTHSPDAPDFQLQAMIQAAGKLVLIDKLLPKLIAGGHKVLIFSQMVRCLDILEDYLIQRRYTYERIDGRVRGNLRQAAIDRFCKPDSDRFVFLLCTRAGGLGINLTAADTCIIFDSDWNPQNDLQVPEGRIQKVWEQMSWPRAQPQDNAAAACLQDFGSQLGVQSEETGPFHNRQKQDSGNSHTAPRGRVLTGLLSVWAALVLSIGILVSFSAMRLGEECGQGMGGGFHIQGFWHWAQARCHRIGQSKAVKVYRLITRNSYEREMFDKASLKLGLDKAVLQDINRKGGTNGVQQLSKMEVEDLLRKGAYGALMDEEDEGSKFCEEDIDQILQRRTHTITIQSEGKGSTFAKASFVASGNRTDISLDDPNFWQKWAKIAELDTEAKNEKESLVIDRPRVRKQTKHYNSFEEDELMEFSELDSDSDERPTRSRRLNDKARRYLRAECFRVEKNLLIFGWGRWKDILTHGRFKWHLNEKDMEMICRALLVYCVKHYKGDEKIKSFIWELITPTKDGQAQTLQNHSGLSAPVPRGRKGKKTKNQLLIPELKDADWLATCNPEVVLHDDGYKKHLKQHCNKVLLRVRMLYYLKAEILGEAAEKAFEGSPARELDVPLPDIDYMEIPVDWWDAEADKSLLIGVFKHGYERYNAMRADPALCFLEKVGMPDEKSLSAEQGVTDGTSDIPERGNTDKEDNAEDKVDGLQKQTESSSDGGDGVFSEKKDDSRAARLRRLVTVYQRCNRKELCRPEILGPGNQGYWVQEEMFRRTSEMDLINKEAQKRWTRREQADFYRTVSSFGVVYDQEKKTFDWTQFRIISRLDKKSDESLEQYFYSFVAMCRNVCRLPTWKDGGPPDTTIYVEPITEERAARTLYRIELLRKVREQVLKCPQLHERLQLCRPSLYLPVWWECGKHDRDLLIGTAKHGLNRTDCYIMNDPQLSFLDAYRNYAQHKRSGTQAPGNLCCLYQTNSKLYESLTYSQMSRTSESLENEPENLVRVESRDDHLSLPDVTCENFISKVQDVISINHDESLLPESLESMMYGKKVLSQEPSSFQESPSTNTESRKDVITISISKDGNCQSGGPEAEIASGPTFMGSLEAGGVAQANIKNGKHLLMSISKEGELCCSEAGQRPENIGQLEAKCLASPSLNPGNESGFVDMCSLSVCDSKRNLSSDQQLIDLLENKSLESKLILSQNHSDEEEEEEENEEENLAMAVGMGERPEVLHLTEPTTNISREKNQGFQDETKKGSLEVANQTPGLQRAFPAPAACQCHCKHMERWMHGLENDEFEIEKPKAYIPDLFKSKTNTIAMEGEPTAIPSQPFKVKHELLKEPWKESAEGQNVFPTYPLEGSELKSEDMDFENKDDYDRDGNCHSQDYPGKYSEEESKSSTSGITGDIGDELQEARAPTIAQLLQEKTLYSFSEWPKDRVIINRLDNICHVVLKGKWPSSQQYEPSGTLPTPVLTSSAGSRTSLSEPEAAEHSFSNGAALAAQIHKESFLAPVFTKDEQKHRRPYEFEVERDAKARGLEQFSATHGHTPIILNGWHGESAMDLSCSSEGSPGATSPFPVSASTPKIGAISSLQGALGMDLSGILQAGLIHPVTGQIVNGSLRRDDAATRRRRGRRKHVEGGMDLIFLKEQTLQAGILEVHEDPGQATLSTTHPEGPGPATSAPEPATAASSQAEKSIPSKSLLDWLRQQADYSLEVPGFGAGFLPENKFNHTLAEPILRDTGPRRRGRRPRSELLKAPSIVADSPSGMGPLFMNGLIAGMDLVGLQNMRNMPGIPLTGLVGFPAGFATMPTGEEVKSTLSMLPMMLPGMAAVPQMFGVGGLLSPPMATTCTSTAPASLSSTTKSGTAVTEKTAEDKPSSHDVKTDTLAEDKPGPGPFSDQSEPAITTSSPVAFNPFLIPGVSPGLIYPSMFLSPGMGMALPAMQQARHSEIVGLESQKRKKKKTKGDNPNSHPEPAPSCEREPSGDENCAEPSAPLPAEREHGAQAGEGALKDSNNDTN

SEQ ID NO: 1582 - protein, 60 aa, Homo sapiens
MDKKLEEGCFDKAYVVLGQFLVLKKDEDLFREWLRDTGGANAKQSRDCFGCLREWCDAFL

SEQ ID NO: 1583 - protein, 1275 aa, Homo sapiens
MSLDFGSVALPVQNEDEEYDEEDYEREKELQQLLTDLPHDMLDDDLSSPELQYSDCSEDGTDGQPHHPEQLEMSWNEQMLPKSQSVNGPSCQGLEPYNKVTYKPYQSSAQNNGSPAQEITGSDTFEGLQQQFLGANENSAENMQIIQLQVLNKAKERQLENLIEKLNESERQIRYLNHQLVIIKDEKDGLTLSLRESQKLFQNGKEREIQLEAQIKALETQIQALKVNEEQMIKKSRTTEMALESLKQQLVDLHHSESLQRAREQHESIVMGLTKKYEEQVLSLQKNLDATVTALKEQEDICSRLKDHVKQLERNQEAIKLEKTEIINKLTRSLEESQKQCAHLLQSGSVQEVAQLQFQLQQAQKAHAMSANMNKALQEELTELKDEISLYESAAKLGIHPSDSEGELNIELTESYVDLGIKKVNWKKSKVTSIVQEEDPNEELSKDEFILKLKAEVQRLLGSNSMKRHLVSQLQNDLKDCHKKIEDLHQVKKDEKSIEVETKTDTSEKPKNQLWPESSTSDVVRDDILLLKNEIQVLQQQNQELKETEGKLRNTNQDLCNQMRQMVQDFDHDKQEAVDRCERTYQQHHEAMKTQIRESLLAKHALEKQQLFEAYERTHLQLRSELDKLNKEVTAVQECYLEVCREKDNLELTLRKTTEKEQQTQEKIKEKLIQQLEKEWQSKLDQTIKAMKKKTLDCGSQTDQVTTSDVISKKEMAIMIEEQKCTIQQNLEQEKDIAIKGAMKKLEIELELKHCENITKQVEIAVQNAHQRWLGELPELAEYQALVKAEQKKWEEQHEVSVNKRISFAVSEAKEKWKSELENMRKNILPGKELEEKIHSLQKELELKNEEVPVVIRAELAKARSEWNKEKQEEIHRIQEQNEQDYRQFLDDHRNKINEVLAAAKEDFMKQKTELLLQKETELQTCLDQSRREWTMQEAKRIQLEIYQYEEDILTVLGVLLSDTQKEHISDSEDKQLLEIMSTCSSKWMSVQYFEKLKGCIQKAFQDTLPLLVENADPEWKKRNMAELSKDSASQGTGQGDPGPAAGHHAQPLALQATEAEADKKKVLEIKDLCCGHCFQELEKAKQECQDLKGKLEKCCRHLQHLERKHKAVVEKIGEENNKVVEELIEENNDMKNKLEELQTLCKTPPRSLSAGAIENACLPCSGGALEELRGQYIKAVKKIKCDMLRYIQESKERAAEMVKAEVLRERQETARKMRKYYLICLQQILQDDGKEGAEKKIMNAASKLATMAKLLETPISSKSQSKTTQSGMSK

SEQ ID NO: 1584 - protein, 101 aa, Homo sapiens
MFPPARGKELLSFEDVAMYFTREEWGHLNWGQKDLYRDVMLENYRNMVLLGFQFPKPEMICQLENWDEQWILDLPRAGNRKASGSACPGGLSLCRQAVLAS

SEQ ID NO: 1585 - protein, 487 aa, Homo sapiens
MRRGERRDAGGPRPESPVPAGRASLEEPPDGPSAGQATGPGEGRRSTESEVYDDGTNTFFWRAHTLTVLFILTCTLGYVTLLEETPQDTAYNTKRGIVASILVFLCFGVTQAKDGPFSRPHPAYWRFWLCVSVVYELFLIFILFQTVQDGRQFLKYVDPKLGVPLPERDYGGNCLIYDPDNETDPFHNIWDKLDGFVPAHFLGWYLKTLMIRDWWMCMIISVMFEFLEYSLEHQLPNFSECWWDHWIMDVLVCNGLGIYCGMKTLEWLSLKTYKWQGLWNIPTYKGKMKRIAFQFTPYSWVRFEWKPASSLRRWLAVCGIILVFLLAELNTFYLKFVLWMPPEHYLVLLRLVFFVNVGGVAMREIYDFMDDPKPHKKLGPQAWLVAAITATELLIVVKYDPHTLTLSLPFYISQCWTLGSVLALTWTVWRFFLRDITLRYKETRWQKWQNKDDQGSTVGNGDQHPLGLDEDLLGPGVAEGEGAPTPN

SEQ ID NO: 1586 - protein, 681 aa, Homo sapiens
MSRRALRRLRGEQRGQEPLGPGALHFDLRDDDDAEEEGPKRELGVRRPGGAGKEGVRVNNRFELINIDDLEDDPVVNGERSGCALTDAVAPGNKGRGQRGNTESKTDGDDTETVPSEQSHASGKLRKKKKKQKNKKSSTGEASENGLEDIDRILERIEDSTGLNRPGPAPLSSRKHVLYVEHRHLNPDTELKRYFGARAILGEQRPRQRQRVYPKCTWLTTPKSTWPRYSKPGLSMRLLESKKGLSFFAFEHSEEYQQAQHKFLVAVESMEPNNIVVLLQTSPYHVDSLLQLSDACRFQEDQEMARDLVERALYSMECAFHPLFSLTSGACRLDYRRPENRSFYLALYKQMSFLEKRGCPRTALEYCKLILSLEPDEDPLCMLLLIDHLALRARNYEYLIRLFQEWEVGASLAHRNLSQLPNFAFSVPLAYFLLSQQTDLPECEQSSARQKASLLIQQALTMFPGVLLPLLESCSVRPDASVSSHRFFGPNAEISQPPALSQLVNLYLGRSHFLWKEPATMSWLEENVHEVLQAVDAGDPAVEACENRRKVLYQRAPRNIHRHVILSEIKEAVAALPPDVTTQSVMGFDPLPPSDTIYSYVRPERLSPISHGNTIALFFRSLLPNYTMEGERPEEGVAGGLNRNQGLNRLMLAVRDMMANFHLNDLEAPHEDDAEGEGEWD

SEQ ID NO: 1587 - protein, 666 aa, Homo sapiens
MSRRALRRLRGEQRGQEPLGPGALHFDLRDDDDAEEEGPKRELGVRRPGGAGKEGVRVNNRFELINIDDLEDDPVVNGERSGCALTDAVAPGNKGRGQRGNTESKTDGDDTETVPSEQSHASGKLRKKKKKQKNKKSSTGEASENGLEDIDRILERIEDSTGLNRPGPAPLSSRKHVLYVEHRHLNPDTELKRYFGARAILGEQRPRQRQRVYPKCTWLTTPKSTWPRYSKPGLSMRLLESKKGLSFFAFEHSEEYQQAQHKFLVAVESMEPNNIVLSDACRFQEDQEMARDLVERALYSMECAFHPLFSLTSGACRLDYRRPENRSFYLALYKQMSFLEKRGCPRTALEYCKLILSLEPDEDPLCMLLLIDHLALRARNYEYLIRLFQEWEVGASLAHRNLSQLPNFAFSVPLAYFLLSQQTDLPECEQSSARQKASLLIQQALTMFPGVLLPLLESCSVRPDASVSSHRFFGPNAEISQPPALSQLVNLYLGRSHFLWKEPATMSWLEENVHEVLQAVDAGDPAVEACENRRKVLYQRAPRNIHRHVILSEIKEAVAALPPDVTTQSVMGFDPLPPSDTIYSYVRPERLSPISHGNTIALFFRSLLPNYTMEGERPEEGVAGGLNRNQGLNRLMLAVRDMMANFHLNDLEAPHEDDAEGEGEWD

SEQ ID NO: 1588 - protein, 547 aa, Homo sapiens
MFYYPNVLQRHTGCFATIWLAATRGSRLVKREYLRVNVVKTCEEILNYVLVRVQPPQPGLPRPRFSLYLSAQLQIGVIRVYSQQCQYLVEDIQHILERLHRAQLQIRIDMETELPSLLLPNHLAMMETLEDAPDPFFGMMSVDPRLPSPFDIPQIRHLLEAAIPERVEEIPPEVPTEPREPERIPVTVLPPEAITILEAEPIRMLEIEGERELPEVSRRELDLLIAEEEEAILLEIPRLPPPAPAEVEGIGEALGPEELRLTGWEPGALLMEVTPPEELRLPAPPSPERRPPVPPPPRRRRRRRLLFWDKETQISPEKFQEQLQTRAHCWECPMVQPPERTIRGPAELFRTPTLSGWLPPELLGLWTHCAQPPPKALRRELPEEAAAEEERRKIEVPSEIEVPREALEPSVPLMVSLEISLEAAEEEKSRISLIPPEERWAWPEVEAPEAPALPVVPELPEVPMEMPLVLPPELELLSLEAVHRAVALELQANREPDFSSLVSPLSPRRMAARVFYLLLVLSAQQILHVKQEKPYGRLLIQPGPRFH

SEQ ID NO: 1589 - protein, 525 aa, Homo sapiens
MFYYPNVLQRHTGCFATIWLAATRGSRLVKREYLRVNVVKTCEEILNYVLVRVQPPQPGLPRPRFSLYLSAQLQIGVIRVYSQQCQYLVEDIQHILERLHRAQLQIRIDMETELPSLLLPNHLAMMETLEDAPDPFFGMMSVDPRLPSPFDIPQIRHLLEAAIPERVEEIPPEVPTEPREPERIPVTVLPPEAITILEAEPIRMLEIEGERELPEVSRRELDLLIAEEEEAILLEIPRLPPPAPAEVEGIGEALGPEELRLTGWEPGALLMEVTPPEELRLPAPPSPERRPPVPPPPRRRRRRRLLFWDKETQISPEKFQEQLQTRAHCWECPMVQPPERTIRGPAELFRTPTLSGWLPPELLGLWTHCAQPPPKALRRELPEEAAAEEERRKIEVPSEIEVPREALEPSVPLMVSLEISLEAAEEEKSRISLIPPEERWAWPEVEAPEAPALPVVPELPEVPMEMPLVLPPELELLSLEAVHSPRRMAARVFYLLLVLSAQQILHVKQEKPYGRLLIQPGPRFH

SEQ ID NO: 1590 - protein, 587 aa, Homo sapiens
MASEDIAKLAETLAKTQVAGGQLSFKGKSLKLNTAEDAKDVIKEIEDFDSLEALRLEGNTVGVEAARVIAKALEKKSELKRCHWSDMFTGRLRTEIPPALISLGEGLITAGAQLVELDLSDNAFGPDGVQGFEALLKSSACFTLQELKLNNCGMGIGGGKILAAALTECHRKSSAQGKPLALKVFVAGRNRLENDGATALAEAFRVIGTLEEVHMPQNGINHPGITALAQAFAVNPLLRVINLNDNTFTEKGAVAMAETLKTLRQVEVINFGDCLVRSKGAVAIADAIRGGLPKLKELNLSFCEIKRDAALAVAEAMADKAELEKLDLNGNTLGEEGCEQLQEVLEGFNMAKVLASLSDDEDEEEEEEGEEEEEEAEEEEEEDEEEEEEEEEEEEEEPQQRGQGEKSATPSRKILDPNTGEPAPVLSSPPPADVSTFLAFPSPEKLLRLGPKSSVLIAQQTDTSDPEKVVSAFLKVSSVFKDEATVRMAVQDAVDALMQKAFNSSSFNSNTFLTRLLVHMGLLKSEDKVKAIANLYGPLMALNHMVQQDYFPKALAPLLLAFVTKPNSALESCSFARHSLLQTLYKV

SEQ ID NO: 1591 - protein, 560 aa, Homo sapiens
MASEDIAKLAETLAKTQVAGGQLSFKGKSLKLNTAEDAKDVIKEIEDFDSLEALRLEGNTVGVEAARVIAKALEKKSELKRCHWSDMFTGRLRTEIPPALISLGEGLITAGAQLVELDLSDNAFGPDGVQGFEALLKSSACFTLQELKLNNCGMGIGGGKILAAALTECHRKSSAQGKPLALKVFVAGRNRLENDGATALAEAFRVIGTLEEVHMPQNGINHPGITALAQAFAVNPLLRVINLNDNTFTEKGAVAMAETLKTLRQVEVINFGDCLVRSKGAVAIADAIRGGLPKLKELNLSFCEIKRDAALAVAEAMADKAELEKLDLNGNTLGEEGCEQLQEVLEGFNMAKVLASLSDDEDEEEEEEEEPQQRGQGEKSATPSRKILDPNTGEPAPVLSSPPPADVSTFLAFPSPEKLLRLGPKSSVLIAQQTDTSDPEKVVSAFLKVSSVFKDEATVRMAVQDAVDALMQKAFNSSSFNSNTFLTRLLVHMGLLKSEDKVKAIANLYGPLMALNHMVQQDYFPKALAPLLLAFVTKPNSALESCSFARHSLLQTLYKV

SEQ ID NO: 1592 - protein, 308 aa, Homo sapiens
MIHDAQMDYYGTRLATCSSDRSVKIFDVRNGGQILIADLRGHEGPVWQVAWAHPMYGNILASCSYDRKVIIWREENGTWEKSHEHAGHDSSVNSVCWAPHDYGLILACGSSDGAISLLTYTGEGQWEVKKINNAHTIGCNAVSWAPAVVPGSLIDHPSGQKPNYIKRFASGGCDNLIKLWKEEEDGQWKEEQKLEAHSDWVRDVAWAPSIGLPTSTIASCSQDGRVFIWTCDDASSNTWSPKLLHKFNDVVWHVSWSITANILAVSGGDNKVTLWKESVDGQWVCISDVNKGQGSVSASVTEGQQNEQ

SEQ ID NO: 1593 - protein, 110 aa, Homo sapiens
MTSTLPKALGRKTASRSHTTLQGGSCCPVLWTAKLRCRKLRFPLPPPPPSSSAWPWQGWGIRGEQEAEGPLGETGPPVGPELSGLRQWRKLIKGRYGEWRGSGQKTGQPS

SEQ ID NO: 1594 - protein, 545 aa, Homo sapiens
MMGHRPVLVLSQNTKRESGRKVQSGNINAAKTIADIIRTCLGPKSMMKMLLDPMGGIVMTNDGNAILREIQVQHPAAKSMIEISRTQDEEVGDGTTSVIILAGEMLSVAEHFLEQQMHPTVVISAYRKALDDMISTLKKISIPVDISDSDMMLNIINSSITTKAISRWSSLACNIALDAVKMVQFEENGRKEIDIKKYARVEKIPGGIIEDSCVLRGVMINKDVTHPRMRRYIKNPRIVLLDSSLEYKKGESQTDIEITREEDFTRILQMEEEYIQQLCEDIIQLKPDVVITEKGISDLAQHYLMRANITAIRRVRKTDNNRIARACGARIVSRPEELREDDVGTGAGLLEIKKIGDEYFTFITDCKDPKACTILLRGASKEILSEVERNLQDAMQVCRNVLLDPQLVPGGGASEMAVAHALTEKSKAMTGVEQWPYRAVAQALEVIPRTLIQNCGASTIRLLTSLRAKHTQENCETWGVNGETGTLVDMKELGIWEPLAVKLQTYKTAVETAVLLLRIDDIVSGHKKKGDDQSRQGGAPDAGQE

SEQ ID NO: 1595 - protein, 306 aa, Homo sapiens
MAAVDDLQFEEFGNAATSLTANPDATTVNIEDPGETPKHQPGSPRGSGREEDDELLGNDDSDKTELLAGQKKSSPFWTFEYYQTFFDVDTYQVFDRIKGSLLPIPGKNFVRLYIRSNPDLYGPFWICATLVFAIAISGNLSNFLIHLGEKTYHYVPEFRKVSIAATIIYAYAWLVPLALWGFLMWRNSKVMNIVSYSFLEIVCVYGYSLFIYIPTAILWIIPQKAVRWILVMIALGISGSLLAMTFWPAVREDNRRVALATIVTIVLLHMLLSVGCLAYFFDAPEMDHLPTTTATPNQTVAAAKSS

SEQ ID NO: 1596 - protein, 81 aa, Homo sapiens
MTAHSFALPVIIFTTFWGLVGIAGPWFVPKGPNRGVIITMLVATAVCCYLFWLIAILAQLNPLFGPQLKNETIWYVRFLWE

SEQ ID NO: 1597 - protein, 384 aa, Homo sapiens
MMYITIYSMMKIPHQTQKKRSLEDPNSRPRRPRSMAATSLMSALAARLLQPAHSCSLRLRPFHLAAVRNEAVVISGRKLAQQIKQEVRQEVEEWVASGNKRPHLSVILVGENPASHSYVLNKTRAAAVVGINSETIMKPASISEEELLNLINKLNNDDNVDGLLVQLPLPEHIDERRICNAVSPDKDVDGFHVINVGRMCLDQYSMLPATPWGVWEIIKRTGIPTLGKNVVVAGRSKNVGMPIAMLLHTDGAHERPGGDATVTISHRYTPKEQLKKHTILADIVISAAGIPNLITADMIKEGAAVIDVGINRVHDPVTAKPKLVGDVDFEGVRQKAGYITPVPGGVGPMTVAMLMKNTIIAAKKVLRLEEREVLKSKELGVATN

SEQ ID NO: 1598 - protein, 353 aa, Homo sapiens
MAAPAQQTTQPGGGKRKGKAQYVLAKRARRCDAGGPRQLEPGLQGILITCNMNERKCVEEAYSLLNEYGDDMYGPEKFTDKDQQPSGSEGEDDDAEAALKKEVGDIKASTEMRLRRFQSVESGANNVVFIRTLGIEPEKLVHHILQDMYKTKKKKTRVILRMLPISGTCKAFLEDMKKYAETFLEPWFKAPNKGTFQIVYKSRNNSHVNREEVIRELAGIVCTLNSENKVDLTNPQYTVVVEIIKAVCCLSVVKDYMLFRKYNLQEVVKSPKDPSQLNSKQGNGKEAKLESADKSDQNNTAEGKNNQQVPENTEELGQTKPTSNPQVVNEGGAKPELASQATEGSKSNENDFS

SEQ ID NO: 1599 - protein, 1151 aa, Homo sapiens
MRADEIKDAIYVTMEILSNWGNSWWVGLTEVEFFDLNDTKLYVSPHDVDIRNTATPGELGRLVNRNLAGKKDSSPWTCPFHPPLQLFFVIRNTRQLGDFHLAKIKVRNYWTADGDLDIGAKNVKLYVNRNLIFNGKLDKGDREAPADHSILVDQKNEKSEQLEEAMNAHSEESKGTHEMAGASGDKELGLGCSPPAETLADAKLSSQGNVSGKRKNSTNCRKDSLSQLEEYLRLSAVPTSMGDMPSAPATSPPVKCPPVHEEPSLIQQLENLMGRKICEPPGKTPSWLQPSPTGKDRKQGGRKPKPLWLSPEKPLAWKGRLPSDDVIGEGPGETEARDKGLRHEPGWGTSRSVNTKERPQRATTKVHSDDSDIFNQPPNRERPASGRRGSRKDAGSSSHGDDQPASREDTWSSRTPSRSRWRSEQEHTLHESWSSLSAFDRSHRGRISNTELPGDILDELLQQKSSRHSDLPPSKKGEQPGLSRGQDGYSGETDAGGDFKIPVLPYGQRLVIDIKSTWGDRHYVGLNGIEIFSSKGEPVQISNIKADPPDINILPAYGKDPRVVTNLIDGVNRTQDDMHVWLAPFTRGRSHSITIDFTHPCHVALIRIWNYNKSRIHSFRGVKDITMLLDTQCIFEGEIAKASGTLAGAPEHFGDTILFTTDDDILEAIFYSDEMFDLDVGSLDSLQDEEAMRRPSTADGEGDERPFTQAGLGADERIPELELPSSSPVPQVTTPEPGIYHGICLQLNFTASWGDLHYLGLTGLEVVGKEGQALPIHLHQISASPRDLNELPEYSDDSRTLDKLIDGTNITMEDEHMWLIPFSPGLDHVVTIRLDRAESIAGLRFWNYNKSPEDTYRGAKIVHVSLDGLCVSPPEGFLIRKGPGNCHFDFAQEILFVDYLRAQLLPQPARRLDMRSLECASMDYEAPLMPCGFIFQFQLLTSWGDPYYIGLTGLELYDERGEKIPLSENNIAAFPDSVNSLEGVGGDVRTPDKLIDQVNDTSDGRHMWLAPILPGLVNRVYVIFDLPTTVSMIKLWNYAKTPHRGVKEFGLLVDDLLVYNGILAMVSHLVGGILPTCEPTVPYHTILFTEDRDIRHQEKHTTISNQAEDQDVQMMNENQTITNAKRKQSVVDPALRPKTCISEKETRRRRC

SEQ ID NO: 1600 - protein, 531 aa, Homo sapiens
MAATLDLKSKEEKDAELDKRIEALRRKNEALIRRYQEIEEDRKKAELEGVAVTAPRKGRSVEKENVAVESEKNLGPSRRSPGTPRPPGASKGGRTPPQQGGRAGMGRASRSWEGSPGEQPRGGGAGGRGRRGRGRGSPHLSGAGDTSISDRKSKEWEERRRQNIEKMNEEMEKIAEYERNQREGVLEPNPVRNFLDDPRRRSGPLEESERDRREESRRHGRNWGGPDFERVRCGLEHERQGRRAGLGSAGDMTLSMTGRERSEYLRWKQEREKIDQERLQRHRKPTGQWRREWDAEKTDGMFKDGPVPAHEPSHRYDDQAWARPPKPPTFGEFLSQHKAEASSRRRRKSSRPQAKAAPRAYSDHDDRWETKEGAASPAPETPQPTSPETSPKETPMQPPEIPAPAHRPPEDEGEENEGEEDEEWEDISEDEEEEEIEVEEGDEEEPAQDHQAPEAAPTGIPCSEQAHGVPFSPEEPLLEPQAPGTPSSPFSPPSGHQPVSDWGEEVELNSPRTTHLAGALSPGEAWPFESV

SEQ ID NO: 1601 - protein, 228 aa, Homo sapiens
MADFDTYDDRAYSSFGGGRGSRGSAGGHGSRSQKELPTEPPYTAYVGNLPFNTVQGDIDAIFKDLSIRSVRLVRDKDTDKFKGFCYVEFDEVDSLKEALTYDGALLGDRSLRVDIAEGRKQDKGGFGFRKGGPDDRGFRDDFLGGRGGSRPGDRRTGPPMGSRFRDGPPLRGSNMDFREPTEEERAQRPRLQLKPRTVATPLNQVANPNSAIFGGARPREEVVQKEQE

SEQ ID NO: 1602 - protein, 248 aa, Homo sapiens
MADFDTYDDRAYSSFGGGRGSRGSAGGHGSRSQKELPTEPPYTAYVGNLPFNTVQGDIDAIFKDLSIRSVRLVRDKDTDKFKGFCYVEFDEVDSLKEALTYDGALLGDRSLRVDIAEGRKQDKGGFGFRKGGPDDRGMGSSRESRGGWDSRDDFNSGFRDDFLGGRGGSRPGDRRTGPPMGSRFRDGPPLRGSNMDFREPTEEERAQRPRLQLKPRTVATPLNQVANPNSAIFGGARPREEVVQKEQE

SEQ ID NO: 1603 - protein, 95 aa, Homo sapiens
MFLLLWPPRCNKLAVYLDLCLIFLLLRFSLRIRFFLHLALMAQRFPKKWRYPRVRPRVRGRVGFFGNLCAMRAKWRKKRMRRLKRKRRKMRQRSK

SEQ ID NO: 1604 - protein, 349 aa, Homo sapiens
MAHQTGIHATEELKEFFAKARAGSVRLIKVVIEDEQLVLGASQEPVGRWDQDYDRAVLPLLDAQQPCYLLYRLDSQNAQGFEWLFLAWSPDNSPVRLKMLYAATRATVKKEFGGGHIKDELFGTVKDDLSFAGYQKHLSSCAAPAPLTSAERELQQIRINEVKTEISVESKHQTLQGLAFPLQPEAQRALQQLKQKMVNYIQMKLDLERETIELVHTEPTDVAQLPSRVPRDAARYHFFLYKHTHEGDPLESVVFIYSMPGYKCSIKERMLYSSCKSRLLDSVEQDFHLEIAKKIEIGDGAELTAEFLYDEVHPKQHAFKQAFAKPKGPGGKRGHKRLIRGPGENGDDS

SEQ ID NO: 1605 - protein, 596 aa, Homo sapiens
MVLLHVLFEHAVGYALLALKEVEEISLLQPQVEESVLNLGKFHSIVRLVAFCPFASSQVALENANAVSEGVVHEDLRLLLETHLPSKKKKVLLGVGDPKIGAAIQEELGYNCQTGGVIAEILRGVRLHFHNLVKGLTDLSACKAQLGLGHSYSRAKVKFNVNRVDNMIIQSISLLDQLDKDINTFSMRVREWYGYHFPELVKIINDNATYCRLAQFIGNRRELNEDKLEKLEELTMDGAKAKAILDASRSSMGMDISAIDLINIESFSSRVVSLSEYRQSLHTYLRSKMSQVAPSLSALIGEAVGARLIAHAGSLTNLAKYPASTVQILGAEKALFRALKTRGNTPKYGLIFHSTFIGRAAAKNKGRISRYLANKCSIASRIDCFSEVPTSVFGEKLREQVEERLSFYETGEIPRKNLDVMKEAMVQAEAEEAAAEITRKLEKQEKKRLKKEKKRLAALALASSENSSSTPEECEEMSEKPKKKKKQKPQEVPQENGMEDPSISFSKPKKKKSFSKEELMSSDLEETAGSTSIPKRKKSTPKEETVNDPEEAGHRSGSKKKRKFSKEEPVSSGPEEAAGKSSSKKKKKFHKASQED

SEQ ID NO: 1606 - protein, 565 aa, Homo sapiens
MPQASEHRLGRTREPPVNIQPRVGSKLPFAPRARSKERRNPASGPNPMLRPLPPRPGLPDERLKKLELGRGRTSGPRPRGPLRADHGVPLPGSPPPTVALPLPSRTNLARSKSVSSGDLRPMGIALGGHRGTGELGAALSRLALRPEPPTLRRSTSLRRLGGFPGPPTLFSIRTEPPASHGSFHMISARSSEPFYSDDKMAHHTLLLGSGHVGLRNLGNTCFLNAVLQCLSSTRPLRDFCLRRDFRQEVPGGGRAQELTEAFADVIGALWHPDSCEAVNPTRFRAVFQKYVPSFSGYSQQDAQEFLKLLMERLHLEINRRGRRAPPILANGPVPSPPRRGGALLEEPELSDDDRANLMWKRYLEREDSKIVDLFVGQLKSCLKCQACGYRSTTFEVFCDLSLPIPKKGFAGGKVSLRDCFNLFTKEEELESENAPVCDRCRQKTRSTKKLTVQRFPRILVLHLNRFSASRGSIKKSSVGVDFPLQRLSLGDFASDKAGSPVYQLYALCNHSGSVHYGHYTALCRCQTGWHVYNDSRVSPVSENQVASSEGYVLFYQLMQEPPRCL

SEQ ID NO: 1607 - protein, 751 aa, Homo sapiens [sequence omitted]

SEQ ID NO: 1608 - protein, 253 aa, Homo sapiens
MTQGTEDLKGPGQRCENEPLLDPVGPEPLGPESQSGKGDMVEMATRFGSTLQLDLEKGKESLLEKRLVAEEEEDEEEVEEDGPSSCSEDDYSELLQEITDNLTKKEIQIEKIHLDTSSFVEELPGEKDLAHVVEIYDFEPALKTEDLLATFSEFQEKGFRIQWVDDTHALGIFPCLASAAEALTREFSVLKIRPLTQGTKQSKLKALQRPKLLRLVKERPQTNATVARRLVARALGLQHKKKERPAVRGSVPP

SEQ ID NO: 1609 - protein, 622 aa, Homo sapiens
MGPLQFRDVAIEFSLEEWHCLDTAQRNLYRNVMLENYSNLVFLGIVVSKPDLIAHLEQGKKPLTMKRHEMVANPSGPVICSHFAQDLWPEQNIKDSFQKVILRRYEKRGHGNLQLIKRCESVDECKVHTGGYNGLNQCSTTTQSKVFQCDKYGKVFHKFSNSNRHNIRHTEKKPFKCIECGKAFNQFSTLITHKKIHTGEKPYICEECGKAFKYSSALNTHKRIHTGEKPYKCDKCDKAFIASSTLSKHEIIHTGKKPYKCEECGKAFNQSSTLTKHKKIHTGEKPYKCEECGKAFNQSSTLTKHKKIHTGEKPYVCEECGKAFKYSRILTTHKRIHTGEKPYKCNKCGKAFIASSTLSRHEFIHMGKKHYKCEECGKAFIWSSVLTRHKRVHTGEKPYKCEECGKAFKYSSTLSSHKRSHTGEKPYKCEECGKAFVASSTLSKHEIIHTGKKPYKCEECGKAFNQSSSLTKHKKIHTGEKPYKCEECGKAFNQSSSLTKHKKIHTGEKPYKCEECGKAFNQSSTLIKHKKIHTREKPYKCEECGKAFHLSTHLTTHKILHTGEKPYRCRECGKAFNHSATLSSHKKIHSGEKPYECDKCGKAFISPSSLSRHEIIHTGEKP

SEQ ID NO: 1610 - protein, 395 aa, Homo sapiens
MFPRVSTFLPLRPLSRHPLSSGSPETSAAAIMLLTVRHGTVRYRSSALLARTKNNIQRYFGTNSVICSKKDKQSVRTEETSKETSESQDSEKENTKKDLLGIIKGMKVELSTVNVRTTKPPKRRPLKSLEATLGRLRRATEYAPKKRIEPLSPELVAAASAVADSLPFDKQTTKSELLSQLQQHEEESRAQRDAKRPKISFSNIISDMKVARSATARVRSRPELRIQFDEGYDNYPGQEKTDDLKKRKNIFTGKRLNIFDMMAVTKEAPETDTSPSLWDVEFAKQLATVNEQPLQNGFEELIQWTKEGKLWEFPINNEAGFDDDGSEFHEHIFLEKHLESFPKQGPIRHFMELVTCGLSKNPYLSVKQKVEHIEWFRNYFNEKKDILKESNIQFN

SEQ ID NO: 1611 - protein, 386 aa, Homo sapiens
MFPRVSTFLPLRPLSRHPLSSGSPETSAAAIMLLTVRHGTVRTKNNIQRYFGTNSVICSKKDKQSVRTEETSKETSESQDSEKENTKKDLLGIIKGMKVELSTVNVRTTKPPKRRPLKSLEATLGRLRRATEYAPKKRIEPLSPELVAAASAVADSLPFDKQTTKSELLSQLQQHEEESRAQRDAKRPKISFSNIISDMKVARSATARVRSRPELRIQFDEGYDNYPGQEKTDDLKKRKNIFTGKRLNIFDMMAVTKEAPETDTSPSLWDVEFAKQLATVNEQPLQNGFEELIQWTKEGKLWEFPINNEAGFDDDGSEFHEHIFLEKHLESFPKQGPIRHFMELVTCGLSKNPYLSVKQKVEHIEWFRNYFNEKKDILKESNIQFN

SEQ ID NO: 1612 - protein, 670 aa, Homo sapiens [sequence omitted]

SEQ ID NO: 1613 - protein, 110 aa, Homo sapiens
MSHHPHSLRNSCLIRMDLLYWQFTIYTITFCFSHLSGRLTLSAQHISHRPCLLSYSLLFWKVHHLFLEGFPCSPRLDEMSFHQFPQHPVHVSVVHLPIVYKGSMTQVSPH

SEQ ID NO: 1614 - protein, 308 aa, Homo sapiens
MAGKKNVLSSLAVYAEDSEPESDGEAGIEAVGSAAEEKGGLVSDAYGEDDFSRLGGDEDGYEEEEDENSRQSEDDDSETEKPEADDPKDNTEAEKRDPQELVASFSERVRNMSPDEIKIPPEPPGRCSNHLQDKIQKLYERKIKEGMDMNYIIQRKKEFRNPSIYEKLIQFCAIDELGTNYPKDMFDPHGWSEDSYYEALAKAQKIEMDKLEKAKKERTKIEFVTGTKKGTTTNATSTTTTTASTAVADAQKRKSKWDSAIPVTTIAQPTILTTTATLPAVVTVTTSASGSKTTVISAVGTIVKKAKQ

SEQ ID NO: 1615 - protein, 366 aa, Homo sapiens
MAGKKNVLSSLAVYAEDSEPESDGEAGIEAVGSAAEEKGGLVSDAYGEDDFSRLGGDEDGYEEEEDENSRQSRRCFTMFPSLVSNFWPQAIPLPHPPKVLGLQEDDDSETEKPEADDPKDNTEAEKRDPQELVASFSERVRNMSPDEIKIPPEPPGRCSNHLQDKIQKLYERKIKEGMDMNYIIQRKKEFRNPSIYEKLIQFCAIDELGTNYPKDMFDPHGWSEDSYYEALAKAQKIEMDKLEKAKKERTKACCRDVSAAPGEPSCPSPVRAGTASSWIEFVTGTKKGTTTNATSTTTTTASTAVADAQKRKSKWDSAIPVTTIAQPTILTTTATLPAVVTVTTSASGSKTTVISAVGTIVKKAKQ

SEQ ID NO: 1616 - protein, 358 aa, Homo sapiens
MAERQEEQRGSPPLRAEGKADAEVKLILYHWTHSFSSQKVRLVIAEKALKCEEHDVSLPLSEHNEPWFMRLNSTGEVPVLIHGENIICEATQIIDYLEQTFLDERTPRLMPDKESMYYPRVQHYRELLDSLPMDAYTHGCILHPELTVDSMIPAYATTRIRSQIGNTESELKKLAEENPDLQEAYIAKQKRLKSKLLDHDNVKYLKKILDELEKVLDQVETELQRRNEETPEEGQQPWLCGESFTLADVSLAVTLHRLKFLGFARRNWGNGKRPNLETYYERVLKRKTFNKVLGHVNNILISAVLPTAFRVAKKRAPKVLGTTLVVGLLAGVGYFAFMLFRKRLGSMILALRPRPNYF

SEQ ID NO: 1617 - protein, 574 aa, Homo sapiens
MCPRAARAPATLLLALGAVLWPAAGAWELTILHTNDVHSRLEQTSEDSSKCVNASRCMGGVARLFTKVQQIRRAEPNVLLLDAGDQYQGTIWFTVYKGAEVAHFMNALRYDAMALGNHEFDNGVEGLIEPLLKEAKFPILSANIKAKGPLASQISGLYLPYKVLPVGDEVVGIVGYTSKETPFLSNPGTNLVFEDEITALQPEVDKLKTLNVNKIIALGHSGFEMDKLIAQKVRGVDVVVGGHSNTFLYTGNPPSKEVPAGKYPFIVTSDDGRKVPVVQAYAFGKYLGYLKIEFDERGNVISSHGNPILLNSSIPEDPSIKADINKWRIKLDNYSTQELGKTIVYLDGSSQSCRFRECNMGNLICDAMINNNLRHTDEMFWNHVSMCILNGGGIRSPIDERNNGTITWENLAAVLPFGGTFDLVQLKGSTLKKAFEHSVHRYGQSTGEFLQVGGIHVVYDLSRKPGDRVVKLDVLCTKCRVPSYDPLKMDEVYKVILPNFLANGGDGFQMIKDELLRHDSGDQDINVVSTYISKMKVIYPAVEGRIKFSTGSHCHGSFSLIFLSLWAVIFVLYQ

SEQ ID NO: 1618 - protein, 379 aa, Homo sapiens
MTSVAARSHMWPCSGKTGEQEGSLSTLFSRLYAFVMSVISDDRFEDLEEANPFSFREFLKTKNLGLSKEDPASRIYAKEASRHSLGLDHNSPPSQTGGYGLEYQQPFFEDPTGAGDLLDEEEDEDTGWSGAYLPSAIEQTHPERVPAGTSPCSTYLSFFSTPSELAGPESLPSWALSDTDSRVSPASPAGSPSADFAVHGESLGDRHLRTLQISYDALKDENSKLRRKLNEVQSFSEAQTEMVRTLERKLEAKMIKEESDYHDLESVVQQVEQNLELMTKRAVKAENHVVKLKQEISLLQAQVSNFQRENEALRCGQGASLTVVKQNADVALQNLRVVMNSAQASIKQLVSGAETLNLVAEILKSIDRISEVKDEEEDS

SEQ ID NO: 1619 - protein, 475 aa, Homo sapiens
MAAPRPPPARLSGVMVPAPIQDLEALRALTALFKEQRNRETAPRTIFQRVLDILKKSSHAVELACRDPSQVENLASSLQLITECFRCLRNACIECSVNQNSIRNLDTIGVAVDLILLFRELRVEQESLLTAFRCGLQFLGNIASRNEDSQSIVWVHAFPELFLSCLNHPDKKIVAYSSMILFTSLNHERMKELEENLNIAIDVIDAYQKHPESEWPFLIITDLFLKSPELVQAMFPKLNNQERVTLLDLMIAKITSDEPLTKDDIPVFLRHAELIASTFVDQCKTVLKLASEEPPDDEEALATIRLLDVLCEMTVNTELLGYLQVFPGLLERVIDLLRVIHVAGKETTNIFSNCGCVRAEGDISNVANGFKSHLIRLIGNLCYKNKDNQDKVNELDGIPLILDNCNISDSNPFLTQWVIYAIRNLTEDNSQNQDLIAKMEEQGLADASLLKKVGFEVEKKGEKLILKSTRDTPKP

SEQ ID NO: 1620 - protein, 461 aa, Homo sapiens
MEDLDALLSDLETTTSHMPRSGAPKERPAEPLTPPPSYGHQPQTGSGESSGASGDKDHLYSTVCKPRSPKPAAPAAPPFSSSSGVLGTGLCELDRLLQELNATQFNITDEIMSQFPSSKVASGEQKEDQSEDKKRPSLPSSPSPGLPKASATSATLELDRLMASLSDFRVQNHLPASGPTQPPVVSSTNEGSPSPPEPTGKGSLDTMLGLLQSDLSRRGVPTQAKGLCGSCNKPIAGQVVTALGRAWHPEHFVCGGCSTALGGSSFFEKDGAPFCPECYFERFSPRCGFCNQPIRHKMVTALGTHWHPEHFCCVSCGEPFGDEGFHEREGRPYCRRDFLQLFAPRCQGCQGPILDNYISALSALWHPDCFVCRECFAPFSGGSFFEHEGRPLCENHFHARRGSLCATCGLPVTGRCVSALGRRFHPDHFTCTFCLRPLTKGSFQERAGKPYCQPCFLKLFG

SEQ ID NO: 1621 - protein, 2161 aa, Homo sapiens
MEMPRKPRLTLFVQRRIENIATEREFDPEEFYYLLEAAEGHAKEGQGIKTDIPRYIISQLGLNKDPLEEMAHLGNYDSGTAETPETDESVSSSNASLKLRRKPRESDFETIKLISNGAYGAVYFVRHKESRQRFAMKKINKQNLILRNQIQQAFVERDILTFAENPFVVSMYCSFETRRHLCMVMEYVEGGDCATLMKNMGPLPVDMARMYFAETVLALEYLHNYGIVHRDLKPDNLLVTSMGHIKLTDFGLSKVGLMSMTTNLYEGHIEKDAREFLDKQVCGTPEYIAPEVILRQGYGKPVDWWAMGIILYEFLVGCVPFFGDTPEELFGQVISDEINWPEKDEAPPPDAQDLITLLLRQNPLERLGTGGAYEVKQHRFFRSLDWNSLLRQKAEFIPQLESEDDTSYFDTRSEKYHHMETEEEDDTNDEDFNVEIRQFSSCSHRFSKVFSSIDRITQNSAEEKEDSVDKTKSTTLPSTETLSWSSEYSEMQQLSTSNSSDTESNRHKLSSGLLPKLAISTEGEQDEAASCPGDPHEEPGKPALPPEECAQEEPEVTTPASTISSSTLSVGSFSEHLDQINGRSECVDSTDNSSKPSSEPASHMARQRLESTEKKKISGKVTKSLSASALSLMIPGDMFAVSPLGSPMSPHSLSSDPSSSRDSSPSRDSSAASASPHQPIVIHSSGKNYGFTIRAIRVYVGDSDIYTVHHIVWNVEEGSPACQAGLKAGDLITHINGEPVHGLVHTEVIELLLKSGNKVSITTTPFENTSIKTGPARRNSYKSRMVRRSKKSKKKESLERRRSLFKKLAKQPSPLLHTSRSFSCLNRSLSSGESLPGSPTHSLSPRSPTPSYRSTPDFPSGTNSSQSSSPSSSAPNSPAGSGHIRPSTLHGLAPKLGGQRYRSGRRKSAGNIPLSPLARTPSPTPQPTSPQRSPSPLLGHSLGNSKIAQAFPSKMHSPPTIVRHIVRPKSAEPPRSPLLKRVQSEEKLSPSYGSDKKHLCSRKHSLEVTQEEVQREQSQREAPLQSLDENVCDVPPLSRARPVEQGCLKRPVSRKVGRQESVDDLDRDKLKAKVVVKKADGFPEKQESHQKSHGPGSDLENFALFKLEEREKKVYPKAVERSSTFENKASMQEAPPLGSLLKDALHKQASVRASEGAMSDGPVPAEHRQGGGDFRRAPAPGTLQDGLCHSLDRGISGKGEGTEKSSQAKELLRCEKLDSKLANIDYLRKKMSLEDKEDNLCPVLKPKMTAGSHECLPGNPVRPTGGQQEPPPASESRAFVSSTHAAQMSAVSFVPLKALTGRVDSGTEKPGLVAPESPVRKSPSEYKLEGRSVSCLEPIEGTLDIALLSGPQASKTELPSPESAQSPSPSGDVRASVPPVLPSSSGKKNDTTSARELSPSSLKMNKSYLLEPWFLPPSRGLQNSPAVSLPDPEFKRDRKGPHPTARSPGTVMESNPQQREGSSPKHQDHTTDPKLLTCLGQNLHSPDLARPRCPLPPEASPSREKPGLRESSERGPPTARSERSAARADTCREPSMELCFPETAKTSDNSKNLLSVGRTHPDFYTQTQAMEKAWAPGGKTNHKDGPGEARPPPRDNSSLHSAGIPCEKELGKVRRGVEPKPEALLARRSLQPPGIESEKSEKLSSFPSLQKDGAKEPERKEQPLQRHPSSIPPPPLTAKDLSSPAARQHCSSPSHASGREPGAKPSTAEPSSSPQDPPKPVAAHSESSSHKPRPGPDPGPPKTKHPDRSLSSQKPSVGATKGKEPATQSLGGSSREGKGHSKSGPDVFPATPGSQNKASDGIGQGEGGPSVPLHTDRAPLDAKPQPTSGGRPLEVLEKPVHLPRPGHPGPSEPADQKLSAVGEKQTLSPKHPKPSTVKDCPTLCKQTDNRQTDKSPSQPAANTDRRAEGKKCTEALYAPAEGDKLEAGLSFVHSENRLKGAERPAAGVGKGFPEARGKGPGPQKPPTEADKPNGMKRSPSATGQSSFRSTALPEKSLSCSSSFPETRAGVREASAASSDTSSAKAAGGMLELPAPSNRDHRKAQPAGEGRTHMTKSDSLPSFRVSTLPLESHHPDPNTMGGASHRDRALSVTATVGETKGKDPAPAQPPPARKQNVGRDVTKPSPAPNTDRPISLSNEKDFVVRQRRGKESLRSSPHKKAL

SEQ ID NO: 1622 - protein, 623 aa, Homo sapiens
MPASFPLSRNAGTRGGNPAPSPPLRSPGKGRLASPILPQRSGNIPEAPRRYDPGVRIGLGGAAALLSAFRCHATASPSHPSLSTSGRDCRVMRYSVGDGRTGDGDNRNHIHDGDHGRGEEPIAPPLAPRTRKPPLRPGDRAPVCRWAGLRNHAQNKAKLISETRRRFEAEYVTDKSDKYDARDVERLQQDDNWVESYLSWRHNIVDETLKMLDESFQWRKEISVNVWIRVKYHVKDQKTILDKKKLIAFWLERYAKRENGKPVTVMFDLSETGINSIDMDFVRFIINCFKVYYPKYLSAFKIVKTWLGPEAVSLLKFTSKNEVQDYVSVEYLPPHMGGTDPFKYSYPPLVDDDFQTPLCENGPITSEDETSSKEDIESDGKETLETISNEEQTPLLKKINPTESTSKAEENEKVDSKVKAFKKPLSVFKGPLLHISPAEELYFGSTESGEKKTLIVLTNVTKNIVAFKVRTTAPEKYRVKPSNSSCDPGASVDIVVSPHGGLTVSAQDRFLIMAAEMEQSSGTGPAELTQFWKEVPRNKVMEHRLRCHTVESSKPNTLTLKDNAFNMSDKTSEDICLQLSRLLESNRKLEDQVQRCIWFQQLLLSLTMLLLAFVTSFFYLLYS

SEQ ID NO: 1623 - protein, 119 aa, Homo sapiens
MQKLQTRSPAMSLSDPGLGYHPTCWTLRWPPLCSLHALHVFHCLFSSRLGTPVSPRLAMDPNCSCEAGGSCACAGSCKCKKCKCTSCKKSCCSCCPLGCAKCAQGCICKGASEKCSCCA

SEQ ID NO: 1624 - protein, 239 aa, Homo sapiens
MMRKMLLAAALSVTAMTAHADYQCSVTPRDDVIVSPQTVQVKGENGNLVITPDGNVMYNGKQYSLNAAQREQAKDYQAELRSTLPWIDEGAKSRVEKARIALDKIIVQEMGESSKMRSRLTKLDAQLKEQMNRIIETRSDGLTFHYKAIDQVRAEGQQLVNQAMGGILQDSINEMGAKAVLKSGGNPLQNVLGSLGGLQSSIQTEWKKQEKDFQQFGKDVCSRVVTLEDSRKALVGNLK

SEQ ID NO: 1625 - protein, 644 aa, Homo sapiens
MLENYGNVASLGFPLLKPAVISQLEGGSELGGSSPLAAGTGLQGLQTVDIQTDNDLTKEMYEGKENVSFELQRDFSQETDFSEASLLEKQQEVHSAGNIKKEKSNTIDGTVKDETSPVEECFFSQSSNSYQCHTITGEQPSGCTGLGKSISFDTKLVKHEIINSEERPFKCEELVEPFRCDSQLIQHQENNTEEKPYQCSECGKAFSINEKLIWHQRLHSGEKPFKCVECGKSFSYSSHYITHQTIHSGEKPYQCKMCGKAFSVNGSLSRHQRIHTGEKPYQCKECGNGFSCSSAYITHQRVHTGEKPYECNDCGKAFNVNAKLIQHQRIHTGEKPYECNECGKGFRCSSQLRQHQSIHTGEKPYQCKECGKGFNNNTKLIQHQRIHTGEKPYECTECGKAFSVKGKLIQHQRIHTGEKPYECNECGKAFRCNSQFRQHLRIHTGEKPYECNECGKAFSVNGKLMRHQRIHTGEKPFECNECGRCFTSKRNLLDHHRIHTGEKPYQCKECGKAFSINAKLTRHQRIHTGEKPFKCMECEKAFSCSSNYIVHQRIHTGEKPFQCKECGKAFHVNAHLIRHQRSHTGEKPFRCVECGKGFSFSSDYIIHQTVHTWKKPYMCSVCGKAFRFSFQLSQHQSVHSEGKS

SEQ ID NO: 1626 - protein, 99 aa, Homo sapiens
MHAYVSLDPLERPPTTTKFAAASDRRRAAIMDTSRVQPIKLARVTKVLGRTGSQGQCTQVRVEFMDDTSRSIIRNVKGPVREGDVLTLLESEREARRLR

SEQ ID NO: 1627 - protein, 293 aa, Homo sapiens [sequence omitted]

SEQ ID NO: 1628 - protein, 1053 aa, Homo sapiens
MFGRSRSWVGGGHGKTSRNIHSLDHLKYLYHVLTKNTTVTEQNRNLLVETIRSITEILIWGDQNDSSVFDFFLEKNMFVFFLNILRQKSGRYVCVQLLQTLNILFENISHETSLYYLLSNNYVNSIIVHKFDFSDEEIMAYYISFLKTLSLKLNNHTVHFFYNEHTNDFALYTEAIKFFNHPESMVRIAVRTITLNVYKVSLDNQAMLHYIRDKTAVPYFSNLVWFIGSHVIELDDCVQTDEEHRNRGKLSDLVAEHLDHLHYLNDILIINCEFLNDVLTDHLLNRLFLPLYVYSLENQDKGGERPKISLPVSLYLLSQVFLIIHHAPLVNSLAEVILNGDLSEMYAKTEQDIQRSSAKPSIRCFIKPTETLERSLEMNKHKGKRRVQKRPNYKNVGEEEDEEKGPTEDAQEDAEKAKGTEGGSKGIKTSGESEEIEMVIMERSKLSELAASTSVQEQNTTDEEKSAAATCSESTQWSRPFLDMVYHALDSPDDDYHALFVLCLLYAMSHNKGMDPEKLERIQLPVPNAAEKTTYNHPLAERLIRIMNNAAQPDGKIRLATLELSCLLLKQQVLMSAGCIMKDVHLACLEGAREESVHLVRHFYKGEDIFLDMFEDEYRSMTMKPMNVEYLMMDASILLPPTGTPLTGIDFVKRLPCGDVEKTRRAIRVFFMLRSLSLQLRGEPETQLPLTREEDLIKTDDVLDLNNSDLIACTVITKDGGMVQRFLAVDIYQMSLVEPDVSRLGWGVVKFAGLLQDMQVTGVEDDSRALNITIHKPASSPHSKPFPILQATFIFSDHIRCIIAKQRLAKGRIQARRMKMQRIAALLDLPIQPTTEVLGFGLGSSTSTQHLPFRFYDQGRRGSSDPTVQRSVFASVDKVPGFAVAQCINQHSSPSLSSQSPPSASGSPSGSGSTSHCDSGGTSSSSTPSTAQSPADAPMSPELPKPHLPDQLVIVNETEADSKPSKNVARSAAVETASLSPSLVPARQPTISLLCEDTADTLSVESLTLVPPVDPHSLRSLTGMPPLSTPAAACTEPVGEEAACAEPVGTAED

SEQ ID NO: 1629 - protein, 39 aa, Homo sapiens
MHECNVHTYASLFCLFLLHTGKLCCLNSHRHFHCIKYSK

SEQ ID NO: 1630 - protein, 226 aa, Homo sapiens
MATAMYLEHYLDSIENLPCELQRNFQLMRELDQRTEDKKAEIDILAAEYISTVKTLSPDQRVERLQKIQNAYSKCKEYSDDKVQLAMQTYEMVDKHIRRLDADLARFEADLKDKMEGSDFESSGGRGLKKGLRQKEKRGSRGRGRRTSEEDTPKKKKHKGGSEFTDTILSVHPSDVLDMPVDPNEPTYCLCHQVSYGEMIGCDNPDCPIEWFHFACVDLTTKPKGK

SEQ ID NO: 1631 - protein, 1279 aa, Homo sapiens
MPAVRVWDVAEHSQVAELQEHKYGVACVAFSPSAKYIVSVGYQHDMIVNVWAWKKNIVVASNKVSSRVTAVSFSEDCSYFVTAGNRHIKFWYLDDSKTSKVNATVPLLGRSGLLGELRNNLFTDVACGRGKKADSTFCITSSGLLCEFSDRRLLDKWVELRVYPEVKDSNQACLPPSSFITCSSDNTIRLWNTESSGVHGSTLHRNILSSDLIKIIYVDGNTQALLDTELPGGDKADASLLDPRVGIRSVCVSPNGQHLASGDRMGTLRVHELQSLSEMLKVEAHDSEILCLEYSKPDTGLKLLASASRDRLIHVLDAGREYSLQQTLDEHSSSITAVKFAASDGQVRMISCGADKSIYFRTAQKSGDGVQFTRTHHVVRKTTLYDMDVEPSWKYTAIGCQDRNIRIFNISSGKQKKLFKGSQGEDGTLIKVQTDPSGIYIATSCSDKNLSIFDFSSGECVATMFGHSEIVTGMKFSNDCKHLISVSGDSCIFVWRLSSEMTISMRQRLAELRQRQRGGKQQGPSSPQRASGPNRHQAPSMLSPGPALSSDSDKEGEDEGTEEELPALPVLAKSTKKALASVPSPALPRSLSHWEMSRAQESVGFLDPAPAANPGPRRRGRWVQPGVELSVRSMLDLRQLETLAPSLQDPSQDSLAIIPSGPRKHGQEALETSLTSQNEKPPRPQASQPCSYPHIIRLLSQEEGVFAQDLEPAPIEDGIVYPEPSDNPTMDTSEFQVQAPARGTLGRVYPGSRSSEKHSPDSACSVDYSSSCLSSPEHPTEDSESTEPLSVDGISSDLEEPAEGDEEEEEEEGGMGPYGLQEGSPQTPDQEQFLKQHFETLASGAAPGAPVQVPERSESRSISSRFLLQVQTRPLREPSPSSSSLALMSRPAQVPQASGEQPRGNGANPPGAPPEVEPSSGNPSPQQAASVLLPRCRLNPDSSWAPKRVATASPFSGLQKAQSVHSLVPQERHEASLQAPSPGALLSREIEAQDGLGSLPPADGPPSRPHSYQNPTTSSMAKISRSISVGENLGLVAEPQAHAPIRVSPLSKLALPSRAHLVLDIPKPLPDRPTLAAFSPVTKGRAPGEAEKPGFPVGLGKAHSTTERWACLGEGTTPKPRTECQAHPGPSSPCAQQLPVSSLFQGPENLQPPPPEKTPNPMECTKPGAALSQDSEPAVSLEQCEQLVAELRGSVRQAVRLYHSVAGCKMPSAEQSRIAQLLRDTFSSVRQELEAVAGAVLSSPGSSPGAVGAEQTQALLEQYSELLLRAVERRMERKL

SEQ ID NO: 1632 - protein, 223 aa, Homo sapiens
MQFSFQQGGWGASLADRLVRKCDVLNRGFSGYNTRWAKIILPRLIRKGNSLDIPVAVTIFFGANDSALKDENPKQHIPLEEYAANLKSMVQYLKSVDIPENRVILITPTPLCETAWEEQCIIQGCKLNRLNSVVGEYANACLQVAQDCGTDVLDLWTLMQDSQDFSSYLSDGLHLSPKGNEFLFSHLWPLIEKKVSSLPLLLPYWRDVAEAKPELSLLGDGDH

SEQ ID NO: 1633 - protein, 44 aa, Homo sapiens
MNRAARNKSEKRYYSEFLQIAHLFNYGLSSFLREFIIFLIKLLQ

SEQ ID NO: 1634 - protein, 209 aa, Homo sapiens
MAAPRQIPSHIVRLKPSCSTDSSFTRTPVPTVSLASRELPVSSWQVTEPSSKNLWEQICKEYEAEQPPFPEGYKVKQEPVITVAPVEEMLFHGFSAEHYFPVSHFTMISRTPCPQDKSETINPKTCSPKEYLETFIFPVLLPGMASLLHQAKKEKCFEVRCDPEIQELRQWQKKLREAKHIHQQVKIFWAKQEQKVKCKMEDDQYLQPR

SEQ ID NO: 1635 - protein, 82 aa, Homo sapiens
MDSFGQPRPEDNQSVVRRMQKKYWKTKQVFIKATGKKEDEHLVASDAELDAKLEVFHSVQETCTELLKIIEKYQLRLNGMKS

SEQ ID NO: 1636 - protein, 779 aa, Homo sapiens
MAANGDSPPWSPALAAEGRGSSCEASVSFEDVTVDFSKEEWQHLDPAQRRLYWDVTLENYSHLLSVGYQIPKSEAAFKLEQGEGPWMLEGEAPHQSCSGEAIGKMQQQGIPGGIFFHCERFDQPIGEDSLCSILEELWQDNDQLEQRQENQNNLLSHVKVLIKERGYEHKNIEKIIHVTTKLVPSIKRLHNCDTILKHTLNSHNHNRNSATKNLGKIFGNGNNFPHSPSSTKNENAKTGANSCEHDHYEKHLSHKQAPTHHQKIHPEEKLYVCTECVMGFTQKSHLFEHQRIHAGEKSRECDKSNKVFPQKPQVDVHPSVYTGEKPYLCTQCGKVFTLKSNLITHQKIHTGQKPYKCSECGKAFFQRSDLFRHLRIHTGEKPYECSECGKGFSQNSDLSIHQKTHTGEKHYECNECGKAFTRKSALRMHQRIHTGEKPYVCADCGKAFIQKSHFNTHQRIHTGEKPYECSDCGKSFTKKSQLHVHQRIHTGEKPYICTECGKVFTHRTNLTTHQKTHTGEKPYMCAECGKAFTDQSNLIKHQKTHTGEKPYKCNGCGKAFIWKSRLKIHQKSHIGERHYECKDCGKAFIQKSTLSVHQRIHTGEKPYVCPECGKAFIQKSHFIAHHRIHTGEKPYECSDCGKCFTKKSQLRVHQKIHTGEKPNICAECGKAFTDRSNLITHQKIHTREKPYECGDCGKTFTWKSRLNIHQKSHTGERHYECSKCGKAFIQKATLSMHQIIHTGKKPYACTECQKAFTDRSNLIKHQKMHSGEKRYKASD

SEQ ID NO: 1637 - protein, 103 aa, Homo sapiens [sequence omitted]

SEQ ID NO: 1638 - protein, 594 aa, Homo sapiens
MAAAVLRDSTSVPVTAEAKLMGFTQGCVTFEDVAIYFSQEEWGLLDEAQRLLYRDVMLENFALITALVCWHGMEDEETPEQSVSVEGVPQVRTPEASPSTQKIQSCDMCVPFLTDILHLTDLPGQELYLTGACAVFHQDQKHHSAEKPLESDMDKASFVQCCLFHESGMPFTSSEVGKDFLAPLGILQPQAIANYEKPNKISKCEEAFHVGISHYKWSQCRRESSHKHTFFHPRVCTGKRLYESSKCGKACCCECSLVQLQRVHPGERPYECSECGKSFSQTSHLNDHRRIHTGERPYVCGQCGKSFSQRATLIKHHRVHTGERPYECGECGKSFSQSSNLIEHCRIHTGERPYECDECGKAFGSKSTLVRHQRTHTGEKPYECGECGKLFRQSFSLVVHQRIHTTARPYECGQCGKSFSLKCGLIQHQLIHSGARPFECDECGKSFSQRTTLNKHHKVHTAERPYVCGECGKAFMFKSKLVRHQRTHTGERPFECSECGKFFRQSYTLVEHQKIHTGLRPYDCGQCGKSFIQKSSLIQHQVVHTGERPYECGKCGKSFTQHSGLILHRKSHTVERPRDSSKCGKPYSPRSNIV

SEQ ID NO: 1639 - protein, 212 aa, Homo sapiens
MAGPGPGPGDPDEQYDFLFKLVLVGDASVGKTCVVQRFKTGAFSERQGSTIGVDFTMKTLEIQGKRVKLQIWDTAGQERFRTITQSYYRSANGAILAYDITKRSSFLSVPHWIEDVRKYAGSNIVQLLIGNKSDLSELREVSLAEAQSLAEHYDILCAIETSAKDSSNVEEAFLRVATELIMRHGGPLFSEKSPDHIQLNSKDIGEGWGCGC

SEQ ID NO: 1640 - protein, 40 aa, Homo sapiens
MHTTASNGRMLFMKVTMYMRRGVQIMGWSVRMAFMACFTQ

SEQ ID NO: 1641 - protein, 250 aa, Homo sapiens
MAWQVSLLELEDRLQCPICLEVFKESLMLQCGHSYCKGCLVSLSYHLDTKVRCPMCWQVVDGSSSLPNVSLAWVIEALRLPGDPEPKVCVHHRNPLSLFCEKDQELICGLCGLLGSHQHHPVTPVSTVCSRMKEELAALFSELKQEQKKVDELIAKLVKNRTRIVNESDVFSWVIRREFQELRHPVDEEQARCLEGIGGHTRGLVASLDMQLEQAQGTRERLAQAECVLEQFGNEDHHEFIWKFHSMASR

SEQ ID NO: 1642 - protein, 305 aa, Homo sapiens
MAPLDLDKYVEIARLCKYLPENDLKRLCDYVCDLLLEESNVQPVSTPVTVCGDIHGQFYDLCELFRTGGQVPDTNYIFMGDFVDRGYYSLETFTYLLALKAKWPDRITLLRGNHESRQITQVYGFYDECQTKYGNANAWRYCTKVFDMLTVAALIDEQILCVHGGLSPDIKTLDQIRTIERNQEIPHKGAFCDLVWSDPEDVDTWAISPRGAGWLFGAKVTNEFVHINNLKLICRAHQLVHEGYKFMFDEKLVTVWSAPNYCYRCGNIASIMVFKDVNTREPKLFRAVPDSERVIPPRTTTPYFL

SEQ ID NO: 1643 - protein, 527 aa, Homo sapiens
MTAELREAMALAPWGPVKVKKEEEEEENFPGQASSQQVHSENIKVWAPVQGLQTGLDGSEEEEKGQNISWDMAVVLKATQEAPAASTLGSYSLPGTLAKSEILETHGTMNFLGAETKNLQLLVPKTEICEEAEKPLIISERIQKADPQGPELGEACEKGNMLKRQRIKREKKDFRQVIVNDCHLPESFKEEENQKCKKSGGKYSLNSGAVKNPKTQLGQKPFTCSVCGKGFSQSANLVVHQRIHTGEKPFECHECGKAFIQSANLVVHQRIHTGQKPYVCSKCGKAFTQSSNLTVHQKIHSLEKTFKCNECEKAFSYSSQLARHQKVHITEKCYECNECGKTFTRSSNLIVHQRIHTGEKPFACNDCGKAFTQSANLIVHQRSHTGEKPYECKECGKAFSCFSHLIVHQRIHTAEKPYDCSECGKAFSQLSCLIVHQRIHSGDLPYVCNECGKAFTCSSYLLIHQRIHNGEKPYTCNECGKAFRQRSSLTVHQRTHTGEKPYECEKCGAAFISNSHLMRHHRTHLVE

SEQ ID NO: 1644 - protein, 640 aa, Homo sapiens
MAEAALVNTPQIPMVTEEFVKPSQGHVTFEDIAVYFSQEEWGLLDEAQRCLYHDVMLENFSLMASVGCLHGIEAEEAPSEQTLSAQGVSQARTPKLGPSIPNAHSCEMCILVMKDILYLSEHQGTLPWQKPYTSVASGKWFSFGSNLQQHQNQDSGEKHIRKEESSALLLNSCKIPLSDNLFPCKDVEKDFPTILGLLQHQTTHSRQEYAHRSRETFQQRRYKCEQVFNEKVHVTEHQRVHTGEKAYKRREYGKSLNSKYLFVEHQRTHNAEKPYVCNICGKSFLHKQTLVGHQQRIHTRERSYVCIECGKSLSSKYSLVEHQRTHNGEKPYVCNVCGKSFRHKQTFVGHQQRIHTGERPYVCMECGKSFIHSYDRIRHQRVHTGEGAYQCSECGKSFIYKQSLLDHHRIHTGERPYECKECGKAFIHKKRLLEHQRIHTGEKPYVCIICGKSFIRSSDYMRHQRIHTGERAYECSDCGKAFISKQTLLKHHKIHTRERPYECSECGKGFYLEVKLLQHQRIHTREQLCECNECGKVFSHQKRLLEHQKVHTGEKPCECSECGKCFRHRTSLIQHQKVHSGERPYNCTACEKAFIYKNKLVEHQRIHTGEKPYECGKCGKAFNKRYSLVRHQKVHITEEP

SEQ ID NO: 1645 - protein, 821 aa, Homo sapiens
MKSNQERSNECLPPKKREIPATSRSSEEKAPTLPSDNHRVEGTAWLPGNPGGRGHGGGRHGPAGTSVELGLQQGIGLHKALSTGLDYSPPSAPRSVPVATTLPAAYATPQPGTPVSPVQYAHLPHTFQFIGSSQYSGTYASFIPSQLIPPTANPVTSAVASAAGATTPSQRSQLEAYSTLLANMGSLSQTPGHKAEQQQQQQQQQQQQQQQQQQHQQQQQQQQQQQQQQQQHLSRAPGLITPGSPPPAQQNQYVHISSSPQNTGRTASPPAIPVHLHPHQTMIPHTLTLGPPSQVVMQYADSGSHFVPREATKKAESSRLQQAIQAKEVLNGEMEKSRRYGAPSSADLGLGKAGGKSVPHPYESRHVVVHPSPSDYSSRDPSGVRASVMVLPNSNTPAADLEVQQATHREASPSTLNDKSGLHLGKPGHRSYALSPHTVIQTTHSASEPLPVGLPATAFYAGTQPPVIGYLSGQQQAITYAGSLPQHLVIPGTQPLLIPVGSTDMEASGAAPAIVTSSPQFAAVPHTFVTTALPKSENFNPEALVTQAAYPAMVQAQIHLPVVQSVASPAAAPPTLPPYFMKGSIIQLANGELKKVEDLKTEDFIQSAEISNDLKIDSSTVERIEDSHSPGVAVIQFAVGEHRAQVSVEVLVEYPFFVFGQGWSSCCPERTSQLFDLPCSKLSVGDVCISLTLKNLKNGSVKKGQPVDPASVLLKHSKADGLAGSRHRYAEQENGINQGSAQMLSENGELKFPEKMGLSAAPFLTKIEPSKPAATRKRRWSAPESRKLEKSEDEPPLTLPKPSLIPQEVKICIEGRSNVGK

SEQ ID NO: 1646 - protein, 223 aa, Homo sapiens
MTPLDLKFQYEETRSQQGSVGERCSAKWALRQRICAEAFRACKCCEPRGSRARFGCWRLQPEFKPKQLEGTMANCERTFIAIKPDGVQRGLVGEIIKRFEQKGFRLVGLKFMQASEDLLKEHYVDLKDRPFFAGLVKYMHSGPVVAMVWEGLNVVKTGRVMLGETNPADSKPGTIRGDFCIQVGRNIIHGSDSVESAEKEIGLWFRPEELVDYTSCAQNWIYE

SEQ ID NO: 1647 - protein, 484 aa, Homo sapiens
MLNKKTKQIQDMAEEKGTQAGEIHDLKDMLDVKERKVNVLQKKIENLQEQLRDKEKQMSSLKERVKSLQADTTNTDTALTTLEEALAEKERTIERLKEQRDRDEREKQEEIDNYKKDLKDLKEKVSLLQGDLSEKEASLLDLKEHASSLASSGLKKDSRLKTLEIALEQKKEECLKMESQLKKAHEAALEARASPEMSDRIQHLEREITRYKDESSKAQAEVDRLLEILKEVENEKNDKDKKIAELESLTSRQVKDQNKKVANLKHKEQVEKKKSAQMLEEARRREDNLNDSSQQLQDSLRKKDDRIEELEEALRESVQITAEREMVLAQEESARTNAEKQVEELLMAMEKVKQELESMKAKLSSTQQSLAEKETHLTNLRAERRKHLEEVLEMKQEALLAAISEKDANIALLELSSSKKKTQEEVAALKREKDRLVQQLKQQTQNRMKLMADNYEDDHFKSSHSNQTNHKPSPDQDEEEGIWA

SEQ ID NO: 1648 - protein, 427 aa, Homo sapiens
MGTPKPRILPWLVSQLDLGQLEGVAWVNKSRTRFRIPWKHGLRQDAQQEDFGIFQAWAEATGAYVPGRDKPDLPTWKRNFRSALNRKEGLRLAEDRSKDPHDPHKIYEFVNSGVGDFSQPDTSPDTNGGGSTSDTQEDILDELLGNMVLAPLPDPGPPSLAVAPEPCPQPLRSPSLDNPTPFPNLGPSENPLKRLLVPGEEWEFEVTAFYRGRQVFQQTISCPEGLRLVGSEVGDRTLPGWPVTLPDPGMSLTDRGVMSYVRHVLSCLGGGLALWRAGQWLWAQRLGHCHTYWAVSEELLPNSGHGPDGEVPKDKEGGVFDLGPFIVDLITFTEGSGRSPRYALWFCVGESWPQDQPWTKRLVMVKVVPTCLRALVEMARVGGASSLENTVDLHISNSHPLSLTSDQYKAYLQDLVEGMDFQGPGES

SEQ ID NO: 1649 - protein, 176 aa, Homo sapiens
MARVLKAAAANAVGLFSRLQAPIPTVRASSTSQPLDQVTGSVWNLGRLNHVAIAVPDLEKAAAFYKNILGAQVSEAVPLPEHGVSVVFVNLGNTKMELLHPLGRDSPIAGFLQKNKAGGMHHICIEVDNINAAVMDLKKKKIRSLSEEVKIGAHGKPVIFLHPKDCGGVLVELEQA

SEQ ID NO: 1650 - protein, 2188 aa, Homo sapiens
MADVTARSLQYEYKANSNLVLQADRSLIDRTRRDEPTGEVLSLVGKLEGTRMGDKAQRTKPQMQEERRAKRRKRDEDRHDINKMKGYTLLSEGIDEMVGIIYKPKTKETRETYEVLLSFIQAALGDQPRDILCGAADEVLAVLKNEKLRDKERRKEIDLLLGQTDDTRYHVLVNLGKKITDYGGDKEIQNMDDNIDETYGVNVQFESDEEEGDEDVYGEVREEASDDDMEGDEAVVRCTLSANMYVDEILVWCASELNIPEFFPLESPHKKVGYGLSSRTWLQGGGKVIEAGRDLLVASGELMSSKKKDLHPRDIDAFWLQRQLSRFYDDAIVSQKKADEVLEILKTASDDRECENQLVLLLGFNTFDFIKVLRQHRMMILYCTLLASAQSEAEKERIMGKMEADPELSKFLYQLHETEKEDLIREERSRRERVRQSRMDTDLETMDLDQGGEALAPRQVLDLEDLVFTQGSHFMANKRCQLPDGSFRRQRKGYEEVHVPALKPKPFGSEEQLLPVEKLPKYAQAGFEGFKTLNRIQSKLYRAALETDENLLLCAPTGAGKTNVALMCMLREIGKHINMDGTINVDDFKIIYIAPMRSLVQEMVGSFGKRLATYGITVAELTGDHQLCKEEISATQIIVCTPEKWDIITRKGGERTYTQLVRLIILDEIHLLHDDRGPVLEALVARAIRNIEMTQEDVRLIGLSATLPNYEDVATFLRVDPAKGLFYFDNSFRPVPLEQTYVGITEKKAIKRFQIMNEIVYEKIMEHAGKNQVLVFVHSRKETGKTARAIRDMCLEKDTLGLFLREGSASTEVLRTEAEQCKNLELKDLLPYGFAIHHAGMTRVDRTLVEDLFGDKHIQVLVSTATLAWGVNLPAHTVIIKGTQVYSPEKGRWTELGALDILQMLGRAGRPQYDTKGEGILITSHGELQYYLSLLNQQLPIESQMVSKLPDMLNAEIVLGNVQNAKDAVNWLGYAYLYIRMLRSPTLYGISHDDLKGDPLLDQRRLDLVHTAALMLDKNNLVKYDKKTGNFQVTELGRIASHYYITNDTVQTYNQLLKPTLSEIELFRVFSLSSEFKNITVREEEKLELQKLLERVPIPVKESIEEPSAKINVLLQAFISQLKLEGFALMADMVYVTQSAGRLMRAIFEIVLNRGWAQLTDKTLNLCKMIDKRMWQSMCPLRQFRKLPEEVVKKIEKKNFPFERLYDLNHNEIGELIRMPKMGKTIHKYVHLFPKLELSVHLQPITRSTLKVELTITPDFQWDEKVHGSSEAFWILVEDVDSEVILHHEYFLLKAKYAQDEHLITFFVPVFEPLPPQYFIRVVSDRWLSCETQLPVSFRHLILPEKYPPPTELLDLQPLPVSALRNSAFESLYQDKFPFFNPIQTQVFNTVYNSDDNVFVGAPTGSGKTICAEFAILRMLLQNSEGRCVYITPMRLWQEQVYMDWYEKFQDRLNKKVVLLTGETSTDLKLLGKGNIIISTPEKWDILSRRWKQRKNVQNINLFVVDEVHLIGGENGPVLEVICSRMRYISSQIERPIRIVALSSSLSNAKDVAHWLGCSATSTFNFHPNVRPVPLELHIQGFNISHTQTRLLSMAKPVFHAITKHSPKKPVIVFVPSRKQTRLTAIDILTTCAADIQRQRFLHCTEKDLIPYLEKLSDSTLKETLLNGVGYLHEGLSPMERRLVEQLFSSGAIQVVVASRSLCWGMNVAAHLVIIMDTLYYNGKIHAYVDYPIYDVLQMVGHANRPLQDDEGRCVIMCQGSKKDFFKKFLYEPLPVESHLDHCMHDHFNAEIVTKTIENKQDAVDYLTWTFLYRRMTQNPNYYNLQGISHRHLSDHLSELVEQTLSDLEQSKCISIEDEMDVAPLNLGMIAAYYYINYTTIELFSMSLNAKTKVRGLIEIISNAAEYENIPIRHHEDNLLRQLAQKVPHKLNNPKFNDPHVKTNLLLQAHLSRMQLSAELQSDTEEILSKAIRLIQACVDVLSSNGWLSPALAAMELAQMVTQAMWSEDSYLRRLPPFPSGLFKRCTDKGVESVFDIMEMEDEERNALLQLTDSQIADVARFCNRYPNIELSYEVVDKDSIRSGGPVVVLVQLEREEEVTGPVIAPLFPQKREEGWWVVIGDAKSNSLISIKRLTLQQKAKVKLDFVAPATGGRHNTLYFMSDAYMGCDQEYKFSVDVKEAETDSDSD

SEQ ID NO: 1651 - protein, 2174 aa, Homo sapiens
MADVTARSLQYEYKANSNLVLQADRSLIDRTRRDEPTGEVLSLVGKLEGTRMGDKAQRTKPQMQEERRAKRRKRDEDRHDINKMKGYTLLSEGIDEMVGIIYKPKTKETRETYEVLLSFIQAALGDQPRDILCGAADEVLAVLKNEKLRDKERRKEIDLLLGQTDDTRYHVLVNLGKKITDYGGDKEIQNMDDNIDETYGVNVQFESDEEEGDEDVYGEVREEASDDDMEGDEAVVRCTLSANMYVDEILVWCASELNIPEFFPLESPHKKVGYGLSSRTWLQGGGKVIEAGRDLLVASGELMSSKKKDLHPRDIDAFWLQRQLSRFYDDAIVSQKKADEVLEILKTASDDRECENQLVLLLGFNTFDFIKVLRQHRMMILYCTLLASAQSEAEKERIMGKMEADPELSKFLYQLHETEKEDLIREERSRRERVRQSRMDTDLETMDLDQGGEALAPRQVLDLEDLVFTQGSHFMANKRCQLPDGSFRRQRKGYEEVHVPALKPKPFGSEEQLLPVEKLPKYAQAGFEGFKTLNRIQSKLYRAALETDENLLLCAPTGAGKTNVALMCMLREIGKHINMDGTINVDDFKIIYIAPMRSLVQEMVGSFGKRLATYGITVAELTGDHQLCKEEISATQIIVCTPEKWDIITRKVDEIHLLHDDRGPVLEALVARAIRNIEMTQEDVRLIGLSATLPNYEDVATFLRVDPAKGLFYFDNSFRPVPLEQTYVGITEKKAIKRFQIMNEIVYEKIMEHAGKNQVLVFVHSRKETGKTARAIRDMCLEKDTLGLFLREGSASTEVLRTEAEQCKNLELKDLLPYGFAIHHAGMTRVDRTLVEDLFADKHIQVLVSTATLAWGVNLPAHTVIIKGTQVYSPEKGRWTELGALDILQMLGRAGRPQYDTKGEGILITSHGELQYYLSLLNQQLPIESQMVSKLPDMLNAEIVLGNVQNAKDAVNWLGYAYLYIRMLRSPTLYGISHDDLKGDPLLDQRRLDLVHTAALMLDKNNLVKYDKKTGNFQVTELGRIASHYYITNDTVQTYNQLLKPTLSEIELFRVFSLSSEFKNITVREEEKLELQKLLERVPIPVKESIEEPSAKINVLLQAFISQLKLEGFALMADMVYVTQSAGRLMRAIFEIVLNRGWAQLTDKTLNLCKMIDKRMWQSMCPLRQFRKLPEEVVKKIEKKNFPFERLYDLNHNEIGELIRMPKMGKTIHKYVHLFPKLELSVHLQPITRSTLKVELTITPDFQWDEKVHGSSEAFWILVEDVDSEVILHHEYFLLKAKYAQDEHLITFFVPVFEPLPPQYFIRVVSDRWLSCETQLPVSFRHLILPEKYPPPTELLDLQPLPVSALRNSAFESLYQDKFPFFNPIQTQVFNTVYNSDDNVFVGAPTGSGKTICAEFAILRMLLQSSEGRCVYITPMEALAEQVYMDWYEKFQDRLNKKVVLLTGETSTDLKLLGKGNIIISTPEKWDILSRRWKQRKNVQNINLFVVDEVHLIGGENGPVLEVICSRMRYISSQIERPIRIVALSSSLSNAKDVAHWLGCSATSTFNFHPNVRPVPLELHIQGFNISHTQTRLLSMAKPVYHAITKHSPKKPVIVFVPSRKQTRLTAIDILTTCAADIQRQRFLHCTEKDLIPYLEKLSDSTLKETLLNGVGYLHEGLSPMERRLVEQLFSSGAIQVVVASRSLCWGMNVAAHLVIIMDTQYYNGKIHAYVDYPIYDVLQMVGHANRPLQDDEGRCVIMCQGSKKDFFKKFLYEPLPVESHLDHCMHDHFNAEIVTKTIENKQDAVDYLTWTFLYRRMTQNPNYYNLQGISHRHLSDHLSELVEQTLSDLEQSKCISIEDEMDVAPLNLGMIAAYYYINYTTIELFSMSLNAKTKVRGLIEIISNAAEYENIPIRHHEDNLLRQLAQKVPHKLNNPKFNDPHVKTNLLLQAHLSRMQLSAELQSDTEEILSKAIRLIQACVDVLSSNGWLSPALAAMELAQMVTQAMWSKDSYLKQLPHFTSEHIKRCTDKGVESVFDIMEMEDEERNALLQLTDSQIADVARFCNRYPNIELSYEVVDKDSIRSGGPVVVLVQLEREEEVTGPVIAPLFPQKREEGWWVVIGDAKSNSLISIKRLTLQQKAKVKLDFVAPATGAHNYTLYFMSDAYMGCDQEYKFSVDVKEAETDSDSD

SEQ ID NO: 1652 - protein, 182 aa, Homo sapiens [sequence omitted]

SEQ ID NO: 1653 - protein, 1393 aa, Homo sapiens
MPNSERHGGKKDGSGGASGTLQPSSGGGSSNSRERHRLVSKHKRHKSKHSKDMGLVTPEAASLGTVIKPLVEYDDISSDSDTFSDDMAFKLDRRENDERRGSDRSDRLHKHRHHQHRRSRDLLKAKQTEKEKSQEVSSKSGSMKDRISGSSKRSNEETDDYGKAQVAKSSSKESRSSKLHKEKTRKERELKSGHKDRSKSHRKRETPKSYKTVDSPKRRSRSPHRKWSDSSKQDDSPSGASYGQDYDLSPSRSHTSSNYDSYKKSPGSTSRRQSVSPPYKEPSAYQSSTRSPSPYSRRQRSVSPYSRRRSSSYERSGSYSGRSPSPYGRRRSSSPFLSKRSLSRSPLPSRKSMKSRSRSPAYSRHSSSHSKKKRSSSRSRHSSISPVRLPLNSSLGAELSKKKKKKAAAAAAAKMDGKESKGSPVFLPRKENSSVEAKDSGLESKKLPRSVKLEKSAPDTELVNVTHLNTEVKNSSDTGKVKLDENSEKHLVKDLKAQGTRDSKPIALKEEIVTPKETETSEKETPPPLPTIASPPPPLPTTTPPPQTPPLPPLPPIPALPQQPPLPPSQPAFSQVPASSTSTLPPSTHSKTSAVSSQANSQPPVQVSVKTQVSVTAAIPHLKTSTLPPLPLPPLLPGGDDMDSPKETLPSKPVKKEKEQRTRHLLTDLPLPPELPGGDLSPPDSPEPKAITPPQQPYKKRPKICCPRYGERRQTESDWGKRCVDKFDIIGIIGEGTYGQVYKARDKDTGELVALKKVRLDNEKEGFPITAIREIKILRQLIHRSVVNMKEIVTDKQDALDFKKDKGAFYLVFEYMDHDLMGLLESGLVHFSEDHIKSFMKQLMEGLEYCHKKNFLHRDIKCSNILLNNSGQIKLADFGLARLYNSEESRPYTNKVITLWYRPPELLLGEERYTPAIDVWSCGCILGELFTKKPIFQANLELAQLELISRLCGSPCPAVWPDVIKLPYFNTMKPKKQYRRRLREEFSFIPSAALDLLDHMLTLDPSKRCTAEQTLQSDFLKDVELSKMAPPDLPHWQDCHELWSKKRRRQRQSGVVVEEPPPSKTSRKETTSGTSTEPVKNSSPAPPQPAPGKVESGAGDAIGLADITQQLNQSELAVLLNLLQSQTDLSIPQMAQLLNIHSNPEMQQQLEALNQSISALTEATSQQQDSETMAPEESLKEAPSAPVILPSAEQMTLEASSTPADMQNILAVLLSQLMKTQEPAGSLEENNSDKNSGPQGPRRTPTMPQEEAAACPPHILPPEKRPPEPPGPPPPPPPPPLVEGDLSSAPQELNPAVTAALLQLLSQPEAEPPGHLPHEHQALRPMEYSTRPRPNRTYGNTDGPETGFSAIDTDERNSGPALTESLVQTLVKNRTFSGSLSHLGESSSYQGTG

SEQ ID NO: 1654 - protein, 101 aa, Homo sapiens [sequence omitted]

SEQ ID NO: 1655 - protein, 495 aa, Homo sapiens
MPHQRPRTCAMNPELTMESLGTLHGARGGGSGGGGGGGGGGGGGGPGHEQELLASPSPHHARRGPRGSLRGPPPPPTAHQELGTAAAAAAAASRSAMVTSMASILDGGDYRPELSIPLHHAMSMSCDSSPPGMGMSNTYTTLTPLQPLPPISTVSDKFHHPHPHHHPHHHHHHHHQRLSGNVSGSFTLMRDERGLPAMNNLYSPYKEMPGMSQSLSPLAATPLGNGLGGLHNAQQSLPNYGPPGHDKMLSPNFDAHHTAMLTRGEQHLSRGLGTPPAAMMSHLNGLHHPGHTQSHGPVLAPSRERPPSSSSGSQVATSGQLEEINTKEVAQRITAELKRYSIPQAIFAQRVLCRSQGTLSDLLRNPKPWSKLKSGRETFRRMWKWLQEPEFQRMSALRLAACKRKEQEPNKDRNNSQKKSRLVFTDLQRRTLFAIFKENKRPSKEMQITISQQLGLELTTVSNFFMNARRRSLEKWQDDLSTGGSSSTSSTCTKA

SEQ ID NO: 1656 - protein, 709 aa, Homo sapiens [sequence omitted]

SEQ ID NO: 1657 - protein, 277 aa, Homo sapiens [sequence omitted]

SEQ ID NO: 1658 - protein, 291 aa, Homo sapiens
MACLSPSQLQKFQQDGFLVLEGFLSAEECVAMQQRIGEIVAEMDVPLHCRTEFSTQEEEQLRAQGSTDYFLSSGDKIRFFFEKGVFDEKGNFLVPPEKSINKIGHALHAHDPVFKSITHSFKVQTLARSLGLQMPVVVQSMYIFKQPHFGGEVSPHQDASFLYTEPLGRVLGVWIAVEDATLENGCLWFIPGSHTSGVSRRMVRAPVGSAPGTSFLGSEPARDNSLFVPTPVQRGALVLIHGEVVHKSKQNLSDRSRQAYTFHLMEASGTTWSPENWLQPTAELPFPQLYT

SEQ ID NO: 1659 - protein, 66 aa, Homo sapiens
MRNTFAELKNSLEALSSRMDQAEERIGTQAGVQWRDHGSLQPQPPEFKQCFHLSLPSSWDYRACLS

SEQ ID NO: 1660 - protein, 233 aa, Homo sapiens [sequence omitted]

SEQ ID NO: 1661 - protein, 276 aa, Homo sapiens
MQVHALREDFREKNSSTNQHIIRLESLQAEIKMLSDRKRELEHRLSATLEENDLLQGTVEELQDRVLILERQGHDKDLQLHQSQLELQEVRLSCRQLQVKVEELTEERSLQSSAATSTSLLSEIEQSMEAEELEQEREQVTLLSVEMTALKEERDRLRVTSEDKEPKEQLQKAIRDRDEAIAKKNAVELELAKCRMDMMSLNSQLLDAIQQKLNLSQQLEAWQDDMHRVIDRQLMDTHLKERSQPAAALCRGHSAGRGDEPSIAEGKRLFSFFRKI

SEQ ID NO: 1662 - protein, 2263 aa, Homo sapiens
MAVWQLYYWRGGVTVSVGGSRPGQTLRGSVQNKLNPRPGKVVIYSEPDVSEKCIEVFSDIQDCSSWSLSPVILIKVVRGCWILYEQPNFEGHSIPLEEGELELSGLWGIEDIVERHEEAESDKPVVIGSIRHVVQDYRVSHIDLFTEPEGLGILSSYFDDTEEMQGFGVMQKTCSMKVHWGTWLIYEEPGFQGVPFILEPGEYPDLSFWDTEAAYIGSMRPLKMGGRKVEFPTDPKSRAQPPEDNRRKPVLGKLGTLFTAGRRRNSRNGLESPTRSNAKPLSPKDVVASPKLPERESERSRSQSSQLKQTDTSEEGSPRENPREAEGELPESGGPAAPPDAELSPRWSSSAAAVAVQQCHENDSPQLEPLEAEGEPFPDATTTAKQLHSSPGNSSRQENAETPARSPGEDASPGAGHEQEAFLGVRGAPGSPTQERPAGGLGEAPNAAPSVCAEEGSLGPRNARSQPPKGASDLPGEPPAEGAAHTASSAQADCTARPKGHAHPAKVLTLDIYLSKTEGAQVDEPVVITPRAEDCGDWDDMEKRSSGRRSGRRRGSQKSTDSPGADAELPESAARDDAVFDDEVAPNAASDNASAEKKVKSPRAALDGGVASAASPESKPSPGTKGQLRGESDRSKQPPPASSPTKRKGRSRALEAVPAPPASGPRAPAKESPPKRVPDPSPVTKGTAAESGEEAARAIPRELPVKSSSLLPEIKPEHKRGPLPNHFNGRAEGGRSRELGRAAGAPGASDADGLKPRNHFGVGRSTVTTKVTLPAKPKHVELNLKTPKNLDSLGNEHNPFSQPVHKGNTATKISLFENKRTNSSPRHTDIRGQRNTPASSKTFVGRAKLNLAKKAKEMEQPEKKVMPNSPQNGVLVKETAIETKVTVSEEEILPATRGMNGDSSENQALGPQPNQDDKADVQTDAGCLSEPVASALIPVKDHKLLEKEDSEAADSKSLVLENVTDTAQDIPTTVDTKDLPPTAMPKPQHTFSDSQSPAESSPGPSLSLSAPAPGDVPKDTCVQSPISSFPCTDLKVSENHKGCVLPVSRQNNEKMPLLELGGETTPPLSTERSPEAVGSECPSRVLVQVRSFVLPVESTQDVSSQVIPESSEVREVQLPTCHSNEPEVVSVASCAPPQEEVLGNEHSHCTAELAAKSGPQVIPPASEKTLPIQAQSQGSRTPLMAESSPTNSPSSGNHLATPQRPDQTVTNGQDSPASLLNISAGSDDSVFDSSSDMEKFTEIIKQMDSAVCMPMKRKKARMPNSPAPHFAMPPIHEDHLEKVFDPKVFTFGLGKKKESQPEMSPALHLMQNLDTKSKLRPKRASAEQSVLFKSLHTNTNGNSEPLVMPEINDKENRDVTNGGIKRSRLEKSALFSSLLSSLPQDKIFSPSVTSVNTMTTAFSTSQNGSLSQSSVSQPTTEGAPPCGLNKEQSNLLPDNSLKVFNFNSSSTSHSSLKSPSHMEKYPQKEKTKEDLDSRSNLHLPETKFSELSKLKNDDMEKANHIESVIKSNLPNCANSDTDFMGLFKSSRYDPSISFSGMSLSDTMTLRGSVQNKLNPRPGKVVIYSEPDVSEKCIEVFSDIQDCSSWSLSPVILIKVVRGCWILYEQPNFEGHSIPLEEGELELSGLWGIEDILERHEEAESDKPVVIGSIRHVVQDYRVSHIDLFTEPEGLGILSSYFDDTEEMQGFGVMQKTCSMKVHWGTWLIYEEPGFQGVPFILEPGEYPDLSFWDTEAAYIGSMRPLKMGGRKVEFPTDPKVVVYEKPFFEGKCVELETGMCSFVMEGGETEEATGDDHLPFTSVGSMKVLRGIWVAYEKPGFTGHQYLLEEGEYRDWKAWGGYNGELQSLRPILGDFSNAHMIMYSEKNFGSKGSSIDVLGIVANLKETGYGVKTQSINVLSGVWVAYENPDFTGEQYILDKGFYTSFEDWGGKNYKISSVQPICLDSFTGPRRRNQIHLFSEPQFQGHSQSFEETTSQIDDSFSTKSCRVSGGSWVVYDGENFTGNQYVLEEGHYPCLSAMGCPPGATFKSLRFIDVEFSEPTIILFEREDFKGKKIELNAETVNLRSLGFNTQIRSVQVIGGIWVTYEYGSYRGRQFLLSPAEVPNWYEFSGCRQIGSLRPFVQKRIYFRLRNKATGLFMSTNGNLEDLKLLRIQVMEDVGADDQIWIYQEGCIKCRIAEDCCLTIVGSLVTSGSKLGLALDQNADSQFWSLKSDGRIYSKLKPNLVLDIKGGTQYDQNHIILNTVSKEKFTQVWEAMVLYT

SEQ ID NO: 1663 - protein, 417 aa, Homo sapiens
MGRRRAPELYRAPFPLYALQVDPSTGLLIAAGGGGAAKTGIKNGVHFLQLELINGRLSASLLHSHDTETRATMNLALAGDILAAGQDAHCQLLRFQAHQQQGNKAEKAGSKEQGPRQRKGAAPAEKKCGAETQHEGLELRVENLQAVQTDFSSDPLQKVVCFNHDNTLLATGGTDGYVRVWKVPSLEKVLEFKAHEGEIEDLALGPDGKLVTVGRDLKASVWQKDQLVTQLHWQENGPTFSSTPYRYQACRFGQVPDQPAGLRLFTVQIPHKRLRQPPPCYLTAWDGSNFLPLRTKSCGHEVVSCLDVSESGTFLGLGTVTGSVAIYIAFSLQCLYYVREAHGIVVTDVAFLPEKGRGPELLGSHETALFSVAVDSRCQLHLLPSRRSVPVWLLLLLCVGLIIVTILLLQSAFPGFL

SEQ ID NO: 1664 - protein, 250 aa, Homo sapiens
MTHCCSPCCQPTCCRTTCCRTTCWKPTTVTTCSSTPCCQPSCCVPSCCQPCCHPTCCQNTCCRTTCCQPTCVASCCQPSCCSTPCCQPTCCGSSCCGQTSCGSSCCQPICGSSCCQPCCHPTCYQTICFRTTCCQPTCCQPTCCRNTSCQPTCCGSSCCQPCCHPTCCQTICRSTCCQPSCVTRCCSTPCCQPTCGGSSCCSQTCNESSYCLPCCRPTCCQTTCYRTTCCRPSCCCSPCCVSSCCQPSCC

SEQ ID NO: 1665 - protein, 736 aa, Homo sapiens
MRELKRTLDAKGHGVLEMPSGTGKTVSLLALIMAYQRAYPLEVTKLIYCSRTVPEIEKVIEELRKLLNFYEKQEGEKLPFLGLALSSRKNLCIHPEVTPLRFGKDVDGKCHSLTASYVRAQYQHDTSLPHCRFYEEFDAHGREVPLPAGIYNLDDLKALGRRQGWCPYFLARYSILHANVVVYSYHYLLDPKIADLVSKELARKAVVVFDEAHNIDNVCIDSMSVNLTRRTLDRCQGNLETLQKTVLRIKETDEQRLRDEYRRLVEGLREASAARETDAHLANPVLPDEVLQEAVPGSIRTAEHFLGFLRRLLEYVKWRLRVQHVVQESPPAFLSGLAQRVCIQRKPLRFCAERLRSLLHTLEITDLADFSPLTLLANFATLVSTYAKGFTIIIEPFDDRTPTIANPILHFSCMDASLAIKPVFERFQSVIITSGTLSPLDIYPKILDFHPVTMATFTMTLARVCLCPMIIGRGNDQVAISSKFETREDIAVIRNYGNLLLEMSAVVPDGIVAFFTSYQYMESTVASWYEQGILENIQRNKLLFIETQDGAETSVALEKYQEACENGRGAILLSVARGKVSEGIDFVHHYGRAVIMFGVPYVYTQSRILKARLEYLRDQFQIRENDFLTFDAMRHAAQCVGRAIRGKTDYGLMVFADKRFARGDKRGKLPRWIQEHLTDANLNLTVDEGVQVAKYFLRQMAQPFHREDQLGLSLLSLEQLESEETLKRIEQIAQQL

SEQ ID NO: 1666 - protein, 72 aa, Homo sapiens
MSSKTASTNNIAQARRTVQQLRLEASIERIKVSKASADLMSYCEEHARSDPLLIGIPTSENPFKDKKTCIIL

SEQ ID NO: 1667 - protein, 120 aa, Homo sapiens
MGRRKSKRKPPPKKKMTGTLETQFTCPFCNHEKSCDVKMDRARNTGVISCTVCLEEFQTPITCILGNLGFFQRVGRGLESGPCSSGPLCALVQGQSRPEEQVPPSDFCGVRRCRAGFQCQ

SEQ ID NO: 1668 - protein, 61 aa, Homo sapiens
MKRFLFLLLTISLLVMVQIQTGLSGQNDTSQTSSPSASSSMSGGIFLFFVANAIIHLFCFS

SEQ ID NO: 1669 - protein, 370 aa, Homo sapiens
MEILMTVSKFASICTMGANASALEKEIGPEQFPVNEHYFGLVNFGNTCYCNSVLQALYFCRPFREKVLAYKSQPRKKESLLTCLADLFHSIATQKKKVGVIPPKKFITRLRKENELFDNYMQQDAHEFLNYLLNTIADILQEERKQEKQNGRLPNGNIDNENNNSTPDPTWVHEIFQGTLTNETRCLTCETISSKDEDFLDLSVDVEQNTSITHCLRGFSNTETLCSEYKYYCEECRSKQEAHKRMKVKKLPMILALHLKRFKYMDQLHRYTKLSYRVVFPLELRLFNTSGDATNPDRMYDLVAVVVHCGSGPNRGHYIAIVKSHDFWLLFDDDIVEKIDAQAIEEFYGLTSDISKNSESGYILFYQSRD

SEQ ID NO: 1670 - protein, 184 aa, Homo sapiens
MKPDETPMFDPNLLKEVDWSQNTATFSPAISPTHPGEGLVLRPLCTADLNRGFFKVLGQLTETGVVSPEQFMKSFEHMKKSGDYYVTVVEDVTLGQIVATATLIIEHKFIHSCAKRGRVEDVVASDECRGKQLGNLLLSTLTLLSKKLNCYKITLECLPQNVGFYKKFGYTVSEENYMCRRFLK

SEQ ID NO: 1671 - protein, 359 aa, Homo sapiens
MKSPFYRCQNTTSVEKGNSAVMGGVLFSTGLLGNLLALGLLARSGLGWCSRRPLRPLPSVFYMLVCGLTVTDLLGKCLLSPVVLAAYAQNRSLRVLAPALDNSLCQAFAFFMSFFGLSSTLQLLAMALECWLSLGHPFFYRRHITLRLGALVAPVVSAFSLAFCALPFMGFGKFVQYCPGTWCFIQMVHEEGSLSVLGYSVLYSSLMALLVLATVLCNLGAMRNLYAMHRRLQRHPRSCTRDCAEPRADGREASPQPLEELDHLLLLALMTVLFTMCSLPVIYRAYYGAFKDVKEKNRTSEEAEDLRALRFLSVISIVDPWIFIIFRSPVFRIFFHKIFIRPLRYRSRCSNSTNMESSL

SEQ ID NO: 1672 - protein, 241 aa, Homo sapiens
MFLTRSEYDRGVNTFSPEGRLFQVEYAIEAIKLGSTAIGIQTSEGVCLAVEKRITSPLMEPSSIEKIVEIDAHIGCAMSGLIADAKTLIDKARVETQNHWFTYNETMTVESVTQAVSNLALQFGEEDADPGAMSRPFGVALLFGGVDEKGPQLFHMDPSGTFVQCDARAIGSASEGAQSSLQEVYHKSMTLKEAIKSSLIILKQVMEEKLNATNIELATVQPGQNFHMFTKEELEEVIKDI

SEQ ID NO: 1673 - protein, 398 aa, Homo sapiens
MLGRSGYRALPLGDFDRFQQSSFGFLGSQKGCLSPERGGVGTGADVPQSWPSCLCHGLISFLGFLLLLVTFPISGWFALKIVPTYERMIVFRLGRIRTPQGPGMVLLLPFIDSFQRVDLRTRAFNVPPCKLASKDGAVLSVGADVQFRIWDPVLSVMTVKDLNTATRMTAQNAMTKALLKRPLREIQMEKLKISDQLLLEINDVTRAWGLEVDRVELAVEAVLQPPQDSPAGPNLDSTLQQLALHFLGGSMNSMAGGAPSPGPADTVEMVSEVEPPAPQVGARSSPKQPLAEGLLTALQPFLSEALVSQVGACYQFNVVLPSGTQSAYFLDLTTGRGRVGHGVPDGIPDVVVEMAEADLRALLCRELRPLGAYMSGRLKVKGDLAMAMKLEAVLRALK

SEQ ID NO: 1674 - protein, 121 aa, Homo sapiens
MATEGDVELELETETSGPERPPEKPRKHDSGAADLERVTDYAEEKEIQSSNLETAMSVIGDRRSREQKAKQEREKELAKVTIKKEDLELIMTEMEISRAAAERSLREHMGNVVEALIALTN

SEQ ID NO: 1675 - protein, 139 aa, Homo sapiens
MEAVVFVFSLLDCCALIFLSVYFIITLSDLECDYINARSCCSKLNKWVIPELIGHTIVTVLLLMSLHWFIFLLNLPVATWNIYRYIMVPSGNMGVFDPTEIHNRGQLKSHMKEAMIKLGFHLLCFFMYLYSMILALIND

SEQ ID NO: 1676 - protein, 803 aa, Homo sapiens
MEIPKLLPARGTLQGGGGGGIPAGGGRVHRGPDSPAGQVPTRRLLLLRGPQDGGPGRRREEASTASRGPGPSLLAPRTDQPSGGGGGGGDDFFLVLLDPVGGDVETAGSGQAAGPVLREEAEEGPGLQGGESGANPAGPTALGPRCLSAVPTPAPISAPGPAAAFAGTVTIHNQDLLLRFENGVLTLATPPPHAWEPGAAPAQQPGCLIAPQAGFPHAAHPGDCPELPPDLLLAEPAEPAPAPAPEEEAEGPAAALGPRGPLGSGPGVVLYLCPEAQCGQTFAKKHQLKVHLLTHSSSQGQRPFKCPLGGCGWTFTTSYKLKRHLQSHDKLRPFGCPAEGCGKSFTTVYNLKAHMKGHEQENSFKCEVCEESFPTQAKLSAHQRSHFEPERPYQCAFSGCKKTFITVSALFSHNRAHFREQELFSCSFPGCSKQYDKACRLKIHLRSHTGERPFLCDFDGCGWNFTSMSKLLRHKRKHDDDRRFMCPVEGCGKSFTRAEHLKGHSITHLGTKPFVCPVAGCCARFSARSSLYIHSKKHLQDVDTWKSRCPISSCNKLFTSKHSMKTHMVKRHKVGQDLLAQLEAANSLTPSSELTSQRQNDLSDAEIVSLFSDVPDSTSAALLDTALVNSGILTIDVASVSSTLAGHLPANNNNSVGQAVDPPSLMATSDPPQSLDTSLFFGTAATGFQQSSLNMDEVSSVSVGPLGSLDSLAMKNSSPEPQALTPSSKLTVDTDALTPSSTLCENSVSELLTPTKAEWNVHPDSDFFGQEGETQFGFPNAAGNHGSQKETDLITVTGSSFLV

SEQ ID NO: 1677 - protein, 155 aa, Homo sapiens
MASLKCSTVVCVICLEKPKYRCPACRVPYCSVVCFRKHKEQCNPETRPVEKKIRSALPTKTVKPVENKDDDDSIADFLNSDEEEDRVSLQNLKNLGESATLRSLLLNPHLRQLMVNLDQGEDKAKLMRAYMQEPLFVEFADCCLGIVEPSQNEES

SEQ ID NO: 1678 - protein, 957 aa, Homo sapiens
MPGRRPRPLSAELGGSTQAMRDKCGARDGAGTCYYGTLKLAGPESLRWLALDGERDVADTMKNFEMRILLDYPGGPSTITGSERVEDASLLALKMEEGAMSEGGGKNSHCLLTSTVRPRATAYGASGPDPGPARVASRRLGAAVGLLSADTLWPLNGLARAIDEEIEALRDDSGDDDEATTPADKSELHHTLKNLSLKLDDLSTCNDLIAKHGAALQRSLTELDGLKIPSESGEKLKVVNERATLFRITSNAMINGAAAILTSYQEWLQPQGFEGTRCSEVVSGLGIWNSNAVFQPPTPLPVLYLLEHPFLTLQHSQDGAWRRPAAAEETLGVRDGHQVRTGVPIFLLWGGTACDVHGAQWVLQACRDFLELAEIHSRKWQRALQYEQEQRVHLEETIEQLAKQHNSLERAFHSAPGRPANPSKSFIEGSLLTPKGEDSEEDEDTEYFDAMEDSTSFITVITEAKEDSRKAEGSTGTSSVDWSSADNVLDGASLVPKGSSKVKRRVRIPNKPNYSLNLWSIMKNCIGRELSRIPMPVNFNEPLSMLQRLTEDLEYHHLLDKAVHCTSSVEQMCLVAAFSVSSYSTTVHRIAKPFNPMLGETFELDRLDDMGLRSLCEQVSHHPPSAAHYVFSKHGWSLWQEITISSKFRGKYISIMPLGAIHLEFQASGNHYVWRKSTSTVHNIIVGKLWIDQSGDIEIVNHKTNDRCQLKFLPYSYFSKEAARKVTGVVSDSQGKAHYVLSGSWDEQMECSKVMHSSPSSPSSDGKQKTVYQTLSAKLLWKKYPLPENAENMYYFSELALTLNEHEEGVAPTDSRLRPDQRLMEKGRWDEANTEKQRLEEKQRLSRRRRLEACGPGSSCSSEEEGVKAFDKIQPVSRGHSPRFILCDCCPLAPNSGRTGNYRKLARLPKRMRRSRYGHVRRASKTTQASCRFRLERVAGLRKPSTVHNRWLVMNRS

SEQ ID NO: 1679 - protein, 2189 aa, Homo sapiens
MGIFVKTIFPNGSAAEDGRLKEGDEILDVNGIPIKGLTFQEAIHTFKQIRSGLFVLTVRTKLVSPSLTPCSTPTHMSRSASPNFNTSGGASAGGSDEGSSSSLGRKTPGPKDRIVMEVTLNKEPRVGLGIGACCLALENSPPGIYIHSLAPGSVAKMESNLSRGDQILEVNSVNVRHAALSKVHAILSKCPPGPVRLVIGRHPNPKDSLISESELSQYFAHDVPGPLSDFMVAGSEDEDHPGSGCSTSEEGSLPPSTSTHKEPGKPRANSLVTLGSHRASGLFHKQVTVARQASLPGSPQALRNPLLRQRKVGCYDANDASDEEEFDREGDCISLPGALPGPIRPLSEDDPRRVSISSSKGMDVHNQEERPRKTLVSKAISAPLLGSSVDLEESIPEGMVDAASYAANLTDSAEAPKGSPGSWWKKELSGSSSAPKLEYTVRTDTQSPTNTGSPSSPQQKSEGLGSRHRPVARVSPHCKRSEAEAKPSGSQTVNLTGRANDPCDLDSRVQATSVKVTVAGFQPGGAVEKESLGKLTTGDACVSTSCELASALSHLDASHLTENLPKAASELGQQPMTELDSSSDLISSPGKKGAAHPDPSKTSVDTGKVSRPENPSQPASPRVAKCKARSPVRLPHEGSPSPGEKAAAPPDYSKTRSASETSTPHNTRRVAALRGAGPGAEGMTPAGAVLPGDPLTSQEQRQGAPGNHSKALEMTGIHAPESSQEPSLLEGADSVSSRAPQASLSMLPSTDNTKEACGHVSGHCCPGGSRESPVTDIDSFIKELDASAARSPSSQTGDSGSQEGSAQGHPPAGAGGGSSCRAEPVPGGQTSSPRRAWAAGAPAYPQWASQPSVLDSINPDKHFTVNKNFLSNYSRNFSSFHEDSTSLSGLGDSTEPSLSSMYGDAEDSSSDPESLTEAPRASARDGWSPPRSRVSLHKEDPSESEEEQIEICSTRGCPNPPSSPAHLPTQAAICPASAKVLSLKYSTPRESVASPREKAACLPGSYTSGPDSSQPSSLLEMSSQEHETHADISTSQNHRPSCAEETTEVTSASSAMENSPLSKVARHFHSPPIILSSPNMVNGLEHDLLDDETLNQYETSINAAASLSSFSVDVPKNGESVLENLHISESQDLDDLLQKPKMIARRPIMAWFKEINKHNQGTHLRSKTEKEQPLMPARSPDSKIQMVSSSQKKGVTVPHSPPQPKTNLENKDLSKKSPAEMLLTNGQKAKCGPKLKRLSLKGKAKVNSEAPAANAVKAGGTDHRKPLISPQTSHKTLSKAVSQRLHVADHEDPDRNTTAAPRSPQCVLESKPPLATSGPLKPSVSDTSIRTFVSPLTSPKPVPEQGMWSRFHMAVLSEPDRGCPTTPKSPKCRAEGRAPRADSGPVSPAASRNGMSVAGNRQSEPRLASHVAADTAQPRPTGEKGGNIMASDRLERTNQLKIVEISAEAVSETVCGNKPAESDRRGGCLAQGNCQEKSEIRLYRQVAESSTSHPSSLPSHASQAEQEMSRSFSMTKLASSSSSLQTAIRKAEYSQGKSSLMSDSRGVPRNSIPGGPSGEDHLYFTPRPATRTYSMPAQFSSHFGREGHPPHSLGRSRDSQVPVTSSVVPEAKASRGGLPSLANGQGIYSVKPLLDTSRNLPATDEGDIISVQETSCLVTDKIKVTRRHYCYEQNWPHESTSFFSVKQRIKSFENLANADRPVAKSGASPFLSVSSKPPIGRRSSGSIVSGSLGHPGDAAARLLRRSLSSCSENQSEAGTLLPQMAKSPSIMTLTISRQNPPETSSKGSDSELKKSLGPLGIPTPTMTLASPVKRNKSSVRHTQPSPVSRSKLQELRALSMPDLDKLCSEDYSAGPSAVLFKTELEITPRRSPGPPAGGVSCPEKGGNRACPGGSGPKTSAAETPSSASDTGEAAQDLPFRRSWSVNLDQLLVSAGDQQRLQSVLSSVGSKSTILTLIQEAKAQSENEEDVCFIVLNRKEGSGLGFSVAGGTDVEPKSITVHRVFSQGAASQEGTMNRGDFLLSVNGASLAGLAHGNVLKVLHQAQLHKDALVVIKKGMDQPRPSARQEPPTANGKGLLSRKTIPLEPGIGRSVAVHDALCVEVLKTSAGLGLSLDGGKSSVTGDGPLVIKRVYKGGVAEQAGIIEAGDEILAINGKPLVGLMHFDAWNIMKSVPEGPVQLLIRKHRNSS

SEQ ID NO: 1680 - protein, 401 aa, Homo sapiens
MPVQLSEHPEWNESMHSLRISVGGLPVLASMTKAADPRFRPRWKVILTFFVGAAILWLLCSHRPAPGRPPTHNAHNWRLGQAPANWYNDTYPLSPPQRTPAGIRYRIAVIADLDTESRAQEENTWFSYLKKGYLTLSDSGDKVAVEWDKDHGVLESHLAEKGRGMELSDLIVFNGKLYSVDDRTGVVYQIEGSKAVPWVILSDGDGTVEKGFKAEWLAVKDERLYVGGLGKEWTTTTGDVVNENPEWVKVVGYKGSVDHENWVSNYNALRAAAGIQPPGYLIHESACWSDTLQRWFFLPRRASQERYSEKDDERKGANLLLSASPDFGDIAVSHVGAVVPTHGFSSFKFIPNTDDQIIVALKSEEDSGRVASYIMAFTLDGRFLLPETKIGSVKYEGIEFI

SEQ ID NO: 1681 - protein, 332 aa, Homo sapiens
MNGEEEYGSGSAGGARVGSGEFGVEMAALAPLPPLPAQFKSIQHHLRTAQEHDKRDPVVAYYCRLYAMQTGMKIDSKTPECRKFLSKLMDQLEALKKQLGDNEAITQEIVGCAHLENYALKMFLYADNEDRAGRFHKNMIKSFYTASLLIDVITVFGELTDENVKHRKYARWKATYIHNCLKNGETPQAGPVGIEEDNDIEENEDAGAASLPTQPTQPSSSSTYDPSNMPSGNYTGIQIPPGAHAPANTPAEVPHSTGVASNTIQPTPQTIPAIDPALFNTISQGDVRLTPEDFARAQKYCKYAGSALQYEDVSTAVQNLQKALKLLTTGRE

SEQ ID NO: 1682 - protein, 313 aa, Homo sapiens
MAATLGPLGSWQQWRRCLSARDGSRRLLLLLLLGSGQGPQQVGAGQTFEYLKREHSLSKPYQGEAPRPCFLRDWELQVHFKIHGQGKKNLHGDGLAIWYTKDRMQPGPVFGNMDKFVGLGVFVDTYPNEEKQQERVFPYISAMVNNGSLSYDHERDGRPTELGGCTAIVRNLHYDTFLVIRYVKRHLTIMMDIDGKHEWRDCIEVPGVRLPRGYYFGTSSITGDLSDNHDVISLKLFELTVERTPEEEKLHRDVFLPSVDNMKLPEMTAPLPPLSGLALFLIVFFSLVFSVFAIVIGIILYNKWQEQSRKRFY

SEQ ID NO: 1683 - protein, 377 aa, Homo sapiens
MQPPPPGPLGDCLRDWEDLQQDFQNIQETHRLYRLKLEELTKLQNNCTSSITRQKKRLQELALALKKCKPSLPAEAEGAAQELENQMKERQGLFFDMEAYLPKKNGLYLSLVLGNVNVTLLSKQAKFAYKDEYEKFKLYLTIILILISFTCRFLLNSRVTDAAFNFLLVWYYCTLTIRESILINNGSRIKGWWVFHHYVSTFLSGVMLTWPDGLMYQKFRNQFLSFSMYQSFVQFLQYYYQSGCLYRLRALGERHTMDLTVEGFQSWMWRGLTFLLPFLFFGHFWQLFNALTLFNLAQDPQCKEWQVLMCGFPFLLLFLGNFFTTLRVVHQLHHAAEEAAPGAGPSPEEMQTLPPSRGRGGRTGAGEPDERAPRPLL

SEQ ID NO: 1684 - protein, 194 aa, Homo sapiens
MSALWLLLGLLALMDLSESSNWGCYGNIQSLDTPGASCGIGRRHGLNYCGVRASERLAEIDMPYLLKYQPMMQTIGQKYCMDPAVIAGVLSRKSPGDKILVNMGDRTSMVQDPGSQAPTSWISESQVSQTTEVLTTRIKEIQRRFPTWTPDQYLRGGLCAYSGGAGYVRSSQDLSCDFCNDVLARAKYLKRHGF

SEQ ID NO: 1685 - protein, 228 aa, Homo sapiens [sequence omitted]

SEQ ID NO: 1686 - protein, 196 aa, Homo sapiens
MKIKPGFMGKATPPYDVQVIDDKGSILPPNTEGNIGIRIKPVRPVSLFMCYEGDPEKTAKVECGDFYNTGDRGKMDEEGYICFLGRSDDIINASGYRIGPAEVESALVEHPAVAESAVVGSPDPIRGEVVKAFIVLTPQFLSHDKDQLTKELQQHVKSVTAPYKYPRKVEFVSELPKTITGKIERKELRKKETGQM

SEQ ID NO: 1687 - protein, 702 aa, Homo sapiens
MVAHINNSRLKAKGVGQHDNAQNFGNQSFEELRAACLRKGELFEDPLFPAEPSSLGFKDLGPNSKNVQNISWQRPKDIINNPLFIMDGISPTDICQGILGDCWLLAAIGSLTTCPKLLYRVVPRGQSFKKNYAGIFHFQIWQFGQWVNVVVDDRLPTKNDKLVFVHSTERSEFWSALLEKAYAKLSGSYEALSGGSTMEGLEDFTGGVAQSFQLQRPPQNLLRLLRKAVERSSLMGCSIEVTSDSELESMTDKMLVRGHAYSVTGLQDVHYRGKMETLIRVRNPWGRIEWNGAWSDSAREWEEVASDIQMQLLHKTEDGEFWMSYQDFLNNFTLLEICNLTPDTLSGDYKSYWHTTFYEGSWRRGSSAGGCRNHPGTFWTNPQFKISLPEGDDPEDDAEGNVVVCTCLVALMQKNWRHARQQGAQLQTIGFVLYAVPKEFQNIQDVHLKKEFFTKYQDHGFSEIFTNSREVSSQLRLPPGEYIIIPSTFEPHRDADFLLRVFTEKHSESWELDEVNYAEQLQEEKVSEDDMDQDFLHLFKIVAGEGKEIGVYELQRLLNRMAIKFKSFKTKGFGLDACRCMINLMDKDGSGKLGLLEFKILWKKLKKWMDIFRECDQDHSGTLNSYEMRLVIEKAGIKLNNKVMQVLVARYADDDLIIDFDSFISCFLRLKTMFTFFLTMDPKNTGHICLSLEQWLQMTMWG

SEQ ID NO: 1688 - protein, 30 aa, Homo sapiens
MLSGDPHLPQPLCHCLDHCPCCFSGTTRTS

SEQ ID NO: 1689 - protein, 125 aa, Homo sapiens
MTYIKSPAPCQTQTCYVQGASPCQSYYVQAPASGSTSQYCVTDPCSAPCSTSYCCLAPRTFGVSPLRRWIQRPQNCNTGSSGCCENSGSSGCCGSGGCGCSCGCGSSGCCCLGIIPMKSRSPALL

SEQ ID NO: 1690 - protein, 471 aa, Homo sapiens
MTSFYSTSSCPLGCTMAPGARNVFVSPIDVGCQPVAEANAASMCLLANVAHANRVRVGSTPLGRPSLCLPPTSHTACPLPGTCHIPGNIGICGAYGKNTLNGHEKETMKFLNDRLANYLEKVRQLEQENAELETTLLERSKCHESTVCPDYQSYFRTIEELQQKILCSKAENARLIVQIDNAKLAADDFRIKLESERSLHQLVEADKCGTQKLLDDATLAKADLEAQQESLKEEQLSLKSNHEQEVKILRSQLGEKFRIELDIEPTIDLNRVLGEMRAQYEAMVETNHQDVEQWFQAQSEGISLQAMSCSEELQCCQSEILELRCTVNALEVERQAQHTLKDCLQNSLCEAEDRYGTELAQMQSLISNLEEQLSEIRADLERQNQEYQVLLDVKARLENEIATYRNLTPLQSLFHACLLYFLSKLWPCHRWVSLWPWSQHGEMILKARVRRLRLVALGSGVPSPCPVFLQD

SEQ ID NO: 1691 - protein, 118 aa, Homo sapiens [sequence omitted]

SEQ ID NO: 1692 - protein, 180 aa, Homo sapiens
MKWVQFSNLHVDVPKDLTKPVVTISDEPDILYKRLSVLVKGHDKAVLDSYEYFAVLAAKELGISIKVHEPPRKIERFTLLQSVHIYKKHRVQYEMRTLYRCLELEHLTGSTADVYLEYIQRNLPEGVAMEVTKFCFFIFLDTIRTVTRTHQGANLGNTIRRKRRKQVIKPQGGHFCLNLK

SEQ ID NO: 1693 - protein, 105 aa, Homo sapiens [sequence omitted]

SEQ ID NO: 1694 - protein, 346 aa, Homo sapiens
MLKKPLSAVTWLCIFIVAFVSHPAWLQKLSKHKTPAQPQLKAANCCEEVKELKAQVANLSSLLSELNKKQERDWVSVVMQVMELESNSKRMESRLTDAESKYSEMNNQIDIMQLQAAQTVTQTSADAIYDCSSLYQKNYRISGVYKLPPDDFLGSPELEVFCDMETSGGGWTIIQRRKSGLVSFYRDWKQYKQGFGSIRGDFWLGNEHIHRLSRQPTRLRVEMEDWEGNLRYAEYSHFVLGNELNSYRLFLGNYTGNVGNDALQYHNNTAFSTKDKDNDNCLDKCAQLRKGGYWYNCCTDSNLNGVYYRLGEHNKHLDGITWYGWHGSTYSLKRVEMKIRPEDFKP

SEQ ID NO: 1695 - protein, 454 aa, Homo sapiens
MYNTVWNMEDLDLEYAKTDINCGTDLMFYIEMDPPALPPKPPKPTTVANNGMNNNMSLQDAEWYWGDISREEVNEKLRDTADGTFLVRDASTKMHGDYTLTLRKGGNNKLIKIFHRDGKYGFSDPLTFSSVVELINHYRNESLAQYNPKLDVKLLYPVSKYQQDQVVKEDNIEAVGKKLHEYNTQFQEKSREYDRLYEEYTRTSQEIQMKRTAIEAFNETIKIFEEQCQTQERYSKEYIEKFKREGNEKEIQRIMHNYDKLKSRISEIIDSRRRLEEDLKKQAAEYREIDKRMNSIKPDLIQLRKTRDQYLMWLTQKGVRQKKLNEWLGNENTEDQYSLVEDDEDLPHHDEKTWNVGSSNRNKAENLLRGKRDGTFLVRESSKQGCYACSVVVDGEVKHCVINKTATGYGFAEPYNLYSSLKELVLHYQHTSLVQHNDSLNVTLAYPVYAQQRR

SEQ ID NO: 1696 - protein, 45 aa, Homo sapiens
MLDLGAAKANLEKAQAELVGTADEATRAEIQIRIEANEALVKALE

SEQ ID NO: 1697 - protein, 366 aa, Homo sapiens
MAPNLKGRPRKKKPCPQRRDSFSGVKDSNNNSDGKAVAKVKCEARSALTKPKNNHNCKKVSNEEKPKVAIGEECRADEQAFLVALYKYMKERKTPIERIPYLGFKQINLWTMFQAAQKLGGYETITARRQWKHIYDELGGNPGSTSAATCTRRHYERLILPYERFIKGEEDKPLPPIKPRKQENSSQENENKTKVSGTKRIKHEIPKSKKEKENAPKPQDAAEVSSEQEKEQETLISQKSIPEPLPAADMKKKIEGYQEFSAKPLASRVDPEKDNETDQGSNSEKVAEEAGEKGPTPPLPSAPLAPEKDSALVPGASKQPLTSPSALVDSKQESKLCCFTESPESEPQEASFPSFPTTQATAGKPE

SEQ ID NO: 1698 - protein, 455 aa, Homo sapiens
MCTKTIPVLWGCFLLWNLYVSSSQTIYPGIKARITQRALDYGVQAGMKMIEQMLKEKKLPDLSGSESLEFLKVDYVNYNFSNIKISAFSFPNTSLAFVPGVGIKALTNHGTANISTDWGFESPLFVLYNSFAEPMEKPILKNLNEMLCPIIASEVKALNANLSTLEVLTKIDNYTLLDYSLISSPEITENYLDLNLKGVFYPLENLTDPPFSPVPFVLPERSNSMLYIGIAEYFFKSASFAHFTAGVFNVTLSTEEISNHFVQNSQGLGNVLSRIAEIYILSQPFMVRIMATEPPIINLQPGNFTLDIPASIMMLTQPKNSTVETIVSMDFVASTSVGLVILGQRLVCSLSLNRFRLALPESNRSNIEVLRFENILSSILHFGVLPLANAKLQQGFPLPNPHKFLFVNSDIEVLEGFLLISTDLKYETSSKQQPSFHVWEGLNLISRQWRGKSAP

SEQ ID NO: 1699 - protein, 97 aa, Homo sapiens
MTGKTTKVPNACLFTINKEDHTLGNIIKSQLLKDPQVLFAGYKVPHPLEHKIIIRVQTTPDYSPQEAFTNAITDLISELSLLEERFRTCLLPLRLLP

SEQ ID NO: 1700 - protein, 110 aa, Homo sapiens
MNKSQEQVSFKDVCVDFTQEEWYLLDPAQKILYRDVILENYSNLVSVGYCITKPEVIFKIEQGEEPWILEKGFPSQCQPEREWEVDDVLESSQEHEDDPFWELLFPNNKQ

SEQ ID NO: 1701 - protein, 299 aa, Homo sapiens
MAPSLLCPFTAMHKTVGRASCAPPSWRMELRSGSVGSQAVARRMDGDSRDGGGGKDATGSEDYENLPTSASVSTHMTAGAMAGILEHSVMYPVDSVKTRMQSLSPDPKAQYTSVYGALKKIMRTEGFWRPLRGVNVMIMGAGPAHAMYFACYENMKRTLNDVFHHQGNSHLANGIAGSMATLLHDAVMNPAEVVKQRLQMYNSQHRSAISCIRTVWRTEGLGAFYRSYTTQLTMNIPFQSIHFITYEFLQEQVNPHRTYNPQSHIISGGLAGALAAAANSDPREISFFGFGGVSSSSNR

SEQ ID NO: 1702 - protein, 38 aa, Homo sapiens
MVLLLSLTFFSALTFHSICQLRNTGVEVDIVFQRVSFL

SEQ ID NO: 1703 - protein, 139 aa, Homo sapiens
MSSLPVPYKLPVSLSVGSCVIIKGTPIHSFINDPQLQVDFYTDMDEDSDIAFRFRVHFGNHVVMNRREFGIWMLEETTDYVPFEDGKQFELCIYVHYNEYEIKVNGIRIYGFVHRIPPSFVKMVQVSRDISLTSVCVCN

SEQ ID NO: 1704 - protein, 379 aa, Homo sapiens
MSSPSLSDLGKREPAAAADERGTQQRRACANATWNSIHNGVIAVFQRKGLPDQELFSLNEGVRQLLKTELGSFFTEYLQNQLLTKGMVILRDKIRFYEGQKLLDSLAETWDFFFSDVLPMLQAIFYPVQGKEPSVRQLALLHFRNAITLSVKLEDALARAHARVPPAIVQMLLVLQGVHESRGVTEDYLRLETLVQKVVSPYLGTYGLHSSEGPFTHSCILEKRLLRRSRSGDVLAKNPVVRSKSYNTPLLNPVQEHEAEGAAAGGTSIRRHSVSEMTSCPEPQGFSDPPGQGPTGTFRSSPAPHSGPCPSRLYPTTQPPEQGLDPTRSSLPRSSPENLVDQILESVDSDSEGIFIDFGRGRGSGMSDLEGSGGRQSVV

SEQ ID NO: 1705 - protein, 208 aa, Homo sapiens
MVFYFTSSSVNSSAYTIYMGKDKYENEDLIKHGWPEDIWFHVDKLSSAHVYLRLHKGENIEDIPKEVLMDCAHLVKANSIQGCKMNNVNVVYTPWSNLKKTADMDVGQIGFHRQKDVKIVTVEKKVNEILNRLEKTKVERFSDLAAEKECRDREERNEKKAQIQEMKKREKEEMKKKREMDELRSYSSLMKVENMSSNQDGNDSDEFM

SEQ ID NO: 1706 - protein, 86 aa, Homo sapiens
MVFYFTSSSVNSSAYTIYMGKDKYENEDLIKHGWPEDIWFHVDKLSSAHVYLRLHKGENIEDIPKEVLMDCAHLVKANSIQGAIHH

SEQ ID NO: 1707 - protein, 128 aa, Homo sapiens
MRVHISSCLKVQEQMANCPKFVPVVPTSQPIPSNIPNRSTFACPYCGARNLDQQELVKHCVESHRSDPNRVVCPICSAMPWGDPSYKSANFLQHLLHRHKFSYDTFVDYSIDEEAAFQAALALSLSEN

SEQ ID NO: 1708 - protein, 582 aa, Homo sapiens
MISRYTRKAVPQSLELKGITKHALNHHPPPEKLEEISPTSDSHEKDTSSQSKSDITRESSFTSADTGNSLSAFPSYTGAGISTEGSSDFSWGYGELDQNATEKVQTMFTAIDELLYEQKLSVHTKSLQEECQQWTASFPHLRILGRQIITPSEGYRLYPRSPSAVSASYETTLSQERDSTIFGIRGKKLHFSSSYAHKASSIAKSSSFCSMERDEEDSIIVSEGIIEEYLAFDHIDIEEGFHGKKSEAATEKQKLGYPPIAPFYCMKEDVLAYVFDSVWCKVVSCMEQLTRSHWEGFASDDESNVAVTRPDSESSCVLSELHPLVLPRVPQSKVLYITSNPMSLCQASRHQPNVNDLLVHGMPLQPRNLSLMDKLLDLDDKLLMRPGSSTILSTRNWPNRAVEFSTSSLSYTVQSTRRRNPPPRTLHPISTSHSCAETPRSVEEILRGARVPVAPDSLSSPSPTPLSRNNLLPPIGTAEVEHVSTVGPQRQMKPHGDSSRAQSAVVDEPNYQQPQERLLLPDFFPRPNTTQSFLLDTQYRRSCAVEYPHQARPGRGSAGPQLHGSTKSQSGGRPVSRTRQGP

SEQ ID NO: 1709 - protein, 170 aa, Homo sapiens
MRLQGAIFVLLPHLGPILVWLFTRDHMSGWCEGPRMLSWCPFYKVLLLVQTAIYSVVGYASYLVWKDLGGGLGWPLALPLGLYAVQLTISWTVLVLFFTVHNPGLALLHLLLLYGLVVSTALIWHPINKLAALLLLPYLAWLTVTSALTYHLWRDSLCPVHQPQPTEKSD

SEQ ID NO: 1710 - protein, 383 aa, Homo sapiens
MDIPRSVQNFRFFASSSLHHTSECTQMDHLGCMHYTVRAPGGVAGLISPWNLPLYLLTWKIAPAMAAGNTVIAKPSELTSVTAWMLCKLLDKAGVPPGVVNIVFGTGPRVGEALVSHPEVPLISFTGSQPTAERITQLSAPHCKKLSLELGGKNPAIIFEDANLDECIPATVRSSFANQGEICLCTSRIFVQKSIYSEFLKRFVEATRKWKVGIPSDPLVSIGALISKAHLEKVRSYVKRALAEGAQIWCGEGVDKLSLPARNQAGYFMLPTVITDIKDESCCMTEEIFGPVTCVVPFDSEEEVIERANNVKYGLAATVWSSNVGRVHRVAKKLQSGLVWTNCWLIRELNLPFGGMKSSGIGREGAKDSYDFFTEIKTITVKH

SEQ ID NO: 1711 - protein, 565 aa, Homo sapiens
MGRNQSRKAENSKNQSASSTPKDHSASPATEQSWMGNDFDELTELGFRKSVMTNFSQLKEDVRTHHKEAKNLEKRLDKWLTRINSIEETLNDLMELKTMARELRDTCTSFSSRFDQVEEGEIQTTIREYYEHLYANKLENLEEMDKFLDTYTLPRLNQEEVESLNRPITGSEIEAIINSLPTKKIPGPDRFTAKFYQRYKEELSNLIHYLGLSHHLLALNFIIVSFGKKSAWSSAQVKVTDTDFDGVEVRVFEGPPKPEEPLKRSVVYIHGGGWALASAKIRYYDELCTAMAEELNAVIVSIEYRLVPKVYFPEQIHDVVRATKYFLKPEVLQKYMVDPGRICISGDSAGGNLAAALGQQFTQDASLKNKLKLQALIYPVLQALDFNTPSYQQNVNTPILPRYVMVKYWVDYFKGNYDFVQAMIVNNHTSLDVEEAAAVRARLNWTSLLPASFTKNYKPVVQTTGNARIVQELPQLLDARSAPLIADQAVLQLLPKTYILTCEHDVLRDDGIMYAKRLESAGVEVTLDHFEDGFHGCMIFTSWPTNFSVGIRTRNSYIKWLDQNL

SEQ ID NO: 1712 - protein, 622 aa, Homo sapiens
MRLLRRRHMPLRLAMVGCAFVLFLFLLHRDVSSREEATEKPWLKSLVSRKDHVLDLMLEAMNNLRDSMPKLQIRAPEAQQTLFSINQSCLPGFYTPAELKPFWERPPQDPNAPGADGKAFQKSKWTPLETQEKEEGYKKHCFNAFASDRISLQRSLGPDTRPPECVDQKFRRCPPLATTSVIIVFHNEAWSTLLRTVYSVLHTTPAILLKEIILVDDASTEEHLKEKLEQYVKQLQVVRVVRQEERKGLITARLLGASVAQAEVLTFLDAHCECFHGWLEPLLARIAEDKTVVVSPDIVTIDLNTFEFAKPVQRGRVHSRGNFDWSLTFGWETLPPHEKQRRKDETYPIKSPTFAGGLFSISKSYFEHIGTYDNQMEIWGGENVEMSFRVWQCGGQLEIIPCSVVGHVFRTKSPHTFPKGTSVIARNQVRLAEVWMDSYKKIFYRRNLQAAKMAQEKSFGDISERLQLREQLHCHNFSWYLHNVYPEMFVPDLTPTFYGAIKNLGTNQCLDVGENNRGGKPLIMYSCHGLGGNQYFEYTTQRDLRHNIAKQLCLHVSKGALGLGSCHFTGKNSQVPKDEEWELAQDQLIRNSGSGTCLTSQDKKPAMAPCNPSDPHQLWLFV

SEQ ID NO: 1713 - protein, 344 aa, Homo sapiens
MIDELNKQVSELSQLYKEAQAELEDYRKRKSLEDVTAEYIHKAEHEKLMQLTNVSRAKAEDALSEMKSQYSKVLNELTQLKQLVDAQKENSVSITEHLQVITTLRTAAKEMEEKISNLKEHLASKEVEVAKLEKQLLEEKAAMTDAMVPRSSYEKLQSSLESEVSVLASKLKESVKEKEKVHSEVVQIRSEVSQVKREKENIQTLLKSKEQEVNELLQKFQQAQEELAEMKRYSESSSKLEEDKDKKINEMSKEVTKLKEALNSLSQLSYSTSSSKRQSQQLEALQQQVKQLQNQLAECKKQHQEVISVYRMHLLYAVQGQMDEDVQKVLKQILTMCKNQSQKK

SEQ ID NO: 1714 - protein, 304 aa, Homo sapiens
MAHLGNCLLSIKPQEKSEGLQLNFQQNVDDAMTVLPKLATGLDVNVRFTGVSDFEYTPECSVFDLLGIPLYHGWLVDPQQSPEAARAVGKLSYNQLVERIITCKHSSDTNLVTEGLIAEQFLETTAAHLTYHGLCELTAAAKEGELSVFFRNNHFSTMTKHKSHLYLLVTDQGFLQEEQVVWESLHNVDGDSCFCDSDFHLSHSLGKGPGAEGGSGSPEKQLQVDQDYLIALSLQQQQPRGPLGLTDLELAQQLQQEEYQQQQAAQPVRMRTRVLSLQGRGATSGRPAGERRQRPKHESDCILL

SEQ ID NO: 1715 - protein, 470 aa, Homo sapiens
MEFAAENEGKSGGGLHSVAEGVRLSPEPGREGVRDLAGAEEFGGGEEGTGLTGIKEIGDGEEGSGQRPEEIPMDLTVVKQEIIDWPGTEGRLAGQWVEQEVEDRPEVKDENAGVLEVKQETDSSLVVKEAKVGEPEVKEEKVKEEVMDWSEVKEEKDNLEIKQEEKFVGQCIKEELMHGECVKEEKDFLKKEIVDDTKVKEEPPINHPVGCKRKLAMSRCETCGTEEAKYRCPRCMRYSCSLPCVKKHKAELTCNGVRDKTAYISIQQFTEMNLLSDYRFLEDVARTADHISRDAFLKRPISNKYMYFMKNRARRQGINLKLLPNGFTKRKENSTFFDKKKQQFCWHVKLQFPQSQAEYIEKRVPDDKTINEILKPYIDPEKSDPVIRQRLKAYIRSQTGVQILMKIEYMQQNLVRYYELDPYKSLLDNLRNKVIIEYPTLHVVLKGSNNDMKVLHQVKSESTKNVGNEN

SEQ ID NO: 1716 - protein, 644 aa, Homo sapiens
MRDGGKYSLEQRGVLQKLIHHRKETLSRRGPSASSVAVMTSSTSDHHLDAAAARQPNGVCRAGFERQHSLPSSEHLGADGGLYQIPLPSSQIPPQPRRAAPTTPPPPVKRRDREALMASGSGGHNTMPSGGNSVSSGSSVSSTSLDTLYTSSSPSEPGSSCSPTPPPVPRRGTHTTVSQVQPPPSKASAPEPPAEEEVATGTTSASDDLEALGTLSLGTTEEKAAAEAAVPRTIGAELMELVRRNTGLSHELCRVAIGIIVGHIQASVPASSPVMEQVLLSLVEGKDLSMALPSGQVCHDQQRLEVIFADLARRKDDAQQRSWALYEDEGVIRCYLEELLHILTDADPEVCKKMCKRNEFESVLALVAYYQMEHRASLRLLLLKCFGAMCSLDAAIISTLVSSVLPVELARDMQTDTQDHQKLCYSALILAMVFSMGEAVPYAHYEHLGTPFAQFLLNIVEDGLPLDTTEQLPDLCVNLLLALNLHLPAADQNVIMAALSKHANVKIFSEKLLLLLNRGDDPVRIFKHEPQPPHSVLKFLQDVFGSPATAAIFYHTDMMALIDITVRHIADLSPGDKLRMEYLSLMHAIVRTTPYLQHRHRLPDLQAILRRILNEEETSPQCQMDRMIVREMCKEFLVLGEAPS

SEQ ID NO: 1717 - protein, 185 aa, Homo sapiens
MLKSMVLWLGEQVQSLQLQQQLRHHFNHIHICVTNSEYNQSEYPWDLVKAHLQGAFTSNITFDISELQNKILDLNRHTQEFQPSLEDWTEFQEGLESLNPWTYLKYHSNILYVVLGVMLFCLCLLFIVCKIGWTANRRMRAAQPGLTFFQLIHKQGDMQGAEGPWDVTNSAFHWRLYDQTANCLS

SEQ ID NO: 1718 - protein, 439 aa, Homo sapiens
MFMFNWFTDCLWTLFLSNYQPSVESSSPGGSATSDDHEFDPSADMLVHDFDDERTLEEEEMMEGETNFSSEIEDLAREGDMPIHELLSLYGYGSTVRLPEEDEEEEEEEEEGEDDEDADNDDNSGCSGENKEENIKDSSGQEDETQSSNDDPSQSVASQDAQEIIRPRRCKYFDTNSEVEEESEEDEDYIPSEDWKKEIMVGSMFQAEIPVGICRYKENEKVYENDDQLLWDPEYLPEDKVIIFLKDASRRTGDEKGVEAIPEGSHIKDNEQALYELVKCNFDTEEALRRLRFNVKAAREELSVWTEEECRNFEQGLKAYGKDFHLIQANKVRTRSVGECVAFYYMWKKSERYDFFAQQTRFGKKKYNLHPGVTDYMDRLLDESESAASSRAQSPPPTASNSSNSQSEKEDGTVSTANQNGKQPEKHFSFFIIRDTFLQ

SEQ ID NO: 1719 - protein, 447 aa, Homo sapiens
MGEDTDTRKINHSFLRDHSYVTEADIISTVEFNHTGELLATGDKGGRVVIFQREPESKNAPHSQGEYDVYSTFQSHEPEFDYLKSLEIEEKINKIKWLPQQNAAHSLLSTNDKTIKLWKITERDKRPEGYNLKDEEGKLKDLSTVTSLQVPVLKPMDLMVEVSPRRIFANGHTYHINSISVNSDCETYMSADDLRINLWHLAITDRSFNIVDIKPANMEDLTEVITASEFHPHHCNLFVYSSSKGSLRLCDMRAAALCDKHSKLFEEPEDPSNRSFFSEIISSVSDVKFSHSGRYMLTRDYLTVKVWDLNMEARPIETYQVHDYLRSKLCSLYENDCIFDKFECAWNGSDSVIMTGTYNNFFRMFDRNTKRDVTLEASRESSKPRAVLKPRRVCVGGKRRRDDISVDSLDFTKKILHTAWHPAENIIAIAATNNLYIFQDKVNSDMH

SEQ ID NO: 1720 - protein, 141 aa, Homo sapiens
MSFSLNFTLPANTTSSPVTGGKETDCGPSLGLAAGIPLLVATALLVALLFTLIHRRRSSIEAMEESDRPCEISEIDDNPKISENPRRSPTHEKNTMGAQEAHIYVKTVAGSEEPVHDRYRPTIEMERRRGLWWLVPRLSLE

SEQ ID NO: 1721 - protein, 147 aa, Homo sapiens [sequence omitted]

SEQ ID NO: 1722 - protein, 137 aa, Homo sapiens
MGAHLVRRYLGDASVEPDPLQMPTFPPDYGFPERKEREMVATQQEMMDAQLRLQLRDYCAHHLIRLLKCKRDSFPNFLACKQERHDWDYCEHRDYVMRMKEFERERRLLQRKKRREKKAAELAKGQGPGEVDPKVAL

SEQ ID NO: 1723 - protein, 121 aa, Homo sapiens
MGAHLVRRYLGDASVEPDPLQMPTFPPDYGFPERKEREMVATQQEMMDALLKCKRDSFPNFLACKQERHDWDYCEHRDYVMRMKEFERERRLLQRKKRREKKAAELAKGQGPGEVDPKVAL

SEQ ID NO: 1724 - protein, 1241 aa, Homo sapiens
MRAVLTWRDKAEHCINDIAFKPDGTQLILAAGSRLLVYDTSDGTLLQPLKGHKDTVYCVAYAKDGKRFASGSADKSVIIWTSKLEGILKYTHNDAIQCVSYNPITHQLASCSSSDFGLWSPEQKSVSKHKSSSKIICCSWTNDGQYLALGMFNGIISIRNKNGEEKVKIERPGGSLSPIWSICWNPSSRWESFWMNRENEDAEDVIVNRYIQEIPSTLKSAVYSSQGSEAEEEEPEEEDDSPRDDNLEERNDILAVADWGQKVSFYQLSGKQIGKDRALNFDPCCISYFTKGEYILLGGSDKQVSLFTKDGVRLGTVGEQNSWVWTCQAKPDSNYVVVGCQDGTISFYQLIFSTVHGLYKDRYAYRDSMTDVIVQHLITEQKVRIKCKELVKKIAIYRNRLAIQLPEKILIYELYSEDLSDMHYRVKEKIIKKFECNLLVVCANHIILCQEKRLQCLSFSGVKEREWQMESLIRYIKVIGGPPGREGLLVGLKNGQILKIFVDNLFAIVLLKQATAVRCLDMSASRKKLAVVDENDTCLVYDIDTKELLFQEPNANSVAWNTQCEDMLCFSGGGYLNIKASTFPVHRQKLQGFVVGYNGSKIFCLHVFSISAVEVPQSAPMYQYLDRKLFKEAYQIACLGVTDTDWRELAMEALEGLDFETAKKAFIRVQDLRYLELISSIEERKKRGETNNDLFLADVFSYQGKFHEAAKLYKRSGHENLALEMYTDLCMFEYAKDFLGSGDPKETKMLITKQADWARNIKEPKAAVEMYISAGEHVKAIEICGDHGWVDMLIDIARKLDKAEREPLLLCATYLKKLDSPGYAAETYLKMGDLKSLVQLHVETQRWDEAFALGEKHPEFKDDIYMPYAQWLAENDRFEEAQKAFHKAGRQREAVQVLEQLTNNAVAESRFNDAAYYYWMLSMQCLDIAQDPAQKDTMLGKFYHFQRLAELYHGYHAIHRHTEDPFSVHRPETLFNISRFLLHSLPKDTPSGISKVKILFTLAKQSKALGAYRLARHAYDKLRGLYIPARFQKSIELGTLTIRAKPFHDSEELVPLCYRCSTNNPLLNNLGNVCINCRQPFIFSASSYDVLHLVEFYLEEGITDEEAISLIDLEVLRPKRDDRQLEIANNSSQILRLVETKDSIGDEDPFTAKLSFEQGGSEFVPVVVSRLVLRSMSRRDVLIKRWPPPLRWQYFRSLLPDASITMCPSCFQMFHSEDYELLVLQHGCCPYCRRCKDDPGP

SEQ ID NO: 1725 - protein, 350 aa, Homo sapiens
MNPRGLFQDFNPSKVLIYTCLLLFSGLLPLRLDGIIQWSYWAVFAPIWLRKLLVVAGASVGAGVWARNPRYRTEGEACVEIKAMLIAVGIHLLLLMFEVLVCDRVERGTHFWLLVFMPLFFVSPVSVAACVWGFRHDRSLELEILCSVNILQFIFIALKLDRIIHWPWLVVFVPLWILMSFLCLVVLYYIVWSLLFLRSLDVVAEQRRTHVTMAISWITIVVPLLTFEVLLVHRLDGHNTFSYVSIFVPLWLSLLTLMATTFRRKGGNHWWFGIRRDFCQFLLEIFPFLREYGNISYDLHHEDSEDAEETSVPEAPKIAPIFGKKARVVITQSPGKYVPPPPKLNIDMPD

SEQ ID NO: 1726 - protein, 239 aa, Homo sapiens
MTCFGPYPIGTGLQGITLCYSCFPSFCKMKSRMCMAISICQTLSMLSFVVCAFRYRHMFKRGWPMGTCCLFLPTAAPVLSCEAATQTERRLDLAAVTLRRGLRSRASRCRPRSLIDYKSYMDTKLLVARFLEQSSCTMTPDIHELVENIKSVLKSDEEHMEEAITSASFLEQIMAPLQPSTSRAHKLPLRRQPGLLHLQSCGDLHTITPAGRPRAERRPRRVEAERSHSLIGVIRETVL

SEQ ID NO: 1727 - protein, 237 aa, Homo sapiens
MTCFGPYPIGTGLQGITLCCFPSFCKMKSRMCMAISICQMLSMLSFVVCAFRYRHMFKRGWPMGTCCLFLPTAAPVLSCEAATQTERRLDLAAVTLRRGLRSRASRCRPRSLIDYKSYMDTKLLVARFLEQSSCTMTPDIHELVENIKSVLKSDEEHMEEAITSASFLEQIMAPLQPSTSRAHKLPSRRQPGLLHLQSCGDLHTFTPAGRPRAERRPRRVEAERPHSLIGVIRETVL

SEQ ID NO: 1728 - protein, 105 aa, Homo sapiens [sequence omitted]

SEQ ID NO: 1729 - protein, 242 aa, Homo sapiens
MLTRKIKLWDINAHITCRLCSGYLIDATTVTECLHTFCRSCLVKYLEENITCPTCRIVIHQSHPLQYIGHDRTMQDIVYKLVPGLQEAEMRKQREFYHKLGMEVPGDIKGETCSAKQHLDSHRNGETKADDSSNKEAAEEKPEEDNDYHRSDEQVSICLECNSSKLRGLKRKWIRCSAQATVLHLKKFIAKKLNLSSFNELDILCNEEILGKDHTLKFVVVTRWRFKKAPLLLHYRPKMDLL

SEQ ID NO: 1730 - protein, 377 aa, Homo sapiens
MPHEVVRDENSSVYAEVSRLLLATGHWKRLRRDNPRFNLMLGERNRLPFGRLGHEPGLVQLVNYYRGADKLCRKASLVKLIKTSPELAESCTWFPESYVIYPTNLKTPVAPAQNGIQPPISNSRTDEREFFLASYNRKKEDGEGNVWIAKSSAGAKGEGILISSEASELLDFIDNQGQVHVIQKYLEHPLLLEPGHRKFDIRSWVLVDHQYNIYLYREGVLRTASEPYHVDNFQDKTCHLTNHCIQKEYSKNYGKYEEGNEMFFKEFNQYLTSALNITLESSILLQIKHIIRNCLLSVEPAISTKHLPYQSFQLFGFDFMVDEELKVWLIEVNGAPACAQKLYAELCQGIVDIAISSVFPPPDVEQPQTQPAAFIKL

SEQ ID NO: 1731 - protein, 221 aa, Homo sapiens
MALALAALAAVEPACGSRYQQLQNEEESGEPEQAAGDAPPPYSSISAESAAYFDYKDESGFPKPPSYNVATTLPSYDEAERTKAEATIPLVPGRDEDFVGRDDFDDADQLRIGNDGIFMLTFFMAFLFNWIGFFLSFCLTTSAAGRYGAISGFGLSLIKWILIVRFSTYFPGYFDGQYWLWWVFLVLGFLLFLRGFINYAKVRKMPETFSNLPRTRVLFIY

SEQ ID NO: 1732 - protein, 423 aa, Homo sapiens [sequence omitted]

SEQ ID NO: 1733 - protein, 320 aa, Homo sapiens
MVGYDPKPDGRNNTKFQVAVAGSVSGLVTRALISPFDVIKIRFQLQHERLSRSDPSAKYHGILQASRQILQEEGPTAFWKGHVPAQILSIGYGAVQFLSFEMLTELVHRGSVYDAREFSVHFVCGGLAACMATLTVHPVDVLRTRFAAQGEPKVYNTLRHAVGTMYRSEGPQVFYKGLAPTLIAIFPYAGLQFSCYSSLKHLYKWAIPAEGKKNENLQNLLCGSGAGVISKTLTYPLDLFKKRLQVGGFEHARAAFGQVRRYKGLMDCAKQVLQKEGALGFFKGLSPSLLKAALSTGFMFFSYEFFCNVFHCMNRTASQR

SEQ ID NO: 1734 - protein, 497 aa, Homo sapiens
MDPLGAPSQFVDVDTLPSWGDSCQDELNSSDTTAEIFQEDTVRSPFLYNKDVNGKVVLWKGDVALLNCTAIVNTSNESLTDKNPVSESIFMLAGPDLKEDLQKLKGCRTGEAKLTKGFNLAARFIIHTVGPKYKSRYRTAAESSLYSCYRNVLQLAKEQSMSSVGFCVINSAKRGYPLEDATHIALRTVRRFLEIHGETIEKVVFAVSDLEEGTYQKLLPLYFPRSLKEENRSLPYLPADIGNAEGEPVVPERQIRISEKPGAPEDNQEEEDEGLGVDLSFIGSHAFARMEGDIDKQRKLILQGQLSEAALQKQHQRNYNRWLCQARAEDLSDIASLKALYQTGVDNCGRTVMVVVGRNIPVTLIDMDKALLYFIHVMDHIAVKEYVLVYFHTLTSEYNHLDSDFLKKLYDVVDVKYKRNLKAVYFVHPTFRSKVSTWFFTTFSVSGLKDKIHHVDSLHQLFSAISPEQIDFPPFVLEYDARENGPYYTSYPPSPDL

SEQ ID NO: 1735 - protein, 424 aa, Homo sapiens [sequence omitted]

SEQ ID NO: 1736 - protein, 601 aa, Homo sapiens
MAYDDSVKKEDCFDGDHTFEDIGLAAGRSQREKKRSYKDFLREEEEIAAQVRNSSKKKLKDSELYFLGTDTHKKKRKHSSDDYYYGDISSLESSQKKKKKSSPQSTDTAMDLLKAITSPLAAGSKPSKKTGEKSSGSSSHSESKKEHHRKKVSGSSGELPLEDGGSHKSKKMKPLYVNTETLTLREPDGLKMKLILSPKEKGSSSVDEESFQYPSQQATVKKSSKKSARDEQGALLLGHELQSFLKTARKKHKSSSDAHSSPGPEGCGSDASQFAESHSANLDLSGLEPILVESDSSSGGELEAGELVIDDSYREIKKKKKSKKSKKKKDKEKHKEKRHSKSKRSLGLSAVPVGEVTVTSGPPPSIPYAGAAAPPLPLPGLHTDGHSEKKKKKKEKDKERERGEKPKKKNMSAYQVFCKEYRVTIVADHPGIDFGELSKKLAEVWKQLPEKDKLIWKQKAQYLQHKQNKAEATTVKRKASSSEGSMKVKASSVGVLSPQKKSPPTTMLLPASPAKAPETEPIDVAAHLQLLGESLSLIGHRLQETEGMVAVSGSLSVLLDSIICALGPLACLTTQLPELNGCPKQVLSNTLDNIAYTTPGL

SEQ ID NO: 1737 - protein, 210 aa, Homo sapiens
MSRMFCQAARVDLTLDPDTAHPALMLSPDRRGVRLAERRQEVADHPKRFSADCCVLGAQGFRSGRHYWEVEVGGRRGWAVGAARESTHHKEKVGPGGSSVGSGDASSSRHHHRRRRLHLPQQPLLQREVWCVGTNGKRYQAQSSTEQTLLSPSEKPRRFGVYLDYEAGRLGFYNAETLAHVHTFSAAFLGERVFPFFRVLSKGTRIKLCP

SEQ ID NO: 1738 - protein, 350 aa, Homo sapiens
MSKGLPETRTDAAMSELVPEPRPKPAVPMKPMSINSNLLGYIGIDTIIEQMRKKTMKTGFDFNIMVVGQSGLGKSTLVNTLFKSQVSRKASSWNREEKIPKTVEIKAIGHVIEEGGVKMKLTVIDTPGFGDQINNENCWEPIEKYINEQYEKFLKEEVNIARKKRIPDTRVHCCLYFISPTGHSLRPLDLEFMKHLSKVVNIIPVIAKADTMTLEEKSEFKQRVRKELEVNGIEFYPQKEFDEDLEDKTENDKIRQESMPFAVVGSDKEYQVNGKRVLGRKTPWGIIEVENLNHCEFALLRDFVIRTHLQDLKEVTHNIHYETYRAKRLNDNGGLPPVSVDTEESHDSNP

SEQ ID NO: 1739 - protein, 477 aa, Homo sapiens
MLRWLRDFVLPTAACQDAEQPMRYETLFQALDRNGDGVVDIGELQEGLRNLGIPLGQDAEEKIFTTGDVNKDGKLDFEEFMKYLKDHEKKMKLAFKSLDKNNDGKIEASEIVQSLQTLGLTISEQQAELILQSIDVDGTMTVDWNEWRDYFLFNPVTDIEEIIRFWKHSTGIDIGDSLTIPDEFTEDEKKSGQWWRQLLAGGIAGAVSRTSTAPLDRLKIMMQVHGSKSDKMNIFGGFRQMVKEGGIRSLWRGNGTNVIKIAPETAVKFWAYEQYKKLLTEEGQKIGTFERFISGSMAGATAQTFIYPMEVMKTRLAVGKTGQYSGIYDCAKKILKHEGLGAFYKGYVPNLLGIIPYAGIDLAVYELLKSYWLDNFAKDSVNPGVMVLLGCGALSSTCGQLASYPLALVRTRMQAQAMLEGSPQLNMVGLFRRIISKEGIPGLYRGITPNFMKVLPAVGISYVVYENMKQTLGVTQK

SEQ ID NO: 1740 - protein, 776 aa, Homo sapiens
MLAPRGAAVLLLHLVLQRWLAAGAQATPQVFDLLPSSSQRLNPGALLPVLTDPALNDLYVISTFKLQTKSSATIFGLYSSTDNSKYFEFTVMGRLSKAILRYLKNDGKVHLVVFNNLQLADGRRHRILLRLSNLQRGAGSLELYLDCIQVDSVHNLPRAFAGPSQKPETIELRTFQRKPQDFLEELKLVVRGSLFQVASLQDCFLQQSEPLAATGTGDFNRQFLGQMTQLNQLLGEVKDLLRQQVKETSFLRNTIAECQACGPLKFQSPTPSTVVAPAPPAPPTRPPRRCDSNPCFRGVQCTDSRDGFQCGPCPEGYTGNGITCIDVDECKYHPCYPGVHCINLSPGFRCDACPVGFTGPMVQGVGISFAKSNKQVCTDIDECRNGACVPNSICVNTLGSYRCGPCKPGYTGDQIRGCKVERNCRNPELNPCSVNAQCIEERQGDVTCVCGVGWAGDGYICGKDVDIDSYPDEELPCSARNCKKDNCKYVPNSGQEDADRDGIGDACDEDADGDGILNEQDNCVLIHNVDQRNSDKDIFGDACDNCLSVLNNDQKDTDGDGRGDACDDDMDGDGIKNILDNCPKFPNRDQRDKDGDGVGDACDSCPDVSNPNQSDVDNDLVGDSCDTNQDSDGDGHQDSTDNCPTVINSAQLDTDKDGIGDECDDDDDNDGIPDLVPPGPDNCRLVPNPAQEDSNSDGVGDICESDFDQDQVIDRIDVCPENAEVTLTDFRAYQTVGLDPEGDAQIDPNWVVLNQGMEIVQTMNSDPGLAVGYTAF

SEQ ID NO: 1741 - protein, 370 aa, Homo sapiens
MEGLLHYINPAHAISLLSALNEERLKGQLCDVLLIVGDQKFRAHKNVLAASSEYFQSLFTNKENESQTVFQLDFCEPDAFDNVLNYIYSSSLFVEKSSLAAVQELGYSLGISFLTNIVSKTPQAPFPTCPNRKKVFVEDDENSSQKRSVIVCQSRNEAQGKTVSQNQPDVSHTSRPSPSIAVKANTNKPHVPKPIEPLHNLSLTEKSWPKDSSVVYAKSLEHSGSLDDPNRISLVKRNAVLPSKPLQDREAMDDKPGVSGQLPKGKALELALKRPRPPVLSVCSSSETPYLLKETNKGNGQGEDRNLLYYSKLGLVIPSSGSGSGNQSIDRSGPLVKSLLRRSLSMDSQVPVYSPSIDLKSSQGIIFGVQ

SEQ ID NO: 1742 - protein, 182 aa, Homo sapiens
MLKNKGHSSKKDNLAVNAVALQDHILHDLQLRNLSVADHSKTQVQKKENKSLKRDTKAIIDTGLKKTTQCPKLEDSEKEYVLDPKPPPLTLAQKLGLIGPPPPPLSSDEWEKVKQRSLLQGDSVQPCPICKEEFELRPQVFSIRGCCFHAPMCSTKHVFRLLKSSQIRKPVLSVERTSIKPE

SEQ ID NO: 1743 - protein, 295 aa, Homo sapiens
MSSDGEPLSRMDSEDSISSTIMDVDSTISSGRSTPAMMNGQGSTTSSSKNIAYNCCWDQCQACFNSSPDLADHIRSIHVDGQRGGVFVCLWKGCKVYNTPSTSQSWLQRHMLTHSGDKPFKCVVGGCNASFASQGGLARHVPTHFSQQNSSKVSSQPKAKEESPSKAGMNKRRKLKNKRRRSLPRPHDFFDAQTLDAIRHRAICFNLSAHIESLGKGHSVVFHSPVIAKRKEDSGKIKLLLHWMPEDILHDVWVNESERHQLKTKVVHLSKLPKDTALLLDPNIYRTMPQKRLKR

SEQ ID NO: 1744 - protein, 214 aa, Homo sapiens
MDNAGKEREAVQLMAEAEKRVKASHSFLRGLFGGNTRIEEACEMYTRAANMFKMAKNWSAAGNAFCQAAKLHMQLQSKHDSATSFVDAGNAYKKADPQEAINCLNAAIDIYTDMGRFTIAAKHHITIAEIYETELVDIEKAIAHYEQSADYYKGEESNSSANKCLLKVAAYAAQLEQYQKAIEIYEQVGANTMEYPFVEYRPKDTSSKLPFATL

SEQ ID NO: 1745 - protein, 163 aa, Homo sapiens
MSRRAPGSRLSSGGGGGGTKYPRSWNDWQPRTDSASADPDNLKYSSSRDRGGSSSYGLQPSNSAVVSRQRHDDTRVHADIQNDEKGGYSVNGGSGENTYGRKSLGQELRVNNVTSPEFTSVQHGSRALATKDMRKSQERSMSYCDESRLSNLLRRITREDDRD

SEQ ID NO: 1746 - protein, 56 aa, Homo sapiens
MDHKQLCWSHPQKSGQSSRSCCICSNQHGLIWKYSLNMCLQCCHQYVKDIGFIKLD

SEQ ID NO: 1747 - protein, 89 aa, Homo sapiens
MGLQRFREAAAVFQETLRGGSQPDAARELRSCLLHLTLQGQRGGICAPPLSPGALQPLPHAELAPSGLPSLRCPRSTALRSPGLSPLLH

SEQ ID NO: 1748 - protein, 217 aa, Homo sapiens
MVKLGCSFSGKPGKDPGDQDGAAMDSVPLISPLDISQLQPPLPDQVVIKTQTEYQLSSPDQQNFPDLEGQRLNCSHPEEGRRLPTARMIAFAMALLGCVLIMYKAIWYDQFTCPDGFLLRHKICTPLTLEMYYTEMDPERHRSILAAIGAYPLSRKHGTETPAAWGDGYRAAKEERKGPTQAGAAAAATEPPGKPSAKAEKEAARKAAGSAAPPPAQ

SEQ ID NO: 1749 - protein, 404 aa, Homo sapiens
MAESVERLQQRVQELERELAQERSLQVPRSGDGGGGRVRIEKMSSEVVDSNPYSRLMALKRMGIVSDYEKIRTFAVAIVGVGGVGSVTAEMLTRCGIGKLLLFDYDKVELANMNRLFFQPHQAGLSKVQAAEHTLRNINPDVLFEVHNYNITTVENFQHFMDRISNGGLEEGKPVDLVLSCVDNFEARMTINTACNELGQTWMESGVSENAVSGHIQLIIPGESACFACAPPLVVAANIDEKTLKREGVCAASLPTTMGVVAGILVQNVLKFLLNFGTVSFYLGYNAMQDFFPTMSMKPNPQCDDRNCRKQQEEYKKKVAALPKQEVIQEEEEIIHEDNEWGIELVSEVSEEELKNFSGPVPDLPEGITVAYTIPKKQEDSVTELTVEDSGESLEDLMAKMKNM

SEQ ID NO: 1750 - protein, 198 aa, Homo sapiens
MADQRQRSLSTSGESLYHVLGLDKNATSDDIKKSYRKLALKYHPDKNPDNPEAADKFKEINNAHAILTDATKRNIYDKYGSLGLYVAEQFGEENVNTYFVLSSWWAKALFVFCGLLTCCYCCCCLCCCFNCCCGKCKPKAPEGEETEFYVSPEDLEAQLQSDEREATDTPIVIQPASATETTQLTADSHPSYHTDGFN

SEQ ID NO: 1751 - protein, 952 aa, Homo sapiens
MGSRADGPRTSGHVTGKMAVFPWHSRNRNYKAEFASCRLEAVPLEFGDYHPLKPITVTESKTKKVNRKGSTSSTSSSSSSSVVDPLSSVLDGTDPLSMFAATADPAALAAAMDSSRRKRDRDDNSVVGSDFEPWTNKRGEILARYTTTEKLSINLFMGSEKGKAGTATLAMSEKVRTRLEELDDFEEGSQKELLNLTQQDYVNRIEELNQSLKDAWASDQKVKALKIVHPGKLVYERIFSMCVDSRSVLPDHFSPENANDTAKETCLNWFFKIASIRELIPRFYVEASILKCNKFLSKTGISECLPRLTCMIRGIGDPLVSVYARAYLCRVGMEVAPHLKETLNKNFFDFLLTFKQIHGDTVQNQLVVQGVELPSYLPLYPPAMDWIFQCISYHAPEALLTEMMERCKKLGNNALLLNSVMSAFRAEFIATRSMDFIGMIKECDESGFPKHLLFRSLGLNLALADPPESDRLQILNEAWKVITKLKNPQDYINCAEVWVEYTCKHFTKREVNTVLADVIKHMTPDRAFEDSYPQLQLIIKKVIAHFHDFSVLFSVEKFLPFLDMFQKESVRVEVCKCIMDAFIKHQQEPTKDPVILNALLHVCKTMHDSVNALTLEDEKRMLSYLINGFIKMVSFGRDFEQQLSFYVESRSMFCNLEPVLVQLIHSVNRLAMETRKVMKGNHSRKTAAFVRACVAYCFITIPSLAGIFTRLNLYLHSGQVALANQCLSQADAFFKAAISLVPEVPKMINIDGKMRPSESFLLEFLCNFFSTLLIVPDHPEHGVLFLVRELLNVIQDYTWEDNSDEKIRIYTCVLHLLSAMSQETYLYHIDKVDSNDSLYGGDSKFLAENNKLCETVMAQILEHLKTLAKDEALKRQSSLGLSFFNSILAHGDLRNNKLNQLSVNLWHLAQRHGCADTRTMVKTLEYIKKQSKQPDMTHLTELALRLPLQTRT

SEQ ID NO: 1752 - protein, 509 aa, Homo sapiens
MAERAALEELVKLQGERVRGLKQQKASAELIEEEVAKLLKLKAQLGPDESKQKFVLKTPKGTRDYSPRQMAVREKVFDVIIRCFKRHGAEVIDTPVFELKETLMGKYGEDSKLIYDLKDQGGELLSLRYDLTVPFARYLAMNKLTNIKRYHIAKVYRRDNPAMTRGRYREFYQCDFDIAGNFDPMIPDAECLKIMCEILSSLQIGDFLVKVNDRRILDGMFAICGVSDSKFRTICSSVDKLDKVSWEEVKNEMVGEKGLAPEVADRIGDYVQQHGGVSLVEQLLQDPKLSQNKQALEGLGDLKLLFEYLTLFGIDDKISFDLSLARGLDYYTGVIYEAVLLQTPAQAGEEPLGVGSVAAGGRYDGLVGMFDPKGRKVPCVGLSIGVERIFSIVEQRLEALEEKIRTTETQVLVASAQKKLLEERLKLVSELWDAGIKAELLYKKNPKLLNQLQYCEEAGIPLVAIIGEQELKDGVIKLRSVTSREEVDVRREDLVEEIKRRTGQPLCIC

SEQ ID NO: 1753 - protein, 4544 aa, Homo sapiens
MLTPPLLLLLPLLSALVAAAIDAPKTCSPKQFACRDQITCISKGWRCDGERDCPDGSDEAPEICPQSKAQRCQPNEHNCLGTELCVPMSRLCNGVQDCMDGSDEGPHCRELQGNCSRLGCQHHCVPTLDGPTCYCNSSFQLQADGKTCKDFDECSVYGTCSQLCTNTDGSFICGCVEGYLLQPDNRSCKAKNEPVDRPPVLLIANSQNILATYLSGAQVSTITPTSTRQTTAMDFSYANETVCWVHVGDSAAQTQLKCARMPGLKGFVDEHTINISLSLHHVEQMAIDWLTGNFYFVDDIDDRIFVCNRNGDTCVTLLDLELYNPKGIALDPAMGKVFFTDYGQIPKVERCDMDGQNRTKLVDSKIVFPHGITLDLVSRLVYWADAYLDYIEVVDYEGKGRQTIIQGILIEHLYGLTVFENYLYATNSDNANAQQKTSVIRVNRFNSTEYQVVTRVDKGGALHIYHQRRQPRVRSHACENDQYGKPGGCSDICLLANSHKARTCRCRSGFSLGSDGKSCKKPEHELFLVYGKGRPGIIRGMDMGAKVPDEHMIPIENLMNPRALDFHAETGFIYFADTTSYLIGRQKIDGTERETILKDGIHNVEGVAVDWMGDNLYWTDDGPKKTISVARLEKAAQTRKTLIEGKMTHPRAIVVDPLNGWMYWTDWEEDPKDSRRGRLERAWMDGSHRDIFVTSKTVLWPNGLSLDIPAGRLYWVDAFYDRIETILLNGTDRKIVYEGPELNHAFGLCHHGNYLFWTEYRSGSVYRLERGVGGAPPTVTLLRSERPPIFEIRMYDAQQQQVGTNKCRVNNGGCSSLCLATPGSRQCACAEDQVLDADGVTCLANPSYVPPPQCQPGEFACANSRCIQERWKCDGDNDCLDNSDEAPALCHQHTCPSDRFKCENNRCIPNRWLCDGDNDCGNSEDESNATCSARTCPPNQFSCASGRCIPISWTCDLDDDCGDRSDESASCAYPTCFPLTQFTCNNGRCININWRCDNDNDCGDNSDEAGCSHSCSSTQFKCNSGRCIPEHWTCDGDNDCGDYSDETHANCTNQATRPPGGCHTDEFQCRLDGLCIPLRWRCDGDTDCMDSSDEKSCEGVTHVCDPSVKFGCKDSARCISKAWVCDGDNDCEDNSDEENCESLACRPPSHPCANNTSVCLPPDKLCDGNDDCGDGSDEGELCDQCSLNNGGCSHNCSVAPGEGIVCSCPLGMELGPDNHTCQIQSYCAKHLKCSQKCDQNKFSVKCSCYEGWVLEPDGESCRSLDPFKPFIIFSNRHEIRRIDLHKGDYSVLVPGLRNTIALDFHLSQSALYWTDVVEDKIYRGKLLDNGALTSFEVVIQYGLATPEGLAVDWIAGNIYWVESNLDQIEVAKLDGTLRTTLLAGDIEHPRAIALDPRDGILFWTDWDASLPRIEAASMSGAGRRTVHRETGSGGWPNGLTVDYLEKRILWIDARSDAIYSARYDGSGHMEVLRGHEFLSHPFAVTLYGGEVYWTDWRTNTLAKANKWTGHNVTVVQRTNTQPFDLQVYHPSRQPMAPNPCEANGGQGPCSHLCLINYNRTVSCACPHLMKLHKDNTTCYEFKKFLLYARQMEIRGVDLDAPYYNYIISFTVPDIDNVTVLDYDAREQRVYWSDVRTQAIKRAFINGTGVETVVSADLPNAHGLAVDWVSRNLFWTSYDTNKKQINVARLDGSFKNAVVQGLEQPHGLVVHPLRGKLYWTDGDNISMANMDGSNRTLLFSGQKGPVGLAIDFPESKLYWISSGNHTINRCNLDGSGLEVIDAMRSQLGKATALAIMGDKLWWADQVSEKMGTCSKADGSGSVVLRNSTTLVMHMKVYDESIQLDHKGTNPCSVNNGDCSQLCLPTSETTRSCMCTAGYSLRSGQQACEGVGSFLLYSVHEGIRGIPLDPNDKSDALVPVSGTSLAVGIDFHAENDTIYWVDMGLSTISRAKRDQTWREDVVTNGIGRVEGIAVDWIAGNIYWTDQGFDVIEVARLNGSFRYVVISQGLDKPRAITVHPEKGYLFWTEWGQYPRIERSRLDGTERVVLVNVSISWPNGISVDYQDGKLYWCDARTDKIERIDLETGENREVVLSSNNMDMFSVSVFEDFIYWSDRTHANGSIKRGSKDNATDSVPLRTGIGVQLKDIKVFNRDRQKGTNVCAVANGGCQQLCLYRGRGQRACACAHGMLAEDGASCREYAGYLLYSERTILKSIHLSDERNLNAPVQPFEDPEHMKNVIALAFDYRAGTSPGTPNRIFFSDIHFGNIQQINDDGSRRITIVENVGSVEGLAYHRGWDTLYWTSYTTSTITRHTVDQTRPGAFERETVITMSGDDHPRAFVLDECQNLMFWTNWNEQHPSIMRAALSGANVLTLIEKDIRTPNGLAIDHRAEKLYFSDATLDKIERCEYDGSHRYVILKSEPVHPFGLAVYGEHIFWTDWVRRAVQRANKHVGSNMKLLRVDIPQQPMGIIAVANDTNSCELSPCRINNGGCQDLCLLTHQGHVNCSCRGGRILQDDLTCRAVNSSCRAQDEFECANGECINFSLTCDGVPHCKDKSDEKPSYCNSRRCKKTFRQCSNGRCVSNMLWCNGADDCGDGSDEIPCNKTACGVGEFRCRDGTCIGNSSRCNQFVDCEDASDEMNCSATDCSSYFRLGVKGVLFQPCERTSLCYAPSWVCDGANDCGDYSDERDCPGVKRPRCPLNYFACPSGRCIPMSWTCDKEDDCEHGEDETHCNKFCSEAQFECQNHRCISKQWLCDGSDDCGDGSDEAAHCEGKTCGPSSFSCPGTHVCVPERWLCDGDKDCADGADESIAAGCLYNSTCDDREFMCQNRQCIPKHFVCDHDRDCADGSDESPECEYPTCGPSEFRCANGRCLSSRQWECDGENDCHDQSDEAPKNPHCTSPEHKCNASSQFLCSSGRCVAEALLCNGQDDCGDSSDERGCHINECLSRKLSGCSQDCEDLKIGFKCRCRPGFRLKDDGRTCADVDECSTTFPCSQRCINTHGSYKCLCVEGYAPRGGDPHSCKAVTDEEPFLIFANRYYLRKLNLDGSNYTLLKQGLNNAVALDFDYREQMIYWTDVTTQGSMIRRMHLNGSNVQVLHRTGLSNPDGLAVDWVGGNLYWCDKGRDTIEVSKLNGAYRTVLVSSGLREPRALVVDVQNGYLYWTDWGDHSLIGRIGMDGSSRSVIVDTKITWPNGLTLDYVTERIYWADAREDYIEFASLDGSNRHVVLSQDIPHIFALTLFEDYVYWTDWETKSINRAHKTTGTNKTLLISTLHRPMDLHVFHALRQPDVPNHPCKVNNGGCSNLCLLSPGGGHKCACPTNFYLGSDGRTCVSNCTASQFVCKNDKCIPFWWKCDTEDDCGDHSDEPPDCPEFKCRPGQFQCSTGICTNPAFICDGDNDCQDNSDEANCDIHVCLPSQFKCTNTNRCIPGIFRCNGQDNCGDGEDERDCPEVTCAPNQFQCSITKRCIPRVWVCDRDNDCVDGSDEPANCTQMTCGVDEFRCKDSGRCIPARWKCDGEDDCGDGSDEPKEECDERTCEPYQFRCKNNRCVPGRWQCDYDNDCGDNSDEESCTPRPCSESEFSCANGRCIAGRWKCDGDHDCADGSDEKDCTPRCDMDQFQCKSGHCIPLRWRCDADADCMDGSDEEACGTGVRTCPLDEFQCNNTLCKPLAWKCDGEDDCGDNSDENPEECARFVCPPNRPFRCKNDRVCLWIGRQCDGTDNCGDGTDEEDCEPPTAHTTHCKDKKEFLCRNQRCLSSSLRCNMFDDCGDGSDEEDCSIDPKLTSCATNASICGDEARCVRTEKAAYCACRSGFHTVPGQPGCQDINECLRFGTCSQLCNNTKGGHLCSCARNFMKTHNTCKAEGSEYQVLYIADDNEIRSLFPGHPHSAYEQAFQGDESVRIDAMDVHVKAGRVYWTNWHTGTISYRSLPPAAPPTTSNRHRRQIDRGVTHLNISGLKMPRGIAIDWVAGNVYWTDSGRDVIEVAQMKGENRKTLISGMIDEPHAIVVDPLRGTMYWSDWGNHPKIETAAMDGTLRETLVQDNIQWPTGLAVDYHNERLYWADAKLSVIGSIRLNGTDPIVAADSKRGLSHPFSIDVFEDYIYGVTYINNRVFKIHKFGHSPLVNLTGGLSHASDVVLYHQHKQPEVTNPCDRKKCEWLCLLSPSGPVCTCPNGKRLDNGTCVPVPSPTPPPDAPRPGTCNLQCFNGGSCFLNARRQPKCRCQPRYTGDKCELDQCWEHCRNGGTCAASPSGMPTCRCPTGFTGPKCTQQVCAGYCANNSTCTVNQGNQPQCRCLPGFLGDRCQYRQCSGYCENFGTCQMAADGSRQCRCTAYFEGSRCEVNKCSRCLEGACVVNKQSGDVTCNCTDGRVAPSCLTCVGHCSNGGSCTMNSKMMPECQCPPHMTGPRCEEHVFSQQQPGHIASILIPLLLLLLLVLVAGVVFWYKRRVQGAKGFQHQRMTNGAMNVEIGNPTYKMYEGGEPDDVGGLLDADFALDPDKPTNFTNPVYATLYMGGHGSRHSLASTDEKRELLGRGPEDEIGDPLA

SEQ ID NO: 1754 - protein, 392 aa, Homo sapiens
MELVAGCYEQVLFGFAVHPEPEACGDHEQWTLVADFTHHAHTASLSAVAVNSRFVVTGSKDETIHIYDMKKKIEHGALVHHSGTITCLKFYGNRHLISGAEDGLICIWDAKKWECLKSIKAHKGQVTFLSIHPSGKLALSVGTDKTLRTWNLVEGRSAFIKNIKQNAHIVEWSPRGEQYVVIIQNKIDIYQLDTASISGTITNEKRISSVKFLSESVLAVAGDEEVIRFFDCDSLVCLCEFKAHENRVKDMFSFEIPEHHVIVSASSDGFIKMWKLKQDKKVPPSLLCEINTNARLTCLGVWLDKVADMKESLPPAAEPSPVSKEQSKIGKKEPGDTVHKEEKRSKPNTKKRGLTGDSKKATKESGLISTKKRKMVEMLEKKRKKKKIKPMQ

SEQ ID NO: 1755 - protein, 266 aa, Homo sapiens
MEMKKKINLELRNRSPEEVTELVLDNCLCVNGEIEGLNDTFKELEFLSMANVELSSLARLPSLNKLRKLELSDNIISGGLEVLAEKCPNLTYLNLSGNKIKDLSTVEALQNLKNLKSLDLFNCEITNLEDYRESIFELLQQITYLDGFDQEDNEAPDSEEEDDEDGDEDDEEEEENEAGPPEGYEEEEEEEEDEDEDEDEDEAGSELGEGEEEVGLSYLMKEEIQDEEDDDDYVEEGEEEEEEEEGGLRGEKRKRDAEDDGEEEDD

SEQ ID NO: 1756 - protein, 237 aa, Homo sapiens
MALEAAGGPPEETLSLWKREQARLKAHVVDRDTEAWQRDPAFSGLQRVGGVDVSFVKGDSVRACASLVVLSFPELEVLLVDGNGVLHHRGFGVACHLGVLTDLPCVGVAKKLLQVDGLENNALHKEKIRLLQTRGDSFPLLGDSGTVLGMALRSHDRSTRPLYISVGHRMSLEAAVRLTCCCCRFRIPEPVRQADICSREHIRKSLGLPGPPTPRSPKAQRPVACPKGDSGESSALC

SEQ ID NO: 1757 - protein, 282 aa, Homo sapiens
MALEAAGGPPEETLSLWKREQARLKAHVVDRDTEAWQRDPAFSGLQRVGGVDVSFVKGDSVRACASLVVLSFPELEVVYEESRMVSLTAPYVSGFLAFREVPFLLELVQQLREKEPGLMPQVLLVDGNGVLHHRGFGVACHLGVLTDLPCVGVAKKLLQVDGLENNALHKEKIRLLQTRGDSFPLLGDSGTVLGMALRSHDRSTRPLYISVGHRMSLEAAVRLTCCCCRFRIPEPVRQADICSREHIRKSLGLPGPPTPRSPKAQRPVACPKGDSGESSALC

SEQ ID NO: 1758 - protein, 1028 aa, Homo sapiens
MNLFNLDRFGFEKRNKIEEAPEATPQPSQPGPSSPISLSAEEENAEGEVSRANTPDSDITEKTEDSSVPETPDNERKASISYFKNQRGIQYIDLSSDSEDVVSPNCSNTVQEKTFNKDTVIIVSEPSEDEESQGLPTMARRNDDISELEDLSELEDLKDAKLQTLKELFPQRSDNDLLKLIESTSTMDGAIAAALLMFGDAGGGPRKRKLSSSSEPYEEDEFNDDQSIKKTRLDHGEESNESAESSSNWEKQESIVLKLQKEFPNFDKQELREVLKEHEWMYTEALESLKVFAEDQDMQYASQSEVPNGKEVSSRSQNYPKNATKTKLKQKFSMKAQNGFNKKKKKNVFNPKRVVEDSEYDSGSDVGSSLDEDYSSGEEVMEDGYKGKILHFLQDASIGELTLIPQCSQKKAQKITELRPFNSWEALFTKMSKTNGLSEDLIWHCKTLIQERDVVIRLMNKCEDISNKLTKQVTMLTGNGGGWNIEQPSILNQSLSLKPYQKVGLNWLALVHKHGLNGILADEMGLGKTIQAIAFLAYLYQEGNNGPHLIVVPASTIDNWLREVNLWCPTLKVLCYYGSQEERKQIRFNIHSRYEDYNVIVTTYNCAISSSDDRSLFRRLKLNYAIFDEGHMLKNMGSIRYQHLMTINANNRLLLTGTPVQNNLLELMSLLNFVMPHMFSSSTSEIRRMFSSKTKSADEQSIYEKERIAHAKQIIKPFILRRVKEEVLKQLPPKKDRIELCAMSEKQEQLYLGLFNRLKKSINNLVTEKNTEMCNVMMQLRKMANHPLLHRQYYTAEKLKEMSQLMLKEPTHCEANPDLIFEDMEVMTDFELHVLCKQYRHINNFQLDMDLILDSGKFRVLGCILSELKQKGDRVVLFSQFTMMLDILEVLLKHHQHRYLRLDGKTQISERIHLIDEFNTDMDIFVFLLSTKAGGLGINLTSANVVILHDIDCNPYNDKQAEDRCHRVGQTKEVLVIKLISQGTIEESMLKINQQKLKLEQDMTTVDEGDEGSMPADIATLLKTSMGL

SEQ ID NO: 1759 - protein, 299 aa, Homo sapiens
MQLPLRNSRVDGFVSNLVGARIPRGKVITTARGSSTGELEGHASSRLPPQPCGWGQSSDLLSRIDLDELMKKDEPPLDFPDTLEGFEYAFNEKGQLRHIKTGEPFVFNYREDLHRWNQKRYEALGEIITKYVYELLEKDCNLKKVSIPVDATESEPKSFIFMSEDALTNPQKLMVLIHGSGVVRAGQWARRLIINEDLDSGTQIPFIKRAVAEGYGVIVLNPNENYIEVEKPKIHVQSSSDSSDEPAEKRERKDKVSKETKKRRDFYEKYRNNKKKKKKTQKGGQVQQYNLIMSHNTIH

SEQ ID NO: 1760 - protein, 1053 aa, Homo sapiens
MALDNLLANLPPAKPGKSSSLEMTPYNTPQLSPATTPANKKNRLPIATRSRSRTNMLMDLHMDHEGSSQETIQEVQPEEVLVISLGTGPQLTPGMMSENEVLNMQLSDGGQGDVPVDENKLHGKPDKTLRFSLCSDNLEGISEGPSNRSNSVSSLDLEGESVSELGAGPSGSNGVEALQLLEHEQATTQDNLDDKLRKFEIRDMMGLTDDRDISETVSETWSTDVLGSDFDPNIDEDRLQEIAGAAAENMLGSLLCLPGSGSVLLDPCTGSTISETTSEAWSVEVLPSDSEAPDLKQEERLQELESCSGLGSTSDDTDVREVSSRPSTPGLSVVSGISATSEDIPNKIEDLRSECSSDFGGKDSVTSPDMDEITHDFLYILQPKQHFQHIEAEADMRIQLSSSAHQLTSPPSQSESLLAMFDPLSSHEGASAVVRPKVHYARPSHPPPDPPILEGAVGGNEARLPNFGSHVLTPAEMEAFKQRHSYPERLVRSRSSDIVSSVRRPMSDPSWNRRPGNEERELPPAAAIGATSLVAAPHSSSSSPSKDSSRGETEERKDSDDEKSDRNRPWWRKRFVSAMPKAPIPFRKKEKQEKDKDDLGPDRFSTLTDDPSPRLSAQAQVAEDILDKYRNAIKRTSPSDGAMANYESTEVMGDGESAHDSPRDEALQNISADDLPDSASQAAHPQDSAFSYRDAKKKLRLALCSADSVAFPVLTHSTRNGLPDHTDPEDNEIVCFLKVQIAEAINLQDKNLMAQLQETMRCVCRFDNRTCRKLLASIAEDYRKRAPYIAYLTRCRQGLQTTQAHLERLLQRVLRDKEVANRYFTTVCVRLLLESKEKKIREFIQDFQKLTAADDKTAQVEDFLQFLYGAMAQDVIWQNASEEQLQDAQLAIERSVMNRIFKLAFYPNQDGDILRDQVLHEHIQRLSKVVTANHRALQIPEVYLREAPWPSAQSEIRTISAYKTPRDKVQCILRMCSTIMNLLSLANEDSVPGADDFVPVLVFVLIKANPPCLLSTVQYISSFYASCLSGEESYWWMQFTAAVEFIKTIDDRK

SEQ ID NO: 1761 - protein, 1026 aa, Homo sapiens
MALDNLLANLPPAKPGKSSSLEMTPYNTPQLSPATTPANKKNRLPIATRSRSRTNMLMDLHMDHEGSSQETIQEVQPEEVLVISLGTGPQLTPGMMSENEVLNMQLSDGGQGDVPVDENKLHGKPDKTLRFSLCSDNLEGISEGPSNRSNSVSSLDLEGESVSELGAGPSGSNGVEALQLLEHEQATTQDNLDDKLRKFEIRDMMGLTDDRDISETVSETWSTDVLGSDFDPNIDEDRLQEIAGAAAENMLGSLLCLPGSGSVLLDPCTGSTISETTSEAWSVEVLPSDSEAPDLKQEERLQELESCSGLGSTSDDTDVREVSSRPSTPGLSVVSGISATSEDIPNKIEDLRSECSSDFGGKDSVTSPDMDEITHGAHQLTSPPSQSESLLAMFDPLSSHEGASAVVRPKVHYARPSHPPPDPPILEGAVGGNEARLPNFGSHVLTPAEMEAFKQRHSYPERLVRSRSSDIVSSVRRPMSDPSWNRRPGNEERELPPAAAIGATSLVAAPHSSSSSPSKDSSRGETEERKDSDDEKSDRNRPWWRKRFVSAMPKAPIPFRKKEKQEKDKDDLGPDRFSTLTDDPSPRLSAQAQVAEDILDKYRNAIKRTSPSDGAMANYESTEVMGDGESAHDSPRDEALQNISADDLPDSASQAAHPQDSAFSYRDAKKKLRLALCSADSVAFPVLTHSTRNGLPDHTDPEDNEIVCFLKVQIAEAINLQDKNLMAQLQETMRCVCRFDNRTCRKLLASIAEDYRKRAPYIAYLTRCRQGLQTTQAHLERLLQRVLRDKEVANRYFTTVCVRLLLESKEKKIREFIQDFQKLTAADDKTAQVEDFLQFLYGAMAQDVIWQNASEEQLQDAQLAIERSVMNRIFKLAFYPNQDGDILRDQVLHEHIQRLSKVVTANHRALQIPEVYLREAPWPSAQSEIRTISAYKTPRDKVQCILRMCSTIMNLLSLANEDSVPGADDFVPVLVFVLIKANPPCLLSTVQYISSFYASCLSGEESYWWMQFTAAVEFIKTIDDRK

SEQ ID NO: 1762 - protein, 1026 aa, Homo sapiens
MALDNLLANLPPAKPGKSSSLEMTPYNTPQLSPATTPANKKNRLPIATRSRSRTNMLMDLHMDHEGSSQETIQEVQPEEVLVISLGTGPQLTPGMMSENEVLNMQLSDGGQGDVPVDENKLHGKPDKTLRFSLCSDNLEGISEGPSNRSNSVSSLDLEGESVSELGAGPSGSNGVEALQLLEHEQATTQDNLDDKLRKFEIRDMMGLTDDRDISETVSETWSTDVLGSDFDPNIDEDRLQEIAGAAAENMLGSLLCLPGSGSVLLDPCTGSTISETTSEAWSVEVLPSDSEAPDLKQEERLQELESCSGLGSTSDDTDVREVSSRPSTPGLSVVSGISATSEDIPNKIEDLRSECSSDFGGKDSVTSPDMDEITHDFLYILQPKQHFQHIEAEADMRIQLSSSAHQLTSPPSQSESLLAMFDPLSSHEGASAVVRPKVHYARPSHPPPDPPILEGAVGGNEARLPNFGSHVLTPAEMEAFKQRHSYPERLVRSRSSDIVSSVRRPMSDPSWNRRPGNEERELPPAAAIGATSLVAAPHSSSSSPSKDSSRGETEERKDSDDEKSDRNRPWWRKRFVSAMPKDDPSPRLSAQAQVAEDILDKYRNAIKRTSPSDGAMANYESTEVMGDGESAHDSPRDEALQNISADDLPDSASQAAHPQDSAFSYRDAKKKLRLALCSADSVAFPVLTHSTRNGLPDHTDPEDNEIVCFLKVQIAEAINLQDKNLMAQLQETMRCVCRFDNRTCRKLLASIAEDYRKRAPYIAYLTRCRQGLQTTQAHLERLLQRVLRDKEVANRYFTTVCVRLLLESKEKKIREFIQDFQKLTAADDKTAQVEDFLQFLYGAMAQDVIWQNASEEQLQDAQLAIERSVMNRIFKLAFYPNQDGDILRDQVLHEHIQRLSKVVTANHRALQIPEVYLREAPWPSAQSEIRTISAYKTPRDKVQCILRMCSTIMNLLSLANEDSVPGADDFVPVLVFVLIKANPPCLLSTVQYISSFYASCLSGEESYWWMQFTAAVEFIKTIDDRK

SEQ ID NO: 1763 - protein, 685 aa, Homo sapiens
METLESELTCPICLELFEDPLLLPCAHSLCFSCAHRILVSSCSSGESIEPITAFQCPTCRYVISLNHRGLDGLKRNVTLQNIIDRFQKASVSGPNSPSESRRERTYRPTTAMSSERIACQFCEQDPPRDAVKTCITCEVSYCDRCLRATHPNKKPFTSHRLVEPVPDTHLRGITCLDHENEKVNMYCVSDDQLICALCKLVGRHRDHQVASLNDRFEKLKQTLEMNLTNLVKRNSELENQMAKLIQICQQVEVNTAMHEAKLMEECDELVEIIQQRKQMIAVKIKETKVMKLRKLAQQVANCRQCLERSTVLINQAEHILKENDQARFLQSAKNIAERVAMATASSQVLIPDINFNDAFENFALDFSREKKLLEGLDYLTAPNPPSIREELCTASHDTITVHWISDDEFSISSYELQYTIFTGQANFISLYNSVDSWMIVPNIKQNHYTVHGLQSGTRYIFIVKAINQAGSRNSEPTRLKTNSQPFKLDPKMTHKKLKISNDGLQMEKDESSLKKSHTPERFSGTGCYGAAGNIFIDSGCHYWEVVMGSSTWYAIGIAYKSAPKNEWIGKNASSWVFSRCNSNFVVRHNNKEMLVDVPPHLKRLGVLLDYDNNMLSFYDPANSLHLHTFDVTFILPVCPTFTIWNKSLMILSGLPAPDFIDYPERQECNCRPQESPYVSGMKTCH

SEQ ID NO: 1764 - protein, 838 aa, Homo sapiens
MTGAEIEPSAQAKPEKKAGEEVIAGPERENDVPLVVRPKVRTQATTGARPKTETKSVPAARPKTEAQAMSGARPKTEVQVMGGARPKTEAQGITGARPKTDARAVGGARSKTDAKAIPGARPKDEAQAWAQSEFGTEAVSQAEGVSQTNAVAWPLATAESGSVTKSKGLSMDRELVNVDAETFPGTQGQKGIQPWFGPGEETNMGSWCYSRPRAREEASNESGFWSADETSTASSFWTGEETSVRSWPREESNTRSRHRAKHQTNPRSRPRSKQEAYVDSWSGSEDEASNPFSFWVGENTNNLFRPRVREEANIRSKLRTNREDCFESESEDEFYKQSWVLPGEEANSRFRHRDKEDPNTALKLRAQKDVDSDRVKQEPRFEEEVIIGSWFWAEKEASLEGGASAICESEPGTEEGAIGGSAYWAEEKSSLGAVAREEAKPESEEEAIFGSWFWDRDEACFDLNPCPVYKVSDRFRDAAEELNASSRPQTWDEVTVEFKPGLFHGVGFRSTSPFGIPEEASEMLEAKPKNLELSPEGEEQESLLQPDQPSPEFTFQYDPSYRSVREIREHLRARESAESESWSCSCIQCELKIGSEEFEEFLLLMDKIRDPFIHEISKIAMGMRSASQFTRDFIRDSGVVSLIETLLNYPSSRVRTSFLENMIHMAPPYPNLNMIETFICQVCEETLAHSVDSLEQLTGIRMLRHLTMTIDYHTLIANYMSGFLSLLTTANARTKFHVLKMLLNLSENPAVAKKLFSAKALSIFVGLFNIEETNDNIQIVIKMFQNISNIIKSGKMSLIDDDFSLEPLISAFREFEELAKQLQAQIDNQNDPEVGQQS

SEQ ID NO: 1765 - protein, 1021 aa, Homo sapiens
MDLLSGTYIFAVLLACVVFHSGAQEKNYTIREEMPENVLIGDLLKDLNLSLIPNKSLTTAMQFKLVYKTGDVPLIRIEEDTGEIFTTGARIDREKLCAGIPRDEHCFYEVEVAILPDEIFRLVKIRFLIEDINDNAPLFPATVINISIPENSAINSKYTLPAAVDPDVGINGVQNYELIKSQNIFGLDVIETPEGDKMPQLIVQKELDREEKDTYVMKVKVEDGGFPQRSSTAILQVSVTDTNDNHPVFKETEIEVSIPENAPVGTSVTQLHATDADIGENAKIHFSFSNLVSNIARRLFHLNATTGLITIKEPLDREETPNHKLLVLASDGGLMPARAMVLVNVTDVNDNVPSIDIRYIVNPVNDTVVLSENIPLNTKIALITVTDKDADHNGRVTCFTDHEIPFRLRPVFSNQFLLETAAYLDYESTKEYAIKLLAADAGKPPLNQSAMLFIKVKDENDNAPVFTQSFVTVSIPENNSPGIQLTKVSAMDADSGPNAKINYLLGPDAPPEFSLDCRTGMLTVVKKLDREKEDKYLFTILAKDNGVPPLTSNVTVFVSIIDQNDNSPVFTHNEYNFYVPENLPRHGTVGLITVTDPDYGDNSAVTLSILDENDDFTIDSQTGVIRPNISFDREKQESYTFYVKAEDGGRVSRSSSAKVTINVVDVNDNKPVFIVPPSNCSYELVLPSTNPGTVVFQVIAVDNDTGMNAEVRYSIVGGNTRDLFAIDQETGNITLMEKCDVTDLGLHRVLVKANDLGQPDSLFSVVIVNLFVNESVTNATLINELVRKSTEAPVTPNTEIADVSSPTSDYVKILVAAVAGTITVVVVIFITAVVRCRQAPHLKAAQKNKQNSEWATPNPENRQMIMMKKKKKKKKHSPKNLLLNFVTIEETKADDVDSDGNRVTLDLPIDLEEQTMGKYNWVTTPTTFKPDSPDLARHYKSASPQPAFQIQPETPLNSKHHIIQELPLDNTFVACDSISKCSSSSSDPYSVSDCGYPVTTFEVPVSVHTRPVGIQVSNTTF

SEQ ID NO: 1766 - protein, 268 aa, Homo sapiens [sequence omitted]

SEQ ID NO: 1767 - protein, 1024 aa, Homo sapiens
MERRSRRKSRRNGRSTAGKAAATQPAKSPGAQLWLFPSAAGLHRALLRRVEVTRQLCCSPGRLAVLERGGAGVQVHQLLAGSGGARTPKCIKLGKNMKIHSVDQGAEHMLILSSDGKPFEYDNYSMKHLRFESILQEKKIIQITCGDYHSLALSKGGELFAWGQNLHGQLGVGRKFPSTTTPQIVEHLAGVPLAQISAGEAHSMALSMSGNIYSWGKNECGQLGLGHTESKDDPSLIEGLDNQKVEFVACGGSHSALLTQDGLLFTFGAGKHGQLGHNSTQNELRPCLVAELVGYRVTQIACGRWHTLAYVSDLGKVFSFGSGKDGQLGNGGTRDQLMPLPVKVSSSEELKLESHTSEKELIMIAGGNQSILLWIKKENSYVNLKRTIPTLNEGTVKRWIADVETKRWQSTKREIQEIFSSPACLTGSFLRKRRTTEMMPVYLDLNKARNIFRELTQKDWITNMITTCLKDNLLKRLPFHSPPQEALEIFFLLPECPVMHISNNWESLVVPFAKVVCKMSDQSSLVLEEYWATLQESTFSKLVQMFKTAVICQLDYWDESAEENGNVQALLEMLKKLHRVNQVKCQLPESIFQVDELLHRLNFFVEVCRRYLWKMTVDASENVQCCVIFSHFPFIFNNLSKIKLLHTDTLLKIESKKHKAYLRSAAIEEERESEFALRPTFDLTVRRNHLIEDVLNQLSQFENEDLRKELWVSFSGEIGYDLGGVKKEFFYCLFAEMIQPEYGMFMYPEGASCMWFPVKPKFEKKRYFFFGVLCGLSLFNCNVANLPFPLALFKKLLDQMPSLEDLKELSPDLGKNLQTLLDDEGDNFEEVFYIHFNVHWDRNDTNLIPNGSSITVNQTNKRDYVSKYINYIFNDSVKAVYEEFRRGFYKMCDEDIIKLFHPEELKDVIVGNTDYDWKTFEKNARYEPGYNSSHPTIVMFWKAFHKLTLEEKKKFLVFLTGTDRLQMKDLNNMKITFCCPESWNERDPIRALTCFSVLFLPKYSTMETVEEALQEAINNNRGFG

SEQ ID NO: 1768 - protein, 585 aa, Homo sapiens
MAPSTPLLTVRGSEGLYMVNGPPHFTESTVFPRESGKNCKVCIFSKDGTLFAWGNGEKVNIISVTNKGLLHSFDLLKAVCLEFSPKNTVLATWQPYSTSKDGTAGIPNLQLYDVKTGTCLKSFIQKKMQNWCPSWSEDETLCARNVNNEVHFFENNNFNTIANKLHLQKINDFVLSPGPQPYKVAVYVPGSKGAPSFVRLYQYPNFAGPHAALANKSFFKADKVTMLWNKKATAVLVIASTDVDKTGASYYGEQTLHYIATNGESAVVQLPKNGPIYDVVWNSSSTEFCAVYGFMPAKATIFNLKCDPVFDFGTGPRNAAYYSPHGHILVLAGFGNLRGQMEVWDVKNYKLISKPVASDSTYFAWCPDGEHILTATCAPRLRVNNGYKIWHYTGSILHKYDVPSNAELWQVSWQPFLDGIFPAKTITYQAVPSEVPNEEPKVATAYRPPALRNKPITNSKLHEEEPPQNMKPQSGNDKPLSKTALKNQRKHEAKKAAKQEARSDKSPDLAPTPAPQSTPRNTVSQSISGDPEIDKKIKNLKKKLKAIEQLKEQAATGKQLEKNQLEKIQKETALLQELEDLELGI

SEQ ID NO: 1769 - protein, 840 aa, Homo sapiens
MGTPRAQHPPPPQLLFLILLSCPWIQGLPLKEEEILPEPGSETPTVASEALAELLHGALLRRGPEMGYLPGPPLGPEGGEEETTTTIITTTTVTTTVTSPVLCNNNISEGEGYVESPDLGSPVSRTLGLLDCTYSIHVYPGYGIEIQVQTLNLSQEEELLVLAGGGSPGLAPRLLANSSMLGEGQVLRSPTNRLLLHFQSPRVPRGGGFRIHYQAYLLSCGFPPRPAHGDVSVTDLHPGGTATFHCDSGYQLQGEETLICLNGTRPSWNGETPSCMASCGGTIHNATLGRIVSPEPGGAVGPNLTCRWVIEAAEGRRLHLHFERVSLDEDNDRLMVRSGGSPLSPVIYDSDMDDVPERGLISDAQSLYVELLSETPANPLLLSLRFEAFEEDRCFAPFLAHGNVTTTDPEYRPGALATFSCLPGYALEPPGPPNAIECVDPTEPHWNDTEPACKAMCGGELSEPAGVVLSPDWPQSYSPGQDCVWGVHVQEEKRILLQVEILNVREGDMLTLFDGDGPSARVLAQLRGPQPRRRLLSSGPDLTLQFQAPPGPPNPGLGQGFVLHFKEVPRNDTCPELPPPEWGWRTASHGDLIRGTVLTYQCEPGYELLGSDILTCQWDLSWSAAPPACQKIMTCADPGEIANGHRTASDAGFPVGSHVQYRCLPGYSLEGAAMLTCYSRDTGTPKWSDRVPKCALKYEPCLNPGVPENGYQTLYKHHYQAGESLRFFCYEGFELIGEVTITCVPGHPSQWTSQPPLCKVTQTTDPSRQLEGGNLALAILLPLGLVIVLGSGVYIYYTKLQGKSLFGFSGSHSYSPITVESDFSNPLYEAGDTREYEVSI

SEQ ID NO: 1770 - protein, 853 aa, Homo sapiens
MGTPRAQHPPPPQLLFLILLSCPWIQGLPLKEEEILPEPGSETPTVASEALAELLHGALLRRGPEMGYLPGPPLGPEGGEEETTTTIITTTTVTTTVTSPVLCNNNISEGEGYVESPDLGSPVSRTLGLLDCTYSIHVYPGYGIEIQVQTLNLSQEEELLVLAGGGSPGLAPRLLANSSMLGEGQVLRSPTNRLLLHFQSPRVPRGGGFRIHYQAYLLSCGFPPRPAHGDVSVTDLHPGGTATFHCDSGYQLQGEETLICLNGTRPSWNGETPSCMASCGGTIHNATLGRIVSPEPGGAVGPNLTCRWVIEAAEGRRLHLHFERVSLDEDNDRLMVRSGGSPLSPVIYDSDMDDVPERGLISDAQSLYVELLSETPANPLLLSLRFEAFEEDRCFAPFLAHGNVTTTDPEYRPGALATFSCLPGYALEPPGPPNAIECVDPTEPHWNDTEPACKAMCGGELSEPAGVVLSPDWPQSYSPGQDCVWGVHVQEEKRILLQVEILNVREGDMLTLFDGDGPSARVLAQLRGPQPRRRLLSSGPDLTLQFQAPPGPPNPGLGQGFVLHFKEVPRNDTCPELPPPEWGWRTASHGDLIRGTVLTYQCEPGYELLGSDILTCQWDLSWSAAPPACQKIMTCADPGEIANGHRTASDAGFPVGSHVQYRCLPGYSLEGAAMLTCYSRDTGTPKWSDRVPKCALKYEPCLNPGVPENGYQTLYKHHYQAGESLRFFCYEGFELIGEVTITCVPGHPSQWTSQPPLCKVAYEELLDNRKLEVTQTTDPSRQLEGGNLALAILLPLGLVIVLGSGVYIYYTKLQGKSLFGFSGSHSYSPITVESDFSNPLYEAGDTREYEVSI

SEQ ID NO: 1771 - protein, 649 aa, Homo sapiens
MKQILGVIDKKLRNLEKKKGKLDDYQERMNKGERLNQDQLDAVSKYQEVTNNLEFAKELQRSFMALSQDIQKTIKKTARREQLMREEAEQKRLKTVLELQYVLDKLGDDEVRTDLKQGLNGVPILSEEELSLLDEFYKLVDPERDMSLRLNEQYEHASIHLWDLLEGKEKPVCGTTYKVLKEIVERVFQSNYFDSTHNHQNGLCEEEEAASAPAVEDQVPEAEPEPAEEYTEQSEVESTEYVNRQFMAETQFTSGEKEQVDEWTVETVEVVNSLQQQPQAASPSVPEPHSLTPVAQADPLVRRQRVQDLMAQMQGPDNFIQDSMLDFENQTLDPAIVSAQPMNPTQNMDMPQLVCPPVHSESRLAQPNQVPVQPEATQVPLVSSTSEGYTASQPLYQPSHATEQRPQKEPIDQIQATISLNTDQTTASSSLPAASQPQVFQAGTSKPLHSSGINVNAAPFQSMQTVFNMNAPVPPVNEPETLKQQNQYQASYNQSFSSQPHQVEQTELQQEQLQTVVGTYHGSPDQSHQVTGNHQQPPQQNTGFPRSNQPYYNSRGVSRGGSRGARGLMNGYRGPAMDSEEDMMVTALHSLTLQTVVIHSLSSVLPGITLAINGMDISRISSEALGRVDHGEPHEVVEGPQDPTEGCRK

SEQ ID NO: 1772 - protein, 573 aa, Homo sapiens
MAHYITFLCMVLVLLLQNSVLAEDGEVRSSCRTAPTDLVFILDGSYSVGPENFEIVKKWLVNITKNFDIGPKFIQVGVVQYSDYPVLEIPLGSYDSGEHLTAAVESILYLGGNTKTGKAIQFALDYLFAKSSRFLTKIAVVLTDGKSQDDVKDAAQAARDSKITLFAIGVGSETEDAELRAIANKPSSTYVFYVEDYIAISKIREVMKQKLCEESVCPTRIPVAARDERGFDILLGLDVNKKVKKRIQLSPKKIKGYEVTSKVDLSELTSNVFPEGLPPSYVFVSTQRFKVKKIWDLWRILTIDGRPQIAVTLNGVDKILLFTTTSVINGSQVVTFANPQVKTLFDEGWHQIRLLVTEQDVTLYIDDQQIENKPLHPVLGILINGQTQIGKYSGKEETVQFDVQKLRIYCDPEQNNRETACEIPGFCLNGPSDVGSTPAPCICPPGKPGLQGPKGDPGLPGNPGYPGQPGQDGKPVSTESLVISGISGITGYQGIAGTPGVPGSPGIQGARGLPGYKGEPGRDGDKGDRGLPGFPGLHGMPGSKGEMGAKGDKGSPGFYGKKGSIDHTTKYSY

SEQ ID NO: 1773 - protein, 1268 aa, Homo sapiens
MSAPAGSSHPAASARIPPKFGGSAVSGAAAPAGPGAGPAPHQQNGPAQNQMQVPSGYGLHHQNYIAPSGHYSQGPGKMTSLPLDTQCGDYYSALYTVPTQNVTPNTVNQQPGAQQLYSRGPPAPHIVGSTLGSFQGAASSASHLHTSASQPYSSFVNHYNSPAMYSASSSVASQGFPSTCGHYAMSTVSNAAYPSVSYPSLPAGDTYGQMFTSQNAPTVRPVKDNSFSGQNTAISHPSPLPPLPSQQHHQQQSLSGYSTLTWSSPGLPSTQDNLIRNHTGSLAVANNNPTITVADSLSCPVMQNVQPPKSSPVVSTVLSGSSGSSSTRTPPTANHPVEPVTSVTQPSELLQQKGVQYGEYVNNQASSAPTPLSSTSDDEEEEEEDEEAGVDSSSTTSSASPMPNSYDALEGGSYPDMLSSSASSPAPDPAPEPDPASAPAPASAPAPVVPQPSKMAKPLAMAIQHFSLVIRMLQHHLFLEYSPSNPVYSGFQQYPQQYPGVNQLSSSIGGLSLQSSPQPESLRPVNLTQERNILPMTPVWAPVPNLNADLKKLNCSPDSFRCTLTNIPQTQALLNKAKLPLGLLLHPFRDLTQLPVITSNTIVRCRSCRTYINPFVSFIDQRRWKCNLCYRVNDVPEEFMYNPLTRSYGEPHKRPEVQNSTVEFIASSDYMLRPPQPAVYLFVLDVSHNAVEAGYLTILCQSLLENLDKLPGDSRTRIGFMTFDSTIHFYNLQEGLSQPQMLIVSDIDDVFLPTPDSLLVNLYESKELIKDLLNALPNMFTNTRETHSALGPALQAAFKLMSPTGGRVSVFQTQLPSLGAGLLQSREDPNQRSSTKVVQHLGPATDFYKKLALDCSGQQTAVDLFLLSSQYSDLASLACMSKYSAGCIYYYPSFHYTHNPSQAEKLQKDLKRYLTRKIGFEAVMRIRCTKGLSMHTFHGNFFVRSTDLLSLANINPDAGFAVQLSIEESLTDTSLVCFQTALLYTSSKGERRIRVHTLCLPVVSSLADVYAGVDVQAAICLLANMAVDRSVSSSLSDARDALVNAVVDSLSAYGSTVSNLQHSALMAPSSLKLFPLYVLALLKQKAFRTGTSTRLDDRVYAMCQIKSQPLVHLMKMIHPNLYRIDRLTDEGAVHVNDRIVPQPPLQKLSAEKLTREGAFLMDCGSVFYIWVGKGCDNNFIEDVLGYTNFASIPQKMTHLPELDTLSSERARSFITWLRDSRPLSPILHIVKDESPAKAEFFQHLIEDRTEAAFSYYEFLLHVQQQICK

SEQ ID NO: 1774 - protein, 440 aa, Homo sapiens
METGQRTHASGTYSFLDRTQHSDIKADCNTCVEIEDRKVSRQQMNCEREQLRGNQEAAAAPDTMAQPYASAQFAPPQNGIPAEYTAPHPHPAPEYTGQTTVPEHTLNLYPPAQTHSEQSPADTSAQTVSGTATQTDDAAPTDGQPQTQPSENTENKSQPKRLHVSNIPFRFRDPDLRQMFGQFGKILDVEIIFNERGSKGFGFVTFENSADADRAREKLHGTVVEGRKIEVNNATARVMTNKKTVNPYTNGWKLNPVVGAVYSPEFYAGTVLLCQANQEGSSMYSAPSSLVYTSAMPGFPYPAATAAAAYRGAHLRGRGRTVYNTFRAAAPPPPIPAYGGVVYQDGFYGADIYGGYAAYRYAQPTPATAAAYSDSYGRVYAADPYHHALAPAPTYGVGAMNAFAPLTDAKTRSHADDVGLVLSSLQASIYRGGYNRFAPY

SEQ ID NO: 1775 - protein, 746 aa, Homo sapiens
MTIPGLDWGMEEVMQKDQKKVPQKKVPYAKPIPAQFQQAWMQNKVPIPAPNEVLNDRKEDIKLEEKKKTQAEIEQEMATLQYTNPQLLEQLKIERLAQKQVEQIQPPPSSGTPLLGPQPFPGQGPMSQIPQGFQQPHPSQQMPMNMAQMGPPGPQGQFRPPGPQGQMGPQGPPLHQGGGGPQGFMGPQGPQGPPQGLPRPQDMHGPQGMQRHPGPHGPLGPQGPPGPQGSSGPQGHMGPQGPPGPQGHIGPQGPPGPQGHLGPQGPPGTQGMQGPPGPRGMQGPPHPHGIQGGPGSQGIQGPVSQGPLMGLNPRGMQGPPGPRENQGPAPQGMIMGHPPQEMRGPHPPGGLLGHGPQEMRGPQEIRGMQGPPPQGSMLGPPQELRGPPGSQSQQGPPQGSLGPPPQGGMQGPPGPQGQQNPARGPHPSQGPIPFQQQKTPLLGDGPRAPFNQEGQSTGPPPLIPGLGQQGAQGRIPPLNPGQGPGPNKVSEEEPRRGMRAVLPPEEGMVFLVLKTLVQRRILMLMREAARGRDLRGRGRGTPRGGRKGLLPTPDEFPRFEGGRKPDSWDGNREPGPGHEHFRDTPRPDHPPHDGHSPASRERSSSLQGMDMASLPPRKRPWHDGPGTSEHREMEAPGGPSEDRGGKGRGGPGPAQRVPKSGRSSSLDGEHHDGYHRDEPFGGPPGSGTPSRGGRSGSNWGRGSNMNSGPPRRGAFLGGGRGPVKPRTEFPEGVFGQIVRTFGGLHP

SEQ ID NO: 1776 - protein, 253 aa, Homo sapiens
MAAARATTPADGEEPAPEAEALAAARERSSRFLSGLELVKQGAEARVFRGRFQGRAAVIKHRFPKGYRHPALEARLGRRRTVQEARALLRCRRAGISAPVVFFVDYASNCLYMEEIEGSVTVRDYIQSTMETEKTPQGLSNLAKTIGQVLARMHDEDLIHGDLTTSNMLLKPPLEQLNIVLIDFGLSFISALPEDKGVDLYVLEKAFLSTHPNTETVFEAFLKSYSTSSKKARPVLKKLDEVRLRGRKRSMVG

SEQ ID NO: 1777 - protein, 393 aa, Homo sapiens
MRTLFNLLWLALACSPVHTTLSKSDAKKAASKTLLEKSQFSDKPVQDRGLVVTDLKAESVVLEHRSYCSAKARDRHFAGDVLGYVTPWNSHGYYVTKVFGSKFTQISPVWLQLKRRGREMFEVTGLHDVDQGWMRAVRKHAKGLHIVPRLLFEDWTYDDFRNVLYSEDEIEELSKTVVQVAKNQHFDGFVVEVWNQLLSQKRVGLIHMLTHLAEALHQARLLALLVIPPAITPGTDQLGMFTHKEFEQLAPVLDGFSLMTYDYSTAHQPGPNAPLSWVRACVQVLDPKSKWRSKILLGLNFYGMDYATSKDAREPVVGARYIQTLKDHRPRMVWDSQASEHFFEYKKSRSGRHVVFYPTLKSLQVRLELARELGVGVSIWELGQGLDYFYDLL

SEQ ID NO: 1778 - protein, 412 aa, Homo sapiens
MGSTKHWGEWLLNLKVAPAGVFGVAFLARVALVFYGVFQDRTLHVRYTDIDYQVFTDAARFVTEGRSPYLRATYRYTPLLGWLLTPNIYLSELFGKFLFISCDLLTAFLLYRLLLLKGLGRRQACGYCVFWLLNPLPMAVSSRGNADSIVASLVLMVLYLIKKRLVACAAVFYGFAVHMKIYPETYILPITLHLLPDRDNDKSLRQFRTRLCNRTALMFVAVAGLTFFALSFGFYYEYGWEFLEHTYFYHLTRRDIRHNFSPYFYMLYLTAESKWSFSLGIAAFLPQLILLSAVSFAYYRDLVFCCFLHTSIFVTFNKVCTSQYFLWYLCLLPLVMPLVRMPWKRAVVLLMLWFIGQAMWLAPAYVLEFQGKNTFLFIWLAGLFFLLINCSILIQIISHYKEEPLTERIKYD

SEQ ID NO: 1779 - protein, 868 aa, Homo sapiens
MRGAASASVREPTPLPGRGAPRTKPRAGRGPTVGTPATLALPARGRPRSRNGLASKGQRGAAPTGPGHRALPSRDTALPQERNKKLEAVGTGIEPKAMSQGLVTFGDVAVDFSQEEWEWLNPIQRNLYRKVMLENYRNLASLGLCVSKPDVISSLEQGKEPWTVKRKMTRAWCPDLKAVWKIKELPLKKDFCEGKLSQAVITERLTSYNLEYSLLGEHWDYDALFETQPGLVTIKNLAVDFRQQLHPAQKNFCKNGIWENNSDLGSAGHCVAKPDLVSLLEQEKEPWMVKRELTGSLFSGQRSVHETQELFPKQDSYAEGVTDRTSNTKLDCSSFRENWDSDYVFGRKLAVGQETQFRQEPITHNKTLSKERERTYNKSGRWSYLDDSEEKVHNRDSIKNFQKSSVVIKQTGIYAGKKLFKCNECKKTFTQSSSLTVHQRIHTGEKPYKCNECGKAFSDGSSFARHQRCHTGKKPYECIECGKAFIQNTSLIRHWRYYHTGEKPFDCIDCGKAFSDHIGLNQHRRIHTGEKPYKCDVCHKSFRYGSSLTVHQRIHTGEKPYECDVCRKAFSHHASLTQHQRVHSGEKPFKCKECGKAFRQNIHLASHLRIHTGEKPFECAECGKSFSISSQLATHQRIHTGEKPYECKVCSKAFTQKAHLAQHQKTHTGEKPYECKECGKAFSQTTHLIQHQRVHTGEKPYKCMECGKAFGDNSSCTQHQRLHTGQRPYECIECGKAFKTKSSLICHRRSHTGEKPYECSVCGKAFSHRQSLSVHQRIHSGKKPYECKECRKTFIQIGHLNQHKRVHTGERSYNYKKSRKVFRQTAHLAHHQRIHTGESSTCPSLPSTSNPVDLFPKFLWNPSSLPSP

SEQ ID NO: 1780 - protein, 277 aa, Homo sapiens
MQHLDCDLWLQLELSSQCVLLGNGVAMNLHVKTLSLMTWRSRFLEESFWSLEETAALAKQLPLKSPSENIFLHIVDLSDPKQIWKFVENFKQEHKLHVLINNAGCMVNKRELTEDGLEKNFAANTLGVYILTTGLIPVLEKEHDPRVITVSSGGMLVQKLNTNDLQSERTPFDGTMVYAQNKRQQVVLTERWAQGHPAIHFSSMHPGWADTPGVRQAMPGFHARFRDRLRSEAQGADTMLWLALSSAAAAQPSGRSRVSLEGPKLTRTQLSCTKWSL

SEQ ID NO: 1781 - protein, 198 aa, Homo sapiens
MLEMNMAIAFPAAPLLTVILALVGMEAIMSEFFNDTTTAFYIILIVWLADQYDAICCHTSTSKRHWLRFFYLYHFAFYAYHYRFNGQYSSLALVTSWLFIQHSMIYFFHHYELPAILQQVRIQEMLLQAPTLGPGTPTALPDDMNNNSGAPATAPDSAGQPPALGPVSPGGQRESRACGSGAQLPGGRGSLSGSSCRW

SEQ ID NO: 1782 - protein, 1455 aa, Homo sapiens
MRLTRHEQSAPALGGTPEQTPGQQSPENDNTIKDLLPEDAGIDHQTVHQLITVLMKFMAKDESSAESDISSAKAFNTVKRHLYVLLGYDQQEGCFMIAPQKMRLSTCFNAFIAGIAQVMDYNINLGKHLLPLVVQVLKYCSCPQLRHYFQQPPRCSLWSLKPHIRQMWLKALLVILYKYPYRDCDISKILLHLIHITVNTLNAQYHSCKPHATAGPLYSDNSNISRYSEKEKEEDSVFDESDIHDTPTGPCNKESQTFFARLKRIGGSKMVKYQPVEMNVQRSEIELAEYRETGALQDSLLHCVREESIPKKKLRSFKQKSLDIGNADSLLFTLDEHRRKSCIDRCDIEKPPTQAAYIAQRPNDPGRSRQNSATRPDNSEIPENPAMEGFPDARRPVIPEVRLNCMETFEVKVDSPVKPAPKEDLDLIDLSSDSTSGPEKHSILSTSDSDSLVFEPLPPLRIVESDEEEETMNQGDDGPSGKNAASSPSIPSHPSVLSLSTAPLVQVSVEDCSKDFSSKDSGNNQSAGNTDSALITLEDPMDAEGSSKPEELPEFSCGSPLTLKQKRDLLQKSFALPEMSLDDHPDPGTEGEKPGELMPSSGAKTVLLKVPEDAENPTESEKPDTSAESDTEQNPERKVEEDGAEESEFKIQIVPRQRKQRKIAVSAIQREYLDISFNILDKLGEQKDPDPSTKGLSTLEMPRESSSAPTLDAGVPETSSHSSISTQYRQMKRGSLGVLTMSQLMKRQLEHQSSAPHNISNWDTEQIQPGKRQCNVPTCLNPDLEGQPLRMRGATKSSLLSAPSIVSMFVPAPEEFTDEQPTVMTDKCHDCGAILEEYDEETLGLAIVVLSTFIHLSPDLAAPLLLDIMQSVGRLASSTTFSNQAESMMVPGNAAGVAKQFLRCIFHQLAPNGIFPQLFQSTIKDGTFLRTLASSLMDFNELSSIAALSQLLEGLNNKKNLPAGGAMIRCLENIATFMEALPMDSPSSLWTTISNQFQTFFAKLPCVLPLKCSLDSSLRIMICLLKIPSTNATRSLLEPFSKLLSFVIQNAVFTLAYLVELCGLCYRAFTKERDKFYLSRSVVLELLQALKLKSPLPDTNLLLLVQFICADAGTKLAESTILSKQMIASVPGCGTAAMECVRQYINEVLDFMADMHTLTKLKSHMKTCSQPLHEDTFGGHLKVGLAQIAAMDISRGNHRDNKAVIRYLPWLYHPPSAMQQGPKEFIECVSHIRLLSWLLLGSLTHNAVCPNASSPCLPIPLDAGSHVADHLIVILIGFPEQSKTSVLHMCSLFHAFIFAQLWTVYCEQSAVATNLQNQNEFSFTAILTALEFWSRVTPSILQLMAHNKVMVEMVCLHVISLMEALQECNSTIFVKLIPMWLPMIQSNIKHLSAGLQLRLQAIQNHVNHHSLRTLPGSGQSSAGLAALRKWLQCTQFKMAQVEIQSSEAASQFYPL

SEQ ID NO: 1783 - protein, 425 aa, Homo sapiens
MATAEVLNIGKKLYEGKTKEVYELLDSPGKVLLQSKDQITAGNAARKNHLEGKAAISNKITSCIFQLLQEAGIKTAFTRKCGETAFIAPQCEMIPIEWVCRRIATGSFLKRNPGVKEGYKFYPPKVELFFKDDANNDPQWSEEQLIAAKFCFAGLLIGQTEVDIMSHATQAIFEILEKSWLPQNCTLVDMKIEFGVDVTTKEIVLADVIDNDSWRLWPSGDRSQQKDKQSYRDLKEVTPEGLQMVKKNFEWVAERVELLLKSESQCRVVVLMGSTSDLGHCEKIKKACGNFGIPCELRVTSAHKGPDETLRIKAEYEGDGIPTVFVAVAGRSNGLGPVMSGNTAYPVISCPPLTPDWGVQDVWSSLRLPSGLGCSTVLSPEGSAQFAAQIFGLSNHLVWSKLRASILNTWISLKQADKKIRECNL

SEQ ID NO: 1784 - protein, 366 aa, Homo sapiens
MPMISVLGKMFLWQREGPGGRWTCQTSRRVSSDPAWAVEWIELPRGLSLSSLGSARTLRGWSRSSRPSSVDSQDLPEVNVGDTVAMLPKSRRALTIQEIAALARSSLHGISQVVKDHVTKPTAMAQGRVAHLIEWKGWSKPSDSPAALESAFSSYSDLSEGEQEARFAAGVAEQFAIAEAKLRAWSSVDGEDSTDDSYDEDFAGGMDTDMAGQLPLGPHLQDLFTGHRFSRPVRQGSVEPESDCSQTVSPDTLCSSLCSLEDGLLGSPARLASQLLGDELLLAKLPPSRESAFRSLGPLEAQDSLYNSPLTESCLSPAEEEPAPCKDCQPLCPPLTGSWERQRQASDLASSGVVSLDEDEAEPEEQ

SEQ ID NO: 1785 - protein, 628 aa, Homo sapiens
MSPGGKFDFDDGGCYVGGWEAGRAHGYGVCTGPGAQGEYSGCWAHGFESLGVFTGPGGHSYQGHWQQGKREGLGVERKSRWTYRGEWLGGLKGRSGVWESVSGLRYAGLWKDGFQDGYGTETYSDGGTYQGQWQAGKRHGYGVRQSVPYHQAALLRSPRRTSLDSGHSDPPTPPPPLPLPGDEGGSPASGSRGGFVLAGPGDADGASSRKRTPAAGGFFRRSLLLSGLRAGGRRSSLGSKRGSLRSEVSSEVGSTGPPGSEASGPPAAAPPALIEGSATEVYAGEWRADRRSGFGVSQRSNGLRYEGEWLGNRRHGYGRTTRPDGSREEGKYKRNRLVHGGRVRSLLPLALRRGKVKEKVDRAVEGARRAVSAARQRQEIAAARAADALLKAVAASSVAEKAVEAARMAKLIAQDLQPMLEAPGRRPRQDSEGSDTEPLDEDSPGVYENGLTPSEGSPELPSSPASSRQPWRPPACRSPLPPGGDQGPFSSPKAWPEEWGGAGAQAEELAGYEAEDEAGMQGPGPRDGSPLLGGCSDSSGSLREEEGEDEEPLPPLRAPAGTEPEPIAMLVLRGSSSRGPDAGCLTEELGEPAATERPAQPGAANPLVVGAVALLDLSLAFLFSQLLT

SEQ ID NO: 1786 - protein, 1119 aa, Homo sapiens
MSTAAFHISSLLEKMTSSDKDFRFMATSDLMSELQKDSIQLDEDSERKVVKMLLRLLEDKNGEVQNLAVKWLGVPLGAFHASLLHCLLPQLSSPRLAVRKRAVGALGHLAAACSTDLFVELADHLLDRLPGPRVPTSPTAIRTLIQCLGSVGRQAGHRLGAHLDRLVPLVEDFCNLDDDELRESCLQAFEAFLRKCPKEMGPHVPNVTSLCLQYIKHDPNYNYDSDEDEEQMETEDSEFSEQESEDEYSDDDDMSWKVRRAAAKCIAALISSRPDLLPDFHCTLAPVLIRRFKEREENVKADVFTAYIVLLRQTRPPKGWLEAMEEPTQTGSNLHMLRGQVPLVVKALQRQLKDRSVRARQGCFSLLTELAGVLPGSLAEHMPVLVSGIIFSLADRSSSSTIRMDALAFLQGLLGTEPAEAFHPHLPILLPPVMACVADSFYKIAAEALVVLQELVRALWPLHRPRMLDPEPYVGEMSAVTLARLRATDLDQEVKERAISCMGHLVGHLGDRLGDDLEPTLLLLLDRLRNEITRLPAIKALTLVAVSPLQLDLQPILAEALHILASFLRKNQRALRLATLAALDALAQSQGLSLPPSAVQAVLAELPALVNESDMHVAQLAVDFLATVTQAQPASLVEVSGPVLSELLRLLRSPLLPAGVLAAAEGFLQALVGTRPPCVDYAKLISLLTAPVYEQAVDGGPGLHKQVFHSLARCVAALSAACPQEAASTASRLVCDARSPHSSTGVKVLAFLSLAEVGQVAGPGPQRELKAVLLEALGSPSEDVRAAASYALGRVGAGSLPDFLPFLLEQIEAEPRRQYLLLHSLREALGAAQPDSLKPYAEDIWALLFQRCEGAEEGTRGVVAECIGKLVLVNPSFLLPRLRKQLAAGRPHTRSTVITAVKFLISDQPHPIDPLLKSFIAVHNKPSLVRDLLDDILPLLYQETKIRRDLIREVEMGPFKHTVDDGLDVRKAAFECMYSLLESCLGQLDICEFLNHVEDGLKDHYDIRMLTFIMVARLATLCPAPVLQRVDRLIEPLRATCTAKVKAGSVKQEFEKQDELKRSAMRAVAALLTIPEVGKSPIMADFSSQIRSNPELAALFESIQKDSTSAPSTDSMELS

SEQ ID NO: 1787 - protein, 1143 aa, Homo sapiens
MSTAAFHISSLLEKMTSSDKDFRFMATSDLMSELQKDSIQLDEDSERKVVKMLLRLLEDKNGEVQNLAVKWLGVPLGAFHASLLHCLLPQLSSPRLAVRKRAVGALGHLAAACSTDLFVELADHLLDRLPGPRVPTSPTAIRTLIQCLGSVGRQAGHRLGAHLDRLVPLVEDFCNLDDDELRESCLQAFEAFLRKCPKEMGPHVPNVTSLCLQYIKHDPNYNYDSDEDEEQMETEDSEFSEQESEDEYSDDDDMSWKVRRAAAKCIAALISSRPDLLPDFHCTLAPVLIRRFKEREENVKADVFTAYIVLLRQTRPPKGWLEAMEEPTQTGSNLHMLRGQVPLVVKALQRQLKDRSVRARQGCFSLLTELAGVLPGSLAEHMPVLVSGIIFSLADRSSSSTIRMDALAFLQGLLGTEPAEAFHPHLPILLPPVMACVADSFYKIAAEALVVLQELVRALWPLHRPRMLDPEPYVGEMSAVTLARLRATDLDQEVKERAISCMGHLVGHLGDRLGDDLEPTLLLLLDRLRNEITRLPAIKALTLVAVSPLQLDLQPILAEALHILASFLRKNQRALRLATLAALDALAQSQGLSLPPSAVQAVLAELPALVNESDMHVAQLAVDFLATVTQAQPASLVEVSGPVLSELLRLLRSPLLPAGVLAAAEGFLQALVGTRPPCVDYAKLISLLTAPVYEQAVDGGPGLHKQVFHSLARCVAALSAACPQEAASTASRLVCDARSPHSSTGVKVLAFLSLAEVGQVAGPGPQRELKAVLLEALGSPSEDVRAAASYALGRVGAGSLPDFLPFLLEQIEAEPRRQYLLLHSLREALGAAQPDSLKPYAEDIWALLFQRCEGAEEGTRGVVAECIGKLVLVNPSFLLPRLRKQLAAGRPHTRSTVITAVKFLISDQPHPIDPLLKSFIGEFMESLQDPDLNVRRATLAFFNSAVHNKPSLVRDLLDDILPLLYQETKIRRDLIREVEMGPFKHTVDDGLDVRKAAFECMYSLLESCLGQLDICEFLNHVEDGLKDHYDIRMLTFIMVARLATLCPAPVLQRVDRLIEPLRATCTAKVKAGSVKQEFEKQDELKRSAMRAVAALLTIPEVGKSPIMADFSSQIRSNPELAALFESIQKDSTSAPSTDSMELS

SEQ ID NO: 1788 - protein, 392 aa, Homo sapiens
MITLITEQLQKQTLDELKCTRFSISLPLPDHADISNCGNSFQLVSEGASWRGLPHCSCAEFQDSLNFSYHPSGLSLHLRPPSRGNSPKEQPFSQVLRPEPPDPEKLPVPPAPPSKRHCRSLSVPVDLSRWQPVWRPAPSKLWTPIKHRGSGGGGGPQVPHQSPPKRVSSLRFLQAPSASSQCAPAHRPYSPPFFSLALAQDSSRPCAASPQSGSWESDAESLSPCPPQRRFSLSPSLGPQASRFLPSARSSPASSPELPWRPRGLRNLPRSRSQPCDLDARKTGVKRRHEEDPRRLRPSLDFDKMNQKPYSGGLCLQETAREGSSISPPWFMACSPPPLSASCSPTGGSSQVLSESEEEEEGAVRWGRQALSKRTLCQRDFGDLDLNLIEEN

SEQ ID NO: 1789 - protein, 542 aa, Homo sapiens
MEPDSVIEDKTIELMCSVPRSLWLGCANLVESMCALSCLQSMPSVRCLQISNGTSSVIVSRKRPSEGNYQKEKDLCIKYFDQWSESDQVEFVEHLISRMCHYQHGHINSYLKPMLQRDFITALPEQGLDHIAENILSYLDARSLCAAELVCKEWQRVISEGMLWKKLIERMVRTDPLWKGLSERRGWDQYLFKNRPTDGPPNSFYRSLYPKIIQDIETIESNWRCGRHNLQRIQCRSENSKGVYCLQYDDEKIISGLRDNSIKIWDKTSLECLKVLTGHTGSVLCLQYDERVIVTGSSDSTVRVWDVNTGEVLNTLIHHNEAVLHLRFSNGLMVTCSKDRSIAVWDMASATDITLRRVLVGHRAAVNVVDFDDKYIVSASGDRTIKVWSTSTCEFVRTLNGHKRGIACLQYRDRLVVSGSSDNTIRLWDIECGACLRVLEGHEELVRCIRFDNKRIVSGAYDGKIKVWDLQAALDPRAPASTLCLRTLVEHSGRVFRLQFDEFQIISSSHDDTILIWDFLNVPPSAQNETRSPSRTYTYISR

SEQ ID NO: 1790 - protein, 943 aa, Homo sapiens
MDGSTERLEARRPAGRLPWSSRQEMTRRPSLMAGRQHGWSAQQSATVANPVPGANPDLLPHFLVEPEDVYIVKNKPVLLVCKAVPATQIFFKCNGEWVRQVDHVIERSTDGSSGLPTMEVRINVSRQQVEKVFGLEEYWCQCVAWSSSGTTKSQKAYIRIAYLRKNFEQEPLAKEVSLEQGIVLPCRPPEGIPPAEVEWLRNEDLVDPSLDPNVYITREHSLVVRQARLADTANYTCVAKNIVARRRSASAAVIVYGGPRDSLVTGRGTAVPLGSDMWLSFSVRPVNGGWSTWTEWSVCSASCGRGWQKRSRSCTNPAPLNGGAFCEGQNVQKTACATLCPVDGSWSPWSKWSACGLDCTHWRSRECSDPAPRNGGEECQGTDLDTRNCTSDLCVHNSYTPAPTKAMLSPAAASGPEDVALYVGLIAVAVCLVLLLLVLILVYCRKKEGLDSDVADSSILTSGFQPVSIKPSKADNPHLLTIQPDLSTTTTTYQGSLCPRQDGPSPKFQLTNGHLLSPLGGGRHTLHHSSPTSEAEEFVSRLSTQNYFRSLPRGTSNMTYGTFNFLGGRLMIPNTGISLLIPPDAIPRGKIYEIYLTLHKPEDVSCGPPGVLLTRPVILAMDHCGEPSPDSWSLRLKKQSCEGSWEDVLHLGEEAPSHLYYCQLEASACYVFTEQLGRFALVGEALSVAAAKRLKLLLFAPVACTSLEYNIRVYCLHDTHDALKEVVQLEKQLGGQLIQEPRVLHFKDSYHNLRLSIHDVPSSLWKSKLLVSYQEIPFYHIWNGTQRYLHCTFTLERVSPSTSDLACKLWVWQVEGDGQSFSINFNITKDTRFAELLALESEAGVPALVGPSAFKIPFLIRQKIISSLDPPCRRGADWRTLAQKLHLDSHLSFFASKPSPTAMILNLWEARHFPNGNLSQLAAAVAGLGQPDAGLFTVSEAEC

SEQ ID NO: 1791 - protein, 1003 aa, Homo sapiens
MRKFNIRKVLDGLTAGSSSASQQQQQQHPPGNREPEIQETLQSEHFQLCKTVRHGFPYQPSALAFDPVQKILAVGTQTGALRLFGRPGVECYCQHDSGAAVIQLQFLINEGALVSALADDTLHLWNLRQKRPAILHSLKFCRERVTFCHLPFQSKWLYVGTERGNIHIVNVESFTLSGYVIMWNKAIELSSKSHPGPVVHISDNPMDEGKLLIGFESGTVVLWDLKYKKADYRYTYDEAIHSVAWHHEGKQFICSHSDGTLTIWNVRSPAKPVQTITPHGKQLRDGKKPEPCKPILKVEFKTTRSGEPFIILSGGLSYDTVGRRPCLTVMHGKSTAVLEMDYSIVDFLTLCETPYPNDFQEPYAVVVLLEKDLVLIDLAQNGYPIFENPYPLSIHESPVTCCEYFADCPVDLIPALYSVGARQKRQGYSKKEWPINGGNWGLGAQSYPEIIITGHADGSVKFWDASAITLQVLYKLKTSKVFEKSRNKDDRPNTDIVDEDPYAIQIISWCPESRMLCIAGVSAHVIIYRFSKQEVITEVIPMLEVRLLYEINDVETPEGEQPPPLPTPVGGSNPQPIPPQSHPSTSSSSSDGLRDNVPCLNVVCKEHGNHFILTRSKKLNKLENQQLFLKICKRRLPSEITLLREPNLLGFYQGPTNLREEKSLQWAQAFQVKEEKYATPAHFSHLIPPKREWEEVKEPVEFEIINLKLFEIYISTPKNEILKYKSNKYVQDLHEEQHKTLQSENILYDIIMMKDMVTFCHLPFQSKWLYVGTERGNIHIVNVESFTLSGYVIMWNKAIELSSKSHPGPVVHISDNPMDEGKLLIGFESGTVVLWDLKSKKADYRYTYDEAIHSVAWHHEGKQFICSHSDGTLTIWNVRSPAKPVQTITPHGKQLKDGKKPEPCKPILKVEFKTTRSGEPFIILSGGLSYDTVGRRPCLTVMHGKSTAVLEMDYSIVDFLTLCETPYPNDFQEPYAVVVLLEKDLVLIDLAQNGYPIFEIPTL

SEQ ID NO: 1792 - protein, 1749 aa, Homo sapiens
MHLKHLRTLLSPQDGAAKVTCMAWSQNNAKFAVCTVDRVVLLYDEHGERRDKFSTKPADMKYGRKSYMVKGMAFSPDSTKIAIGQTDNIIYVYKIGEDWGDKKVICNKFIQTSAVTCLQWPAEYIIVFGLAEGKVRLANTKTNKSSTIYGTESYVVSLTTNCSGKGILSGHADGTIVRYFFDDEGSGESQEKLVNHPCPPYALAWATNSIVAAGCDRKIVAYGKEGHMLQTFDYSRDPQEREFTTAVSSPGGQSVVLGSYDRLRVFNWIPRRSIWEEAKPKEITNLYTITALAWKRDGSRLCVGTLCGGVEQFDCCLRRSIYKNKFELTYVGPSQVIVKNLSSGTRVVLKSHYGYEVEEVKILGKERYLVAHTSETLLLGDLNTNRLSEIAWQGSGGNEKYFFENENVCMIFNAGELTLVEYGNNDTLGSVRTEFMNPHLISVRINERCQRGTEDNKKLAYLIDIKTIAIVDLIGGYNIGTVSHESRVDWLELNETGHKLLFRDRKLRLHLYDIESCSKTMILNFCSYMQWVPGSDVLVAQNRNSLCVWYNIEAPERVTMFTIRGDVIGLERGGGKTEVMVMEGVTTVAYTLDEGLIEFGTAIDDGNYIRATAFLETLEMTPETEAMWKTLSKLALEARQLHIAERCFSALGQVAKARFLHETNEIADQVSREYGGEGTDFYQVRARLAMLEKNYKLAEMIFLEQNAVEEAMGMYQELHRWDECIAVAEAKGHPALEKLRRSYYQWLMDTQQEERAGELQESQGDGLAAISLYLKAGLPAKAARLVLTREELLANTELVEHITAALIKGELYERAGDLFEKIHNPQKALECYRKGNAFMKAVELARLAFPVEVVKLEEAWGDHLVQQKQLDAAINHYIEARCSIKAIEAALGARQWKKAIYILDLQDRNTASKYYPLVAQHYASLQEYEIAEELYTKGDRTKDAIDMYTQAGRWEQAHKLAMKCMRPEDVSVLYITQAQEMEKQGKYREAERLYVTVQEPDLAITMYKKHKLYDDMIRLVGKHHPDLLSDTHLHLGKELEAEGRLQEAEYHYLEAQEWKATVNMYRASGLWEEAYRVARTQGGANAHKHVAYLWAKSLGGEAAVRLLNKLGLLEAAVDHAADNCSFEFAFELSRLALKHKTPEVHLKYAMFLEDEGKFEEAEAEFIRAGKPKEAVLMFVHNQDWEAAQRVAEAHDPDSVAEVLVGQARGALEEKDFQKAEGLLLRAQRPGLALNYYKEAGLWSDALRICKDYVPSQLEALQEEYEREATKKGARGVEGFVEQARHWEQAGEYSRAVDCYLKVRDSGNSGLAEKCWMKAAELSIKFLPPQRNMEVVLAVGPQLIGIGKHSAAAELYLNLDLVKEAIDAFIEGEEWNKAKRVAKELDPRYEDYVDQHYKEFLKNQGKVDSLVGVDVIAALDLYVEQGQWDKCIETATKQNYKILHKYVALYATHLIREGSSAQALALYVQHGAPANPQNFNIYKRIFTDMVSSPGTNCAEAYHSWADLRDVLFNLCENLVKSSEANSPAHEEFKTMLLIAHYYATRSAAQSVKQLETVAARLSVSLLRHTQLLPVDKAFYEAGIAAKAVGWDNMAFIFLNRFLDLTDAIEEGTLDGLDHSDFQDTDIPFEVPLPAKQHVPEAEREEVRDWVLTVSMDQRLEQVLPRDERGAYEASLVAASTGVRALPCLITGYPILRNKIEFKRPGKAANKDNWNKFLMAIKTSHSPVCQDVLKFISQWCGGLPSTSFSFQ

SEQ ID NO: 1793 - protein, 764 aa, Homo sapiens
MNEAKVKETLRRCGASGDECGRLQYALTCLRKVTGLGGEHKEDSSWSSLDARRESGSGPSTDTLSAASLPWPPGSSQLGRAGNSAQGPRSISVSALPASDSPTPSFSEGLSDTCIPLHASGRLTPRALHSFITPPTTPQLRRHTKLKPPRTPPPPSRKVFQLLPSFPTLTRSKSHESQLGNRIDDVSSMRFDLSHGSPQMVRRDIGLSVTHRFSTKSWLSQVCHVCQKSMIFGVKCKHCRLKCHNKCTKEAPACRISFLPLTRLRRTESVPSDINNPVDRAAEPHFGTLPKALTKKEHPPAMNHLDSSSNPSSTTSSTPSSPAPFPTSSNPSSATTPPNPSPGQRDSRFNFPAAYFIHHRQQFIFPDISAFAHAAPLPEAADGTRLDDQPKADVLEAHEAEAEEPEAGKSEAEDDEDEVDDLPSSRRPWRGPISRKASQTSVYLQEWDIPFEQVELGEPIGQGRWGRVHRGRWHGEVAIRLLEMDGHNQDHLKLFKKEVMNYRQTRHENVVLFMGACMNPPHLAIITSFCKGRTLHSFVRDPKTSLDINKTRQIAQEIIKGMGYLHAKGIVHKDLKSKNVFYDNGKVVITDFGLFGISGVVREGRRENQLKLSHDWLCYLAPEIVREMTPGKDEDQLPFSKAADVYAFGTVWYELQARDWPLKNQAAEASIWQIGSGEGMKRVLTSVSLGKEVSEILSACWAFDLQERPSFSLLMDMLEKLPKLNRRLSHPGHFWKSADINSSKVVPRFERFGLGVLESSNPKM

SEQ ID NO: 1794 - protein, 308 aa, Homo sapiens
MAHYITFLCMVLVLLLQNSVLAEDGEVRSSCRTAPTDLVFILDGSYSVGPENFEIVKKWLVNITKNFDIGPKFIQVGVVQYSDYPVLEIPLGSYDSGEHLTAAVESILYLGGNTKTGKAIQFALDYLFAKSSRFLTKIAVVLTDGKSQDDVKDAAQAARDSKITLFAIGVGSETEDAELRAIANKPSSTYVFYVEDYIAISKIREVMKQKLCEESVCPTRIPVAARDERGFDILLGLDVNKKVKKRIQLSPKKIKGYEVTSKVDLSELTSNVFPEGLPPSYVFVSTQRFKVKKIWDLWRILTIDGCHK

SEQ ID NO: 1795 - protein, 434 aa, Homo sapiens [sequence omitted]

SEQ ID NO: 1796 - protein, 243 aa, Homo sapiens
MSPYQLNAYALALTAVGEIIQHYDSDKMFPALGFGAKLPPDGRVSHEFPLNGNQENPSCCGIDGILEAYHRSLRTVQLYGPTNFAPVVTHVARNAAAVQDGSQYSVLLIITDGVISDMAQTKEAIVNAAKLPMSIIIVGVGQAEFDAMVELDGDDVRISSRGKLAERDIVQFVPFRDYVDRTGNHVLSMARLARDVLAEIPDQLVSYMKAQGIRPRSPPAAPTHSPSQSPARTPPACPLHTHI

SEQ ID NO: 1797 - protein, 1092 aa, Homo sapiens [sequence omitted]

SEQ ID NO: 1798 - protein, 573 aa, Homo sapiens
MDAKSLTAWSRTLVTFKDVFVDFTREEWKLLDTAQQIVYRNVMLENYKNLVSLGYQLTKPDVILRLEKGEEPWLVEREIHQETHPDSETAFEIKSSVSSRSIFKDKQSCDIKMEGMARNDLWYLSLEEVWKCRDQLDKYQENPERHLRQVAFTQKKVLTQERVSESGKYGGNCLLPAQLVLREYFHKRDSHTKSLKHDLVLNGHQDSCASNSNECGQTFCQNIHLIQFARTHTGDKSYKCPDNDNSLTHGSSLGISKGIHREKPYECKECGKFFSWRSNLTRHQLIHTGEKPYECKECGKSFSRSSHLIGHQKTHTGEEPYECKECGKSFSWFSHLVTHQRTHTGDKLYTCNQCGKSFVHSSRLIRHQRTHTGEKPYECPECGKSFRQSTHLILHQRTHVRVRPYECNECGKSYSQRSHLVVHHRIHTGLKPFECKDCGKCFSRSSHLYSHQRTHTGEKPYECHDCGKSFSQSSALIVHQRIHTGEKPYECCQCGKAFIRKNDLIKHQRIHVGEETYKCNQCGIIFSQNSPFIVHQIAHTGEQFLTCNQCGTALVNTSNLIGYQTNHIRENAY

SEQ ID NO: 1799 - protein, 439 aa, Homo sapiens
MDAKSLTAWSRTLVTFKDVFVDFTREEWKLLDTAQQIVYRNVMLENYKNLVSLGYQLTKPDVILRLEKGEEPWLVEREIHQETHPDSETAFEIKSSVSSRSIFKDKQSCDIKMEGMARNDLWYLSLEEVWKCRDQLDKYQENPERHLRHQLIHTGEKPYECKECGKSFSRSSHLIGHQKTHTGEEPYECKECGKSFSWFSHLVTHQRTHTGDKLYTCNQCGKSFVHSSRLIRHQRTHTGEKPYECPECGKSFRQSTHLILHQRTHVRVRPYECNECGKSYSQRSHLVVHHRIHTGLKPFECKDCGKCFSRSSHLYSHQRTHTGEKPYECHDCGKSFSQSSALIVHQRIHTGEKPYECCQCGKAFIRKNDLIKHQRIHVGEETYKCNQCGIIFSQNSPFIVHQIAHTGEQFLTCNQCGTALVNTSNLIGYQTNHIRENAY

SEQ ID NO: 1800 - protein, 612 aa, Homo sapiens
MSRKISKESKKVNISSSLESEDISLETTVPTDDISSSEEREGKVRITRQLIERKELLHNIQLLKIELSQKTMMIDNLKVDYLTKIEELEEKLNDALHQKQLLTLRLDNQLAFQQKDASKYQELMKQEMETILLRQKQLEETNLQLREKAGDVRRSLRDFELTEEQYIKLKAFPEDQLSIPEYVSVRFYELVNPLRKEICELQVKKNILAEELSTNKNQLKQLTETYEEDRKNYSEVQIRCQRLALELADTKQLIQQGDYRQENYDKVKSERDALEQEVIELRRKHEILEASHMIQTKERSELSKEVVTLEQTVTLLQKDKEYLNRQNMELSVRCAHEEDRLERLQAQLEESKKAREEMYEKYVASRDHYKTEYENKLHDELEQIRLKTNQEIDQLRNASREMYERENRNLREARDNAVAEKERAVMAEKDALEKHDQLLDRYRELQLSTESKVTEFLHQSKLKSFESERVQLLQEETARNLTQCQLECEKYQKKLEVLTKEFYSLQASSEKRITELQAQNSEHQARLDIYEKLEKELDEIIMQTAEIENEDEAERVLFSYGYGANVPTTAKRRLKQSVHLARRVLQLEKQNSLILKDLEHRKDQVTQLSPGA

SEQ ID NO: 1801 - protein, 753 aa, Homo sapiens
MKVIGFKPEEIQTVYKILAAILHLGNLKFVVDGDTPLIENGKVVSIIAELLSTKTDMVEKALLYRTGATGRDIIDKQHTEQEASYGRDAFAKAIYERLFCWIVTRINDIIEVKNYDTTIHGKNTVIGVLDIYGFEIFDNNSFEQFCINYCNEKLQQLFIQLVLKQEQEEYQREGIPWKHIDYFNNQIIVDLVEQQHKGIIAILDDACMNVGKVTDEMFLEALNSKLGKHAHFSSRKLCASDKILEFDRDFRIRHYAGDVVYSVIGFIDKNKDTLFQDFKRLMYNSSNPVLKNMWPEGKLSITEVTKRPLTAATLFKNSMIALVDNLASKEPYYVRCIKPNDKKSPQIFDDERCRHQVEYLGLLENVRVRRAGFAFRQTYEKFLHRYKMISEFTWPNHDLPSDKEAVKKLIERCGFQDDVAYGKTKIFIRTPRTLFTLEELRAQMLIRIVLFLQKVWRGTLARMRYKRTKAALTIIRYYRRYKVKSYIHEVARRFHGVKTMRDYGKHVKWPSPPKVLRRFEEALQTIFNRWRASQLIKSIPASDLPQVRAKVAAVEMLKGQRADLGLQRAWEGNYLASKPDTPQTSGTFVPVANELKRKDKYMNVLFSCHVRKVNRFSKVEDRAIFVTDRHLYKMDPTKQYKVMKTIPLYNLTGLSVSNGKDQLVVFHTKDNKDLIVCLFSKQPTHESRIGELVGVLVNHFKSEKRHLQVNVTNPVQCSLHGKKCTVSVETRLNQPQPDFTKNRSGFILSVPGN

SEQ ID NO: 1802 - protein, 2166 aa, Homo sapiens
MQIEQLERYIQRYLVYAILWSLSGDSRLKMRAELGEYIRRITTVPLPTAPNIPIIDYEVSISGEWSPWQAKVPQIEVETHKVAAPDVVVPTLDTVRHEALLYTWLAEHKPLVLCGPPGSGKTMTLFSALRALPDMEVVGLNFSSATTPELLLKTFDHYCEYRRTPNGVVLAPVQLGKWLVLFCDEINLPDMDKYGTQRVISFIRQMVEHGGFYRTSDQTWVKLERIQFVGACNPPTDPGRKPLSHRFLRHVPVVYVDYPGPASLTQIYGTFNRAMLRLIPSLRTYAEPLTAAMVEFYTMSQERFTQDTQPHYIYSPREMTRWVRGIFEALRPLETLPVEGLIRIWAHEALRLFQDRLVEDEERRWTDENIDTVALKHFPNIDREKAMSRPILYSNWLSKDYIPVDQEELRDYVKARLKVFYEEELDVPLVLFNEVLDHVLRIDRIFRQPQGHLLLIGVSGAGKTTLSRFVAWMNGLSVYQIKVHRKYTGEDFDEDLRTVLRRSGCKNEKIAFIMDESNVLDSGFLERMNTLLANGEVPGLFEGDEYATLMTQCKEGAQKEGLMLDSHEELYKWFTSQVIRNLHVVFTMNPSSEGLKDRAATSPALFNRCVLNWFGDWSTEALYQVGKEFTSKMDLEKPNYIVPDYMPVVYDKLPQPPSHREAIVNSCVFVHQTLHQANARLAKRGGRTMAITPRHYLDFINHYANLFHEKRSELEEQQMHLNVGLRKIKETVDQVEELRRDLRIKSQELEVKNAAANDKLKKMVKDQQEAEKKKVMSQEIQEQLHKQQEVIADKQMSVKEDLDKVEPAVIEAQNAVKSIKKQHLVEVRSMANPPAAVKLALESICLLLGESTTDWKQIRSIIMRENFIPTIVNFSAEEISDAIREKMKKNYMSNPSYNYEIVNRASLACGPMVKWAIAQLNYADMLKRVEPLRNELQKLEDDAKDNQQKANEVEQMIRDLEASIARYKEEYAVLISEAQAIKADLAAVEAKVNRSTALLKSLSAERERWEKTSETFKNQMSTIAGDCLLSAAFIAYAGYFDQQMRQNLFTTWSHHLQQANIQFRTDIARTEYLSNADERLRWQASSLPADDLCTENAIMLKRFNRYPLIIDPSGQATEFIMNEYKDRKITRTSFLDDAFRKNLESALRFGNPLLVQDVESYDPVLNPVLNREVRRTGGRVLITLGDQDIDLSPSFVIFLSTRDPTVEFPPDLCSRVTFVNFTVTRSSLQSQCLNEVLKAERPDVDEKRSDLLKLQGEFQLRLRQLEKSLLQALNEVKGRILDDDTIITTLENLKREAAEVTRKVEETDIVMQEVETVSQQYLPLSTACSSIYFTMESLKQIHFLYQYSLQFFLDIYHNVLYENPNLKGVTDHTQRLSIITKDLFQVAFNRVARGMLHQDHITFAMLLARIKLKGTVGEPTYDAEFQHFLRGNEIVLSAGSTPRIQGLTVEQAEAVVRLSCLPAFKDLIAKVQADEQFGIWLDSSSPEQTVPYLWSEETPATPIGQAIHRLLLIQAFRPDRLLAMAHMFVSTNLGESFMSIMEQPLDLTHIVGTEVKPNTPVLMCSVPGYDASGHVEDLAAEQNTQITSIAIGSAEGFNQADKAINTAVKSGRWVMLKNVHLAPGWLMQLEKKLHSLQPHACFRLFLTMEINPKVPVNLLRAGRIFVFEPPPGVKANMLRTFSSIPVSRICKSPNERARLYFLLAWFHAIIQERLRYAPLGWSKKYEFGESDLRSACDTVDTWLDDTAKGRQNISPDKIPWSALKTLMAQSIYGGRVDNEFDQRLLNTFLERLFTTRSFDSEFKLACKVDGHKDIQMPDGIRREEFVQWVELLPDTQTPSWLGLPNNAERVLLTTQGVDMISKMLKMQMLEDEDDLAYAETEKKTRTDSTSDGRPAWMRTLHTTASNWLHLIPQTLSHLKRTVENIKDPLFRFFEREVKMGAKLLQDVRQDLADVVQVCEGKKKQTNYLRTLINELVKGILPRSWSHYTVPAGMTVIQWVSDFSERIKQLQNISLAAASGGAKELKNIHVCLGGLFVPEAYITATRQYVAQANSWSLEELCLEVNVTTSQGATLDACSFGVTGLKLQGATCNNNKLSLSNAISTALPLTQLRWVKQTNTEKKASVVTLPVYLNFTRADLIFTVDFEIATKEDPRSFYERGVAVLCTE

SEQ ID NO: 1803 - protein, 773 aa, Homo sapiens
MQVSSAEVRIGPMRLTQDPIQVLLIFAKEDSQSDGFWWACDRAGYRCNIARTPESALECFLDKHHEIIVIDHRQTQNFDAEAVCRSIRATNPSEHTVILAVVSRVSDDHEEASVLPLLHAGFNRRFMENSSIIACYNELIQIEHGEVRSQFKLRACNSVFTALDHCHEAIEITSDDHVIQYVNPAFERMMGYHKGELLGKELADLPKSDKNRADLLDTINTCIKKGKEWQGVYYARRKSGDSIQQHVKITPVIGQGGKIRHFVSLKKLCCTTDNNKQIHKIHRDSGDNSQTEPHSFRYKNRRKESIDVKSISSRGSDAPSLQNRRYPSMARIHSMTIEAPITKVINIINAAQENSPVTVAEALDRVLEILRTTELYSPQLGTKDEDPHTSDLVGGLMTDGLRRLSGNEYVFTKNVHQSHSHLAMPITINDVPPCISQLLDNEESWDFNIFELEAITHKRPLVYLGLKVFSRFGVCEFLNCSETTLRAWFQVIEANYHSSNAYHNSTHAADVLHATAFFLGKERVKGSLDQLDEVAALIAATVHDVDHPGRTNSFLCNAGSELAVLYNDTAVLESHHTALAFQLTVKDTKCNIFKNIDRNHYRTLRQAIIDMVLATEMTKHFEHVNKFVNSINKPMAAEIEGSDCECNPAGKNFPENQILIKRMMIKCADVANPCRPLDLCIEWAGRISEEYFAQTDEEKRQGLPVVMPVFDRNTCSIPKSQISFIDYFITDMFDAWDAFAHLPALMQHLADNYKHWKTLDDLKCKSLRLPSDS

SEQ ID NO: 1804 - protein, 272 aa, Homo sapiens
MALLTRTLEEASEQIRMNRSAKYNLEKDLKDKFVALTIDDICFSLNNNSPNIRYSENAVRIEPNSVSLEDWLDFSSTNVEKADKQRNNSLMLKALVDRILSMTANDLRKQCDVVHTAFKNGLKDTKDARDKLADHLAKVMEEIASQEKNITALEKAILDQEGPAKVAHTRLETRTHRPNVELCRDVAQYRLMKEVQEITHNVARLKETLAQAQAELKGLHRRQLALQEEIQVKENTIYIDEVLCMQMRKSIPLRDGEDHGVWAGGLRPDAVC

SEQ ID NO: 1805 - protein, 178 aa, Homo sapiens
MLLGGRKTTDIPLEGYLLSPIQRICKYPLLLKELAKRTPGKHPDHPAVQSALQAMKTVCSNINETKRQMEKLEALEQLQSHIEGWEGSNLTDICTQLLLQGTLLKISAGNIQERAFFLFDNLLVYCKRKSRVTGSKKSTKRTKSINGSLYIFRGRINTEVMEVENVEDGTGSPSPSLA

SEQ ID NO: 1806 - protein, 875 aa, Homo sapiens
MHDAFEPVPILEKLPLQIDCLAAWEEWLLVGTKQGHLLLYRIRKDVGCNRFEVTLEKSNKNFSKKIQQIHVVSQFKILVSLLENNIYVHDLLTFQQITTVSKAKGASLFTCDLQHTETGEEVLRMCVAVKKRLQLYFWKDREFHELQGDFSVPDVPKSMAWCENSICVGFKRDYYLIRVDGKGSIKELFPTGKQLEPLVAPLADGKVAVGQDDLTVVLNEEGICTQKCALNWTDIPVAMEHQPPYIIAVLPRYVEIRTFEPRLLVQSIELQRPRFITSGGSNIIYVASNHFVWRLIPVPMATQIQQLLQDKQFELALQLAEMKDDSDSEKQQQIHHIKNLYAFNLFCQKRFDESMQVFAKLGTDPTHVMGLYPDLLPTDYRKQLQYPNPLPVLSGAELEKAHLALIDYLTQKRSQLVKKLNDSDHQSSTSPLMEGTPTIKSKKKLLQIIDTTLLKCYLHTNVALVAPLLRLENNHCHIEESEHVLKKAHKYSELIILYEKKGLHEKALQVLVDQSKKANSPLKGHERTVQYLQHLGTENLHLIFSYSVWVLRDFPEDGLKIFTEDLPEVESLPRDRVLGFLIENFKGLAIPYLEHIIHVWEETGSRFHNCLIQLYCEKVQGLMKEYLLSFPAGKTPVPAGEEEGELGEYRQKLLMFLEISSYYDPGRLICDFPFDGLLEERALLLGRMGKHEQALFIYVHILKDTRMAEEYCHKHYDRNKDGNKDVYLSLLRMYLSPPSIHCLGPIKLELLEPKANLQAALQVLELHHSKLDTTKALNLLPANTQINDIRIFLEKVLEENAQKKRFNQVLKNLLHAEFLRVQEERILHQQVKCIITEEKVCMVCKKKIGNSAFARYPNGVVVHYFCSKEVNPADT

SEQ ID NO: 1807 - protein, 331 aa, Homo sapiens [sequence omitted]

SEQ ID NO: 1808 - protein, 400 aa, Homo sapiens
MFLPGPQPSAVLPGRWLWAFRTHSQVSSRRLPHTRVHKTKLEFHEAILRLSVQERCRRSILFYPYSTRFDSVPKKMPISTHLYFHERSCSQQLCRTPHCPPPSPLAVPSSSRFPQLLHSRKPEDRFSSLKGVPTEVKIQEMTKLGHELMLCAPDDQELLKGCACAQKQLHFMDQLLDTIRSLTIGCSSCSSLMEHFEDTREKNEALLGELFSSPHLQMLLNPECDPWPLDMQPLLNKQSDDWQWASASAKSEEEEKLAELARQLQESAAKLHALRTEYFAQHEQGAAAGAADISTLDQKLRLVTSDFHQLILAFLQVYDDELGECCQRPGPDLHPCGPIIQATHQNLTSYSQLLQVVMAVADTSAKAVETVKKQQGEQICWGGSSSVMSLATKMNELMEK

SEQ ID NO: 1809 - protein, 249 aa, Homo sapiens
MLLKVQYISCWAVMSFSSFVLNPLRLSYNLVCKAFSGMVFPPPVFVVTEPADTDGQLYLCFSFDPYIAVSELQKLIRQLLLLQLFPKYLIYIDINKALLAKRKRLEMYTKASLKTSNQKIEHVWKTQQDQRQKLNQEYSQQFLTLFQQWDLDMQKAEEQEEKILNMFRQQQKILQQSRIVQSQRLKTIKQLYEQFIKSMEELEKNHDNLLTGAQNEFKKEMAMLQKKIMMETQQQEIASVRKSLQSMLF

SEQ ID NO: 1810 - protein, 115 aa, Homo sapiens
MWVNPEEVLLANALWITERANPYFILQRRKGHAGDGGGGGGLAGLLVGTLDVVLDSSARVAPYRILYQTPDSLGLLDHRLWVVPGKKSLNTGNGLSKISCRHFPSLKMRMISPHL

SEQ ID NO: 1811 - protein, 643 aa, Homo sapiens
MVDAGGVENITQLPQELPQMMAAAADGLGSIAIDTTQLNMSVTDPTAWATAMNNLGMVPVGLPGQQLVSDSICVPGFDPSLNMMTGITPINPMIPGLGLVPPPPPTEVAVVKEIIHCKSCTLFPQNPNLPPPSTRERPPGCKTVFVGGLPENATEEIIQEVFEQCGDITAIRKSKKNFCHIRFAEEFMVDKAIYLSGYRMRLGSSTDKKDSGRLHVDFAQARDDFYEWECKQRMRAREERHRRKLEEDRLRPPSPPAIMHYSEHEAALLAEKLKDDSKFSEAITVLLSWIERGEVNRRSANQFYSMVQSANSHVRRLMNEKATHEQEMEEAKENFKNALTGILTQFEQIVAVFNASTRQKAWDHFSKAQRKNIDIWRKHSEELRNAQSEQLMGIRREEEMEMSDDENCDSPTKKMRVDESALAAQAYALKEENDSLRWQLDAYRNEVELLKQEKEQLFRTEENLTKDQQLQFLQQTMQGMQQQLLTIQEELNNKKSELEQAKEEQSHTQALLKVLQEQLKGTKELVETNGHSHEDSNEINVLTVALVNQDRENNIEKRSQGLKSEKEALLIGIISTFLHVHPFGANIEYLWSYMQQLDSKISANEIEMLLMRLPRMFKQEFTGVGATLEKRWKLCAFEGIKTT

SEQ ID NO: 1812 - protein, 854 aa, Homo sapiens
MPGGGPQGAPAAAGGGGVSHRAGSRDCLPPAACFRRRRLARRPGYMRSSTGPGIGFLSPAVGTLFRFPGGVSGEESHHSESRARQCGLDSRGLLVRSPVSKSAAAPTVTSVRGTSAHFGIQLRGGTRLPDRLSWPCGPGSAGWQQEFAAMDSSETLDASWEAACSDGARRVRAAGSLPSAELSSNSCSPGCGPEVPPTPPGSHSAFTSSFSFIRLSLGSAGERGEAEGCPPSREAESHCQSPQEMGAKAASLDGPHEDPRCLSQPFSLLATRVSADLAQAARNSSRPERDMHSLPDMDPGSSSSLDPSLAGCGGDGSSGSGDAHSWDTLLRKWEPVLRDCLLRNRRQMEVISLRLKLQKLQEDAVENDDYDKAETLQQRLEDLEQEKISLHFQLPSRQPALSSFLGHLAAQVQAALRRGATQQASGDDTHTPLRMEPRLLEPTAQDSLHVSITRRDWLLQEKQQLQKEIEALQARMFVLEAKDQQLRREIEEQEQQLQWQGCDLTPLVGQLSLGQLQEVSKALQDTLASAGQIPFHAEPPETIRSLQERIKSLNLSLKEITTKVCMSEKFCSTLRKKVNDIETQLPALLEAKMHAISGNHFWTAKDLTEEIRSLTSEREGLEGLLSKLLVLSSRNVKKLGSVKEDYNRLRREVEHQETAYETSVKENTMKYMETLKNKLCSCKCPLLGKVWEADLEACRLLIQCLQLQEARGSLSVEDERQMDDLEGAAPPIPPRLHSEDKRKTPLKVLEEWKTHLIPSLHCAGGEQKEESYILSAELGEKCEDIGKKLLYLEDQLHTAIHSHDEDLIQSLRRELQMVKETLQAMILQLQPAKEAGEREAAASCMTAGVHEAQA

SEQ ID NO: 1813 - protein, 317 aa, Homo sapiens
MYNMMETELKPPGPQQTSGGGGGNSTAAAAGGNQKNSPDRVKRPMNAFMVWSRGQRRKMAQENPKMHNSEISKRLGAEWKLLSETEKRPFIDEAKRLRALHMKEHPDYKYRPRRKTKTLMKKDKYTLPGGLLAPGGNSMASGVGVGAGLGAGVNQRMDSYAHMNGWSNGSYSMMQDQLGYPQHPGLNAHGAAQMQPMHRYDVSALQYNSMTSSQTYMNGSPTYSMSYSQQGTPGMALGSMGSVVKSEASSSPPVVTSSSHSRAPCQAGDLRDMISMYLPGAEVPEPAAPSRLHMSQHYQSGPVPGTAINGTLPLSHM

SEQ ID NO: 1814 - protein, 919 aa, Homo sapiens
MVQRMWAEAAGPAGGAEPLFPGSRRSRSVWDAVRLEVGVPDSCPVVLHSFTQLDPDLPRPESSTQEIGEELINGVIYSISLRKVQLHHGGNKGQRWLGYENESALNLYETCKVRTVKAGTLEKLVEHLVPAFQGSDLSYVTIFLCTYRAFTTTQQVLDLLFKRYGRCDALTASSRYGCILPYSDEDGGPQDQLKNAISSILGTWLDQYSEDFCQPPDFPCLKQLVAYVQLNMPGSDLERRAHLLLAQLEHSEPIEAEPEGEEDWALSPVPALKPTPELELALTPARAPSPVPAPAPEPEPAPTPAPGSELEVAPAPAPELQQAPEPAVGLESAPAPALELEPAPEQDPAPSQTLELEPAPAPVPSLQPSWPSPVVAENGLSEEKPHLLVFPPDLVAEQFTLMDAELFKKVVPYHCLGSIWSQRDKKGKEHLAPTIRATVTQFNSVANCVITTCLGNRSTKAPDRARVVEHWIEVARECRILKNFSSLYAILSALQSNSIHRLKKTWEDVSRDSFRIFQKLSEIFSDENNYSLSRELLIKEGTSKFATLEMNPKRAQKRPKETGIIQGTVPYLGTFLTDLVMLDTAMKDYLYGRLINFEKRRKEFEVIAQIKLLQSACNNYSIAPDEQFGAWFRAVERLSETESYNLSCELEPPSESASNTLRTKKNTAIVKRWSDRQAPSTELSTSGSSHSKSCDQLRCGPYLSSGDIADALSVHSAGSSSSDVEEINISFVPESPDGQEKKFWESASQSSPETSGISSASSSTSSSSASTTPVAATRTHKRSVSGLCNSSSALPLYNQQVGDCCIIRVSLDVDNGNMYKSILVTSQDKAPAVIRKAMDKHNLEEEEPEDYELLQILSDDRKLKIPENANVFYAMNSTANYDFVLKKRTFTKGVKVKHGASSTLPRMKQKGLKIAKGIF

SEQ ID NO: 1815 - protein, 1303 aa, Homo sapiens
MGDPAPARSLDDIDLSALRDPAGIFELVEVVGNGTYGQVYKGRHVKTGQLAAIKVMDVTEDEEEEIKQEINMLKKYSHHRNIATYYGAFIKKSPPGNDDQLWLVMEFCGAGSVTDLVKNTKGNALKEDCIAYICREILRGLAHLHAHKVIHRDIKGQNVLLTENAEVKLVDFGVSAQLDRTVGRRNTFIGTPYWMAPEVIACDENPDATYDYRSDIWSLGITAIEMAEGAPPLCDMHPMRALFLIPRNPPPRLKSKKWSKKFIDFIDTCLIKTYLSRPPTEQLLKFPFIRDQPTERQVRIQLKDHIDRSRKKRGEKEETEYEYSGSEEEDDSHGEEGEPSSIMNVPGESTLRREFLRLQQENKSNSEALKQQQQLQQQQQRDPEAHIKHLLHQRQRRIEEQKEERRRVEEQQRREREQRKLQEKEQQRRLEDMQALRREEERRQAEREQEYKRKQLEEQRQSERLQRQLQQEHAYLKSLQQQQQQQQLQKQQQQQLLPGDRKPLYHYGRGMNPADKPAWAREVEERTRMNKQQNSPLAKSKPGSTGPEPPIPQASPGPPGPLSQTPPMQRPVEPQEGPHKSLVAHRVPLKPYAAPVPRSQSLQDQPTRNLAAFPASHDPDPAIPAPTATPSARGAVIRQNSDPTSEGPGPSPNPPAWVRPDNEAPPKVPQRTSSIATALNTSGAGGSRPAQAVRASNPDLRRSDPGWERSDSVLPASHGHLPQAGSLERNRVGVSSKPDSSPVLSPGNKAKPDDHRSRPGRPASYKRAIGEDFVLLKERTLDEAPRPPKKAMDYSSSSEEVESSEDDEEEGEGGPAEGSRDTPGGRSDGDTDSVSTMVVHDVEEITGTQPPYGGGTMVVQRTPEEERNLLHADSNGYTNLPDVVQPSHSPTENSKGQSPPSKDGSGDYQSRGLVKAPGKSSFTMFVDLGIYQPGGSGDSIPITALVGGEGTRLDQLQYDVRKGSVVNVNPTNTRAHSETPEIRKYKKRFNSEILCAALWGVNLLVGTENGLMLLDRSGQGKVYGLIGRRRFQQMDVLEGLNLLITISGKRNKLRVYYLSWLRNKILHNDPEVEKKQGWTTVGDMEGCGHYRVVKYERIKFLVIALKSSVEVYAWAPKPYHKFMAFKSFADLPHRPLLVDLTVEEGQRLKVIYGSSAGFHAVDVDSGNSYDIYIPVHIQSQITPHAIIFLPNTDGMEMLLCYEDEGVYVNTYGRIIKDVVLQWGEMPTSVAYICSNQIMGWGEKAIEIRSVETGHLDGVFMHKRAQRLKFLCERNDKVFFASVRSGGSSQVYFMTLNRNCIMNW

SEQ ID NO: 1816 - protein, 225 aa, Homo sapiens
MNGIRLGTYGLAEAGGYLHTAEGTHSPARSAAAGAMAGVMGAYLGSPIYMVKTHLQAQAASEIAVGHQYKHQGMFQALTEIGQKHGLVGLWRGALGGLPRVIVGSSTQLCTFSSTKDLLSQWEIFPPQSWKLALVAAMMSGIAVVLAMAPFDVACTRLYNQPTDAQGKGLMYRGILDALLQTARTEGIFGMYKGIGASYFRLGPHTILSLFFWDQLRSLYYTDTK

SEQ ID NO: 1817 - protein, 194 aa, Homo sapiens
MLAYCVQDATVVDVEKRRNPSKHYVYIINVTWSDSTSQTIYRRYSKFFDLQMQLLDKFPIEGGQKDPKQRIIPFLPGKILFRRSHIRDVAVKRLKPIDEYCRALVRLPPHISQCDEVFRFFEARPEDVNPPKEQGPSPPDAVLPYGVNKGKQELKAGPNWPGRTHHVVNCVTQKCLFVFHFKFSSSGNKESKSL

SEQ ID NO: 1818 - protein, 699 aa, Homo sapiens
MADAGIRRVVPSDLYPLVLGFLRDNQLSEVANKFAKATGATQQDANASSLLDIYSFWLKSAKVPERKLQANGPVAKKAKKKASSSDSEDSSEEEEEVQGPPAKKAAVPAKRVGLPPGKAAAKASESSSSEESSDDDDEEDQKKQPVQKGVKPQAKAAKAPPKKAKSSDSDSDSSSEDEPPKNQKPKITPVTVKAQTKAPPKPARAAPKIANGKAASSSSSSSSSSSSDDSEEEKAAATPKKTVPKKQVVAKAPVKAATTPTRKSSSSEDSSSDEEEEQKKPMKNKPGPYSSVPPPSAPPPKKSLGTQPPKKAVEKQQPVESSEDSSDESDSSSEEEKKPPTKAVVSKATTKPPPAKKAAESSSDSSDSDSSEDDEAPSKPAGTTKNSSNKPAVTTKSPAVKPAAAPKQPVGGGQKLLTRKADSSSSEEESSSSEEEKTKKMVATTKPKATAKAALSLPAKQAPQGSRDSSSDSDSSSSEEEEEKTSKSAVKKKPQKVAGGAAPSKPASAKKGKAESSNSSSSDDSSEEEEEKLKGKGSPRPQAPKANGTSALTAQNGKAAKNSEEEEEEKKKAAVVVSKSGSLKKRKQNEAAKEAETPQAKKIKLQTPNTFPKRKKGEKRASSPFRRVREEEIEVDSRVADNSFDAKRGAAGDWGERANQVLKFTKGKSFRHEKTKKKRGSYRGGSISVQVNSIKFDSE

SEQ ID NO: 1819 - protein, 1723 aa, Homo sapiens
MTSRKLASATANDSANPLHLSAAPENSRGPALSAEHTSSLVPSLHITTLGQEQAILSGAVPASPSTGTADFPSILTFLQPTENHASPSPVPEMPTLPAEGSDGSPPATRDLLLSSKVPNLLSTSWTFPRWKKDSVTAILGKNEEANVTIPLQAFPRKEVLSLHTVNGFVSDFSTGSVSSPIITAPRTNPLPSGPPLPSILSIQATQTVFPSLLAFSSTKPEVYAAAVDHSGLPASAPKQVRASPSSMDVYDSLTIGDMKKPATTDVFWSSLSAETGSLSTESIISGLQQQTNYDLNGHTISTTSWETHLAPTAPPNGLTSAADAIKSQDFKDTAGHSVTAEGFSIQDLVLGTSIEQPVQQSDMTMVGSHIDLWPTSNNNHSRDFQTAEVAYYSPTTRHSVSHPQLQLPNQPAHPLLLTSPGPTSTGSLQEMLSDGTDTGSEISSDINSSPERNASTPFQNILGYHSAAESSISTSVFPRTSSRVLRASQHPKKWTGAATNAADTVSSKVQPTAAAAVTLFLRKSSPPALSAALVAKGTSSSPLAVASGPAKSSSMTTLAKNVTNKAASGPKRTPGAVHTAFPFTPTYMYARTGHTTSTHTAMQGNMDTASGLLSTTYLPRKPQAMHTGLPNPTNLEMPRASTPRPLTVTAALTSITASVKATRLPPLRAENTDAVLPAASAAVVTTGKMASNLECQMSSKLLVKTVLFLTQRRVQISESLKFSIAKGLTQALRKAFHQNDVSAHVDILEYSHNVTVGYYATKGKLVYLPAVVIEMLGVYGVSNVTADLKQHTPHLQSVAVLASPWNPQPAGYFQLKTVLQFVSQADNIQSCKFAQTMEQRLQKAFQDAERKVLNTKSNLTIQIVSTSNASQAVTLVYVVGNQSTFLNGTVASSLLSQLSAELVGFYLTYPPLTIAEPLEYPNLDISETTRDYWVITVLQGVDNSLVGLHNQSFARVMEQRLAQLFMMSQQQGRRFKRATTLGSYTVQMVKMQRVPGPKDPAELTYYTLYNGKPLLGTVAAKILSTIDSQRMALTLHHVVLLQADPVVKNPPNNLWIIAAVLAPIAVVTVIIIIITAVLCRKNKNDFKPDTMINLPQRAKPVQGFDYAKQHLGQQGADEEVIPVTQETVVLPLPIRDAPQERDVAQDGSTIKTAKSTETRKSRSPSENGSVISNESGKPSSGRRSPQNVMAQQKVTKEEARKRNVPASDEEEGAVLFDNSSKVAAEPFDTSSGSVQLIAIKPTALPMVPPTSDRSQESSAVLNGEVNKALKQKSDIEHYRNKLRLKAKRKGYYDFPAVETSKGLTERKKMYEKAPKEMEHVLDPDSELCAPFTESKNRQQMKNSVYRSRQSLNSPSPGETEMDLLVTRERPRRGIRNSGYDTEPEIIEETNIDRVPEPRGYSRSRQVKGHSETSTLSSQPSIDEVRQQMHMLLEEAFSLASAGHAGQSRHQEAYGSAQHLPYSEVVTSAPGTMTRPRAGVQWVPTYRPEMYQYSLPRPAYRFSQLPEMVMGSPPPPVPPRTGPVAVASLRRSTSDIGSKTRMAESTGPEPAQLHDSASFTQMSRGPVSVTQLDQSALNYSGNTVPAVFAIPAANRPGFTGYFIPTPPSSYRNQAWMSYAGENELPSQWADSVPLPGYIEAYPRSRYPQSSPSRLPRQYSQPANLHPSLEQAPAPSTAASQQSLAENDPSDAPLTNISTAALVKAIREEVAKLAKKQTDMFEFQV

SEQ ID NO: 1820 - protein, 581 aa, Homo sapiens [sequence omitted]

SEQ ID NO: 1821 - protein, 1452 aa, Homo sapiens
MRTLGTCLATLAGLLLTAAGETFSGGCLFDEPYSTCGYSQSEGDDFNWEQVNTLTKPTSDPWMPSGSFMLVNASGRPEGQRAHLLLPQLKENDTHCIDFHYFVSSKSNSPPGLLNVYVKVNNGPLGNPIWNISGDPTRTWNRAELAISTFWPNFYQVIFEVITSGHQGYLAIDEVKVLGHPCTRTPHFLRIQNVEVNAGQFATFQCSAIGRTVAGDRLWLQGIDVRDAPLKEIKVTSSRRFIASFNVVNTTKRDAGKYRCMIRTEGGVGISNYAELVVKEPPVPIAPPQLASVGATYLWIQLNANSINGDGPIVAREVEYCTASGSWNDRQPVDSTSYKIGHLDPDTEYEISVLLTRPGEGGTGSPGPALRTRTKCADPMRGPRKLEVVEVKSRQITIRWEPFGYNVTRCHSYNLTVHYCYQVGGQEQVREEVSWDTENSHPQHTITNLSPYTNVSVKLILMNPEGRKESQELIVQTDEDLPGAVPTESIQGSTFEEKIFLQWREPTQTYGVITLYEITYKAVSSFDPEIDLSNQSGRVSKLGNETHFLFFGLYPGTTYSFTIRASTAKGFGPPATNQFTTKISAPSMPAYELETPLNQTDNTVTVMLKPAHSRGAPVSVYQIVVEEERPRRTKKTTEILKCYPVPIHFQNASLLNSQYYFAAEFPADSLQAAQPFTIGDNKTYNGYWNTPLLPYKSYRIYFQAASRANGETKIDCVQVATKGAATPKPVPEPEKQTDHTVKIAGVIAGILLFVIIFLGVVLVMKKRKLAKKRKETMSSTRQEMTVMVNSMDKSYAEQGTNCDEAFSFMDTHNLNGRSVSSPSSFTMKTNTLSTSVPNSYYPDETHTMASDTSSLVQSHTYKKREPADVPYQTGQLHPAIRVADLLQHITQMKCAEGYGFKEEYESFFEGQSAPWDSAKKDENRMKNRYGNIIAYDHSRVRLQTIEGDTNSDYINGNYIDGYHRPNHYIATQGPMQETIYDFWRMVWHENTASIIMVTNLVEVGRVKCCKYWPDDTEIYKDIKVTLIETELLAEYVIRTFAVEKRGVHEIREIRQFHFTGWPDHGVPYHATGLLGFVRQVKSKSPPSAGPLVVHCSAGAGRTGCFIVIDIMLDMAEREGVVDIYNCVRELRSRRVNMVQTEEQYVFIHDAILEACLCGDTSVPASQVRSLYYDMNKLDPQTNSSQIKEEFRTLNMVTPTLRVEDCSIALLPRNHEKNRCMDILPPDRCLPFLITIDGESSNYINAALMDSYKQPSAFIVTQHPLPNTVKDFWRLVLDYHCTSVVMLNDVDPAQLCPQYWPENGVHRHGPIQVEFVSADLEEDIISRIFRIYNAARPQDGYRMVQQFQFLGWPMYRDTPVSKRSFLKLIRQVDKWQEEYNGGEGRTVVHCLNGGGRSGTFCAISIVCEMLRHQRTVDVFHAVKTLRNNKPNMVDLLDQYKFCYEVALEYLNSG

SEQ ID NO: 1822 - protein, 1872 aa, Homo sapiens
MMNEDAAQKSDSGEKFNGSSQRRKRPKKSDSNASFLRAARAGNLDKVVEYLKGGIDINTCNQNGLNALHLAAKEGHVGLVQELLGRGSSVDSATKKGNTALHIASLAGQAEVVKVLVKEGANINAQSQNGFTPLYMAAQENHIDVVKYLLENGANQSTATEDGFTPLAVALQQGHNQAVAILLENDTKGKVRLPALHIAARKDDTKSAALLLQNDHNADVQSKMMVNRTTESGFTPLHIAAHYGNVNVATLLLNRGAAVDFTARNGITPLHVASKRGNTNMVKLLLDRGGQIDAKTRDGLTPLHCAARSGHDQVVELLLERGAPLLARTKNGLSPLHMAAQGDHVECVKHLLQHKAPVDDVTLDYLTALHVAAHCGHYRVTKLLLDKRANPNARALNGFTPLHIACKKNRIKVMELLVKYGASIQAITESGLTPIHVAAFMGHLNIVLLLLQNGASPDVTNIRGETALHMAARAGQVEVVRCLLRNGALVDARAREEQTPLHIASRLGKTEIVQLLLQHMAHPDAATTNGYTPLHISAREGQVDVASVLLEAGAAHSLATKKGFTPLHVAAKYGSLDVAKLLLQRRAAADSAGKNGLTPLHVAAHYDNQKVALLLLEKGASPHATAKNGYTPLHIAAKKNQMQIASTLLNYGAETNIVTKQGVTPLHLASQEGHTDMVTLLLDKGANIHMSTKSGLTSLHLAAQEDKVNVADILTKHGADQDAHTKLGYTPLIVACHYGNVKMVNFLLKQGANVNAKTKNGYTPLHQAAQQGHTHIINVLLQHGAKPNATTANGNTALAIAKRLGYISVVDTLKVVTEEVTTTTTTITEKHKLNVPETMTEVLDVSDEEGDDTMTGDGGEYLRPEDLKELGDDSLPSSQFLDGMNYLRYSLEGGRSDSLRSFSSDRSHTLSHASYLRDSAVMDDSVVIPSHQVSTLAKEAERNSYRLSWGTENLDNVALSSSPIHSGFLVSFMVDARGGAMRGCRHNGLRIIIPPRKCTAPTRVTCRLVKRHRLATMPPMVEGEGLASRLIEVGPSGAQFLGKLHLPTAPPPLNEGESLVSRILQLGPPGTKFLGPVIVEIPHFAALRGKERELVVLRSENGDSWKEHFCDYTEDELNEILNGMDEVLDSPEDLEKKRICRIITRDFPQYFAVVSRIKQDSNLIGPEGGVLSSTVVPQVQAVFPEGALTKRIRVGLQAQPMHSELVKKILGNKATFSPIVTLEPRRRKFHKPITMTIPVPKASSDVMLNGFGGDAPTLRLLCSITGGTTPAQWEDITGTTPLTFVNECVSFTTNVSARFWLIDCRQIQESVTFASQVYREIICVPYMAKFVVFAKSHDPIEARLRCFCMTDDKVDKTLEQQENFAEVARSRDVEVLEGKPIYVDCFGNLVPLTKSGQHHIFSFFAFKENRLPLFVKVRDTTQEPCGRLSFMKEPKSTRGLVHQAICNLNITLPIYTKESESDQEQEEEIDMTSEKNPQDEQERIEERLAYIADHLGFSWTELARELDFTEEQIHQIRIENPNSLQDQSHALLKYWLERDGKHATDTNLVECLTKINRMDIVHLMETNTEPLQERISHSYAEIEQTITLDHSEGFSVLQEELCTAQHKQKEEQAVSKESETCDHPPIVSEEDISVGYSTFQDGVPKTEGDSSSTALFPQTHKEQVQQDFSGKMQDLPEESSLEYQQEYFVTTPGTETSETQKAMIVPSSPSKTPEEVSTPAEEEKLYLQTPTSSERGGSPIIQEPEEPSEHREESSPRKTSLVIVESADNQPETCERLDEDAAFEKGDDMPEIPPETVTEEEYIDEHGHTVVKKVTRKIIRRYVSSEGTEKEEIMVQGMPQEPVNIEEGDGYSKVIKRVVLKSDTEQSEDNNE

SEQ ID NO: 1823 - protein, 2940 aa, Homo sapiens
MGCIMTEALENKSVHFPLRSKYNRLTKVARFLQENPSCLLCNILHHYLHQANYSIIDDATMSDGLPALVTLKKGLVALARQWMKFIVVTPAFKGVSLHRPAQPLKPQIAMDHEHEDGLGLDNGGGLQSDTSADGAEFEFDAATVSEHTMLLEGTANRPPPGSSGPVTGAEIMRKLSKTHTHSDSALKIKGIHPYHSLSYTSGDTATDSPVHVGRAGMPVKDSPRKESLLSYLTGSFPSLHNLLEGTPQRSSAAVKSSSLTRTGNTVATDMLSEHPLLSEPSSVSFYNWMSNAVGNRGSVLQESPVTKSGHNSLPTGVAPNLPTIPSASDFNTVLSSDQNTLDGTHSQHSTSQDDVAGVEEANQGFPAVQLADAQVVFKPLLSHTGIQSQDTMPFCYRMYFGEHLSFSGTLDCLRADIVDSDTAKERKGKRARRQGHVNLPPLEFKPALMLGTFSISAVVMEKSVCTPQNSTSALSFHDLSKRYYNTFHCNFTISCQSISQHVDMALVRLIHQFSTMIDDIKATQTDIKLSRYTAGSASPTPTFKTRKHRDFRSSDFSRSSRGSLNGGNRVNNAKNKRTNNENNKKESRNKNSLGRSERRTSKVSRKGSKDVVDHMTIHMDDSDSITVSEQSEPSAECWQNMYKLLNFYSLISDPTGILEKSSETFGPAGVRSPTEPTCKVVFENEQDNSSLTKTQRKRSLVTSEPQHVTLIVFGIGMVNRTHLEADIGGLTMESELKRIHGSFTLKEKMKDVLHQKMTETCATAHIGGVNIVLLEGITPNIQLEDFPTSPTSTAKQEFLTVVKCSIAKSQALYSAQRGLKTNNAAVFKVGAISINIPQHPATLHSMMVRSSHQLSKQISDLIRQPSTAPQPVKEDIATPLPSEKTPTSVNQTPVETNEFPQLPEGLEKKPIVLKFSAMLDGIAIGAALLPSLKAEYKMGRMRSHGMTGAQTRFTFELPNHRLRFTSKVSATDMSTIPPSASLNLPPVTMSGKYIMEEHDSYSDQVWSIDELPSKQGYYLQGNYLRCVAEVGSFEHNLTTDLLNHLVFVQKVFMKEVNEVIQKVSGGEQPIPLWNEHDGTADGDKPKILLYSLNLQFKGIQVTATTPSMRAVRFETGLIELELSNRLQTKASPGSSSYLKLFGKCQVDLNLALGQIVKHQVYEEAGSDFHQVAYFKTRIGLRNALREEISGSSDREAVLITLNRPIVYAQPVAFDRAVLFWLNYKAAYDNWNEQRMALHKDIHMATKEVVDMLPGIQQTSAQAFGTLFLQLTVNDLGICLPITNTAQSNHTGDLDTGSALVLTIESTLITACSSESLVSKGHFKNFCIRFADGFETSWDDWKPEIHGDLVMNACVVPDGTYEVCSRTTGQAAAESSSAGTWTLNVLWKMCGIDVHMDPNIGKRLNALGNTLTTLTGEEDIDDIADLNSVNIADLSDEDEVDTMSPTIHTEATDYRRQAASASQPGELRGRKIMKRIVDIRELNEQAKVIDDLKKLGASEGTINQEIQRYQQLESVAVNDIRRDVRKKLRRSSMRAASLKDKWGLSYKPSYSRSKSISASGRPPLKRMERASSRVGETEELPEIRVDAASPGPRVTFNIQDTFPEETELDLLSVTIEGPSHYSSNSEGSCSVFSSPKTPGGFSPGIPFQTEEGRRDDSLSSTSEDSEKDEKDEDHERERFYIYRKPSHTSRKKATGFAAVHQLFTERWPTTPVNRSLSGTATERNIDFELDIRVEIDSGKCVLHPTTLLQEHDDISLRRSYDRSSRSLDQDSPSKKKKFQTNYASTTHLMTGKKVPSSLQTKPSDLETTVFYIPGVDVKLHYNSKTLKTESPNASRGSSLPRTLSKESKLYGMKDSATSPPSPPLPSTVQSKTNTLLPPQPPPIPAAKGKGSGGVKTAKLYAWVALQSLPEEMVISPCLLDFLEKALETIPITPVERNYTAVSSQDEDMGHFEIPDPMEESTTSLVSSSTSAYSSFPVDVVVYVRVQPSQIKFSCLPVSRVECMLKLPSLDLVFSSNRGELETLGTTYPAETLSPGGNATQSGTKTSASKTGIPGSSGLGSPLGRSRHSSSQSDLTSSSSSSSGLSFTACMSDFSLYVFHPYGAGKQKTAVSGLTPGSGGLGNVDEEPTSVTGRKDSLSINLEFVKVSLSRIRRSGGASFFESQSVSKSASKMDTTLINISAVCDIGSASFKYDMRRLSEILAFPRAWYRRSIARRLFLGDQTINLPTSGPGTPDSIEGVSQHLSPESSRKAYCKTWEQPSQSASFTHMPQSPNVFNEHMTNSTMSPGTVGQSLKSPASIRSRSVSDSSVPRRDSLSKTSTPFNKSNKAASQQGTPWETLVVFAINLKQLNVQMNMSNVMGNTTWTTSGLKSQGRLSVGSNRDREISMSVGLGRSQLDSKGGVVGGTIDVNALEMVAHISEHPNQQPSHKIQITMGSTEARVDYMGSSILMGIFSNADLKLQDEWKVNLYNTLDSSITDKSEIFVHGDLKWDIFQVMISRSTTPDLIKIGMKLQEFFTQQFDTSKRALSTWGPVPYLPPKTMTSNLEKSSQEQLLDAAHHRHWPGVLKVVSGCHISLFQIPLPEDGMQFGGSMSLHGNHMTLACFHGPNFRSKSWALFHLEEPNIAFWTEAQKIWEDGSSDHSTYIVQTLDFHLGHNTMVTKPCGALESPMATITKITRRRHENPPHGVASVKEWFNYVTATRNEELNLLRNVDANNTENSTTVKNSSLLSGFRGGSSYNHETETIFALPRMQLDFKSIHVQEPQEPSLQDASLKPKVECSVVTEFTDHICVTMDAELIMFLHDLVSAYLKEKEKAIFPPRILSTRPGQKSPIIIHDDNSSDKDREDSITYTTVDWRDFMCNTWHLEPTLRLISWTGRKIDPVGVDYILQKLGFHHARTTIPKWLQRGVMDPLDKVLSVLIKKLGTALQDEKEKKGKDKEEH

SEQ ID NO: 1824 - protein, 193 aa, Homo sapiens
MEGCVSNLMVCNLAYSGKLEELKESILADKSLATRTDQAGWSPLHIAASAGRDEIVKALLGKGAQVNAVNQNGCTPLHYAASKNRHEIAVMLLEGGANPDAKDHYEATAMHRAAAKGNLKMIHILLYYKASTNIQDTEGNTPLHLACDEERVEEAKLLVSQGASIYIENKEEKTPLQVAKGGLGLILKRMVEG

SEQ ID NO: 1825 - protein, 215 aa, Homo sapiens
MPDKTATPERPPAPENAPSSKKIPAPDKVPSPEKTLTLGDKASVPGNSTSGKIPAPDKVPTPEKMVTPEDKASIPENSIIPEETLTVDKPSTPERVFSVEESPALEAPPMDKVPNPKMAPLGDEAPTLEKVLTPELSEEEVSTRDDIQFHHFSSEEALQKVKYFVAKEDPSSQEEAHTPEAPPPQATNSNNREAGALPACGPRAKPWTGSFTYSA

SEQ ID NO: 1826 - protein, 191 aa, Homo sapiens
MGAYKYIQELWRKKQSDVMRFLLRVRCWQYRQLSALHRAPRPTRPDKARRLGYKAKQGYVIYRIRVRRGGRKRPVPKGATYGKPVHHGVNQLKFARSLQSVAEERAGRHCGALRVLNSYWVGEDSTYKFFEVILIDPFHKAIRRNPDTQWITKPVHKHREMRGLTSAGRKSHGLGKDRMFHHAIGGSCRAA

SEQ ID NO: 1827 - protein, 587 aa, Homo sapiens
MDSRVSGTTSNGETKPVYPVMEKKEEDGTLERGHWNNKMEFVLSVAGEIIGLGNVWRFPYLCYKNGGGAFFIPYLVFLFTCGIPVFLLETALGQYTSQGGVTAWRKICPIFEGIGYASQMIVILLNVYYIIVLAWALFYLFSSFTIDLPWGGCYHEWNTEHCMEFQKTNGSLNGTSENATSPVIEFWERRVLKISDGIQHLGALRWELALCLLLAWVICYFCIWKGVKSTGKVVYFTATFPYLMLVVLLIRGVTLPGAAQGIQFYLYPNLTRLWDPQVWMDAGTQIFFSFAICLGCLTALGSYNKYHNNCYSGTSFVAGFAIFSILGFMSQEQGVPISEVAESGPGLAFIAYPRAVVMLPFSPLWACCFFFMVVLLGLDSQFVCVESLVTALVDMYPHVFRKKNRREVLILGVSVVSFPVGLIMLTEGGMYVFQLFDYYAASGMCLLFVAIFESLCVAWVYGAKRFYDNIEDMIGYRPWPLIKYCWLFLTPAVCTATFLFSLIKYTPLTYNKKYTYPWWGDALGWLLALSSWSAFLPGASTDSEPSRAPSERESVSSCAQPRTCPSGTQQDPRLPPPPGPHCSDSQS

SEQ ID NO: 1828 - protein, 184 aa, Homo sapiens
MAPLLPIRTLPLILILLALLSPGAADFNISSLSGLLSPALTESLLVALPPCHLTGGNATLMVRRANDSKVVTSSFVVPPCRGRRELVSVVDSGAGFTVTRLSAYQVTNLVPGTKFYISYLVKKGTATESSREIPMSTLPRRNMESIGLGMARTGGMVVITVLLSVAMFLLVLGFIIALALGSRK

SEQ ID NO: 1829 - protein, 525 aa, Homo sapiens
MAAVVLAATRLLRGSGSWGCSRLRFGPPAYRRFSSGGAYPNIPLSSPLPGVPKPVFATVDGQEKFETKVTTLDNGLRVASQNKFGQFCTVGILINSGSRYEAKYLSGIAHFLEKLAFSSTARFDSKDEILLTLEKHGGICDCQTSRDTTMYAVSADSKGLDTVVALLADVVLQPRLTDEEVEMTRMAVQFELEDLNLRPDPEPLLTEMIHEAAYRENTVGLHRFCPTENVAKINREVLHSYLRNYYTPDRMVLAGVGVEHEHLVDCARKYLLGVQPAWGSAEAVDIDRSVAQYTGGIAKLERDMSNVSLGPTPIPELTHIMVGLESCSFLEEDFIPFAVLNMMMGGGGSFSAGGPGKGMFSRLYLNVLNRHHWMYNATSYHHSYEDTGLLCIHASADPRQVREMVEIITKEFILMGGTVDTVELERAKTQLTSMLMMNLESRPVIFEDVGRQVLATRSRKLPHELCTLIRNVKPEDVKRVASKMLRGKPAVAALGDLTDLPTYEHIQTALSSKDGRLPRTYRLFR

SEQ ID NO: 1830 - protein, 1359 aa, Homo sapiens
MAEAGLRGWLLWALLLRLAQSEPYTTIHQPGYCAFYDECGKNPELSGSLMTLSNVSCLSNTPARKITGDHLILLQKICPRLYTGPNTQACCSAKQLVSLEASLSITKALLTRCPACSDNFVNLHCHNTCSPNQSLFINVTRVAQLGAGQLPAVVAYEAFYQHSFAEQSYDSCSRVRVPAAATLAVGTMCGVYGSALCNAQRWLNFQGDTGNGLAPLDITFHLLEPGQAVGSGIQPLNEGVARCNESQGDDVATCSCQDCAASCPAIARPQALDSTFYLGQMPGSLVLIIILCSVFAVVTILLVGFRVAPARDKSKMVDPKKGTSLSDKLSFSTHTLLGQFFQGWGTWVASWPLTILVLSVIPVVALAAGLVFTELTTDPVELWSAPNSQARSEKAFHDQHFGPFFRTNQVILTAPNRSSYRYDSLLLGPKNFSGILDLDLLLELLELQERLRHLQVWSPEAQRNISLQDICYAPLNPDNTSLYDCCINSLLQYFQNNRTLLLLTANQTLMGQTSQVDWKDHFLYCANAPLTFKDGTALALSCMADYGAPVFPFLAIGGYKGKDYSEAEALIMTFSLNNYPAGDPRLAQAKLWEEAFLEEMRAFQRRMAGMFQVTFMAERSLEDEINRTTAEDLPIFATSYIVIFLYISLALGSYSSWSRVMVDSKATLGLGGVAVVLGAVMAAMGFFSYLGIRSSLVILQVVPFLVLSVGADNIFIFVLEYQRLPRRPGEPREVHIGRALGRVAPSMLLCSLSEAICFFLGALTPMPAVRTFALTSGLAVILDFLLQMSAFVALLSLDSKRQEASRLDVCCCVKPQELPPPGQGEGLLLGFFQKAYAPFLLHWITRGVVLLLFLALFGVSLYSMCHISVGLDQELALPKDSYLLDYFLFLNRYFEVGAPVYFVTTLGYNFSSEAGMNAICSSAGCNNFSFTQKIQYATEFPEQSYLAIPASSWVDDFIDWLTPSSCCRLYISGPNKDKFCPSTVNSLNCLKNCMSITMGSVRPSVEQFHKYLPWFLNDRPNIKCPKGGLAAYSTSVNLTSDGQVLDTVAILSPRLEYSGTISAHCNLYLLDSASRFMAYHKPLKNSQDYTEALRAARELAANITADLRKVPGTDPAFEVFPYTITNVFYEQYLTILPEGLFMLSLCLVPTFAVSCLLLGLDLRSGLLNLLSIVMILVDTVGFMALWGISYNAVSLINLVSAVGMSVEFVSHITRSFAISTKPTWLERAKEATISMGSAVFAGVAMTNLPGILVLGLAKAQLIQIFFFRLNLLITLLGLLHGLVFLPVILSYVGPDVNPALALEQKRAEEAVAAVMVASCPNHPSRVSTADNIYVNHSFEGSIKGAGAISNFLPNNGRQF

SEQ ID NO: 1831 - protein, 1332 aa, Homo sapiens
MAEAGLRGWLLWALLLRLAQSEPYTTIHQPGYCAFYDECGKNPELSGSLMTLSNVSCLSNTPARKITGDHLILLQKICPRLYTGPNTQACCSAKQLVSLEASLSITKALLTRCPACSDNFVNLHCHNTCSPNQSLFINVTRVAQLGAGQLPAVVAYEAFYQHSFAEQSYDSCSRVRVPAAATLAVGTMCGVYGSALCNAQRWLNFQGDTGNGLAPLDITFHLLEPGQAVGSGIQPLNEGVARCNESQGDDVATCSCQDCAASCPAIARPQALDSTFYLGQMPGSLVLIIILCSVFAVVTILLVGFRVAPARDKSKMVDPKKGTSLSDKLSFSTHTLLGQFFQGWGTWVASWPLTILVLSVIPVVALAAGLVFTELTTDPVELWSAPNSQARSEKAFHDQHFGPFFRTNQVILTAPNRSSYRYDSLLLGPKNFSGILDLDLLLELLELQERLRHLQVWSPEAQRNISLQDICYAPLNPDNTSLYDCCINSLLQYFQNNRTLLLLTANQTLMGQTSQVDWKDHFLYCANAPLTFKDGTALALSCMADYGAPVFPFLAIGGYKGKDYSEAEALIMTFSLNNYPAGDPRLAQAKLWEEAFLEEMRAFQRRMAGMFQVTFMAERSLEDEINRTTAEDLPIFATSYIVIFLYISLALGSYSSWSRVMVDSKATLGLGGVAVVLGAVMAAMGFFSYLGIRSSLVILQVVPFLVLSVGADNIFIFVLEYQRLPRRPGEPREVHIGRALGRVAPSMLLCSLSEAICFFLGALTPMPAVRTFALTSGLAVILDFLLQMSAFVALLSLDSKRQEASRLDVCCCVKPQELPPPGQGEGLLLGFFQKAYAPFLLHWITRGVVLLLFLALFGVSLYSMCHISVGLDQELALPKDSYLLDYFLFLNRYFEVGAPVYFVTTLGYNFSSEAGMNAICSSAGCNNFSFTQKIQYATEFPEQSYLAIPASSWVDDFIDWLTPSSCCRLYISGPNKDKFCPSTVNSLNCLKNCMSITMGSVRPSVEQFHKYLPWFLNDRPNIKCPKGGLAAYSTSVNLTSDGQVLASRFMAYHKPLKNSQDYTEALRAARELAANITADLRKVPGTDPAFEVFPYTITNVFYEQYLTILPEGLFMLSLCLVPTFAVSCLLLGLDLRSGLLNLLSIVMILVDTVGFMALWGISYNAVSLINLVSAVGMSVEFVSHITRSFAISTKPTWLERAKEATISMGSAVFAGVAMTNLPGILVLGLAKAQLIQIFFFRLNLLITLLGLLHGLVFLPVILSYVGPDVNPALALEQKRAEEAVAAVMVASCPNHPSRVSTADNIYVNHSFEGSIKGAGAISNFLPNNGRQF

SEQ ID NO: 1832 - protein, 225 aa, Homo sapiens
MGFGDLKSPAGLQVLNDYLADKSYIEGYVPSQADVAVFEAVSSPPPADLCHALRWYNHIKSYEKEKASLPGVKKALGKYGPADVEDTTGSGATDSKDDDDIDLFGSDDEEESEEAKRLREERLAQYESKKAKKPALVAKSSILLDVKPWDDETDMAKLEECVRSIQADGLVWGSSKLVPVGYGIKKLQIQCVVEDDKVGTDMLEEQITAFEDYVQSMDVAAFNKI

SEQ ID NO: 1833 - protein, 652 aa, Homo sapiens
MINMCFQELVTFRDVAIEFSPEEWKCLDPAQQNLYRDVMLENYRNLVSLGFVISNPDLVTCLEQIKEPCNLKIHETAAKPPAICSPFSQDLSPVQGIEDSFHKLILKRYEKCGHENLQLRKGCKRVNECKVQKGVNNGVYQCLSTTQSKIFQCNTCVKVFSKFSNSNKHKIRHTGEKPFKCTECGRSFYMSHLTQHTGIHAGEKPYNVKNVAKLYRVHNPLNEHKRIHTGEKPYTCEECGKALDVLNEHKKIHTGEKPYKCEECGKAFTRSTTLNEHKKIHTGEKPYKCKECGKAFRWSTSLNEHKNIHTGEKPYKCKECGKAFRQSRSLNEHKNIHTGEKPYTCEKCGKAFNQSSSLIIHRSIHSEQKLYKCEECGKAFTWSSSLNKHKRIHTGEKPYTCEECGKAFYRSSHLAKHKRIHTGEKPYTCEECGKAFNQSSTLILHKRIHSGQKPYKCEECGKAFTRSTTLNEHKKIHTGEKPYKCEECGKAFIWSASLNEHKNIHTGEKPYKCKECGKAFNQSSGLIIHRSIHSEQKLYKCEECGKAFTRSTALNEHKKIHSGEKPYKCKECGKAYNLSSTLTKHKRIHTGEKPFTCEECGKAFNWSSSLTKHKIIHTGEKSYKCEECGKGFNRPSTLTVHKRFILARNIVE

SEQ ID NO: 1834 - protein, 468 aa, Homo sapiens
MDLTKGCVTFEDIAIYFSQDEWGLLDEAQRLLYLEVMLENFALVASLGCGHGTEDEETPSDQNVSVGVSQSKAGSSTQKTQSCEMCVPVLKDILHLADLPGQKPYLVGECTNHHQHQKHHSAKKSLKRDMDRASYVKCCLFCMSLKPFRKWEVGKDLPAMLRLLRSLVFPGGKKPGTITECGEDIRSQKSHYKSGECGKASRHKHTPVYHPRVYTGKKLYECSKCGKAFRGKYSLVQHQRVHTGERPWECNECGKFFSQTSHLNDHRRIHTGERPYECSECGKLFRQNSSLVDHQKIHTGARPYECSQCGKSFSQKATLVKHQRVHTGERPYKCGECGNSFSQSAILNQHRRIHTGAKPYECGQCGKSFSQKATLIKHQRVHTGERPYKCGDCGKSFSQSSILIQHRRIHTGARPYECGQCGKSFSQKSGLIQHQVVHTGERPYECNKCGNSFSQCSSLIHHQKCHNT

SEQ ID NO: 1835 - protein, 121 aa, Homo sapiens
MKHGQKSPTGKQTSQHLKRLKKSGLGHLKWTKAEDIDIETPGSILVNTNLRALINKHTFASLPQHFQQYLLLLLPEVDRQMGSDGILRLSTSALNNEFFAYAAQGWKQRLAEGKFVFSIIM

SEQ ID NO: 1836 - protein, 625 aa, Homo sapiens
MPGTKRFQHVIETPEPGKWELSGYEAAVPITEKSNPLTQDLDKADAENIVRLLGQCDAEIFQEEGQALSTYQRLYSESILTTMVQVAGKVQEVLKEPDGGLVVLSGGGTSGRMAFLMSVSFNQLMKGLGQKPLYTYLIAGGDRSVVASREGTEDSALHGIEELKKVAAGKKRVIVIGISVGLSAPFVAGQMDCCMNNTAVFLPVLVGFNPVSMARNDPIEDWSSTFRQVAERMQKMQEKQKAFVLNPAIGPEGLSGSSRMKGGSATKILLETLLLAAHKTVDQGIAASQRCLLEILRTFERAHQVTYSQSPKIATLMKSVSTSLEKKGHVYLVGWQTLGIIAIMDGVECIHTFGADFRDVRGFLIGDHSDMFNQKAELTNQGPQFTFSQEDFLTSILPSLTEIDTVVFIFTLDDNLTEVQTIVEQVKEKTNHIQALAHSTVGQTLLIPLKKLFPSIISITWPLLFFEYEGNFIQKFQRELSTKWVLNTVSTGAHVLLGKILQNHMLDLRISNSKLFWRALAMLQRFSGQSKARCIESLLRAIHFPQPLSDDIRAAPISCRVQVAHEKEQVIPIALLSLLFRCSITEAQAHLAAAPSVCEAVRSALAGPGQKRTADPLEILEPDVQ

SEQ ID NO: 1837 - protein, 375 aa, Homo sapiens
MASDPHSLEEFCSDPHAVAGALKSYLRELPEPLMTFDLYDDWMRAASLKEPGARLQALQEVCSRLPPENLSNLRYLMKFLARLAEEQEVNKMTPSNIAIVLGPNLLWPPEKEGDQAQLDAASVSSIQVVGVVEALIQSADTLFPGDINFNVSGLFSAVTLQDTVSDRLASEELPSTAVPTPATTPAPAPAPAPAPAPALASAATKERTESEVPPRPASPKVTRSPPETAAPVEDMARRTKRPAPARPTMPPPQVSGSRSSPPAPPLPPGSGSPGTPQALPRRLVGSSLRAPTVPPPLPPTPPQPARRQSRRSPASPSPASPGPASPSPVSLSNPAQVDLGAATAEGGAPEAISGVPTPPAIPPQPRPRSLASETN

SEQ ID NO: 1838 - protein, 320 aa, Homo sapiens
MTSIPFPGDRLLQVDGVILCGLTHKQAVQCLKGPGQVARLVLERRVPRSTQQCPSANDSMGDERTAVSLVTALPGRPSSCVSVTDGPKFEVKLKKNANGLGFSFVQMEKESCSHLKSDLVRIKRLFPGQPAEENGAIAAGDIILAVNGRSTEGLIFQEVLHLLRGAPQEVTLLLCRPPPGALPEMEQEWQTPELSADKEFTRATCTDSCTSPILDQEDSWRDSASPDAGEGLGLRPESSQKAIREAQWGQNRERPWASSLTHSPESHPHLCKLHQERDESTLATSLEKDVRQNCYSVCDIMRLGRYSFSSPLTRLSTDIF

SEQ ID NO: 1839 - protein, 113 aa, Homo sapiens
MLSNEDVVRLVVGHLAEADWHKTDLAQRPANLGLMQSLLLQRKASGLHEADQNAATRLIRHAIGNNEYGEMEAERLAAMLTLPEDLARMYRDDITVTVVYFNSESIGAYYKGG

SEQ ID NO: 1840 - protein, 700 aa, Homo sapiens
MASTVEGGDTALLPEFPRGPLDAYRARASFSWKELALFTEGEGMLRFKKTIFSALENDPLFARSPGADLSLEKYRELNFLRCKRIFEYDFLSVEDMFKSPLKVPALIQCLGMYDSSLAAKYLLHSLVFGSAVYSSGSERHLTYIQKIFRMEIFGCFALTELSHGSNTKAIRTTAHYDPATEEFIIHSPDFEAAKFWVGNMGKTATHAVVFAKLCVPGDQCHGLHPFIVQIRDPKTLLPMPGVMVGDIGKKLGQNGLDNGFAMFHKVRVPRQSLLNRMGDVTPEGTYVSPFKDVRQRFGASLGSLSSGRVSIVSLAILNLKLAVAIALRFSATRRQFGPTEEEEIPVLEYPMQQWRLLPYLAAVYALDHFSKSLFLDLVELQRGLASGDRSARQAELGREIHALASASKPLASWTTQQGIQECREACGGHGYLAMNRLGVLRDDNDPNCTYEGDNNILLQQTSNYLLGLLAHQVHDGACFRSPLKSVDFLDAYPGILDQKFEVSSVADCLDSAVALAAYKWLVCYLLRETYQKLNQEKRSGSSDFEARNKCQVSHGRPLALAFVDLTVVQRFHEHVHQPSVPPSLRAVLGRLSALYALWSLSRHAALLYRGGYFSGEQAGEVLESAVLALCSQLKDDAVALVDVIAPPDFVLDSPIGRADGELYKNLWGAVLQESKVLERASWWPEFSVNKPVIGSLKSKL

SEQ ID NO: 1841 - protein, 233 aa, Homo sapiens
MERVGCTLTTTYAHPRPTPTNFLPAISTMASSYRDRFPHSNLTHSLSLPWRPSTYYKVASNSPSVAPYCTRSQRVSENTMLPFVSNRTTFFTRYTPDDWYRSNLTNYQESNTSRHNSEKLRVDTSRLIQDKYQQTRKTQADTTQNLGERVNDIGFWKSEIIHELDEMIGETNALTDVKKRLERALMETEAPLQVARECLFHREKRMGIDLVHDEVEAQLLTVNVGEMHQSQAA

SEQ ID NO: 1842 - protein, 191 aa, Homo sapiens
MGKTNSKLAPEVLEDLVQNTEFSEQELKQWYKGFLKDCPSGILNLEEFQQLYIKFFPYGDASKFAQHAFRTFDKNGDGTIDFREFICALSVTSRGSFEQKLNWAFEMYDLDGDGRITRLEMLEIIEAIYKMVGTVIMMRMNQDGLTPQQRVDKIFKKMDQDKDDQITLEEFKEAAKSDPSIVLLLQCDMQK

SEQ ID NO: 1843 - protein, 338 aa, Homo sapiens
MAKWGEGDPRWIVEERADATNVNNWHWTERDASNWSTDKLKTLFLAVQVQNEEGKCEVTEVSKLDGEASINNRKGKLIFFYEWSVKLNWTGTSKSGVQYKGHVEIPNLSDENSVDEVEISVSLAKDEPDTNLVALMKEEGVKLLREAMGIYISTLKTEFTQGMILPTMNGESVDPVGQPALKTEERKAKPAPSKTQARPVGVKIPTCKITLKETFLTSPEELYRVFTTQELVQAFTHAPATLEADRGGKFHMVDGNVSGEFTDLVPEKHIVMKWRFKSWPEGHFATITLTFIDKNGETELCMEGRGIPAPEEERTRQGWQRYYFEGIKQTFGYGARLF

SEQ ID NO: 1844 - protein, 310 aa, Homo sapiens
MSYLKQPPYAVNGLSLTTSGMDLLHPSVGYPGLPSEEAVPGHLLTKQRTGVGKTTPRKQRRERTTFTRAQLDVLEALFAKTRYPDIFMREEVALKINLPESRVQVWFKNRRAKCRQQQQQQQNGGQNKVRPAKKKTSPAREVSSESGTSGQFTPPSSTSVPTIASSSAPVSIWSPASISPLSDPLSTSSSCMQRSYPMTYTQASGYSQGYAGSTSYFGGMDCGSYLTPMHHQLPGPGATLSPMGTNAVTSHLNQSPASLSTQGYGASSLGFNSTTDCLDYKDQTASWKLNFNADCLDYKDQTSSWKFQVL

SEQ ID NO: 1845 - protein, 455 aa, Homo sapiens
MAQRDWTWVPSGAAAMGLGVSAEQPAGGAEGFHLHGVQENSPAQQAGLEPYFDFIITIGHSRLNKENDTLKALLKANVEKPVKLEVFNMKTMRVREVEVVPSNMWGGQGLLGASVRFCSFRRASEQVWHVLDVEPSSPAALAGLRPYTDYVVGSDQILQESEDFFTLIESHEGKPLKLMVYNSKSDSCREVTVTPNAAWGGEGSLGCGIGYGYLHRIPTQPPSYHKKPPGTPPPSALPLGAPPPDALPPGPTPEDSPSLETGSRQSDYMEALLQAPGSSMEDPLPGPGSPSHSAPDPDGLPHFMETPLQPPPPVQRVMDPGFLDVSGISLLDNSNASVWPSLPSSTELTTTAVSTSGPEDICSSSSSHERGGEATWSGSEFEVSFLDSPGAQAQADHLPQLTLPDSLTSAASPEDGLSAELLEAQAEEEPASTEGLDTGTEAEGLDSQAQISTTE

SEQ ID NO: 1846 - protein, 249 aa, Homo sapiens
MAERGELDLTGAKQNTGVWLVKVPKYLSQQWAKASGRGEVGKLRIAKTQGRTEVSFTLNEDLANIHDIGGKPASVSAPREHPFVLQSVGGQTLTVFTESSSDKLSLEGIVVQRAECRPAASENYMRLKRLQIEESSKPVRLSQQLDKVVTTNYKPVANHQYNIEYERKKKEDGKRARADKQHVLDMLFSAFEKHQYYNLKDLVDITKQPVVYLKEILKEIGVQNVKGIHKNTWELKPEYRHYQGEEKSD

SEQ ID NO: 1847 - protein, 54 aa, Homo sapiens
MLNHIIRLQAVLEIIMNERANALDLLAQQTTKMRNANYQNRLALDYLLAHEGGV

SEQ ID NO: 1848 - protein, 376 aa, Homo sapiens [sequence omitted]

SEQ ID NO: 1849 - protein, 311 aa, Homo sapiens
MSNFTHYAYLLMIESLMLGKVPPHVPSHHFIFHDDGSARQKGESDYKVIIQQWFSKSGPWTTSSNVTWGLLELQQSISESAVLTIPPGDSGAGSNLITMFLRNRKETDLCSGRSKVNRGWNSGRCKQRGKTEQPGEPLEHVYVTIKHAVALESRHQKGELQCLIKMCIPLSKPLQMFFSPPHWEAWLQRVQQLAKNTRYFRQRLQEMGFIIYGNENASVVPLLLYMPGKVAAFARHMLEKKIGVVVVGFPATPLAEARARFCVSAAHTREMLDTVLEALDEMGDLLQLKYSRHKKSARPELYDETSFELED

SEQ ID NO: 1850 - protein, 95 aa, Homo sapiens
MVVIDVKMLSGFTPTMSSIEELENKGQVMKTEVKNDHVLFYLENGFGRADSFPFSVEQSNLVFNIQPAPAMVYDYYEKEEYALAFYNIDSSSVSE

SEQ ID NO: 1851 - protein, 736 aa, Homo sapiens
MATEGMILTNHDHQIRVGVLTVSDSCFRNLAEDRSGINLKDLVQDPSLLGGTISAYKIVPDEIEEIKETLIDWCDEKELNLILTTGGTGFAPRDVTPEATKEVIEREAPGMALAMLMGSLNVTPLGMLSRPVCGIRGKTLIINLPGSKKGSQECFQFILPALPHAIDLLRDAIVKVKEVHDELEDLPSPPPPLSPPPTTSPHKQTEDKGVQCEEEEEEKKDSGVASTEDSSSSHITAAAIAAKIPDSIISRGVQVLPRDTASLSTTPSESPRAQATSRLSTASCPTPKVQSRCSSKENILRASHSAVDITKVARRHRMSPFPLTSMDKAFITVLEMTPVLGTEIINYRDGMGRVLAQDVYAKDNLPPFPASVKDGYAVRAADGPGDRFIIGESQAGEQPTQTVMPGQVMRVTTGAPIPCGADAVVQVEDTELIRESDDGTEELEVRILVQARPGQDIRPIGHDIKRGECVLAKGTHMGPSEIGLLATVGVTEVEVNKFPVVAVMSTGNELLNPEDDLLPGKIRDSNRSTLLATIQEHGYPTINLGIVGDNPDDLLNALNEGISRADVIITSGGVSMGEKDYLKQVLDIDLHAQIHFGRVFMKPGLPTTFATLDIDGVRKIIFALPGNPVSAVVTCNLFVVPALRKMQGILDPRPTIIKARLSCDVKLDPRPEYHRCILTWHHQEPLPWAQSTGNQMSSRLMSMRSANGLLMLPPKTEQYVELHKGEVVDVMVIGRL

SEQ ID NO: 1852 - protein, 650 aa, Homo sapiens
MAGREALSLGTEAELPNSLPGDDQDECLLLPGELCQHLCINTVGSYHCACFPGFSLQDDGRTCRPEGHPPQPEAPQEPALKSEFSQVASNTIPLPLPQPNTCKDNGPCKQVCSTVGGSAICSCFPGYAIMADGVSCEDQDECLMGAHDCSRRQFCVNTLGSFYCVNHTVLCADGYILNAHRKCVDINECVTDLHTCSRGEHCVNTLGSFHCYKALTCEPGYALKDGECEDVDECAMGTHTCQPGFLCQNTKGSFYCQARQRCMDGFLQDPEGNCVDINECTSLSEPCRPGFSCINTVGSYTCQRNPLICARGYHASDDGTKCVDVNECETGVHRCGEGQVCHNLPGSYRCDCKAGFQRDAFGRGCIDVNECWASPGRLCQHTCENTLGSYRCSCASGFLLAADGKRCEDVNECEAQRCSQECANIYGSYQCYCRQGYQLAEDGHTCTDIDECAQGAGILCTFRCLNVPGSYQCACPEQGYTMTANGRSCKDVDECALGTHNCSEAETCHNIQGSFRCLRFECPPNYVQVSKTKCERTTCHDFLECQNSPARITHYQLNFQTGLLVPAHIFRIGPAPAFTGDTIALNIIKGNEEGYFGTRRLNAYTGVVYLQRAVLEPRDFALDVEMKLWRQGSVTTFLAKMHIFFTTFAL

SEQ ID NO: 1853 - protein, 603 aa, Homo sapiens [sequence omitted]

SEQ ID NO: 1854 - protein, 73 aa, Homo sapiens
MEERPLDAVVPFLPLQRHHVRHCVLNELAQLGLEPRDEVVQAVLDSTTFFPEDEQLFSSNGCKTVASRIAFFL

SEQ ID NO: 1855 - protein, 1216 aa, Homo sapiens
MPGAQPGVHALQLKPVCVSDSLKKGTKFVKWDDDSTSVTPIIVRTDPQGFFFYWTDQNKETELLDLSLVKDARCGRHAKAPKDPKLRELLDVGNIGRLEQRMITVVYGPDLVNISHLNLVAFQEEVAKEWTNEVFSLATNLLAQNMSRDAFLEKAYTKLKLQVTPEGRIPLKNIYRLFSADRKRVETALEACSLPSSRNDSIPQEDFTPEVYRVFLNNLCPRPEIDNIFSEFGAKSKPYLTVDQMMDFINLKQRDPRLNEILYPPLKQEQVQVLIEKYEPNNSLARKGQISVDGFMRYLSGEENGVVSPEKLDLNEDMSQPLSHYFINSSHNTYLTAGQLAGNSSVEMYRQVLLSGCRCVELDCWKGRTAEEEPVITHGFTMTTEISFKEVIEAIAECAFKTSPFPILLSFENHVDSPKQQAKMAEYCRLIFGDALLMEPLEKYPLESGVPLPSPMDLMYKILVKNKKKSHKSSEGSGKKKLSEQASNTYSDSSSMFEPSSPGAGEADTESDDDDDDDDCKKSSMDEGTAGSEAMATEEMSNLVNYIQPVKFESFEISKKRNKSFEMSSFVETKGLEQLTKSPVEFVEYNKMQLSRIYPKGTRVDSSNYMPQLFWNAGCQMVALNFQTMDLAMQINMGMYEYNGKSGYRLKPEFMRRPDKHFDPFTEGIVDGIVANTLSVKIISGQFLSDKKVGTYVEVDMFGLPVDTRRKAFKTKTSQGNAVNPVWEEEPIVFKKVVLPTLACLRIAVYEEGGKFIGHRILPVQAIRPGYHYICLRNERNQPLTLPAVFVYIEVKDYVPDTYADVIEALSNPIRYVNLMEQRAKQLAALTLEDEEEVKKEADPGETPSEAPSEARTTPAENGVNHTTTLTPKPPSQALHSQPAPGSVKAPAKTEDLIQSVLTEVEAQTIEELKQQKSFVKLQKKHYKEMKDLVKRHHKKTTDLIKEHTTKYNEIQNDYLRRRAALEKSAKKDSKKKSEPSSPDHGSSTIEQDLAALDAEMTQKLIDLKDKQQQQLLNLRQEQYYSEKYQKREHIKLLIQKLTDVAEECQNNQLKKLKEICEKEKKELKKKMDKKRQEKITEAKSKDKSQMEEEKTEMIRSYIQEVVQYIKRLEEAQSKRQEKLVEKHKEIRQQILDEKPKLQVELEQEYQDKFKRLPLEILEFVQEAMKGKISEDSNHGSAPLSLSSDPGKVNHKTPSSEELGGDIPGKEFDTPL

SEQ ID NO: 1856 - protein, 183 aa, Homo sapiens
MKFDFYSFFDGTAKRRRFSSKPVVLTEAQKQLMICHLPQVLRLHLKRFRWSGRNNREKIGVHVGFEEILNMEPYCCRETLKSLRPECFIYDLSAVVMHHGKGFGSGHYTAYCYNSEGGFWVHCNDSKLSMCTMDEVCKAQAYILFYTQRVTENGHSKLLPPELLLGSQHPNEDADTSSNEILS

SEQ ID NO: 1857 - protein, 135 aa, Homo sapiens
MPPPQKIPSVRPFKQRKSLAIRQEEVAGIRAKFPNKIPVVVERYPRETFLPPLDKTKFLVPQELTMTQFLSIIRSRMVLRATEAFYLLVNNKSLVSMSATMAEIYRDCIQPYNRILNKKWLACVMVLCNELEIIF

SEQ ID NO: 1858 - protein, 424 aa, Homo sapiens
MCWKQMDNSKKKFERECREAEKAQQSYERLDNDTNATKADVEKAKQQLNLRTHMADENKNEYAAQLQNFNGEQHKHFYVVIPQIYKQLQEMDERRTIKLSECYRGFADSERKVIPIISKCLEGMILAAKSVDERRDSQMVVDSFKSGFEPPGDFPFEDYSQHIYRTISDGTISASKQESGKMDAKTTVGKAKGKLWLFGKKPKGPALEDFSHLPPEQRRKKLQQRIDELNRELQKESDQKDALNKMKDVYEKNPQMGDPGSLQPKLAETMNNIDRLRMEIHKNEAWLSEVEGKTGGRGDRRHSSDINHLVTQGRESPEGSYTDDANQEVRGPPQQHGHHNEFDDEFEDDDPLPAIGHCKAIYPFDGHNEGTLAMKEGEVLYIIEEDKGDGWTRARRQNGEEGYVPTSYIDVTLEKNSKGAVTYI

SEQ ID NO: 1859 - protein, 118 aa, Homo sapiens
MLEQIRNPSPCFKEVIHKHFYLKRVEIMAQCEEWIADIQQYSSDKRVGRTMSHHAAALKRHTAQLREELLKLPCPEGLDPDTDDAPEVCRATTGAEETLMHDQVKPSSSKELPSDFQL

SEQ ID NO: 1860 - protein, 724 aa, Homo sapiens
MEEEGLECPNSSSEKRYFPESLDSSDGDEEEVLACEDLELNPFDGLPYSSRYYKLLKEREDLPIWKEKYSFMENLLQNQIVIVSGDAKCGKSAQVPQWCAEYCLSIHYQHGGVICTQVHKQTMVQLALRVADEMDVNIGHEVGYVIPFENCCTNETILRYCTDDMLQREMMSNPFLGSYGVIILDDIHERSIATDVLLGLLKDVLLARPELKLIINSSPHLISKLNSYYGNVPVIEVKNKHPVEVVYLSEAQKDSFESILRLIFEIHHSGEKGDIVVFLACEQDIEKVCETVYQGSNLNPDLGELVVVPLYPKEKCSLFKPLDETEKRCQVYQRRVVLTTSSGEFLIWSNSVRFVIDVGVERRKVYNPRIRANSLVMQPISQSQAEIRKQILGSSSSGKFFCLYTEEFASKDMTPLKPAEMQEANLTSMVLFMKRIDIAGLGHCDFMNRPAPESLMQALEDLDYLAALDNDGNLSEFGIIMSEFPLDPQLSKSILASCEFDCVDEVLTIAAMVTAPNCFSHVPHGAEEAALTCWKTFLHPEGDHFTLISIYKAYQDTTLNSSSEYCVEKWCRDYFLNCSALRMADVIRAELLEIIKRIELPYAEPAFGSKENTLNIKKALLSGYFMQIARDVDGSGNYLMLTHKQVAQLHPLSGYSITKKMPEWVLFHKFSISENNYIRITSEISPELFMQLVPQYYFSNLPPSESKDILQQVVGSPIPCVNNE

SEQ ID NO: 1861 - protein, 1697 aa, Homo sapiens
MMAQFPTAMNGGPNMWAITSEERTKHDRQFDNLKPSGGYITGDQARNFFLQSGLPAPVLAEIWALSDLNKDGKMDQQEFSIAMKLIKLKLQGQQLPVVLPPIMKQPPMFSPLISARFGMGSMPNLSIPQPLPPAAPITSLSSATSGTNLPPLMMPTPLVPSVSTSSLPNGTASLIQPLPIPYSSSTLPHGSSYSLMMGGFGGASIQKAQSLIDLGSSSSTSSTASLSGNSPKTGTSEWAVPQPTRLKYRQKFNTLDKSMSGYLSGFQARNALLQSNLSQTQLATIWTLADVDGDGQLKAEEFILAMHLTDMAKAGQPLPLTLPPELVPPSFRGGKQIDSINGTLPSYQKMQEEEPQKKLPVTFEDKRKANYERGNMELEKRRQALMEQQQREAERKAQKEKEEWERKQRELQEQEWKKQLELEKRLEKQRELERQREEERRKDIERREAAKQELERQRRLEWERIRRQELLNQKNREQEEIVRLNSKKKNLHLELEALNGKHQQISGRLQDVRLKKQTQKTELEVLDKQCDLEIMEIKQLQQELQEYQNKLIYLVPEKQLLNERIKNMQFSNTPDSGVSLLHKKSLEKEELCQRLKEQLDALEKETASKLSEMDSFNNQLKCGNMDDSVLQCLLSLLSCLNNLFLLLKELRETYNTQQLALEQLYKIKRDKLKEIERKRLELMQKKKLEDEAARKAKQGKENLWKENLRKEEEEKQKRLQEEKTQEKIQEEERKAEEKQRKDKDTLKAEEKKRETASVLVNYRALYPFEARNHDEMSFNSGDIIQVDEKTVGEPGWLYGSFQGNFGWFPCNYVEKMPSSENEKAVSPKKALLPPTVSLSATSTSSEPLSSNQPASVTDYQNVSFSNLTVNTSWQKKSAFTRTVSPGSVSPIHGQGQVVENLKAQALCSWTAKKDNHLNFSKHDIITVLEQQENWWFGEVHGGRGWFPKSYVKIIPGSEVKREEPEALYAAVNKKPTSAAYSVGEEYIALYPYSSVEPGDLTFTEGEEILVTQKDGEWWTGSIGDRSGIFPSNYVKPKDQESFGSASKSGASNKKPEIAQVTSAYVASGSEQLSLAPGQLILILKKNTSGWWQGELQARGKKRQKGWFPASHVKLLGPSSERATPAFHPVCQVIAMYDYAANNEDELSFSKGQLINVMNKDDPDWWQGEINGVTGLFPSNYVKMTTDSDPSQQWCADLQTLDTMQPIERKRQGYIHELIQTEERYMADLQLVVEVFQKRMAESGFLTEGEMALIFVNWKELIMSNTKLLKALRVRKKTGGEKMPVQMIGDILAAELSHMQAYIRFCSCQLNGAALLQQKTDEDTDFKEFLKKLASDPRCKGMPLSSFLLKPMQRITRYPLLIRSILENTPESHADHSSLKLALERAEELCSQVNEGVREKENSDRLEWIQAHVQCEGLAEQLIFNSLTNCLGPRKLLHSGKLYKTKSNKELHGFLFNDFLLLTYMVKQFAVSSGSEKLFSSKSNAQFKMYKTPIFLNEVLVKLPTDPSSDEPVFHISHIDRVYTLRTDNINERTTWVQKIKAASEQYIDTEKKKREKAYQARSQKTSGIGRLMVHVIEATELKACKPNGKSNPYCEISMGSQSYTTRTIQDTLNPKWNFNCQFFIKDLYQDVLCLTLFDRDQFSPDDFLGRTEIPVAKIRTEQESKGPMTRRLLLHEVPTGEVWVRFDLQLFEQKTLL

SEQ ID NO: 1862 - protein, 445 aa, Homo sapiens
MMEESGIETTPPGTPPPNPAGLAATAMSSTPVPLAATSSFSSPNVSSMESFPPLAYSTPQPPLPPVRPSAPLPFVPPPAVPSVPPLVTSMPPPVSPSTAAAFGNPPVSHFPPSTSAPNTLLPAPPSGPPISGFSVGSTYDITRGHAGRAPQTPLMPSFSAPSGTGLLPTPITQQASLTSLAQGTGTTSAITFPEEQEDPRITRGQDEASAGGIWGFIKGVAGNPMVKSVLDKTKHSVESMITTLDPGMAPYIKSGGELDIVVTSNKEVKVAAVRDAFQEVFGLAVVVGEAGQSNIAPQPVGYAAGLKGAQERIDSLRRTGVIHEKQTAVSVENFIAELLPDKWFDIGCLVVEDPVHGIHLETFTQATPVPLEFVQQAQSLTPQDYNLRWSGLLVTVGEVLEKSLLNVSRTDWHMAFTGMSRRQMIYSAARAIAGMYKQRLPPRTV

SEQ ID NO: 1863 - protein, 351 aa, Homo sapiens
MALPFQKELEKYKNIDEDELLGKLSEEELKQLENVLDDLDPESAMLPAGFRQKDQTQKAATGPFDREHLLMYLEKEALEQKDREDFVPFTGEKKGRVFIPKEKPIETRKEEKVTLDPELEEALASASDTELYDLAAVLGVHNLLNNPKFDEETANNKGGKGPVRNVVKGEKVKPVFEEPPNPTNVEISLQQMKANDPSLQEVNLNNIKNIPIPTLREFAKALETNTHVKKFSLAATRSNDPVAIAFADMLKVNKTLTSLNIESNFITGTGILALVEALKENDTLTEIKIDNQRQQLGTAVEMEIAQMLEENSRILKFGYQFTKQGPRTRVAAAITKNNDLVRKKRVEADRR

SEQ ID NO: 1864 - protein, 204 aa, Homo sapiens
MDVAESPERDPHSPEDEEQPQGLSDDDILRDSGSDQDLDGAGVRASDLEDEESAARGPSQEEEDNHSDEEDRASEPKSQDQDSEVNELSRGPTSSPCEEEGDEGEEDRTSDLRDEASSVTRELDEHELDYDEEVPEEPAPAVQEDEAEKAGAEDDEEKGEGTPREEGKAGVQSVGEKESLEAAKEKKKEDDDGEIEFSSSRRPL

SEQ ID NO: 1865 - protein, 509 aa, Homo sapiens
MNENKDTDSKKSEEYEDDFEKDLEWLINENEKSDASIIEMACEKEENINQDLKENETVMEHTKRHSDPDKSLQDEVSPRRNDIISVPGIQPLDPISDSDSENSFQESKLESQKDLEEEEDEEVRRYIMEKIVQANKLLQNQEPVNDKRERKLKFKDQLVDLEVPPLEDTTTFKNYFENERNMFGKLSQLCISNDFGQEDVLLSLTNGSCEENKDRTILVERDGKFELLNLQDIASQGFLPPINNANSTENDPQQLLPRSSNSSVSGTKKEDSTAKIHAVTHSSTGEPLAYIAQPPLNRKTCPSSAVNSDRSKGNGKSNHRTQSAHISPVTSTYCLSPRQKELQKQLEEKREKLKREEERRKIEEEKEKKRENDIVFKAWLQKKREQVLEMRRIQRAKEIEDMNSRQENRDPQQAFRLWLKKKHEEQMKERQTEELRKQEECLFFLKGTEGRERAFKQWLRRKRMEKMAEQQAVRERTRQLRLEAKRSKQLQHHLYMSEAKPFRFTDHYN

SEQ ID NO: 1866 - protein, 79 aa, Homo sapiens
MSKDLVTFGDVAVNFSQEEWEWLNPAQRNLYRKVMLENYRSLVSLGVSVSKPDVISLLEQGKEPWMVKKEGTRGPCPGE

SEQ ID NO: 1867 - protein, 70 aa, Homo sapiens
MAVASDFYLRYYVGHKGKFGHEFLEFEFRPDGEKRPTARGAGKGERDREAGWCGGYRRRRPLLPSKEIGA

SEQ ID NO: 1868 - protein, 209 aa, Homo sapiens
MQPLTKDAGMSLSSVTLASALQVRGEALSEEEIWSLLFLAAEQLLEDLRNDSSDYVVCPWSALLSAAGSLSFQGRVSHIEAAPFKAPELLQGQSEDEQPDASQMHVYSLGMTLYWSAGFHVPPHQPLQLCEPLHSILLTMCEDQPHRRCTLQSVLEACRVHEKEVSVYPAPAGLHIRRLVGLVLGTISEVSREPCFSSSSCWSCVAIKI

SEQ ID NO: 1869 - protein, 438 aa, Homo sapiens
MSLVDLGKRLLEAARKGQDDEVRTLMANGAPFTTDWFSKLRVSCGYIGDNCKNGADVNAKDMLKMTALHWATERHHRDVVELLIKYGADVHAFSKFDKSAFDIALEKNNAEILVILQEAMQNQVNVNPERANPVTDPVSMAAPFIFTSGEVVNLASLISSTNTKTTSGDPHASTVQFSNSTTSVLATLAALAEASVPLSNSHRATANTEEIIEGNSVDSSIQQVMGSGGQRVITIVTDGVPLGNIQTSIPTGGIGQPFIVTVQDGQQVLTVPAGKGAEETVIKEEEEEKLPLTKKPRIGEKTNSVEESKEGNERELLQQQLQEANRRAQEYRHQLLKKEQEAEQYRLKLEAIARQQPNGVDFTMVEEVAEVDAVVVTEGELEERETKVTGSAGATEPHTRGFHGNCFILICKGHNLHCVHINPLLKKEIYRRQTLYKN

SEQ ID NO: 1870 - protein, 444 aa, Homo sapiens
MIEDNKENKDHSLERGRASLIFSLKNEVGGLIKALKIFQEKHVNLLHIESRKSKRRNSEFEIFVDCDINREQLNDIFHLLKSHTNVLSVNLPDNFTLKEDGMETVPWFPKKISDLDHCANRVLMYGSELDADHPGFKDNVYRKRRKYFADLAMNYKHGDPIPKVEFTEEEIKTWGTVFQELNKLYPTHACREYLKNLPLLSKYCGYREDNIPQLEDVSNFLKERTGFSIRPVAGYLSPRDFLSGLAFRVFHCTQYVRHSSDPFYTPEPDTCHELLGHVPLLAEPSFAQFSQEIGLASLGASEEAVQKLATCYFFTVEFGLCKQDGQLRVFGAGLLSSISELKHVLSGHAKVKPFDPKITCKQECLITTFQDVYFVSESFEDAKEKMREFTKTIKRPFGVKYNPYTRSIQILKDAKSITNAMNELRHDLDVVSDALGKVSRKPSI

SEQ ID NO: 1871 - protein, 858 aa, Homo sapiens
MVNFTVDQIRAIMDKKANIRNMSVIAHVDHGKSTLTDSLVCKAGIIASARAGETRFTDTRKDEQERCITIKSTAISLFYELSENDLNFIKQSKDGAGFLINLIDSPGHVDFSSEVTAALRVTDGALVVVDCVSGVCVQTETVLRQAIAERIKPVLMMNKMDRALLELQLEPEELYQTFQRIVENVNVIISTYGEGESGPMGNIMIDPVLGTVGFGSGLHGWAFTLKQFAEMYVAKFAAKGEGQLGPAERAKKVEDMMKKLWGDRYFDPANGKFSKSATSPEGKKLPRTFCQLILDPIFKVFDAIMNFKKEETAKLIEKLDIKLDSEDKDKEGKPLLKAVMRRWLPAGDALLQMITIHLPSPVTAQKYRCELLYEGPPDDEAAMGIKSCDPKGPLMMYISKMVPTSDKGRFYAFGRVFSGLVSTGLKVRIMGPNYTPGKKEDLYLKPIQRTILMMGRYVEPIEDVPCGNIVGLVGVDQFLVKTGTITTFEHAHNMRVMKFSVSPVVRVAVEAKNPADLPKLVEGLKRLAKSDPMVQCIIEESGEHIIAGAGELHLEICLKDLEEDHACIPIKKSDPVVSYRETVSEESNVLCLSKSPNKHNRLYMKARPFPDGLAEDIDKGEVSARQELKQRARYLAEKYEWDVAEARKIWCFGPDGTGPNILTDITKGVQYLNEIKDSVVAGFQWATKEGALCEENMRGVRFDVHDVTLHADAIHRGGGQIIPTARRCLYASVLTAQPRLMEPIYLVEIQCPEQVVGGIYGVLNRKRGHVFEESQVAGTPMFVVKAYLPVNESFGFTADLRSNTGGQAFPQCVFDHWQILPGDPFDNSSRPSQVVAETRKRKGLKEGIPALDNFLDKL

SEQ ID NO: 1872 - protein, 214 aa, Homo sapiens
MASKILLNVQEEVTCPICLELLTEPLSLDCGHSLCRACITVSNKEAVTSMGGKSSCPVCGISYSFEHLQANQHLANIVERLKEVKLSPDNGKKRDLCDHHGEKLLLFCKEDRKVICWLCERSQEHRGHHTVLTEEVFKECQEKLQAVLKRLKKEEEEAEKLEADIREEKTSWKYQVQTERQRIQTEFDQLRSILNNEEQRELQRLEKKKKKIFN

SEQ ID NO: 1873 - protein, 610 aa, Homo sapiens
MDSVAFEDVAVNFTQEEWALLGPSQKSLYRNVMQETIRNLDCIEMKWEDQNIGDQCQNAKRNLRSHTCEIKDDSQCGETFGQIPDSIVNKNTPRVNPCDSGECGEVVLGHSSLNCNIRVDTGHKSCEHQEYGEKPYTHKQRGKAISHQHSFQTHERPPTGKKPFDCKECAKTFSSLGNLRRHMAAHHGDGPYKCKLCGKAFVWPSLFHLHERTHTGEKPYECKQCSKAFPFYSSYLRHERIHTGEKAYECKQCSKAFPDYSTYLRHERTHTGEKPYKCTQCGKAFSCYYYTRLHERTHTGEQPYACKQCGKTFYHHTSFRRHMIRHTGDGPHKCKICGKGFDCPSSVRNHETTHTGEKPYECKQCGKVLSHSSSFRSHMITHTGDGPQKCKICGKAFGCPSLFQRHERTHTGEKPYQCKQCGKAFSLAGSLRRHEATHTGVKPYKCQCGKAFSDLSSFQNHETTHTGEKPYECKECGKAFSCFKYLSQHKRTHTVEKPYECKTCRKAFSHFSNLKVHERIHSGEKPYECKECGKAFSWLTCLLRHERIHTGEKPYECLQCGKAFTRSRFLRGHEKTHTGEKLYECKECGKALSSLRSLHRHKRTHWKDTL

SEQ ID NO: 1874 - protein, 195 aa, Homo sapiens
MPAFNRLFPLASLVLIYWVSVCFPVCVEVPSETEAVQGNPMKLRCISCMKREEVEATTVVEWFYRPEGGKDFLIYEYRNGHQEVESPFQGRLQWNGSKDLQDVSITVLNVTLNDSGLYTCNVSREFEFEAHRPFVKTTRLIPLRVTEEAGEDFTSVVSEIMMYILLVFLTLWLLIEMIYCYRKVSKAEEAAQENA

SEQ ID NO: 1875 - protein, 195 aa, Homo sapiens
MYITIYSMMKIPHQTQKKRSLEDPNSRPRRPFFKSVKEEVFWRNYFYRVSLIKQSAQLTALAAQQQAAGKEEKSNGREQDLPLAEAVRPKTPPVVIKSQLKTQEDEEEISTSPGVSEFVSDAFDACNLNQEDLRKEMEQLVLDKKQEETAVLEEDSADWEKELQQELQEYEVVTESEKRDENWDKEIEKMLQEEN

SEQ ID NO: 1876 - protein, 581 aa, Homo sapiens
MPAPRAREQPRVPGERQPLLPRGARGPRRWRRAAGAAVLLVEMLERAAFFGVTANLVLYLNSTNFNWTGEQATRAALVFLGASYLLAPVGGWLADVYLGRYRAVALSLLLYLAASGLLPATAFPDGRSSFCGEMPASPLGPACPSAGCPRSSPSPYCAPVLYAGLLLLGLAASSVRSNLTSFGADQVMDLGRDATRRFFNWFYWSINLGAVLSLLVVAFIQQNISFLLGYSIPVGCVGLAFFIFLFATPVFITKPPMGSQVSSMLKLALQNCCPQLWQRHSARDRQCARVLADERSPQPGASPQEDIANFQVLVKILPVMVTLVPYWMVYFQMQSTYVLQGLHLHIPNIFPANPANISVALRAQGSSYTIPEAWLLLANVVVVLILVPLKDRLIDPLLLRCKLLPSALQKMALGMFFGFTSVIVAGVLEMERLHYIHHNETVSQQIGEVLYNAAPLSIWWQIPQYLLIGISEIFASIPGLEFAYSEAPRSMQGAIMGIFFCLSGVGSLLGSSLVALLSLPGGWLHCPKDFGNINNCRMDLYFFLLAGIQAVTALLFVWIAGRYERASQGPASHSRFSRDRG

SEQ ID NO: 1877 - protein, 870 aa, Homo sapiens
MGPPSLVLCLLSATVFSLLGGSSAFLSHHRLKGRFQRDRRNIRPNIILVLTDDQDVELGSMQVMNKTRRIMEQGGAHFINAFVTTPMCCPSRSSILTGKYVHNHNTYTNNENCSSPSWQAQHESRTFAVYLNSTGYRTAFFGKYLNEYNGSYVPPGWKEWVGLLKNSRFYNYTLCRNGVKEKHGSDYSKDYLTDLITNDSVSFFRTSKKMYPHRPVLMVISHAAPHGPEDSAPQYSRLFPNASQHITPSYNYAPNPDKHWIMRYTGPMKPIHMEFTNMLQRKRLQTLMSVDDSMETIYNMLVETGELDNTYIVYTADHGYHIGQFGLVKGKSMPYEFDIRVPFYVRGPNVEAGCLNPHIVLNIDLAPTILDIAGLDIPADMDGKSILKLLDTERPVNRFHLKKKMRVWRDSFLVERGKLLHKRDNDKVDAQEENFLPKYQRVKDLCQRAEYQTACEQLGQKWQCVEDATGKLKLHKCKGPMRLGGSRALSNLVPKYYGQGSEACTCDSGDYKLSLAGRRKKLFKKKYKASYVRSRSIRSVAIEVDGRVYHVGLGDAAQPRNLTKRHWPGAPEDQDDKDGGDFSGTGGLPDYSAANPIKVTHRCYILENDTVQCDLDLYKSLQAWKDHKLHIDHEIETLQNKIKNLREVRGHLKKKRPEECDCHKISYHTQHKGRLKHRGSSLHPFRKGLQEKDKVWLLREQKRKKKLRKLLKRLQNNDTCSMPGLTCFTHDNQHWQTAPFWTLGPFCACTSANNNTYWCMRTINETHNFLFCEFATGFLEYFDLNTDPYQLMNAVNTLDRDVLNQLHVQLMELRSCKGYKQCNPRTRNMDLGLKDGGSYEQYRQFQRRKWPEMKRPSSKSLGQLWEGWEG

SEQ ID NO: 1878 - protein, 850 aa, Homo sapiens
MGPPSLVLCLLSATVFSLLGGSSAFLSHHRLKGRFQRDRRNIRPNIILVLTDDQDVELGSMQVMNKTRRIMEQGGAHFINAFVTTPMCCPSRSSILTGKYVHNHNTYTNNENCSSPSWQAQHESRTFAVYLNSTGYRTAFFGKYLNEYNGSYVPPGWKEWVGLLKNSRFYNYTLCRNGVKEKHGSDYSKDYLTDLITNDSVSFFRTSKKMYPHRPVLMVISHAAPHGPEDSAPQYSRLFPNASQHITPSYNYAPNPDKHWIMRYTGPMKPIHMEFTNMLQRKRLQTLMSVDDSMETIYNMLVETGELDNTYIVYTADHGYHIGQFGLVKGKSMPYEFDIRVPFYVRGPNVEAGCLNPHIVLNIDLAPTILDIAGLDIPADMDGKSILKLLDTERPVNRFHLKKKMRVWRDSFLVERGKLLHKRDNDKVDAQEENFLPKYQRVKDLCQRAEYQTACEQLGQKWQCVEDATGKLKLHKCKGPMRLGGSRALSNLVPKYYGQGSEACTCDSGDYKLSLAGRRKKLFKKKYKASYVRSRSIRSVAIEVDGRVYHVGLGDAAQPRNLTKRHWPGAPEDQDDKDGGDFSGTGGLPDYSAANPIKVTHRCYILENDTVQCDLDLYKSLQAWKDHKLHIDHEIETLQNKIKNLREVRGHLKKKRPEECDCHKIRKGLQEKDKVWLLREQKRKKKLRKLLKRLQNNDTCSMPGLTCFTHDNQHWQTAPFWTLGPFCACTSANNNTYWCMRTINETHNFLFCEFATGFLEYFDLNTDPYQLMNAVNTLDRDVLNQLHVQLMELRSCKGYKQCNPRTRNMDLGLKDGGSYEQYRQFQRRKWPEMKRPSSKSLGQLWEGWEG

SEQ ID NO: 1879 - protein, 419 aa, Homo sapiens
MVFSAVLTAFHTGTSNTTFVVYENTYMNITLPPPFQHPDLSPLLRYSFETMAPTGLSSLTVNSTAVPTTPAAFKSLNLPLQITLSAIMIFILFVSFLGNLVVCLMVYQKAAMRSAINILLASLAFADMLLAVLNMPFALVTILTTRWIFGKFFCRVSAMFFWLFVIEGVAILLIISIDRFLIIVQRQDKLNPYRAKVLIAVSWATSFCVAFPLAVGNPDLQIPSRAPQCVFGYTTNPGYQAYVILISLISFFIPFLVILYSFMGILNTLRHNALRIHSYPEGICLSQASKLGLMSLQRPFQMSIDMGFKTRAFTTILILFAVFIVCWAPFTTYSLVATFSKHFYYQHNFFEISTWLLWLCYLKSALNPLIYYWRIKKFHDACLDMMPKSFKFLPQLPGHTKRRIRPSAVYVCGEHRTVV

SEQ ID NO: 1880 - protein, 944 aa, Homo sapiens
MAAVAAVAARRRRSWASLVLAFLGVCLGITLAVDRSNFKTCEESSFCKRQRSIRPGLSPYRALLDSLQLGPDSLTVHLIHEVTKVLLVLELQGLQKNMTRFRIDELEPRRPRYRVPDVLVADPPIARLSVSGRDENSVELTMAEGPYKIILTARPFRLDLLEDRSLLLSVNARGLLEFEHQRAPRVSQGSKDPAEGDGAQPEETPRDGDKPEETQGKAEKDEPGAWEETFKTHSDSKPYGPMSVGLDFSLPGMEHVYGIPEHADNLRLKVTEGGEPYRLYNLDVFQYELYNPMALYGSVPVLLAHNPHRDLGIFWLNAAETWVDISSNTAGKTLFGKMMDYLQGSGETPQTDVRWMSETGIIDVFLLLGPSISDVFRQYASLTGTQALPPLFSLGYHQSRWNYRDEADVLEVDQGFDDHNLPCDVIWLDIEHADGKRYFTWDPSRFPQPRTMLERLASKRRKLVAIVDPHIKVDSGYRVHEELRNLGLYVKTRDGSDYEGWCWPGSAGYPDFTNPTMRAWWANMFSYDNYEGSAPNLFVWNDMNEPSVFNGPEVTMLKDAQHYGGWEHRDVHNIYGLYVHMATADGLRQRSGGMERPFVLARAFFAGSQRFGAVWTGDNTAEWDHLKISIPMCLSLGLVGLSFCGADVGGFFKNPEPELLVRWYQMGAYQPFFRAHAHLDTGRREPWLLPSQHNDIIRDALGQRYSLLPFWYTLLYQAHREGIPVMRPLWVQYPQDVTTFNIDDQYLLGDALLVHPVSDSGAHGVQVYLPGQGEVWYDIQSYQKHHGPQTLYLPVTLSSIPVFQRGGTIVPRWMRVRRSSECMKDDPITLFVALSPQGTAQGELFLDDGHTFNYQTRQEFLLRRFSFSGNTLVSSSADPEGHFETPIWIERVVIIGAGKPAAVVLQTKGSPESRLSFQHDPETSVLVLRKPGINVASDWSIHLR

SEQ ID NO: 1881 - protein, 725 aa, Homo sapiens
MKTEGGKVLYKVRWKGYTSDDDTWEPEIHLEDCKEVLLEFRKRIAENIAKAVKKDIQRLSLNNDIFEANSDSDQQSETKEDTSPKKKKKKLRQREEKSPDDLKKKKAKAGKLKDKSKPDLESSLESLVFDLRTKKRISEAKEELKESKKPKKDEVKETKELKKVKKGEIRDLKTKTREDPKENRKTKKEKFVESQVESESSVLNDSPFPEDDSEGLHSDSREEKQNTKSARERAGQDMGLEHGFEKPLDSAMSAEEDTDVRGRRKKKTPRKAEDTRENRKLENKNAFLEKKTVPKKQRNQDRSKSAAELEKLMPVSAQTPKGRRLSGEERGLWSTDSAEEDKETKRNESKEKYQKRHDSDKEEKGRKEPKGLKKAILVQASTSSYRQSGVFSCGKGAGVTWITLRLTAFSRPLSQLQEIRNAFDLFKLTPEEKNDVSENNRKREEIPLDFKTIDDHKTKENKQSLKERRNTRDETDTWAYIAAEGDQEVLDSVCQADENSGANRRLIQESSGWHLAGAPLGRSFQRKEQAAIFAVLQLPLVIPRQTESGDHNSSPREQNWAENEFDELTEVGFRRWVINSSELKEHVLTQCKEAKNLEKRLEELLTRITSLGKNRNDLMELKTQHENFMKHTQVSITKSERSSSPATEQSWMENDFDKLREGFRRSNYSELKEEVQTHSKEVKNLEKRLDEWLTRITNAEKSLKDLMELKTKARELRDERTSLSS

SEQ ID NO: 1882 - protein, 906 aa, Homo sapiens
MAGNVKKSSGAGGGSGSGGSGSGGLIGLMKDAFQPHHHHHHHLSPHPPGTVDKKMVEKCWKLMDKVVRLCQNPKLALKNSPPYILDLLPDTYQHLRTILSRYEGKMETLGENEYFRVFMENLMKKTKQTISLFKEGKERMYEENSQPRRNLTKLSLIFSHMLAELKGIFPSGLFQGDTFRITKADAAEFWRKAFGEKTIVPWKSFRQALHEVHPISSGLEAMALKSTIDLTCNDYISVFEFDIFTRLFQPWSSLLRNWNSLAVTHPGYMAFLTYDEVKARLQKFIHKPGSYIFRLSCTRLGQWAIGYVTADGNILQTIPHNKPLFQALIDGFREGFYLFPDGRNQNPDLTGLCEPTPQDHIKVTQEQYELYCEMGSTFQLCKICAENDKDVKIEPCGHLMCTSCLTSWQESEGQGCPFCRCEIKGTEPIVVDPFDPRGSGSLLRQGAEGAPSPNYDDDDDERADDTLFMMKELAGAKVERPPSPFSMAPQASLPPVPPRLDLLPQRVCVPSSASALGTASKAASGSLHKDKPLPVPPTLRDLPPPPPPDRPYSVGAESRPQRRPLPCTPGDCPSRDKLPPVPSSRLGDSWLPRPIPKVPVSAPSSSDPWTGRELTNRHSLPFSLPSQMEPRPDVPRLGSTFSLDTSMSMNSSPLVGPECDHPKIKPSSSANAIYSLAARPLPVPKLPPGEQCEGEEDTEYMTPSSRPLRPLDTSQSSRACDCDQQIDSCTYEAMYNIQSQAPSITESSTFGEGNLAAAHANTGPEESENEDDGYDVPKPPVPAVLARRTLSDISNASSSFGWLSLDGDPTTNVTEGSQVPERPPKPFPRRINSERKAGSCQQGSGPAASAATASPQLSSEIENLMSQGYSYQDIQKALVIAQNNIEMAKNILREFVSISSPAHVAT

SEQ ID NO: 1883 - protein, 873 aa, Homo sapiens
MDGAMGPRGLLMCMYLVSLLILQAMPALGSATGRSKSSEKRQAVDTAVDGVFIRSLKVNCKVTSRFAHYVVTSQVVNTANEAREVAFDLEIPNTGFISDFAVTADGNAFIGDIKDKVTAWKQYRKAAISGENAGLVRASGRTMEQFIIHLTVNPQSKVTFQLTYEEVLKRNHMQYEIVIKVKPKQLVHHFEIDVDIFEPQGISKLDAQASFLPKELAAQTIKKSFSGKKGHVLFRPTVSQQQSCPTCSTSLLNGHFKVTYDVSRDKICDLLVANNHFAHFFAPQNLTNMNKNVVFVIDISGSMRGQKVKQTKEALLKILGDIHPGDYFDLVLFGTRVQSWKGSLVQASEANLQAAQDFVRGFSLDEATNLNGGLLRGIEILNQVQESLPELSNHASILIMLTDGDPTEGVTDRSQILKNVRNAIRGRFPLYNLGFGHNVDFNFLEVMSMENNGRAQRIYEDHDATQQLQGFYSQVAKPLLVDVDLQYPQDAVLALTQNHHKQYYEGSEIVVAGRIADNKQSSFKADVQAHGEGQEFSITCLVDEEEMKKLLRERGHMLENHVERLWAYLTIQELLAKRMKVDREVRANLSSQALRMSLDYGFVTPLTSMSIRGMADQDGLKPTIDKPSEDSPPLEMLGPRRTFVLSALQPSPTHSSSNTQRLPDRVTGGFSVNGQLIGNKARSPGQHDGTYFGRLGIANPATDFQLEVTPQNITLNPGFGGPVFSWRDQAVLRQDGVVVTINKKRNLVVSVDDGGTFEVVLHRVWKGSSVHQDFLGFYVLDSHRMSARTHGLLGQFFHPIGFEVSDIHPGSDPTKPDATMVVRNRRLTVTRGLQKDYSKDPWHGAEVSCWFIHNNGAGLIDGAYTDYIVPDIF

SEQ ID NO: 1884 - protein, 539 aa, Homo sapiens
MNLELLESFGQNYPEEADGTLDCISMALTCTFNRWGTLLAVGCNDGRIVIWDFLTRGIAKIKFSAHIHPVCSLCWSRDGHKLVSASTDNIVSQWDVLSGDCDQRFRFPSPILKVQYHPRDQNKVLVCPMKSAPVMLTLSDSKHVVLPVDDDSDLNVVASFDRRGEYIYTGNAKGKILVLKTDSQDLVASFRVTTGTSNTTAIKSIEFARKGSCFLINTADRIIRVYDGREILTCGRDGEPEPMQELQDLVNRTPWKKCCFSGDGEYIVAGSARQHALYIWEKSIGNLVKILHGTRGELLLDVAWHPVRPIIASISSGVVSIWAQNQVENWSAFAPDFKELDENVEYEERESGFDIEDEDKSEPEQTGADAAEDEEVDVTSVDPIAAFCSSDEELEDSKALLYLPIAPEVEDPEENPYGPPPDAVQTSLMDEGASSEKKRQSSADGSQPPKKKPKTTNIELQGVPNDEVHPLLGVKGDGKSKKKQAGRPKGSKGKEKDSPFKPKLYKGDRGLPLEGSAKGKVQAELSQPLTAGGAISELL

SEQ ID NO: 1885 - protein, 766 aa, Homo sapiens
MEETQGELTSSCGSKTMANVSLAFRDVSIDLSQEEWECLDAVQRDLYKDVMLENYSNLVSLDLEYKYITKNLLSEKNVCKIYLSQLQTGEKSKNTIHEDTIFRNGLQCKHEFERQERHQMGCVSQMLIQKQISHPLHPKIHAREKSYECKECRKAFRQQSYLIQHLRIHTGERPYKCMECGKAFCRVGDLRVHHTIHAGERPYECKECGKAFRLHYHLTEHQRIHSGVKPYECKECGKAFSRVRDLRVHQTIHAGERPYECKECGKAFRLHYQLTEHQRIHTGERPYECKVCGKTFRVQRHISQHQKIHTGVKPYKCNECGKAFSHGSYLVQHQKIHTGEKPYECKECGKSFSFHAELARHRRIHTGEKPYECRECGKAFRLQTELTRHHRTHTGEKPYECKECGKAFICGYQLTLHLRTHTGEIPYECKECGKTFSSRYHLTQHYRIHTGEKPYICNECGKAFRLQGELTRHHRIHTCEKPYECKECGKAFIHSNQFISHQRIHTSESTYICKECGKIFSRRYNLTQHFKIHTGEKPYICNECGKAFRFQTELTQHHRIHTGEKPYKCTECGKAFIRSTHLTQHHRIHTGEKPYECTECGKTFSRHYHLTQHHRGHTGEKPYICNECGNAFICSYRLTLHQRIHTGELPYECKECGKTFSRRYHLTQHFRLHTGEKPYSCKECGNAFRLQAELTRHHIVHTGEKPYKCKECGKAFSVNSELTRHHRIHTGEKPYQCKECGKAFIRSDQLTLHQRNHISEEVLCIM

SEQ ID NO: 1886 - protein, 176 aa, Homo sapiens
MEPGSKWRRNPSDVSDESDKSTSGKKNPVISQTGSWRRGMTAQVGITMPRTKASAPAGALKTPGTGKRPGLSWPWGTNASSSSAVSKDGLGFQSVSSLHTSCESIDISLSSGGVPSHNSSTGLIASSKDDSLTPFVRTNSVKTTLSERLVLCLWLPFSERHPSKNKKISLGIPNVE

SEQ ID NO: 1887 - protein, 215 aa, Homo sapiens
MTSRSTARPNGQPQASKICQFKLVLLGESAVGKSSLVLRFVKGQFHEYQESTIGAAFLTQSVCLDDTTVKFEIWDTAGQERYHSLAPMYYRGAQAAIVVYDITNQETFARAKTWVKELQRQASPSIVIALAGNKADLANKRMVEYEEAQAYADDNSLLFMETSAKTAMNVNDLFLAIAKKLPKSEPQNLGGAAGRSRGVDLHEQSQQNKSQCCSN

SEQ ID NO: 1888 - protein, 797 aa, Homo sapiens
MQDGNFLLSALQPEAGVCSLALPSDLQLDRRGAEGPEAERLRAARVQEQVRARLLQLGQQPRHNGAAEPEPEAETARGTSRGQYHTLQAGFSSRSQGLSGDKTSGFRPIAKPAYSPASWSSRSAVDLSCSRRLSSAHNGGSAFGAAGYGGAQPTPPMPTRPVSFHERGGVGSRADYDTLSLRSLRLGPGGLDDRYSLVSEQLEPAATSTYRAFAYERQASSSSSRAGGLDWPEATEVSPSRTIRAPAVRTLQRFQSSHRSRGVGGAVPGAVLEPVARAPSVRSLSLSLADSGHLPDVHGFNSYGSHRTLQRLSSGFDDIDLPSAVKYLMASDPNLQVLGAAYIQHKCYSDAAAKKQARSLQAVPRLVKLFNHANQEVQRHATGAMRNLIYDNADNKLALVEENGIFELLRTLREQDDELRKNVTGILWNLSSSDHLKDRLARDTLEQLTDLVLSPLSGAGGPPLIQQNASEAEIFYNATGFLRNLSSASQATRQKMRECHGLVDALVTSINHALDAGKCEDKSVENAVCVLRNLSYRLYDEMPPSALQRLEGRGRRDLAGAPPGEVVGCFTPQSRRLRELPLAADALTFAEVSKDPKGLEWLWSPQIVGLYNRLLQRCELNRHTTEAAAGALQNITAGDRRWAGVLSRLALEQERILNPLLDRVRTADHHQLRSLTGLIRNLSRNARNKDEMSTKVVSHLIEKLPGSVGEKSPPAEVLVNIIAVLNNLVVASPIAARDLLYFDGLRKLIFIKKKRDSPDSEKSSRAASSLLANLWQYNKLHRDFRAKGYRKEDFLGP

SEQ ID NO: 1889 - protein, 183 aa, Homo sapiens
MEKRELKASVPKFDKIPWLSEASLVNKPLVLSLPRRYPHTSATFLTSSKKNMNLPILFQVPDVLSKARRNQCDSMLLRNQQLCSTCQEMKMVQPRTMKIPDDPKASFENCMSYRMSLHQPKFQTTPEPFHDDIPTENIHYRLPILGPRTAVFHGLLTEAYKTLKERQRSSLPRKEPIGKTTRQ

SEQ ID NO: 1890 - protein, 1068 aa, Homo sapiens
MAPRKRGGRGISFIFCCFRNNDHPEITYRLRNDSNFALQTMEPALPMPPVEELDVMFSELVDELDLTDKHREAMFALPAEKKWQIYCSKKKDQEENKGATSWPEFYIDQLNSMAARKSLLALEKEEEEERSKTIESLKTALRTKPMRFVTRFIDLDGLSCILNFLKTMDYETSESRIHTSLIGCIKALMNNSQGRAHVLAHSESINVIAQSLSTENIKTKVAVLEILGAVCLVPGGHKKVLQAMLHYQKYASERTRFQTLINDLDKSTGRYRDEVSLKTAIMSFINAVLSQGAGVESLDFRLHLRYEFLMLGIQPVIDKLREHENSTLDRHLDFFEMLRNEDELEFAKRFELVHIDTKSATQMFELTRKRLTHSEAYPHFMSILHHCLQMPYKRSGNTVQYWLLLDRIIQQIVIQNDKGQDPDSTPLENFNIKNVVRMLVNENEVKQWKEQAEKMRKEHNELQQKLEKKERECDAKTQEKEEMMQTLNKMKEKLEKETTEHKQVKQQVADLTAQLHELSRRAVCASIPGGPSPGAPGGPFPSSVPGSLLPPPPPPPLPGGMLPPPPPPLPPGGPPPPPGPPPLGAIMPPPGAPMGLALKKKSIPQPTNALKSFNWSKLPENKLEGTVWTEIDDTKVFKILDLEDLERTFSAYQRQQKEADAIDDTLSSKLKVKELSVIDGRRAQNCNILLSRLKLSNDEIKRAILTMDEQEDLPKDMLEQLLKFVPEKSDIDLLEEHKHELDRMAKADRFLFEMSRINHYQQRLQSLYFKKKFAERVAEVKPKVEAIRSGSEEVFRSGALKQLLEVVLAFGNYMNKGQRGNAYGFKISSLNKIADTKSSIDKNITLLHYLITIVENKYPSVLNLNEELRDIPQAAKVNMTELDKEISTLRSGLKAVETELEYQKSQPPQPGDKFVSVVSQFITVASFSFSDVEDLLAEAKDLFTKAVKHFGEEAGKIQPDEFFGIFDQFLQAVSEAKQENENMRKKKEEEERRARMEAQLKEQRERERKMRKAKENSEESGEFDDLVSALRSGEVFDKDLSKLKRNRKRITNQMTDSSRERPITKLNF

SEQ ID NO: 1891 - protein, 520 aa, Homo sapiens
MSLEGPAQPQYSPVQATFEVLDFITHLYAGADVHRHLDVRILLTNIRTKSTFLPPLPTSVQNLAHPPEVVLTDFQTLDGSQYNPVKQQLVRYATSCYSCCPRLASVLLYSDYGIGEVPVEPLDVPLPSTIRPASPVAGSPKQPVRGYYRGAVGGTFDRLHNAHKVLLSVACILAQEQLVVGVADKDLLKSKLLPELLQPYTERVEHLSEFLVDIKPSLTFDVIPLLDPYGPAGSDPSLEFLVVSEETYRGGMAINRFRLENDLEELALYQIQLLKDLRHTENEEDKVSSSSFRQRMLGNLLRPPYERPELPTCLYVIGLTGISGSGKSSIAQRLKGLGAFVIDSDHLGHRAYAPGGPAYQPVVEAFGTDILHKDGIINRKVLGSRVFGNKKQLKILTDIMWPIIAKLAREEMDRAVAEGKRVCVIDAAVLLEAGWQNLVHEVWTAVIPETEAVRRIVERDGLSEAAAQSRLQSQMSGQQLVEQSHVVLSTLWEPHITQRQVEKAWALLQKRIPKTHQALD

SEQ ID NO: 1892 - protein, 1330 aa, Homo sapiens
MEDGGLTAFEEDQRCLSQSLPLPVSAEGPAAQTTAEPSRSFSSAHRHLSRRNGLSRLCQSRTALSEDRWSSYCLSSLAAQNICTSKLHCPAAPEHTDPSEPRGSVSCCSLLRGLSSGWSSPLLPAPVCNPNKAIFTVDAKTTEILVANDKACGLLGYSSQDLIGQKLTQFFLRSDSDVVEALSEEHMEADGHAAVVFGTVVDIISRSGEKIPVSVWMKRMRQERRLCCVVVLEPVERVSTWVAFQSDGTVTSCDSLFAHLHGYVSGEDVAGQHITDLIPSVQLPPSGQHIPKNLKIQRSVGRARDGTTFPLSLKLKSQPSSEEATTGEAAPVSGYRASVWVFCTISGLITLLPDGTIHGINHSFALTLFGYGKTELLGKNITFLIPGFYSYMDLAYNSSLQLPDLASCLDVGNESGCGERTLDPWQGQDPAEGGQDPRINVVLAGGHVVPRDEIRKLMESQDIFTGTQTELIAGGQLLSCLSPQPAPGVDNVPEGSLPVHGEQALPKDQQITALGREEPVAIESPGQDLLGESRSEPVDVKPFASCEDSEAPVPAEDGGSDAGMCGLCQKAQLERMGVSGPSGSDLWAGAAVAKPQAKGQLAGGSLLMHCPCYGSEWGLWWRSQDLAPSPSGMAGLSFGTPTLDEPWLGVENDREELQTCLIKEQLSQLSLAGALDVPHAELVPTECQAVTAPVSSCDLGGRDLCGGCTGSSSACYALATDLPGGLEAVEAQEVDVNSFSWNLKELFFSDQTDQTSSNCSCATSELRETPSSLAVGSDPDVGSLQEQGSCVLDDRELLLLTGTCVDLGQGRRFRESCVGHDPTEPLEVCLVSSEHYAASDRESPGHVPSTLDAGPEDTCPSAEEPRLNVQVTSTPVIVMRGAAGLQREIQEGAYSGSCYHRDGLRLSIQFEVRRVELQGPTPLFCCWLVKDLLHSQRDSAARTRLFLASLPGSTHSTAAELTGPSLVEVLRARPWFEEPPKAVELEGLAACEGEYSQKYSTMSPLGSGAFGFVWTAVDKEKNKEVVVKFIKKEKVLEDCWIEDPKLGKVTLEIAILSRVEHANIIKVLDIFENQGFFQLVMEKHGSGLDLFAFIDRHPRLDEPLASYIFRQVRAGQSRLVSAVGYLRLKDIIHRDIKDENIVIAEDFTIKLIDFGSAAYLERGKLFYTFCGTIEYCAPEVLMGNPYRGPELEMWSLGVTLYTLVFEENPFCELEETVEAAIHPPYLVSKELMSLVSGLLQPVPERRTTLEKLVTDPWVTQPVNLADYTWEEVFRVNKPESGVLSAASLEMGNRSLSDVAQAQELCGGPVPGEAPNGQGCLHPGDPRLLTS

SEQ ID NO: 1893 - protein, 1323 aa, Homo sapiens
MEDGGLTAFEEDQRCLSQSLPLPVSAEGPAAQTTAEPSRSFSSAHRHLSRRNGLSRLCQSRTALSEDRWSSYCLSSLAAQNICTSKLHCPAAPEHTDPSEPRGSVSCCSLLRGLSSGWSSPLLPAPVCNPNKAIFTVDAKTTEILVANDKACGLLGYSSQDLIGQKLTQFFLRSDSDVVEALSEEHMEADGHAAVVFGTVVDIISRSGEKIPVSVWMKRMRQERRLCCVVVLEPVERVSTWVAFQSDGTVTSCDSLFAHLHGYVSGEDVAGQHITDLIPSVQLPPSGQHIPKNLKIQRSVGRARDGTTFPLSLKLKSQPSSEEATTGEAAPVSGYRASVWVFCTISGLITLLPDGTIHGINHSFALTLFGYGKTELLGKNITFLIPGFYSYMDLAYNSSLQLPDLASCLDVGNESGCGERTLDPWQGQDPAEGGQDPRINVVLAGGHVVPRDEIRKLMESQDIFTGTQTELIAGGQLLSCLSPQPAPGVDNVPEGSLPVHGEQALPKDQQITALGREEPVAIESPGQDLLGESRSEPVDVKPFASCEDSEAPVPAEDGGSDAGMCGLCQKAQLERMGVSGPSGSDLWAGAAVAKPQAKGQLAGGSLLMHCPCYGSEWGLWWRSQDLAPSPSGMAGLSFGTPTLDEPWLGVENDREELQTCLIKEQLSQLSLAGALDVPHAELVPTECQAVTAPVSSCDLGGRDLCGGCTGSSSACYALATDLPGGLEAVEAQEVDVNSFSWNLKELFFSDQTDQTSSNCSCATSELRETPSSLAVGSDPDVGSLQEQGSCVLDDRELLLLTGTCVDLGQGRRFRESCVGHDPTEPLEVCLVSSEHYAASDRESPGHVPSTLDAGPEDTCPSAEEPRLNVQVTSTPVIVMRGAAGLQREIQEGAYSGSCYHRDGLRLSIQFEVRRVELQGPTPLFCCWLVKDLLHSQRDSAARTRLFLASLPGSTHSTAAELTGPSLVEVLRARPWFEEPPKAVELEGLAACEGEYSQKYSTMSPLGSGAFGFVWTAVDKEKNKEVVVKFIKKEKVLEDCWIEDPKLGKVTLEIAILSRVEHANIIKVLDIFENQGFFQLVMEKHGSGLDLFAFIDRHPRLDEPLASYIFRQLVSAVGYLRLKDIIHRDIKDENIVIAEDFTIKLIDFGSAAYLERGKLFYTFCGTIEYCAPEVLMGNPYRGPELEMWSLGVTLYTLVFEENPFCELEETVEAAIHPPYLVSKELMSLVSGLLQPVPERRTTLEKLVTDPWVTQPVNLADYTWEEVFRVNKPESGVLSAASLEMGNRSLSDVAQAQELCGGPVPGEAPNGQGCLHPGDPRLLTS

SEQ ID NO: 1894 - protein, 555 aa, Homo sapiens
MDRSKRNSIAGFPPRVERLEEFEGGGGGEGNVSQVGRVWPSSYRALISAFSRLTRLDDFTCEKIGSGFFSEVFKVRHRASGQVMALKMNTLSSNRANMLKEVQLMNRLSHPNILRYINSGNLEQLLDSNLHLPWTVRVKLAYDIAVGLSYLHFKGIFHRDLTSKNCLIKRDENGYSAVVADFGLAEKIPDVSMGSEKLAVVGSPFWMAPEVLRDEPYNEKADVFSYGIILCEIIARIQADPDYLPRTENFGLDYDAFQHMVGDCPPDFLQLTFNCCNMDPKLRPSFVEIGKTLEEILSRLQEEEQERDRKLQPTARGLLEKAPGVKRLSSLDDKIPHKSPCPRRTIWLSRSQSDIFSRKPPRTVSVLDPYYRPRDGAARTPKVNPFSARQDLMGGKIKFFDLPSKSVISLVFDLDAPGPGTMPLADWQEPLAPPIRRWRSLPGSPEFLHQEACPFVGREESLSDGPPPRLSSLKYRVKEIPPFRASALPAAQAHEAMDCSILQEENGFGSRPQGTSPCPAGASEEMEVEERPAGSTPATFSTSGIGLQTQGKQDG

SEQ ID NO: 1895 - protein, 527 aa, Homo sapiens
MDRSKRNSIAGFPPRVERLEEFEGGGGGEGNVSQVGRVWPSSYRALISAFSRLTRLDDFTCEKIGSGFFSEVFKVRHRASGQVMALKMNTLSSNRANMLKEVQLMNRLSHPNILRYINSGNLEQLLDSNLHLPWTVRVKLAYDIAVGLSYLHFKGIFHRDLTSKNCLIKRDENGYSAVVADFGLAEKIPDVSMGSEKLAVVGSPFWMAPEVLRDEPYNEKNFGLDYDAFQHMVGDCPPDFLQLTFNCCNMDPKLRPSFVEIGKTLEEILSRLQEEEQERDRKLQPTARGLLEKAPGVKRLSSLDDKIPHKSPCPRRTIWLSRSQSDIFSRKPPRTVSVLDPYYRPRDGAARTPKVNPFSARQDLMGGKIKFFDLPSKSVISLVFDLDAPGPGTMPLADWQEPLAPPIRRWRSLPGSPEFLHQEACPFVGREESLSDGPPPRLSSLKYRVKEIPPFRASALPAAQAHEAMDCSILQEENGFGSRPQGTSPCPAGASEEMEVEERPAGSTPATFSTSGIGLQTQGKQDG

SEQ ID NO: 1896 - protein, 300 aa, Homo sapiens
MDSDSCAAAFHPEEYSPSCKRRRTVEDFNKFCTFVLAYAGYIPYPKEELPLRSSPSPANSTAGTIDSDGWDAGFSDIASSVPLPVSDRCFSHLQPTLLQRAKPSNFLLDRKKTDKLKKKKKRKRRDSDAPGKEGYRGGLLKLEAADPYVETPTSPTLQDIPQAPSDPCSGWDSDTPSSGSCATVSPDQVKKKKTEGKRTIVRQGKQVVFRDEDSTGNDEDIMVDSDDDSWDLVTCFCMKPFAGRPMIECNECHTWIHLSCAKIRKSNVPEVFVCQKCRDSKFDIRRSNRSRTGSRKLFLD

SEQ ID NO: 1897 - protein, 647 aa, Homo sapiens
MPVSLEDSGEPTSCPATDAETASEGSVESASETRSGPQSASTAVKERPASSEKVKGGDDHDDTSDSDSDGLTLKELQNRLRRKREQEPTERPLKGIQSRLRKKRREEGPAETVGSEASDTVEGVLPSKQEPENDQGVVSQAGKDDRESKLEGKAAQDIKDEEPGDLGRPKPECEGYDPNALYCICRQPHNNRFMICCDRCEEWFHGDCVGISEARGRLLERNGEDYICPNCTILQVQDETHSETADQQEAKWRPGDADGTDCTSIGTIEQKSSEDQGIKGRIEKAANPSGKKKLKIFQPGPGPVPTQLPVLWQVLEIAVSRSISAFTLLHCISCKVIEAPGASKCIGPGCCHVAQPDSVYCSNDCILKHAAATMKFLSSGKEQKPKPKEKMKMKPEKPSLPKCGAQAGIKISSVHKRPAPEKKETTVKKAVVVPARSEALGKEAACESSTPSWASDHNYNAVKPEKTAAPSPSLLYKSTKEDRRSEEKAAATAASKKTAPPGSTVGKQPAPRNLVPKKSSFANVAAATPAIKKPPSGFKGTIPKRPWLSATPSSGASAARQAGPAPAAATAASKKFPGSAALVGAVRKPVVPSVPMASPAPGRLGAMSAAPSQPNSQIRQNIRRSLKEILWKSSFFLFCSESMTAMT

SEQ ID NO: 1898 - protein, 1015 aa, Homo sapiens
MRRFLRPGHDPVRERLKRDLFQFNKTVEHGFPHQPSALGYSPSLRILAIGTRSGAIKLYGAPGVEFMGLHQENNAVTQIHLLPGQCQLVTLLDDNSLHLWSLKVKGGASELQEDESFTLRGPPGAAPSATQITVVLPHSSCELLYLGTESGNVFVVQLPAFRALEDRTISSDAVLQRLPEEARHRRVFEMVEALQEHPRDPNQILIGYSRGLVVIWDLQGSRVLYHFLSSQQLENIWWQRDGRLLVSCHSDGSYCQWPVSSEAQQPEPLRSLVPYGPFPCKAITRILWLTTRQGLPFTIFQGGMPRASYGDRHCISVIHDGQQTAFDFTSRVIGFTVLTEADPAATFDDPYALVVLAEEELVVIDLQTAGWPPVQLPYLASLHCSAITCSHHVSNIPLKLWERIIAAGSRQNAHFSTMEWPIDGGTSLTPAPPQRDLLLTGHEDGTVRFWDASGVCLRLLYKLSTVRVFLTDTDPNENFSAQGEDEWPPLRKVGSFDPYSDDPRLGIQKIFLCKYSGYLAVAGTAGQVLVLELNDEAAEQAVEQVEADLLQDQEGYRWKGHERLAARSGPVRFEPGFQPFVLVQCQPPAVVTSLALHSEWRLVAFGTSHGFGLFDHQQRRQVFVKCTLHPSDQLALEGPLSRVKSLKKSLRQSFRRMRRSRVSSRKRHPAGPPGEAQEGSAKAERPGLQNMELAPVQRKIEARSAEDSFTGFVRTLYFADTYLKDSSRHCPSLWAGTNGGTIYAFSLRVPPAERRMDEPVRAEQAKEIQLMHRAPVVGILVLDGHSVPLPEPLEVAHDLSKSPDMQGSHQLLVVSEEQFKVFTLPKVSAKLKLKLTALEGSRVRRVSVAHFGSRRAEDYGEHHLAVLTNLGDIQVVSLPLLKPQVRYSCIRREDVSGIASCVFTKYGQGFYLISPSEFERFSLSTKWLVEPRCLVDSAETKNHRPGNGAGPKKAPSRARNSGTQSDGEEKQPGLVMERALLSDERAATGVHIEPPWGAASAMAEQSEWLSVQAAR

SEQ ID NO: 1899 - protein, 945 aa, Homo sapiens
MRRFLRPGHDPVRERLKRDLFQFNKTVEHGFPHQPSALGYSPSLRILAIGTRSGAIKLYGAPGVEFMGLHQENNAVTQIHLLPGQCQLVTLLDDNSLHLWSLKVKGGASELQEDESFTLRGPPGAAPSATQITVVLPHSSCELLYLGTESGNVFVVQLPAFRALEDRTISSDAVLQRLPEEARHRRVFEMVEALQEHPRDPNQILIGYSRGLVVIWDLQGSRVLYHFLSSQQLENIWWQRDGRLLVSCHSDGSYCQWPVSSEAQQPEPLRSLVPYAFDDPYALVVLAEEELVVIDLQTAGWPPVQLPYLASLHCSAITCSHHVSNIPLKLWERIIAAGSRQNAHFSTMEWPIDGGTSLTPAPPQRDLLLTGHEDGTVRFWDASGVCLRLLYKLSTVRVFLTDTDPNENFSAQGEDEWPPLRKVGSFDPYSDDPRLGIQKIFLCKYSGYLAVAGTAGQVLVLELNDEAAEQAVEQVEADLLQDQEGYRWKGHERLAARSGPVRFEPGFQPFVLVQCQPPAVVTSLALHSEWRLVAFGTSHGFGLFDHQQRRQVFVKCTLHPSDQLALEGPLSRVKSLKKSLRQSFRRMRRSRVSSRKRHPAGPPGEAQEGSAKAERPGLQNMELAPVQRKIEARSAEDSFTGFVRTLYFADTYLKDSSRHCPSLWAGTNGGTIYAFSLRVPPAERRMDEPVRAEQAKEIQLMHRAPVVGILVLDGHSVPLPEPLEVAHDLSKSPDMQGSHQLLVVSEEQFKVFTLPKVSAKLKLKLTALEGSRVRRVSVAHFGSRRAEDYGEHHLAVLTNLGDIQVVSLPLLKPQVRYSCIRREDVSGIASCVFTKYGQGFYLISPSEFERFSLSTKWLVEPRCLVDSAETKNHRPGNGAGPKKAPSRARNSGTQSDGEEKQPGLVMERALLSDERAATGVHIEPPWGAASAMAEQSEWLSVQAAR

SEQ ID NO: 1900 - protein, 777 aa, Homo sapiens
MPLAPTMAPAPAAPSTAWPTSPESPVVSTPTKSMQALSTVPLDWVTVPKLQECGARPAMEKPTRVVGGFGAASGEVPWQVSLKEGSRHFCGATVVGDRWLLSAAHCFNHTKVEQVRAHLGTASLLGLGGSPVKIGLRRVVLHPLYNPGILDFDLAVLELASPLAFNKYIQPVCLPLAIQKFPVGRKCMISGWGNTQEGNATKPELLQKASVGIIDQKTCSVLYNFSLTDRMICAGFLEGKVDSCQVSGIKALYESELADARRVLDETARERARLQIEIGKLRAELDEVNKSAKKREGELTVAQGRVKDLESLFHRSEVELAAALSDKRGLESDVAELRAQLAKAEDGHAVAKKQLEKETLMRVDLENRCQSLQEELDFRKSVFEEEVRETRRRHERRLVEVDSSRQQEYDFKMAQALEELRSQHDEQVRLYKLELEQTYQAKLDSAKLSSDQNDKAASAAREELKEARMRLESLSYQLSGLQKQASAAEDRIRELEEAMAGERDKFRKMLDAKEQEMTEMRDVMQQQLAEYQELLDVKLALDMEINAYRKLLEGEEERLKLSPSPSSRVTVSRATSSSSGSLSATGRLGRSKRKRLEVEEPLGSGPSVLGTGTGGSGGFHLAQQASASGSVSIEEIDLEGKFVQLKNNSDKDQSLGNWRIKRQVLEGEEIAYKFTPKYILRAGQMVTVWAAGAGVAHSPPSTLVWKGQSSWGTGESFRTVLVNADGEEVAMRTVKKSSVMRENENGEEEEEEAEFGEEDLFHQQGDPRTTSRGCYVM

SEQ ID NO: 1901 - protein, 615 aa, Homo sapiens
MFARGSRRRRSGRAPPEAEDPDRGQPCNSCREQCPGFLLHGWRKICQHCKCPREEHAVHAVPVDLERIMCRLISDFQRHSISDDDSGCASEEYAWVPPGLKPEQVYQFFSCLPEDKVPYVNSPGEKYRIKQLLHQLPPHDSEAQYCTALEEEEKKELRAFSQQRKRENLGRGIVRIFPVTITGAICEECGKQIGGGDIAVFASRAGLGACWHPQCFVCTTCQELLVDLIYFYHVGKVYCGRHHAECLRPRCQACDEIIFSPECTEAEGRHWHMDHFCCFECEASLGGQRYVMRQSRPHCCACYEARHAEYCDGCGEHIGLDQGQMAYEGQHWHASDRCFCCSRCGRALLGRPFLPRRGLIFCSRACSLGSEPTAPGPSRRSWSAGPVTAPLAASTASFSAVKGASETTTKGTSTELAPATGPEEPSRFLRGAPHRHSMPELGLRSVPEPPPESPGQPNLRPDDSAFGRQSTPRVSFRDPLVSEGGPRRTLSAPPAQRRRPRSPPPRAPSRRRHHHHNHHHHHNRHPSRRRHYQCDAGSGSDSESCSSSPSSSSSESSEDDGFFLGERIPLPPHLCRPMPAQDTAMETFNSPSLSLPRDSRAGMPRQARDKNCIVA

SEQ ID NO: 1902 - protein, 1248 aa, Homo sapiens
MMTGYNNGRCPRNSLYSDCIIEEKTVVLQKKDNEGFGFVLRGAKADTPIEEFTPTPAFPALQYLESVDEGGVAWQAGLRTGDFLIEVNNENVVKVGHRQVVNMIRQGGNHLVLKVVTVTRNLDPDDTARKKAPPPPKRAPTTALTLRSKSMTSELEELVDKASVRKKKDKPEEIVPASKPSRAAENMAVEPRVATIKQRPSSRCFPAGSDMNSVYERQGIAVMTPTVPGSPKAPFLGIPRGTMRRQKSIDSRIFLSGITEEERQFLAPPMLKFTRSLSMPDTSEDIPPPPQSVPPSPPPPSPTTYNCPKSPTPRVYGTIKPAFNQNSAAKVSPATRSDTVATMMREKGMYFRRELDRYSLDSEDLYSRNAGPQANFRNKRGQMPENPYSEVGKIASKAVYVPAKPARRKGMLVKQSNVEDSPEKTCSIPIPTIIVKEPSTSSSGKSSQGSSMEIDPQAPEPPSQLRPDESLTVSSPFAAAIAGAVRDREKRLEARRNSPAFLSTDLGDEDVGLGPPAPRTRPSMFPEEGDFADEDSAEQLSSPMPSATPREPENHFVGGAEASAPGEAGRPLNSTSKAQGPESSPAVPSASSGTAGPGNYVHPLTGRLLDPSSPLALALSARDRAMKESQQGPKGEAPKADLNKPLYIDTKMRPSLDAGFPTVTRQNTRGPLRRQETENKYETDLGRDRKGDDKKNMLIDIMDTSQQKSAGLLMVHTVDATKLDNALQEEDEKAEVEMKPDSSPSEVPEGVSETEGALQISAAPEPTTVPGRTIVAVGSMEEAVILPFRIPPPPLASVDLDEDFIFTEPLPPPLEFANSFDIPDDRAASVPALSDLVKQKKSDTPQSPSLNSSQPTNSADSKKPASLSNCLPASFLPPPESFDAVADSGIEEVDSRSSSDHHLETTSTISTVSSISTLSSEGGENVDTCTVYADGQAFMVDKPPVPPKPKMKPIIHKSNALYQDALVEEDVDSFVIPPPAPPPPPGSAQPGMAKVLQPRTSKLWGDVTEIKSPILSGPKANVISELNSILQQMNREKLAKPGEGLDSPMGAKSASLAPRSPEIMSTISGTRSTTVTFTVRPGTSQPITLQSRPPDYESRTSGTRRAPSPVVSPTEMNKETLPAPLSAATASPSPALSDVFSLPSQPPSGDLFGLNPAGRSRSPSPSILQQPISNKPFTTKPVHLWTKPDVADWLESLNLGEHKEAFMDNEIDGSHLPNLQKEDLIDLGVTRVGHRMNIERALKQLLDR

SEQ ID NO: 1903 - protein, 355 aa, Homo sapiens
MNLLTLDVKKKIKEVTEEVANKVSCAMTDEICRLSVLVDEFCSEFHPNPDVLKIYKSELNKHIEDGMGRNLADRCTDEVNALVLQTQQEIIENLKPLLPAGIQDKLHTLIPCKKFDLSYNLNYHKLCSDFQEDIVFRFSLGWSSLVHRFLGPRNAQRVLLGLSEPIFQLPRSLASTPTAPTTPATPDNASQEELMITLVTGLASVTSRTSMGIIIVGGVIWKTIGWKLLSVSLTMYGALYLYERLSWTTHAKERAFKQQFVNYATEKLRMIVSSTSANCSHQVKQQIATTFARLCQQVDITQKQLEEEIARLPKEIDQLEKIQNNSKLLRNKAVQLENELENFTKQFLPSSNEES

SEQ ID NO: 1904 - protein, 244 aa, Homo sapiens
MNLLTLDVKKKIKEVTEEVPNKVSCAMTDEICRLSVLVDEFCSEFHPNPDVLKIYKSLPRSLASTPTAPTTPATPDNASQEELMITLVTGLASVTSRTSMGIIIVGGVIWKTIGWKLLSVSLTMYGALYLYERLSWTTHAKERAFKQQFVNYATEKLRMIVSSTSANCSHQVKQQIATTFARLCQQVDITHKQLEEEIARLPKEIDQLEKIQNNSKLLRNKAVQLENELENFTKQFLPSSNEES

SEQ ID NO: 1905 - protein, 275 aa, Homo sapiens
MTDDKDVLRDVWFGRIPTCFTLYQDEITEREAEPYYLLLPRVSYLTLVTDKVKKHFQKVMRQEDISEIWFEYEGTPLKWHYPIGLLFDLLASSSALPWNITVHFKSFPEKDLLHCPSKDAIEAHFMSCMKEADALKHKSQVINEMQKKDHKQLWMGLQNDRFDQFWAINRKLMEYPAEENGFRYIPFRIYQTTTERPFIQKLFRPVAADGQLHTLGDLLKEVCPSAIDPEDGEKKNQVMIHGIEPMLETPLQWLSEHLSYPDNFLHISIIPQPTD

SEQ ID NO: 1906 - protein, 127 aa, Homo sapiens
MCPLPLAAAAVAAPRAPLRLLNRGLAAAMSTAQSLKSVDYEVFGRVQGVCFRMYTEDEARKIGVVGWVKNTSKGTVTGQVQGPEDKVNSMKSWLSKVGSPSSRIDRTNFSNEKTISKLEYSNFSIRY

SEQ ID NO: 1907 - protein, 286 aa, Homo sapiens [sequence omitted]

SEQ ID NO: 1908 - protein, 134 aa, Homo sapiens
MMKCPQALLAIFWLLLSWVSSEDKVVQSPLSLVVHEGDTVTLNCSYEVTNFRSLLWYKQEKKAPTFLFMLTSSGIEKKSGRLSSILDKKELSSILNITATQTGDSAIYLCAVEAQCSLVTCSLYSNSTAEALQL

SEQ ID NO: 1909 - protein, 415 aa, Homo sapiens
MLWSGCRRFGARLGCLPGGLRVLVQTGHRSLTSCIDPSMGLNEEQKEFQKVAFDFAAREMAPNMAEWDQKELFPVDVMRKAAQLGFGGVYIQTDVGGSGLSRLDTSVIFEALATGCTSTTAYISIHNMCAWMIDSFGNEEQRHKFCPPLCTMEKFASYCLTEPGSGSDAASLLTSAKKQGDHYILNGSKAFISGAGESDIYVVMCRTGGPGPKGISCIVVEKGTPGLSFGKKEKKVGWNSQPTRAVIFEDCAVPVANRIGSEGQGFLIAVRGLNGGRINIASCSLGAAHASVILTRDHLNVRKQFGEPLASNQYLQFTLADMATRLVAARLMVRNAAVALQEERKDAVALCSMAKLFATDECFAICNQALQMHGGYGYLKDYAVQQYVRDSRVHQILEGSNEVMRILISRSLLQE

SEQ ID NO: 1910 - protein, 281 aa, Homo sapiens
MSQPRTPEQALDTPGDCPPGRRDEDAGEGIQCSQRMLSFSDALLSIIATVMILPVTHTEISPEQQFDRSVQRLLATRIAVYLMTFLIVTVAWAAHTRLFQVVGKTDDTLALLNLACMKTITFLPYTFSLMVTFPDVPLGIFLFCVCVIAIGVVQALIVGYAFHFPHLLSPQIQRSAHRALYRRHVLGIVLQGPALCFAAAIFSLFFVPLSYLLMVTVILLPYVSKVTGWCRDRLLGHREPSAHPVEVFSFDLHEPLSKERVEAFSDGVYAIVATLLILDIW

SEQ ID NO: 1911 - protein, 342 aa, Homo sapiens
MQAVDNLTSAPGNTSLCTRDYKITQVLFPLLYTVLFFVGLITNGLAMRIFFQIRSKSNFIIFLKNTVISDLLMILTFPFKILSDAKLGTGPLRTFVCQVTSVIFYFTMYISISFLGLITIDRYQKTTRPFKTSNPKNLLGAKILSVVIWAFMFLLSLPNMILTNRQPRDKNVKKCSFLKSEFGLVWHEIVNYICQVIFWINFLIVIVCYTLITKELYRSYVRTRGVGKVPRKKVNVKVFIIIAVFFICFVPFHFARIPYTLSQTRDVFDCTAENTLFYVKESTLWLTSLNACLDPFIYFFLCKSFRNSLISMLKCPNSATSLSQDNRKKEQDGGDPNEETPM

SEQ ID NO: 1912 - protein, 140 aa, Homo sapiens
MVHLTPEEKSAVTALWGKVNVDEVGGEALGRLLVVYPWTQRFFESFGDLSTPDAVMGNPKVKAHGKKVLGAFSDGLAHLDNLKGTFATLSELHCDKLHVDPENFRLLGNVLVCVLAHHFGKEFTPPVAGLPIRKLVAGCG

SEQ ID NO: 1913 - protein, 555 aa, Homo sapiens
MPTTVDDVLEHGGEFHFFQKQMFFLLALLSATFAPIYVGIVFLGFTPDHRCRSPGVAELSLRCGWSPAEELNYTVPGPGPAGEASPRQCRRYEVDWNQSTFDCVDPLASLDTNRSRLPLGPCRDGWVYETPGSSIVTEFNLVCANSWMLDLFQSSVNVGFFIGSMSIGYIADRFGRKLCLLTTVLINAAAGVLMAISPTYTWMLIFRLIQGLVSKAGWLIGYILITEFVGRRYRRTVGIFYQVAYTVGLLVLAGVAYALPHWRWLQFTVALPNFFFLLYYWCIPESPRWLISQNKNAEAMRIIKHIAKKNGKSLPASLQRLRLEEETGKKLNPSFLDLVRTPQIRKHTMILMYNWFTSSVLYQGLIMHMGLAGDNIYLDFFYSALVEFPAAFMIILTIDRIGRRYPWAASNMVAGAACLASVFIPGDLQWLKIIISCLGRMGITMAYEIVCLVNAELYPTFIRNLGVHICSSMCDIGGIITPFLVYRLTNIWLELPLMVFGVLGLVAGGLVLLLPETKGKALPETIEEAENMQRPRKNKEKMIYLQVQKLDIPLN

SEQ ID NO: 1914 - protein, 282 aa, Homo sapiens
MLGVNPRFDSASSSYYLDMHSLPHVINPVESRLGSSAASLYPVLNFLLYVPELAHSPLYIQDKDGAPVATNAFHSPRWGGIMVYNVDSKTYNASVLPVRVEVDMVRVMEVFLAQLRLLFGIAQPQLPPKCLLSGPTSEGLMTWELDRLLWARSVENLATATTTLTSLAQLLGKISNIVIKDDVASEVYKAVAAVQKSAEELASGHLASAFVASQEAVTSSELAFFDPSLLHLLYFPDDQKFAIYIPLFLPMAVPILLSLVKIFLETRKSWRKPEKTDCVRDI

SEQ ID NO: 1915 - protein, 787 aa, Homo sapiens
MGSTDSKLNFRKAVIQLTTKTQPVEATDDAFWDQFWADTATSVQDVFALVPAAEIRAVREESPSNLATLCYKAVEKLVQGAESGCHSEKEKQIVLNCSRLLTRVLPYIFEDPDWRGFFWSTVPGAGRGGGEEDDEHARPLAESLLLAIADLLFCPDFTVQSHRRSTVDSAEDVHSLDSCEYIWEAGVGFAHSPQPNYIHDMNRMELLKLLLTCFSEAMYLPPAPESGSTNPWVQFFCSTENRHALPLFTSLLNTVCAYDPVGYGIPYNHLLFSDYREPLVEEAAQVLIVTLDHDSASSASPTVDGTTTGTAMDDADPPGPENLFVNYLSRIHREEDFQFILKGIARLLSNPLLQTYLPNSTKKIQFHQELLVLFWKLCDFNKKFLFFVLKSSDVLDILVPILFFLNDARADQSRVGLMHIGVFILLLLSGERNFGVRLNKPYSIRVPMDIPVFTGTHADLLIVVFHKIITSGHQRLQPLFDCLLTIVVNVSPYLKSLSMVTANKLLHLLEAFSTTWFLFSAAQNHHLVFFLLEVFNNIIQYQFDGNSNLVYAIIRKRSIFHQLANLPTDPPTIHKALQRRRRTPEPLSRTGSQEGTSMEGSRPAAPAEPGTLKTSLVATPGIDKLTEKSQVSEDGTLRSLEPEPQQSLEDGSPAKGEPSQAWREQRRPSTSSASGQWSPTPEWVLSWKSKLPLQTIMRLLQVLVPQVEKICIDKGLTDESEILRFLQHGTLVGLLPVPHPILIRKYQANSGTAMWFRTYMWGVIYLRNVDPPVWYDTDVKLFEIQRV

SEQ ID NO: 1916 - protein, 473 aa, Homo sapiens
MQNKVPIPAPNEVLNDRKEDIKLEEKKKTQAEIEQEMATLQYTNPQLLEQLKIERLAQKQVEQIQPPPSSGTPLLGPQPFPGQGPMSQIPQGFQQPHPSQQMPMNMAQMGPPGPQGQFRPPGPQGQMGPQGPPLHQGGGGPQGFMGPQGPQGPPQGLPRPQDMHGPQGMQRHPGPHGPLGPQGPPGPQGSSGPQGHMGPQGPPGPQGHIGPQGPPGPQGHLGPQGPPGTQGMQGPPGPRGMQGPPHPHGIQGGPGSQGIQGPVSQGPLMGLNPRGMQGPPGPRENQGPAPQGMIMGHPPQEMRGPHPPGGLLGHGPQEMRGPQEIRGMQGPPPQGSMLGPPQELRGPPGSQSQQGPPQGSLGPPPQGGMQGPPGPQGQQNPARGPHPSQGPIPFQQQKTPLLGDGPRAPFNQEGQSTGPPPLIPGLGQQGAQGRIPPLNPGQGPGPNKVSEEEPRRGMRAVLPPEEGMVFLVL

SEQ ID NO: 1917 - protein, 305 aa, Homo sapiens
MYNMMETELKPPGPQQTSGGGGGNSTAAAAGGNQKNSPDRVKRPMNAFMVWSRGQRRKMAQENPKMHNSEISKRLGAEWKLLSETEKRPFIDEAKRLRALHMKEHPDYKYRPRRKTKTLMKKDKYTLPGGLLAPGGNSMASGVGVGAGLGAGVNQRMDSYAHMNGWSNGSYSMMQDQLGYPQHPGLNAHGAAQMQPMHRYDVSALQYNSMTSMSYSQQGTPGMALGSMGSVVKSEASSSPPVVTSSSHSRAPCQAGDLRDMISMYLPGAEVPEPAAPSRLHMSQHYQSGPVPGTAINGTLPLSHM

SEQ ID NO: 1918 - protein, 615 aa, Homo sapiens
METTLAISTTTPGLSAKGGILYSSSRSPEETLSPASMRSSSISGEPTSLYSQAESTHTTAFPASTTTSGLSQESTTFHSKPGSTETTLSPGSITTSSFAQEFTTPHSQPGSALSTVSPASTTVPGLSEESTTFYSSPGSTETTAFSHSNTMSIHSQQSTPFPDSPGFTHTVLPATLTTTDIGQESTAFHSSSDATGTTPLPARSTASDLVGEPTTFYISPSPTYTTLFPASSSTSGLTEESTTFHTSPSFTSTIVSTESLETLAPGLCQEGQIWNGKQCVCPQGYVGYQCLSPLESFPVETPEKLNATLGMTVKVTYRNFTEKMNDASSQEYQNFSTLFKNRMDVVLKGDNLPQYRGVNIRRLLNGSIVVKNDVILEADYTLEYEELFENLAEIVKAKIMNETRTTLLDPDSCRKAILCYSEEDTFVDSSVTPGFDFQEQCTQKAAEGYTQFYYVDVLDGKLACVNKCTKGTKSQMNCNLGTCQLQRSGPRCLCPNTNTHWYWGETCEFNIAKSLVYGIVGAVMAVLLLALIILIILFSLSQRKRHREQYDVPQEWRKEGTPGIFQKTAIWEDQNLRESRFGLENAYNNFRPTLETVDSGTELHIQRPEMVASPV

SEQ ID NO: 1919 - protein, 254 aa, Homo sapiens
MAEQEAQPRPSLTTAHAKKQGPPHSREPRAESRLEDPGMDSREAGLTPSPGDPMAGGGPQANPDYLFHVIFLGDSNVGKTSFLHLLHQNSFATGLTATVGVDFRVKTLLVDNKCFVLQLWDTAGQERYHSMTRQLLRKADGVVLMYDITSQESFAHVRYWLDCLQDAGSDGVVILLLGNKMDCEEERQVSVEAGQQLAQELGVYFGECSAALGHNILEPVVNLARSLRMQEEGLKGSLVKVAPKRPPKRFGCCS

SEQ ID NO: 1920 - protein, 952 aa, Homo sapiens
MSKSKSDNQISDRAALEAKVKDLLTLAKTKDVEILHLRNELRDMRAQLGINEDHSEGDEKSEKETIMAHQPTDVESTLLQLQEQNTAIREELNQLKNENRMLKDRLNALGFSLEQRLDNSEKLFGYQSLSPEITPGNQSDGGGTLTSSVEGSAPGSVEDLLSQDENTLMDHQHSNSMDNLDSECSEVYQPLTSSDDALDAPSSSESEGIPSIERSRKGSSGNASEVSVACLTERIHQMEENQHSTSEELQATLQELADLQQITQELNSENERLGEEKVILMESLCQQSDKLEHFSRQIEYFRSLLDEHHISYVIDEDVKSGRYMELEQRYMDLAENARFEREQLLGVQQHLSNTLKMAEQDNKEAQEMIGALKERSHHMERIIESEQKGKAALAATLEEYKATVASDQIEMNRLKAQLENEKQKVAELYSIHNSGDKSDIQDLLESVRLDKEKAETLASSLQEDLAHTRNDANRLQDAIAKVEDEYRAFQEEAKKQIEDLNMTLEKLRSDLDEKETERSDMKETIFELEDEVEQHRAVKLHDNLIISDLENTVKKLQDQKHDMEREIKTLHRRLREESAEWRQFQADLQTAVVIANDIKSEAQEEIGDLKRRLHEAQEKNEKLTKELEEIKSRKQEEERGRVYNYMNAVERDLAALRQGMGLSRRSSTSSEPTPTVKTLIKSFDSASQVPNPAAAAIPRTPLSPSPMKTPPAAAVSPMQRHSISGPISTSKPLTALSDKRPNYGEIPVQEHLLRTSSASRPASLPRVPAMESAKTLSVSRRSSEEMKRDISAQEGASPASLMAMGTTSPQLSLSSSPTASVTPTTRSRIREERKDPLSALAREYGGSKRNALLKWCQKKTEGYQNIDITNFSSSWNDGLAFCALLHTYLPAHIPYQELNSQDKRRNFMLAFQAAESVGIKSTLDINEMVRTERPDWQNVMLYVTAIYKYFET

SEQ ID NO: 1921 - protein, 766 aa, Homo sapiens
MFLPEDKSYNGGGIGSSNRIMDFLEEPIPGVGTYDDFNTIDWVREKSRDRDRHREITNKSKESTWALIHSVSDAFSGWLLMLLIGLLSGSLAGLIDISAHWMTDLKEGICTGGFWFNHEHCCWNSEHVTFEERDKCPEWNSWSQLIISTDEGAFAYIVNYFMYVLWALLFAFLAVSLVKVFAPYACGSGIPEIKTILSGFIIRGYLGKWTLVIKTITLVLAVSSGLSLGKEGPLVHVACCCGNILCHCFNKYRKNEAKRREVLSAAAAAGVSVAFGAPIGGVLFSLEEVSYYFPLKTLWRSFFAALVAAFTLRSINPFGNSRLVLFYVEFHTPWHLFELVPFILLGIFGGLWGALFIRTNIAWCRKRKTTQLGKYPVIEVLVVTAITAILAFPNEYTRMSTSELISELFNDCGLLDSSKLCDYENRFNTSKGGELPDRPAGVGVYSAMWQLALTLILKIVITIFTFGMKIPSGLFIPSMAVGAIAGRLLGVGMEQLAYYHQEWTVFNSWCSQGADCITPGLYAMVGAAACLGGVTRMTVSLVVIMFELTGGLEYIVPLMAAAMTSKWVADALGREGIYDAHIRLNGYPFLEAKEEFAHKTLAMDVMKPRRNDPLLTVLTQDSMTVEDVETIISETTYSGFPVVVSRESQRLVGFVLRRDLIISIENARKKQDGVVSTSIIYFTEHSPPLPPYTPPTLKLRNILDLSPFTVTDLTPMEIVVDIFRKLGLRQCLVTHNGRLLGIITKKDVLKHIAQMANQDPDSILFN

SEQ ID NO: 1922 - protein, 343 aa, Homo sapiens
MSRAGSWDMDGLRADGGGAGGAPASSSSSSVAAAAASGQCRGFLSAPVFAGTHSGRAAAAAAAAAAAAAAASGFAYPGTSERTGSSSSSSSSAVVAARPEAPPAKECPAPTPAAAAAAPPSAPALGYGYHFGNGYYSCRMSHGVGLQQNALKSSPHASLGGFPVEKYMDVSGLASSSVPANEVPARAKEVSFYQGYTSPYQHVPGYIDMVSTFGSGEPRHEAYISMEGYQSWTLANGWNSQVYCTKDQPQGSHFWKSSFPGDVALNQPDMCVYRRGRKKRVPYTKLQLKELENEYAINKFINKDKRRRISAATNLSERQVTIWFQNRRVKDKKIVSKLKDTVS

SEQ ID NO: 1923 - protein, 951 aa, Homo sapiens
MADLSLLQEDLQEDADGFGVDDYSSESDVIIIPSALDFVSQDEMLTPLGRLDKYAASENIFNQTKWWPRSLLDTLREVCDDERDCIAVLERISRLADDSEPTVRAELMEQVPHIALFCQENRPSIPYAFSKFLLPIVVRYLADQNNQVRKTSQAALLALLEQELIERFDVETKVCPVLIELTAPDSNDDVKTEAVAIMCKMAPMVGKDITERLILPRFCEMCCDCRMFHVRKVCAANFGDICSVVGQQATEEMLLPRFFQLCSDNVWGVRKACAECFMAVSCATCQEIRRTKLSALFINLISDPSRWVRQAAFQSLGPFISTFANPSSSGQYFKEESKSSEEMSVENKNRTRDQEAPEDVQVRPEDTPSDLSVSNSSVILENTMEDHAAEASGKPLGEISVPLDSSLLCTLSSESHQEAASNENDKKPGNYKSMLRPEVGTTSQDSALLDQELYNSFHFWRTPLPEIDLDIELEQNSGGKPSPEGPEEESEGPVPSSPNITMATRKELEEMIENLEPHIDDPDVKAQVEVLSAALRASSLDAHEETISIEKRSDLQDELDINELPNCKINQEDSVPLISDAVENMDSTLHYIHSDSDLSNNSSFSPDEERRTKVQDVVPQALLDQYLSMTDPSRAQTVDTEIAKHCAYSLPGVALTLGRQNWHCLRETYETLASDMQWKVRRTLAFSIHELAVILGDQLTAADLVPIFNGFLKDLDEVRIGVLKHLHDFLKLLHIDKRREYLYQLQEFLVTDNSRNWRFRAELAEQLILLLELYSPRDVYDYLRPIALNLCADKVSSVRWISYKLVSEMVKKLHAATPPTFGVDLINELVENFGRCPKWSGRQAFVFVCQTVIEDDCLPMDQFAVHLMPHLLTLANDRVPNVRVLLAKTLRQTLLEKDYFLASASCHQEAVEQTIMALQMDRDSDVKYFASIHPASTKISEDAMSTASSTY

SEQ ID NO: 1924 - protein, 635 aa, Homo sapiens
MAVPPGHGPFSGFPGPQEHTQVLPDVRLLPRRLPLAFRDATSAPLRKLSVDLIKTYKHINEVYYAKKKRRAQQAPPQDSSNKKEKKVLNHGYDDDNHDYIVRSGERWLERYEIDSLIGKGSFGQVVKAYDHQTQELVAIKIIKNKKAFLNQAQIELRLLELMNQHDTEMKYYIVHLKRHFMFRNHLCLVFELLSYNLYDLLRNTHFRGVSLNLTRKLAQQLCTALLFLATPELSIIHCDLKPENILLCNPKRSAIKIVDFGSSCQLGQRIYQYIQSRFYRSPEVLLGTPYDLAIDMWSLGCILVEMHTGEPLFSGSNEVCPQEGVDQMNRIVEVLGIPPAAMLDQAPKARKYFERLPGGGWTLRRTKELRKDYQGPGTRRLQEVLGVQTGGPGGRRAGEPGHSPADYLRFQDLVLRMLEYEPAARISPLGALQHGFFRRTADEATNTGPAGSSASTSPAPLDTCPSSSTASSISSSGGSSGSSSDNRTYRYSNRYCGGPGPPITDCEMNSPQVPPSQPLRPWAGGDVPHKTHQAPASASSLPGTGAQLPPQPRYLGRPPSPTSPPPPELMDVSLVGGPADCSPPHPAPAPQHPAASALRTRMTGGRPPLPPPDDPATLGPHLGLRGVPQSTAASS

SEQ ID NO: 1925 - protein, 101 aa, Homo sapiens
MDPSEAWANATCPGVTYDQESHQVILRLGDHEFIKSLTPLEGTQDTFTNFQQVYLWKDSDMGSRPESMGCRKNTVPRPASPTEAGTDPQTFLHTWVSECRD

SEQ ID NO: 1926 - protein, 1203 aa, Homo sapiens
MEQAPNMAEPRGPVDHGVQIRFITEPVSGAEMGTLRRGGRRPAKDARASTYGVAVRVQGIAGQPFVVLNSGEKGGDSFGVQIKGANDQGASGALSSDLELPENPYSQVKGFPAPSQSSTSDEEPGAYWNGKLLRSHSQASLAGPGPVDPSNRSNSMLELAPKVASPGSTIDTAPLSSVDSLINKFDSQLGGQARGRTGRRTRMLPPEQRKRSKSLDSRLPRDTFEERERQSTNHWTSSTKYDNHVGTSKQPAQSQNLSPLSGFSRSRQTQDWVLQSFEEPRRSAQDPTMLQFKSTPDLLRDQQEAAPPGSVDHMKATIYGILREGSSESETSVRRKVSLVLEKMQPLVMVSSGSTKAVAGQGELTRKVEELQRKLDEEVKKRQKLEPSQVGLERQLEEKTEECSRLQELLERRKGEAQQSNKELQNMKRLLDQGEDLRHGLETQVMELQNKLKHVQGPEPAKEVLLKDLLETRELLEEVLEGKQRVEEQLRLRERELTALKGALKEEVASRDQEVEHVRQQYQRDTEQLRRSMQDATQDHAVLEAERQKMSALVRGLQRELEETSEETGRWQSMFQKNKEDLRATKQELLQLRMEKEEMEEELGEKIEVLQRELEQARASAGDTRQVEVLKKELLRTQEELKELQAERQSQEVAGRHRDRELEKQLAVLRVEADRGRELEEQNLQLQKTLQQLRQDCEEASKAKMVAEAEATVLGQRRAAVETTLRETQEENDEFRRRILGLEQQLKETRGLVDGGEAVEARLRDKLQRLEAEKQQLEEALNASQEEEGSLAAAKRALEARLEEAQRGLARLGQEQQTLNRALEEEGKQREVLRRGKAELEEQKRLLDRTVDRLNKELEKIGEDSKQALQQLQAQLEDYKEKARREVADAQRQAKDWASEAEKTSGGLSRLQDEIQRLRQALQASQAERDTARLDKELLAQRLQGLEQEAENKKRSQDDRARQLKGLEEKVSRLETELDEEKNTVELLTDRVNRGRDQVDQLRTELMQERSARQDLECDKISLERQNKDLKTRLASSEGFQKPSASLSQLESQNQLLQERLQAEEREKTVLQSTNRKLERKVKELSIQIEDERQHVNDQKDQLSLRVKALKRQVDEAEEEIERLDGLRKKAQREVEEQHEVNEQLQARIKSLEKDSWRKASRSAAESALKNEGLSSDEEFDSVYDPSSIASLLTESNLQTSSC

SEQ ID NO: 1927 - protein, 555 aa, Homo sapiens
MAFTQLTFRDVAIEFSQDEWKCLNSTQRTLYRDVMLENYRNLVSLDLSRNCVIKELAPQQEGNPGEVFHTVTLEQHEKHDIEEFCFREIKKKIHDFDCQWRDDERNCNKVTTAPKENLTCRRDQRDRRGIGNKSIKHQLGLSFLPHPHELQQFQAEGKIYECNHVEKSVNHGSSVSPPQILSSTVKTHVSNKYGTDFICSSLLTQEQKSCIREKPYRYIECDKALNHGSHMTVRQVSHSGEKGYKCDLCGKVFSQKSNLARHWRVHTGEKPYKCNECDRSFSRNSCLALHRRVHTGEKPYKCYECDKVFSRNSCLALHQKTHIGEKPYTCKECGKAFSVRSTLTNHQVIHSGKKPYKCNECGKVFSQTSSLATHQRIHTGEKPYKCNECGKVFSQTSSLARHWRIHTGEKPYKCNECGKVFSYNSHLASHRRVHTGEKPYKCNECGKAFSVHSNLTTHQVIHTGEKPYKCNQCGKGFSVHSSLTTHQVIHTGEKPYKCNECGKSFSVRPNLTRHQIIHTGKKPYKCSDCGKSFSVRPNLFRHQIIHTKEKPYKRN

SEQ ID NO: 1928 - protein, 213 aa, Homo sapiens
MVQSCSAYGCKNRYDKDKPVSFHKFPLTRPSLCKEWEAAVRRKNFKPTKYSSICSEHFTPDCFKRECNNKLLKENAVPTIFLCTEPHDKKEDLLEPQEQLPPPPLPPPVSQVDAAIGLLMPPLQTPVNLSVFCDHNYTVEDTMHQRKRIHQLEQQVEKLRKKLKTAQQRCRRQERQLEKLKEVVHFQKEKDDVSERGYVILPNDYFEIVEVPA

SEQ ID NO: 1929 - protein, 154 aa, Homo sapiens
MIHFILLFSRQGKLRLQKWYITLPDKERKKITREIVQIILSRGHRTSSFVDWKELKLVYKRYASLYFCCAIENQDNELLTLEIVHRYVELLDKYFGNVCELDIIFNFEKAYFILDEFIIGGEIQETSKKIAVKAIEDSDMLQEVSTVSQTMGER

SEQ ID NO: 1930 - protein, 480 aa, Homo sapiens
MAGLRNESEQEPLLGDTPGSREWDILETEEHYKSRWRSIRILYLTMFLSSVGFSVVMMSIWPYLQKIDPTADTSFLGWVIASYSLGQMVASPIFGLWSNYRPRKEPLIVSILISVAANCLYAYLHIPASHNKYYMLVARGLLGIGAVFQTCFTFLGEKGVTWDVIKLQINMYTTPVLLSAFLGILNIILILAILREHRVDDSGRQCKSINFEEASTDEAQVPQGNIDQVAVVAINVLFFVTLFIFALFETIITPLTMDMYAWTQEQAVLYNGIILAALGVEAVVIFLGVKLLSKKIGERAILLGGLIVVWVGFFILLPWGNQFPKIQWEDLHNNSIPNTTFGEIIIGLWKSPMEDDNERPTGCSIEQAWCLYTPVIHLAQFLTSAVLIGLGYPVCNLMSYTLYSKILGPKPQGVYMGWLTASGSGARILGPMFISQVYAHWGPRWAFSLVCGIIVLTITLLGVVYKRLIALSVRYGRIQE

SEQ ID NO: 1931 - protein, 1176 aa, Homo sapiens
MAERKGTAKVDFLKKIEKEIQQKWDTERVFEVNASNLEKQTSKGKYFVTFPYPYMNGRLHLGHTFSLSKCEFAVGYQRLKGKCCLFPFGLHCTGMPIKACADKLKREIELYGCPPDFPDEEEEEEETSVKTEDIIIKDKAKGKKSKAAAKAGSSKYQWGIMKSLGLSDEEIVKFSEAEHWLDYFTPLAIQDLKRMGLKVDWRRSFITTDVNPYYDSFVRWQFLTLRERNKIKFGKRYTIYSPKDGQPCMDHDRQTGEGVGPQEYTLLKLKVLEPYPSKLSGLKGKNIFLVAATLRPETMFGQTNCWVRPDMKYIGFETVNGDIFICTQKAARNMSYQGFTKDNGVVPVVKELMGEEILGASLSAPLTSYKVIYVLPMLTIKEDKGTGVVTSVPSDSPDDIAALRDLKKKQALRAKYGIRDDMVLPFEPVPVIEIPGFGNLSAVTICDELKIQSQNDREKLAEAKEKIYLKGFYEGIMLVDGFKGQKVQDVKKTIQKKMIDAGDALIYMEPEKQVMSRSSDECVVALCDQWYLDYGEENWKKQTSQCLKNLETFCEETRRNFEATLGWLQEHACSRTYGLGTHLPWDEQWLIESLSDSTIYMAFYTVAHLLQGGNLHGQAESPLGIRPQQMTKEVWDYVFFKEAPFPKTQIAKEKLDQLKQEFEFWYPVDLRVSGKDLVPNHLSYYLYNHVAMWPEQSDKWPTAVRANGHLLLNSEKMSKSTGNFLTLTQAIDKFSADGMRLALADAGDTVEDANFVEAMADAGILRLYTWVEWVKEMVANWDSLRSGPASTFNDRVFASELNAGIIKTDQNYEKMMFKEALKTGFFEFQAAKDKYRELAVEGMHRELVFRFIEVQTLLLAPFCPHLCEHIWTLLGKPDSIMNASWPVAGPVNEVLIHSSQYLMEVTHDLRLRLKNYMMPAKGKKTDKQPLQKPSHCTIYVAKNYPPWQHTTLSVLRKHFEANNGKLPDNKVIASELGSMPELKKYMKKVMPFVAMIKENLEKMGPRILDLQLEFDEKAVLMENIVYLTNSLELEHIEVKFASEAEDKIREDCCPGKPLNVFRIEPGVSVSLVNPQPSNGHFSTKIEIKQGDNCDSIIRRLMKMNRGIKDLSKVKLMRFDDPLLGPRRVPVLGKEYTEKTPISEHAVFNVDLMSKKIHLTENGIRVDIGDTIIYLVH

SEQ ID NO: 1932 - protein, 1706 aa, Homo sapiens
MDDDSLDELVARSPGPDGHPQVGPADPAGDFEESSVGSSGDSGDDSDSEHGDGTDGEDEGASEEEDLEDRSGSEDSEDDGETLLEVAGTQGKLEAAGSFNSDDDAESCPICLNAFRDQAVGTPENCAHYFCLDCIVEWSKNANSCPVDRTLFKCICIRAQFGGKILKKIPVENTKASEEEEDPTFCEVCGRSDREDRLLLCDGCDAGYHMECLDPPLQEVPVDEWFCPECAAPGVVLAADAGPVSEEEVSLLLADVVPTTSRLRPRAGRTRAIARTRQSERVRATVNRNRISTARRVQHTPGRLGSSLLDEAIEAVATGLSTAVYQRPLTPRTPARRKRKTRRRKKVPGRKKTPSGPSAKSKSSATRSKKRQHRVKKRRGKKVKSEATTRSRIARTLGLRRPVHSSCIPSVLKPVEPSLGLLRADIGAASLSLFGDPYELDPFDSSEELSANPLSPLSAKRRALSRSALQSHQPVARPVSVGLSRRRLPAAVPEPDLEEEPVPDLLGSILSGQSLLMLGSSDVIIHRDGSLSAKRAAPVSFQRNSGSLSRGEEGFKGCLQPRALPSGSPAQGPSGNRPQSTGLSCQGRSRTPARTAGAPVRLDLPAAPGAVQARNLSNGSVPGFRQSHSPWFNGTNKHTLPLASAASKISSRDSKPPCRSVVPGPPLKPAPRRTDISELPRIPKIRRDDGGGRRDAAPAHGQSIEIPSACISRLTGREGTGQPGRGTRAESEASSRVPREPGVHTGSSRPPAPSSHGSLAPLGPSRGKGVGSTFESFRINIPGNMAHSSQLSSPGFCNTFRPVDDKEQRKENPSPLFSIKKTKQLRSEVYDPSDPTGSDSSAPGSSPERSGPGLLPSEITRTISINSPKAQTVQAVRCVTSYTVESIFGTEPEPPLGPSSAMSKLRGAVAAEGASDTEREEPTESQGLAARLRRPSPPEPWDEEDGASCSTFFGSEERTVTCVTVVEPEAPPSPDVLQAATHRVVELRPPSRSRSTSSSRSRKKAKRKRVSREHGRTRSGTRSESRDRSSRSASPSVGEERPRRQRSKAKSRRSSSDRSSSRERAKRKKAKDKSREHRRGPWGHSRRTSRSRSGSPGSSSYEHYESRKKKKRRSASRPRGRECSPTSSLERLCRHKHQRERSHERPDRKESVAWPRDRRKRRSRSPSSEHRAREHRRPRSREKWPQTRSHSPERKGAVREASPAPLAQGEPGREDLPTRLPALGEAHVSPEVATADKAPLQAPPVLEVAAECEPDDLDLDYGDSVEAGHVFDDFSSDAVFIQLDDMSSPPSPESTDSSPERDFPLKPALPPASLAVAAIQREVSLMHDEDPSQPPPLPEGTQEPHLLRPDAAEKAEAPSSPDVAPAGKEDSPSASGRVQEAARPEEVVSQTPLLRSRALVKRVTWNLQESESSAPAEDRAPRGTTSQATEAPRRSLGHGGCGPHRGQAGVLRAALSQSRASGTRVPRHRPLSGLQPRPAACPGPALKHPTLRTGQPAHGPVHPSGEPAASGLWGSTDPGPSARCPDPSLRASQSSHCSQQLGGEDPGPQASCGENQEGGVHEEAAHAGACCGGGEAGHQALLPEEGGDQGGVQGHPAQGRAEDLPQQEWRDQPREGGQPGEGVRGQVQAHAQAQETRGRGGAAHAGGRGLRPGNHGLCPGSCREWRESGPCPGSCREWRESGPCPGSCREWREMGGITMPAVGFLR

SEQ ID NO: 1933 - protein, 311 aa, Homo sapiens
MEATRRRQHLGATGGPGAQLGASFLQARHGSVSADEAARTAPFHLDLWFYFTLQNWVLDFGRPIAMLVFPLEWFPLNKPSVGDYFHMAYNVITPFLLLKLIERSPRTLPRSITYVSIIIFIMGASIHLVGDSVNHRLLFSGYQHHLSVRENPIIKNLKPETLIDSFELLYYYDEYLGHCMWYIPFFLILFMYFSGCFTASKAESLIPGPALLLVAPSGLYYWYLVTEGQIFILFIFTFFAMLALVLHQKRKRLFLDSNGLFLFSSFALTLLLVALWVAWLWNDPVLRKKYPGVIYVPEPWAFYTLHVSSRH

SEQ ID NO: 1934 - protein, 351 aa, Homo sapiens
MLETLRERLLSVQQDFTSGLKTLSDKSREAKVKSKPRTVPFLPKYSAGLELLSRYEDTWAALHRRAKDCASAGELVDSEVVMLSAHWEKKKTSLVELQEQLQQLPALIADLESMTANLTHLEASFEEVENNLLHLEDLCGQCELERCKHMQSQQLENYKKNKRKELETFKAELDAEHAQKVLEMEHTQQMKLKERQKFFEEAFQQDMEQYLSTGYLQIAERREPIGSMSSMEVNVDMLEQMDLMDISDQEALDVFLNSGGEENTVLSPALGPESSTCQNEITLQVPNPSELRAKPPSSSSTCTDSATRDISEGGESPVVQSDEEEVQVDTALATSHTDREATPDGGEDSDS

SEQ ID NO: 1935 - protein, 582 aa, Homo sapiens
MESVKQRILAPGKEGLKNFAGKSLGQIYRVLEKKQDTGETIELTEDGKPLEVPERKAPLCDCTCFGLPRRYIIAIMSGLGFCISFGIRCNLGVAIVDMVNNSTIHRGGKVIKEKAKFNWDPETVGMIHGSFFWGYIITQIPGGYIASRLAADRVFGAAILLTSTLNMLIPSAARVHYGCVIFVRILQGLVEGVTYPACHGIWSKWAPPLERSRLATTSFCGSYAGAVIAMPLAGILVQYTGWSSVFYVYGSFGMVWYMFWLLVSYESPAKHPTITDEERRYTEESIGESANLLGAMEKFKTPWRKFFTSMPVYAIIVANFCRSWTFYLLLISQPAYFEEVFGFEISKVGMLSAVPHLVMTIIVPIGGQIADFLRSKQILSTTTVRKIMNCGGFGMEATLLLVVGYSHTRGVAISFLVLAVGFSGFAISGFNVNHLDIAPRYASILMGISNGVGTLSGMVCPIIVGAMTKNKSREEWQYVFLIAALVHYGGVIFYAIFASGEKQPWADPEETSEEKCGFIHEDELDEETGDITQNYINYGTTKSYGATTQANGGWPSGWEKKEEFVQGEVQDSHSYKDRVDYS

SEQ ID NO: 1936 - protein, 329 aa, Homo sapiens
MSVPEEEERLLPLTQRWPRASKFLLSGCAATVAELATFPLDLTKTRLQMQGEAALARLGDGARESAPYRGMVRTALGIIEEEGFLKLWQGVTPAIYRHVVYSGGRMVTYEHLREVVFGKSEDEHYPLWKSVIGGMMAGVIGQFLANPTDLVKVQMQMEGKRKLEGKPLRFRGVHHAFAKILAEGGIRGLWAGWVPNIQRAALVNMGDLTTYDTVKHYLVLNTPLEDNIMTHGLSSLCSGLVASILGTPADVIKSRIMNQPRDKQGRGLLYKSSTDCLIQAVQGEGFMSLYKGFLPSWLRMVKLGLLPLFFFFVLKLLLIYKHFPFSLLV

SEQ ID NO: 1937 - protein, 495 aa, Homo sapiens
MRVGAEYQARIPEFDPGATKYTDKDNGGMLVWSPYHSIPDAKLDEYIAIAKEKHGYNVEQALGMLFWHKHNIEKSLADLPNFTPFPDEWTVEDKVLFEQAFSFHGKSFHRIQQMLPDKTIASLVKYYYSWKKTRSRTSLMDRQARKLANRHNQGDSDDDVEETHPMDGNDSDYDPKKEAKKEGNTEQPVQTSKIGLGRREYQSLQHRHHSQRSKCRPPKGMYLTQEDVVAVSCSPNAANTILRQLDMELISLKRQVQNAKQVNSALKQKMEGGIEEFKPPESNQKINARWTTEEQLLAVQGVRKYGKDFQAIADVIGNKTVGQVKNFFVNYRRRFNLEEVLQEWEAEQGTQASNGDASTLGEETKSASNVPSGKSTDEEEEAQTPQAPRTLGPSPPAPSSTPTPTAPIATLNQPPPLLRPTLPAAPALHRQPPPLQQQARFIQPRPTLNQPPPPLIRPANSMPPRLNPRPVLSTVGGQQPPSLIGIQTDSQSSLH

SEQ ID NO: 1938 - protein, 289 aa, Homo sapiens
MPGTGVQEGCLVTRQIQQPQELLSAVRNSVHPPQEQPRLEGSKLSSSPASPSSSLQNSTLQPDAFPPGLLHSGNNQITAERKVCNCCSQELETSFTYVDKNINLEQRNRSSPSAKGHNHPGELGWENPNEWSQEAAISLISEEEDDTSSEATSSGKSIDYGFISAILFLVTGILLVIISYIVPREVTVDPNTVAAREMERLEKESARLGAHLDRCVIAGLCLLTLGGVILSCLLMMSMWKGELYRRNRFASSKESAKLYGSFNFRMKTSTNENTLELSLVEEDALAVQS

SEQ ID NO: 1939 - protein, 459 aa, Homo sapiens
MSNCLQNFLKITSTRLLCSRLCQQLRSKRKFFGTVPISRLHRRVVITGIGLVTPLGVGTHLVWDRLIGGESGIVSLVGEEYKSIPCSVAAYVPRGSDEGQFNEQNFVSKSDIKSMSSPTIMAIGAAELAMKDSGWHPQSEADQVATGVAIGMGMIPLEVVSETALNFQTKGYNKVSPFFVPKILVNMAAGQVSIRYKLKGPNHAVSTACTTGAHAVGDSFRFIAHGDADVMVAGGTDSCISPLSLAGFSRARALSTNSDPKLACRPFHPKRDGFVMGEGAAVLVLEEYEHAVQRRARIYAEVLGYGLSGDAGHITAPDPEGEGALRCMAAALKDAGVQPEEISYINAHATSTPLGDAAENKAIKHLFKDHAYALAVSSTKGATGHLLGAAGAVEAAFTTLACYYQKLPPTLNLDCSEPEFDLNYVPLKAQEWKTEKRFIGLTNSFGFGGTNATLCIAGL

SEQ ID NO: 1940 - protein, 166 aa, Homo sapiens
MCTGFLCNFSTESNGFSQLFPGLRPWLAVLAGLFYLPVYRDYIMSFGLCPVSRQSLDFILSQPQLGQAVVIMVGGAHEALYSVPGEHCLTLQKRKGFVRLALRHGASLVPVYSFGENDIFRLKAFATGSWQHWCQLTFKKLMGFSPCIFWGRGIFATTTWSLHPFG

SEQ ID NO: 1941 - protein, 263 aa, Homo sapiens
MGDIPVVGLSSWKASPGKVTEAVKEAIDAGYRHFDCAYFYHNEREVGAGIRCKIKEGAVRREDLLIATKLWCTCHKKSLVETACRKSLKALKLNYLDLYLIHWPMGFKPPHPEWIMSCSELSFCLSHPRVQDLPLDESNMVIPSDTDFLDTWEAMEDLVITGLVKNIGVSNFNHEQLERLLNKPGLRFKPLTNQILIRFQIQRNVIVIPGSITPSHIKENIQVFDFELTQHDMDNILSLNRNLRLAMFPITKNHKDYPFHIEY

SEQ ID NO: 1942 - protein, 1025 aa, Homo sapiens
MHRKKVDNRIRILIENGVAERQRSLFVVVGDRGKDQVVILHHMLSKATVKARPSVLWCYKKELGFSSHRKKRMRQLQKKIKNGTLNIKQDDPFELFIAATNIRYCYYNETHKILGNTFGMCVLQDFEALTPNLLARTVETVEGGGLVVILLRTMNSLKQLYTVTMDVHSRYRTEAHQDVVGRFNERFILSLASCKKCLVIDDQLNILPISSHVATMEALPPQTPDESLGPSDLELRELKESLQDTQPVGVLVDCCKTLDQAKAVLKFIEGISEKTLRSTVALTAARGRGKSAALGLAIAGAVAFGYSNIFVTSPSPDNLHTLFEFVFKGFDALQYQEHLDYEIIQSLNPEFNKAVIRVNVFREHRQTIQYIHPADAVKLGQAELVVIDEAAAIPLPLVKSLLGPYLVFMASTINGYEGTGRSLSLKLIQQLRQQSAQSQVSTTAENKTTTTARLASARTLHEVSLQESIRYAPGDAVEKWLNDLLCLDCLNITRIVSGCPLPEACELYYVNRDTLFCYHKASEVFLQRLMALYVASHYKNSPNDLQMLSDAPAHHLFCLLPPVPPTQNALPEVLAVIQVCLEGEISRQSILNSLSRGKKASGDLIPWTVSEQFQDPDFGGLSGGRVVRIAVHPDYQGMGYGSRALQLLQMYYEGRFPCLEEKVLETPQEIHTVSSEAVSLLEEVITPRKDLPPLLLKLNERPAERLDYLGVSYGLTPRLLKFWKRAGFVPVYLRQTPNDLTGEHSCIMLKTLTDEDEADQGGWLAAFWKDFRRRFLALLSYQFSTFSPSLALNIIQNRNMGKPAQPALSREELEALFLPYDLKRLEMYSRNMVDYHLIMDMIPAISRIYFLNQLGDLALSAAQSALLLGIGLQHKSVDQLEKEIELPSGQLMGLFNRIIRKVVKLFNEVQEKAIEEQMVAAKDVVMEPTMKTLSDDLDEAAKEFQEKHKKEVGKLKSMDLSEYIIRGDDEEWNEVLNKAGPNASIISLKSDKKRKLEAKQEPKQSKKLKNRETKNKKDMKLKRKK

SEQ ID NO: 1943 - protein, 735 aa, Homo sapiens
MAAGGAVAAAPECRLLPYALHKWSSFSSTYLPENILVDKPNDQSSRWSSESNYPPQYLILKLERPAIVQNITFGKYEKTHVCNLKKFKVFGGMNEENMTELLSSGLKNDYNKETFTLKHKIDEQMFPCRFIKIVPLLSWGPSFNFSIWYVELSGIDDPDIVQPCLNWYSKYREQEAIRLCLKHFRQHNYTEAFESLQKKTKIALEHPMSTDIHDKLVLKGDFDACEELIEKAVNDGLFNQYISQQEYKPRWSQIIPKSTKGDGEDNRPGMRGGHQMVIDVQTETVYLFGGWDGTQDLADFWAYSVKENQWTCISRDTEKENGPSARSCHKMCIDIQRRQIYTLGRYLDSSVRNSKSLKSDFYRYDIDTNTWMLLSEDTAADGGPKLVFDHQMCMDSEKHMIYTFGGRILTCNGSVDDSRASEPQFSGLFAFNCQCQTWKLLREDSCNAGPEDIQSRIGHCMLFHSKNRCLYVFGGQRSKTYLNDFFSYDVDSDHVDIISDGTKKDSGMVPMTGFTQRATIDPELNEIHVLSGLSKDKEKREENVRNSFWIYDIVRNSWSCVYKNDQAAKDNPTKSLQEEEPCPRFAHQLVYDELHKVHYLFGGNPGKSCSPKMRLDDFWSLKLCRPSKDYLLRHCKYLIRKHRFEEKAQVDPLSALKYLQNDLYITVDHSDPEETKEFQLLASALFKSGSDFTALGFSDVDHTYAQRTQLFDTLVNFFPDSMTPPKGNLVDLITL

SEQ ID NO: 1944 - protein, 131 aa, Homo sapiens
MAPSLWKGLVGIGLFALAHAAFSAAQHRSYMRLTEKEDESLPIDIVPQTLLAFAVTCYGIVHIAGEFKDMDATSELKNKTFDTLRNHPSFYVFNHRGRVLFRPSDTANSSNQDALSSNTSLKLRKLESLRR

SEQ ID NO: 1945 - protein, 234 aa, Homo sapiens
MRKPDSKIVLLGDMNVGKTSLLQRYMERRFPDTVSTVGGAFYLKQWRSYNISIWDTAGREQFHGLGSMYCRGAAAIILTYDVNHRQSLVELEDRFLGLTDTASKDCLFAIVGNKVDLTEEGALAGQEKEECSPNMDAGDRVSPRAPKQVQLEDAVALYKKILKYKMLDEQDVPAAEQMCFETSAKTGYNVDLLFETLFDLVVPMILQQRAERPSHTVDISSHKPPKRTRSGCCA

SEQ ID NO: 1946 - protein, 1668 aa, Homo sapiens
MPLGSKLTGVIVENENITKEGGLVDMAKKENDLNAEPNLKQTIKATVENGKKDGIAVDHVVGLNTEKYAETVKLKHKRSPGKVKDISIDVERRNENSEVDTSAGSGSAPSVLHQRNGQTEDVATGPRRAEKTSVATSTEGKDKDVTLSPVKAGPATTTSSETRQSEVALPCTSIEADEGLIIGTHSRNNPLHVGAEASECTVFAAAEEGGAVVTEGFAESETFLTSTKEGESGECAVAESEDRAADLLAVHAVKIEANVNSVVTEEKDDAVTSAGSEEKCDGSLSRDSEIVEGTITFISEVESDGAVTSAGTEIRAGSISSEEVDGSQGNMMRMGPKKETEGTVTCTGAEGRSDNFVICSVTGAGPREERMVTGAGVVLGDNDAPPGTSASQEGDGSVNDGTEGESAVTSTGITEDGEGPASCTGSEDSSEGFAISSESEENGESAMDSTVAKEGTNVPLVAAGPCDDEGIVTSTGAKEEDEEGEDVVTSTGRGNEIGHASTCTGLGEESEGVLICESAEGDSQIGTVVEHVEAEAGAAIMNANENNVDSMSGTEKGSKDTDICSSAKGIVESSVTSAVSGKDEVTPVPGGCEGPMTSAASDQSDSQLEKVEDTTISTGLVGGSYDVLVSGEVPECEVAHTSPSEKEDEDIITSVENEECDGLMATTASGDITNQNSLAGGKNQGKVLIISTSTTNDYTPQVSAITDVEGGLSDALRTEENMEGTRVTTEEFEAPMPSAVSGDDSQLTASRSEEKDECAMISTSIGEEFELPISSATTIKCAESLQPVAAAVEERATGPVLISTADFEGPMPSAPPEAESPLASTSKEEKDECALISTSIAEECEASVSGVVVESENERAGTVMEEKDGSGIISTSSVEDCEGPVSSAVPQEEGDPSVTPAEEMGDTAMISTSTSEGCEAVMIGAVLQDEDRLTITRVEDLSDAAIISTSTAECMPISASIDRHEENQLTADNPEGNGDLSATEVSKHKVPMPSLIAENNCRCPGPVRGGKEPGPVLAVSTEEGHNGPSVHKPSAGQGHPSAVCAEKEEKHGKECPEIGPFAGRGQKESTLHLINAEEKNVLLNSLQKEDKSPETGTAGGSSTASYSAGRGLEGNANSPAHLRGPEQPSGQTAKDPSVSIRYLAAVNTGAIKADDMPPVQGTVAEHSFLPAEQQGSEDNLKTSTTKCITGQESKIAPSHTMIPPATYSVALLAPKCEQDLTIKNDYSGKWTDQASAEKTGDDNSTRKSFPEEGDIMVTVSSEENVCDIGNEESPLNVLGGLKLKANLKMEAYVPSEEEKNGEILAPPESLCGGKPSGIAELQREPLLVNESLNVENSGFRTNEEIHSESYNKGEISSGRKDNAEAISGHSVEADPKEVEEEERHMPKRKRKQHYLSSEDEPDDNPDVLDSRIETAQRQCPETEPHDTKEENSRDLEELPKTSSEANSTTSRVMEEKDEYSSSETTGEKPEQNDDDTIKSQEEDQPIIIKRKRGRPRKYPVETTLKMKDDSKTDTGIVTVEQSPSSSKLKVMQTDESNKETANLQERSISNDDGEEKIVTSVRRRGRKPKRSLTVSDDAESSEPERKRQKSVSDPVEDKKEQESDEEEEEEEEDEPSGATTRSTTRSEAQRSKTQLSPSIKRKREVSPPGARTRGQQRVEEAPVKKAKR

SEQ ID NO: 1947 - protein, 1715 aa, Homo sapiens
MPLGSKLTGVIVENENITKEGGLVDMAKKENDLNAEPNLKQTIKATVENGKKDGIAVDHVVGLNTEKYAETVKLKHKRSPGKVKDISIDVERRNENSEVDTSAGSGSAPSVLHQRNGQTEDVATGPRRAEKTSVATSTEGKDKDVTLSPVKAGPATTTSSETRQSEVALPCTSIEADEGLIIGTHSRNNPLHVGAEASECTVFAAAEEGGAVVTEGFAESETFLTSTKEGESGECAVAESEDRAADLLAVHAVKIEANVNSVVTEEKDDAVTSAGSEEKCDGSLSRDSEIVEGTITFISEVESDGAVTSAGTEIRAGSISSEEVDGSQGNMMRMGPKKETEGTVTCTGAEGRSDNFVICSVTGAGPREERMVTGAGVVLGDNDAPPGTSASQEGDGSVNDGTEGESAVTSTGITEDGEGPASCTGSEDSSEGFAISSESEENGESAMDSTVAKEGTNVPLVAAGPCDDEGIVTSTGAKEEDEEGEDVVTSTGRGNEIGHASTCTGLGEESEGVLICESAEGDSQIGTVVEHVEAEAGAAIMNANENNVDSMSGTEKGSKDTDICSSAKGIVESSVTSAVSGKDEVTPVPGGCEGPMTSAASDQSDSQLEKVEDTTISTGLVGGSYDVLVSGEVPECEVAHTSPSEKEDEDIITSVENEECDGLMATTASGDITNQNSLAGGKNQGKVLIISTSTTNDYTPQVSAITDVEGGLSDALRTEENMEGTRVTTEEFEAPMPSAVSGDDSQLTASRSEEKDECAMISTSIGEEFELPISSATTIKCAESLQPVAAAVEERATGPVLISTADFEGPMPSAPPEAESPLASTSKEEKDECALISTSIAEECEASVSGVVVESENERAGTVMEEKDGSGIISTSSVEDCEGPVSSAVPQEEGDPSVTPAEEMGDTAMISTSTSEGCEAVMIGAVLQDEDRLTITRVEDLSDAAIISTSTAECMPISASIDRHEENQLTADNPEGNGDLSATEVSKHKVPMPSLIAENNCRCPGPVRGGKEPGPVLAVSTEEGHNGPSVHKPSAGQGHPSAVCAEKEEKHGKECPEIGPFAGRGQKESTLHLINAEEKNVLLNSLQKEDKSPETGTAGGSSTASYSAGRGLEGNANSPAHLRGPEQPSGQTAKDPSVSIRYLAAVNTGAIKADDMPPVQGTVAEHSFLPAEQQGSEDNLKTSTTKCITGQESKIAPSHTMIPPATYSVALLAPKCEQDLTIKNDYSGKWTDQASAEKTGDDNSTRKSFPEEGDIMVTVSSEENVCDIGNEESPLNVLGGLKLKANLKMEAYVPSEEEKNGEILAPPESLCGGKPSGIAELQREPLLVNESLNVENSGFRTNEEIHSESYNKGEISSGRKDNAEAISGHSVEADPKEVEEEERHMPKRKRKQHYLSSEDEPDDNPDVLDSRIETAQRQCPETEPHDTKEENSRDLEELPKTSSEANSTTSRVMEEKDEYSSSETTGEKPEQNDDDTIKSQEEDQPIIIKRKRGRPRKYPVETTLKMKDDSKTDTGIVTVEQSPSSSKLKVMQTDESNKETANLQERSISNDDGEEKIVTSVRRRGRKPKRSLTVSDDAESSEPERKRQKSVSDPVEDKKEQESDEEEEEEEEDEPSGATTRSTTRSEAQRKQHSKPSARATSKLGSPDTVSPRNRQKLAKEKLPTSEKVSNSPPLGRSKTQLSPSIKRKREVSPPGARTRGQQRVEEAPVKKAKR

SEQ ID NO: 1948 - protein, 354 aa, Homo sapiens
MMSYLKQPPYGMNGLGLAGPAMDLLHPSVGYPATPRKQRRERTTFTRSQLDVLEALFAKTRYPDIFMREEVALKINLPESRVQVWFKNRRAKCRQQQQSGSGTKSRPAKKKSSPVRESSGSESSGQFTPPAVSSSASSSSSASSSSANPAAAAAAGLGGNPVAAASSLSTPAASSIWSPASISPGSAPASVSVPEPLAAPSNTSCMQRSVAAGAATAAASYPMSYGQGGSYGQGYPTPSSSYFGGVDCSSYLAPMHSHHHPHQLSPMAPSSMAGHHHHHPHAHHPLSQSSGHHHHHHHHHHQGYGGSGLAFNSADCLDYKEPGAAAASSAWKLNFNSPVCLDYKDQASWRFQVL

SEQ ID NO: 1949 - protein, 786 aa, Homo sapiens
MPREPRGYRTRVPALRELVPSSHAGSGASEHCQNNRQGSRQHRASRNVQAGGALAPPRHLCGLCSRLHFLKPDLSVRAAPSRAGASVMALRKELLKSIWYAFTALDVEKSGKVSKSQPRVLSHNLYTVLHIPHDPVALEEHFRDDDDGPVSSQGYMPYLNKYILDKVEEGAFVKEHFDELCWTLTAKKNYRADSNGNSMLSNQDAFRLWCLFNFLSEDKYPLIMVPDEGDEGNHPSPEPVPSTKHPNKTQDPPESPKQSVPKSCWGRLWEPDRALPGVGAGNTTCCSYQAFLLLLQVEYLLKKVLSSMSLEVSLGELEELLAQEAQVAQTTGGLSVWQFLELFNSGCCLRGVGRDTLSMAIHEVYQELIQDVLKRGYLWKRGHLRRNWAERWFQLQPSCLCYFGSEECKEKRGIIPLDAHCCVEVLPDRDGKRCMFCVKTATRTYEMSASDTRQRQEWTAAIQMAIRLQAEGKTSLHKDLKQKRREQREQRERRRAAKEEELLRLQQLQEEKERKLQELELLQEAQRQAERLLQEEEERRRSQHRELQQALEGQLREAEQARASMQAEMELKEEEAARQRQRIKELEEMQQRLQEALQLEVKARRDEESVRIAQTRLLEEEEEKLKQLMQLKEEQERYIERAQQEKEELQQEMAQQSRSLQQAQQQLEEVRQNRQRADEDVEAAQRKLRQASTNVKHWNVQMNRLMHPIEPGDKRPVTSSSFSGFQPPLLAHRDSSLKRLTRWGSQGNRTPSPNSNEQQKSLNGGDEAPAPASTPQEDKLDPAPEN

SEQ ID NO: 1950 - protein, 115 aa, Homo sapiens
MLLCTGLVVQAQRQASRQSQRELGGQVDLFKRRVVRRLASLKTRRCRLSRAAQGLPDPGAETCAVCLDYFCNKQWLRVLPCKHEFHRDCVDPWLMLQQTCPLCKFNVLGNRYSDD

SEQ ID NO: 1951 - protein, 252 aa, Homo sapiens
MRPSGLDRVLPQRVQPLLPLLLLGLQVLLVLVEPAAHGTCLLRPQVQGLVLLALVEFPEVFFLSLVNNCENTGNGFPDDSDLRELGGRTACHFGDAQLGQLHLQVVQLFQQLLLLLPSERAAALAACAAMAKIKARDLRGKKKEELLKQLDDLKVELSQLRVAKVTGGAASKLSKIRVVRKSIARVLTVINQTQKENLRKFYKGKKYKPLDLRPKKTRAMRRRLNKHEENLKTKKQQRKERLYPLRKYAVKA

SEQ ID NO: 1952 - protein, 258 aa, Homo sapiens
MPSLRACFKSIFRIHTETGNIWTHLLGCVFFLCLGIFYMFRPNISFVAPLQEKVVFGLFFLGAILCLSFSWLFHTVYCHSEGVSRLFSKLDYSGIALLIMGSFVPWLYYSFYCNPQPCFIYLIVICVLGIAAIIVSQWDMFATPQYRGVRAGVFLGLGLSGIIPTLHYVISEGFLKAATIGQIGWLMLMASLYITGAALYAARIPERFFPGKCDIWFHSHQLFHIFVVAGAFVHFHGVSNLQEFRFMIGGGCSEEDAL

SEQ ID NO: 1953 - protein, 292 aa, Homo sapiens
MKATVLMRQPGRVQEIVGALRKGGGDRLQVISDFDMTLSRFAYNGKRCPSSYNILDNSKIISEECRKELTALLHHYYPIEIDPHRTVKEKLPHMVEWWTKAHNLLCQQKIQKFQIAQVVRESNAMLREGYKTFFNTLYHNNIPLFIFSAGIGDILEEIIRQMKVFHPNIHIVSNYMDFNEDGFLQGFKGQLIHTYNKNSSACENSGYFQQLEGKTNVILLGDSIGDLTMADGVPGVQNILKIGFLNDKVEERRERYMDSYDIVLEKDETLDVVNGLLQHILCQGVQLEMQGP

SEQ ID NO: 1954 - protein, 153 aa, Homo sapiens
MEEDNWRWHFYDTVKGSDWLGDQDAIHYMTEQAPAAVVELENYGMPFSRTEDGKIYQRAFGGQSLKFGKGGQAHRCCCVADRTGHSLLHTLYGRSLRYDTSYFVEYFALDLLMENGECRGVIALCIEVDAAANSDPREISFFGFGGVSSSSNR

SEQ ID NO: 1955 - protein, 1158 aa, Homo sapiens [sequence omitted]

SEQ ID NO: 1956 - protein, 608 aa, Homo sapiens
MGSVTVRYFCYGCLFTSATWTVLLFVYFNFSEVTQPLKNVPVKGSGPHGPSPKKFYPRFTRGPSRVLEPQFKANKIDDVIDSRVEDPEEGHLKFSSELGMIFNERDQELRDLGYQKHAFNMLISDRLGYHRDVPDTRNAACKEKFYPPDLPAASVVICFYNEAFSALLRTVHSVIDRTPAHLLHEIILVDDDSDFDDLKGELDEYVQKYLPGKIKVIRNTKREGLIRGRMIGAAHATGEVLVFLDSHCEVNVMWLQPLLAAIREDRHTVVCPVIDIISADTLAYSSSPVVRGGFNWGLHFKWDLVPLSELGRAEGATAPIKSPTMAGGLFAMNRQYFHELGQYDSGMDIWGGENLEISFRIWMCGGKLFIIPCSRVGHIFRKRRPYGSPEGQDTMTHNSLRLAHVWLDEYKEQYFSLRPDLKTKSYGNISERVELRKKLGCKSFKWYLDNVYPEMQISGSHAKPQQPIFVNRGPKRPKVLQRGRLYHLQTNKCLVAQGRPSQKGGLVVLKACDYSDPNQIWIYNEEHELVLNSLLCLDMSETRSSDPPRLMKCHGSGGSQQWTFGKNNRLYQVSVGQCLRAVDPLGQKGSVAMAICDGSSSQQWHLEG

SEQ ID NO: 1957 - protein, 966 aa, Homo sapiens
MFLNFGQCGPPASLCQSISRPVPVRFHNYGDYFNVFFPLMVLNTFETVAQEWLNSPNRENFYQLQVRKFPADYIKYWEFAVYLEECELAKQLYPKENDLVFLAPERINEEKKDTERNDIQDLHEYHSGYVHKFRRTSVMRNGKTECYLSIQTQENFPANLNELVNCIVISSLVTTQRKLKAMSLLGSRNQLARAVLNPNPMDFCTKDLLTTTSERIIAYLRDFNEDQKKAIETAYAMVKHSPSVAKICLIHGPPGTGKSKTIVGLLYRLLTENQRKGHSDENSNAKIKQNRVLVCAPSNAAVDELMKKIILEFKEKCKDKKNPLGNCGDINLVRLGPEKSINSEVLKFSLDSQVNHRMKKELPSHVQAMHKRKEFLDYQLDELSRQRALCRGGREIQRQELDENISKVSKERQELASKIKEVQGRPQKTQSIIILESHIICCTLSTSGGLLLESAFRGQGGVPFSCVIVDEAGQSCEIETLTPLIHRCNKLILVGDPKQLPPTVISMKAQEYGYDQSMMARFCRLLEENVEHNMISRLPILQLTVQYRMHPDICLFPSNYVYNRNLKTNRQTEAIRCSSDWPFQPYLVFDVGDGSERRDNDSYINVQEIKLVMEIIKLIKDKRKDVSFRNIGIITHYKAQKTMIQKDLDKEFDRKGPAEVDTVDAFQGRQKDCVIVTCVRANSIQGSIGFLASLQRLNVTITRAKYSLFILGHLRTLMENQHWNQLIQDAQKRGAIIKTCDKNYRHDAVKILKLKPVLQRSLTHPPTIAPEGSRPQGGLPSSKLDSGFAKTSVAASLYHTPSDSKEITLTVTSKDPERPPVHDQLQDPRLLKRMGIEVKGGIFLWDPQPSSPQHPGATPPTGEPGFPVVHQDLSHIQQPAAVVAALSSHKPPVRGEPPAASPEASTCQSKCDDPEEELCHRREARAFSEGEQEKCGSETHHTRRNSRWDKRTLEQEDSSSKKRKLL

SEQ ID NO: 1958 - protein, 255 aa, Homo sapiens
MPREDRATWKSNYFLKIIQLLDDYPKCFIVGADNVGSKQMQQIRMSLRGKAVVLMGKNTMMRKAIRGHLENNPALEKLLPHIRGNVGFVFTKEDLTEIRDMLLANKVPAAARAGAIAPCEVTVPAQNTGLGPEKTSFFQALGITTKISRGTIEILGVRNVASVCLQIGYPTVASVPHSIINGYKRVLALSVETDYTFPLAEKVKAFLADPSAFVAAAPVAAATTAAPAAAAAPAKVEAKEESEESDEDMGFGLFD

SEQ ID NO: 1959 - protein, 230 aa, Homo sapiens
MNEPLDYLANASDFPDYAAAFGNCTDENIPLKMHYLPVIYGIIFLVGFPGNAVVISTYIFKMRPWKSSTIIMLNLACTDLLYLTSLPFLIHYYASGENWIFGDFMCKFIRFSFHFNLYSSILFLTCFSIFRYCVIIHPMSCFSIHKTRCAVVACAVVWIISLVAVIPMTFLITSTNRTNRSACLDLTSSDELNTIKWYNLILTATTLPPLGDSDTLLYHDYPHSDPWTAN

SEQ ID NO: 1960 - protein, 474 aa, Homo sapiens
MRLSKTLVDMDMADYSAALDPAYTTLEFENVQVLTMGNDTSPSEGTNLNAPNSLGVSALCAICGDRATGKHYGASSCDGCKGFFRRSVRKNHMYSCRFSRQCVVDKDKRNQCRYCRLKKCFRAGMKKEAVQNERDRISTRRSSYEDSSLPSINALLQAEVLSRQITSPVSGINGDIRAKKIASIADVCESMKEQLLVLVEWAKYIPAFCELPLDDQVALLRAHAGEHLLLGATKRSMVFKDVLLLGNDYIVPRHCPELAEMSRVSIRILDELVLPFQELHIDDNEYAYLKAIIFFDPDAKGLSDPGKIKRLRSQVQVSLEDYINDRQYDSRGRFGELLLLLPTLQSITWQMIEQIQFIKLFGMAKIDNLLQEMLLGGSPSDAPHAHHPLHPHLMQEHMGTNVIVANTMPTHLSNGQMCEWPRPRGQAATPETPQPSPPGGSGSEPYKLLPGAVATIVKPLSAIPQPTITKQEVI

SEQ ID NO: 1961 - protein, 869 aa, Homo sapiens
MEPETALWGPDLQGPEQSPNDAHRGAESENEEESPRQESSGEEIIMGDPAQSPESKDSTEMSLERSSQDPSVPQNPPTPLGHSNPLDHQIPLDPPAPEVVPTPSDWTKACEASWQWGALTTWNSPPVVPANEPSLRELVQGRPAGAEKPYICNECGKSFSQWSKLLRHQRIHTGERPNTCSECGKSFTQSSHLVQHQRTHTGEKPYKCPDCGKCFSWSSNLVQHQRTHTGEEPYKCTECEIAFTQSTNLIKHQRSHTGEKPYKCGECRRAFYRSSDLIQHQATHTGEKPYKCPECGKRFGQNHNLLKHQKIHAGEKPYRCTECGKSFIQSSELTQHQRTHTGEKPYECLECGKSFGHSSTLIKHQRTHLREDPFKCPVCGKTFTLSATLLRHQRTHTGERPYKCPECGKSFSVSSNLINHQRIHRGERPYICADCGKSFIMSSTLIRHQRIHTGEKPYKCSDCGKSFIRSSHLIQHRRTHTGEKPYKCPECGKSFSQSSNLITHVRTHMDENLFVCSDCGKAFLEAHELEQHRVIHERGKTPARRAQGDSLLGLGDPSLLTPPPGAKPHKCLVCGKGFNDEGIFMQHQRIHIGENPYKNADGLIAHAAPKPPQLRSPRLPFRGNSYPGAAEGRAEAPGQPLKPPEGQEGFSQRRGLLSSKTYICSHCGESFLDRSVLLQHQLTHGNEKPFLFPDYRIGLGEGAGPSPFLSGKPFKCPECKQSFGLSSELLLHQKVHAGGKSSQKSPELGKSSSVLLEHLRSPLGARPYRCSDCRASFLDRVALTRHQETHTQEKPPNPEDPPPEAVTLSTDQEGEGETPTPTESSSHGEGQNPKTLVEEKPYLCPECGAGFTEVAALLLHRSCHPGVSL

SEQ ID NO: 1962 - protein, 869 aa, Homo sapiens
MQEINQNLAEEAGLNITHICLPPDSSEAEIIDEILKINEDTRVHGLALQISENLFSNKVLNALKPEKDVDGVTDINLGKLVRGDAHECFVSPVAKAVIELLEKSVGVNLDGKKILVVGAHGSLEAALQCLFQRKGSMTMSIQWKTRQLQSKLHEADIVVLGSPKPEEIPLTWIQPGTTVLNCSHDFLSGKVGCGSPRIHFGGLIEEDDVILLAAALRIQNMVSSGRRWLREQQHRRWRLHCLKLQPLSPVPSDIEISRGQTPKAVDVLAKEIGLLADEIEIYGKSKAKVRLSVLERLKDQADGKYVLVAGITPTPLGEGKSTVTIGLVQALTAHLNVNSFACLRQPSQGPTFGVKGGAAGGGYAQVIPMEEFNLHLTGDIHAITAANNLLAAAIDTRILHENTQTDKALYNRLVPLVNGVREFSEIQLARLKKLGINKTDPSTLTEEEVSKFARLDIDPSTITWQRVLDTNDRFLRKITIGQGNTEKGHYRQAQFDIAVASEIMAVLALTDSLADMKARLGRMVVASDKSGQPVTADDLGVTGALTVLMKDAIKPNLMQTLEGTPVFVHAGPFANIAHGNSSVLADKIALKLVGEEGFVVTEAGFGADIGMEKFFNIKCRASGLVPNVVVLVATVRALKMHGGGPSVTAGVPLKKEYTEENIQLVADGCCNLQKQIQITQLFGVPVVVALNVFKTDTRAEIDLVCELAKRAGAFDAVPCYHWSVGGKGSVDLARAVREAASKRSRFQFLYDVQVPIVDKIRTIAQAVYGAKDIELSPEAQAKIDRYTQQGFGNLPICMAKTHLSLSHQPDKKGVPRDFILPISDVRASIGAGFIYPLVGTMSTMPGLPTRPCFYDIDLDTETEQVKGLF

SEQ ID NO: 1963 - protein, 48 aa, Homo sapiens
MSRKPRASSPLSNNHPPTPKRRGSGRFPRQPGREKGPIKEVPGTKGSP

SEQ ID NO: 1964 - protein, 60 aa, Homo sapiens
MSRKPRASSPLSNNHPPTPKRRGSGRHPLIPGPEALSKFPRQPGREKGPIKEVPGTKGSP

SEQ ID NO: 1965 - protein, 502 aa, Homo sapiens
MCRILNDEAAWNELARACLHHMEVEFAIRVYRRIGNVGIVMSLEQIKGIEDYNLLAGHLAMFTNDYNLAQDLYLASSCPIAALEMRRDLQHWDSALQLAKHLAPDQIPFISKEYAIQLEFAGDYVNALAHYEKGITGDNKEHDEACLAGVAQMSIRMGDIRRGVNQALKHPSRVLKRDCGAILENMKQFSEAAQLYEKGLYYDKAASVYIRSKNWAKVGDLLPHVSSPKIHLQYAKAKEADGRYKEAVVAYENAKQWQSVIRIYLDHLNNPEKAVNIVRETQSLDGAKMVARFFLQLGDYGSAIQFLVMSKCNNEAFTLAQQHNKMEIYADIIGSEDTTNEDYQSIALYFEGEKRYLQAGKFFLLCGQYSRALKHFLKCPSSEDNVAIEMAIETVGQAKDELLTNQLIDHLLGENDSMPKDAKYLFRLYMALKQYREAAQTAIIIAREEQSAGNYRNAHDVLFSMYAELKSQKIKIPSEMATNLMILHSYILVRFMLKMEIT

SEQ ID NO: 1966 - protein, 323 aa, Homo sapiens
MPGTYAPSTTLSSPSTQGLQEQARALMRDFPLVDGHNDLPLVLRQVYQKGLQDVNLRNFSYGQTSLDRLRDGLVGAQFWSAYVPCQTQDRDALRLTLEQIDLIRRMCASYSELELVTSAKALNDTQKLACLIGVEGGHSLDNSLSILRTFYMLGVRYLTLTHTCNTPWAESSAKGVHSFYNNISGLTDFGEKVVAEMNRLGMMVDLSHVSDAVARRALEVSQAPVIFSHSAARGVCNSARNVPDDILQLLKKNGGVVMVSLSMGVIQCNPSANVSTVADHFDHIKAVIGSKFIGIGGDYDGAGKYRKKTKCKAPWRTSSRMSS

SEQ ID NO: 1967 - protein, 519 aa, Homo sapiens
MAEDEPSGALLKPLVFRVDETTPAVVQSVLLERGWNKFDKQEQNAEDWNLYWRTSSFRMTEHNSVKPWQQLNHHPGTTKLTRKDCLAKHLKHMRRMYGTSLYQFIPLTFVMPNDYTKFVAEYFQERQMLGTKHSYWICKPAELSRGRGILIFSDFKDFIFDDMYIVQKYISNPLLIGRYKCDLRIYVCVTGFKPLTIYVYQEGLVRFATEKFDLSNLQNNYAHLTNSSINKSGASYEKIKEVIGHGCKWTLSRFFSYLRSWDVDDLLLWKKIHRMVILTILAIAPSVPFAANCFELFGFDILIDDNLKPWLLEVNYSPALTLDCSTDVLVKRKLVHDIIDLIYLNGLRNEGREASNATHGNSNIDAAKSDRGGLDAPDCLPYDSLSFTSRMYNEDDSVVEKAVSVRPEAAPASQLEGEMSGQDFHLSTREMPQSKPKLRSRHTPHKTLMPYASLFQSHSCKTKTSPCVLSDRGKAPDPQAGNFVLVFPFNEATLGASRNGLNVKRIIQELQKLMNKQHS

SEQ ID NO: 1968 - protein, 240 aa, Homo sapiens [sequence omitted]

SEQ ID NO: 1969 - DNA, 324 bp, Homo sapiens
ggatatcagagcacaggatcgaggcctcgggaaattacctggcacagcgactgacatcatccttcctgaggggactgagctcttggaaatcaaaccctctcatgttgtgtggatggacgattctcctcacacttacgatggtacaaggggaaccatgaggcccccaaggggatccctgggtgtccacacgaactcctcctaccctcattgggggacggtcgccaagcctcctgctggggattaggatctattacctgcgcctggacaggaggggactcctcttttcacccgctagtctctgtgcacatactgccctattgaccg

SEQ ID NO: 1970 - DNA, 685 bp, Homo sapiens
  misc_feature (1)...(685): n = a,t,c or g
acgccaagcttggcacgagggaagaacttggcaaggatctctttgattgtactttgtatgttctattgaaatatgatgattttaatgctgacaagcacctggctcttgaagaattttatagagcattccaagtgatccagttgagtctgccagaagatcagaaactaagcatcactgcagcaactgtgggacaaagtgctgttctgagctgtgccattcaaggaaccctgagacctcccattatctggaaaaggaacaatattattctaaataatttagatttggaagacatcaatgactttggagatgatgggtccttgtatattactaaggttaccacaactcacgttggcaattacacctgctatgcagatggctatgaacaagtctatcagactcacatcttccaagtgaatgttcctccagtcatccgggtgtatccagagagtcaggctaggagagccgggggtaactgccagtcttagggtgccatgcaggaggggcataccaaagccttcagcttgggctgggtttgaaggatgggaattggatatttacacccaaagcttttcccaaacaacttcacggttttcaaggcaatggggcagttgagggtttcacattaaggcattgttncgctatggaggttacngggggcttacanttgttttcgcaaggattgagt

SEQ ID NO: 1971 - DNA, 482 bp, Homo sapiens
gtttctattccgccttccttgtagcagataagggtattgtcacttcaaaacacaacaacgatacccagcacatctgggagtctgactccaatgaattttctgtaattgctgacccaagaggaaacactctaggacggggaacgacaattacgtgagtatgaccaattccttataagaattaatagtcatggtgaggatcttgactctccagttctattctctgagcaaatgacttattctgggccttaattttcctgccttataaaatgaggaaacagaactgttgtcacttgaagaaatgtttgaggacctgcaaagggccaggcacaaaggtttgtgattgctgttgtacatggagggtataaagtaggaaatagcagcagcttccccaagggagaaggcttcttgggtacccacagaggaggcactgctttgtcagtttcccaggttagaagagtaatttgtctgtggagcatcctgat

SEQ ID NO: 1972 - DNA, 493 bp, Homo sapiens
agaaccaaaacagatgtgtacatcctgaatttggctgtagcagatttactccttctattcactctgcctttttgggctgttaatgcagttcatgggtgggttttagggaaaataatgtgcaaaataacttcagccttgtacacactaaactttgtctctggaatgcagtttctggcttgtatcagcatagacagatatgtggcagtaactaaagtccccagccaatcaggagtgggaaaaccatgctggatcatctgtttctgtgtctggatggctgccatcttgctgagcataccccagctggttttttatacagtaaatgacaatgctaggtgcattcccattttcccccgctacctaggaacatcaatgaaagcattgattcaaatgctagagatctgcattggatttgtagtaccctttcttattatgggggtgtgctactttatcacagcaaggacactcatgaagatgccaaacattaaaatatctc

SEQ ID NO: 1973 - DNA, 1284 bp, Homo sapiens
catcgcatgcggtcccctgcggtaccggaccggaaatcccgggtcgagccacgcgtccgcccacgcgtccgtaaaaataataatgataattctcaggatggttctgtgaataactttcagggtcacactggaaacaagcgacgctcgcggacgccctcgagggctcaccttctgcagatcacgaagacacagaccagggccagcagcgtccccagcgcgatcagcagcgacgtccgccaggccacctgagtaccaggaccgggagcgacttccggacctcccagccccagtctggaaccctaagggagcggaaagaccaccagggatccctgtctgcctggtgctcgggacacggggagcgccagggacttccactgtgcccagcaggccggcagagaccgggtttcaccgtgttggccgggatggtctcgatctcctgactttgtgatccgcccgcctcggcctcccaaagtgctgggattacaggcgtgagccaccgcgcctggcccacctgcccattttttaaaaactttattcttcctggtatcaaggggagaaagaaaaaaattttttaaaatatttaaaactttattttgaaataatttcaaaatcacagcagtttgaagggtacaacaaagaacattttgccacattttctctttcattcgttccctcctcttctccctcacccctgtttcttcctatcctctctgaaccatgaaccatttgaggattatttgtatacatcatgctcgtttatccgtaagatgttttagtgaacatttcccaagaacagggacagcctctcacatgcccatggtacagttctcaaattcaggaaatgtgtaatattctctgatcagcccaggagttgctaatttgtagttcctgtttcaaatttgccaactgtcccaataatgattttgaaagccgttgtttttctggtccaggatccaatccaggatcaagcgctgcctttagttgtcctctctgcagcctcctttcgtttggagcaggtcctcagcctttctgtctttcatgacattgatgtttgtgaagagtacagtccagtttctgttgtagaacgtccttgaagttggtcccggaatatttgtttaaagtgagttgggaaaccacattcacatgtcttttggttatgtgtgtatttgtcaaacagccagccttgtgctgcgtgctgtgatggggagcattactcaacagagcctggccctgaccttggggatgtagtttgggtttgtggggaaagcagctaccgccacgaaa

SEQ ID NO: 1974 - DNA, 1345 bp, Homo sapiens
gcggccgccccggcggctcctggaaccccggttcgcggcgatgccagccaccccagcgaagccgccgcagttcagtgcttggataatttgaaagtacaatagttggtttccctgtccacccgccccacttcgcttgccatcacagcacgcctatcggatgtgagaggagaagtcccgctgctcgggcactgtctatatacgcctaacacctacatatattttaaaaacattaaatataattaacaatcaaaagaaagaggagaaaggaagggaagcattactgggttactatgcacttgcgactgatttcttggctttttatcattttgaactttatggaatacatcggcagccaaaacgcctcccggggaaggcgccagcgaagaatgcatcctaacgttagtcaaggctgccaaggaggctgtgcaacatgctcagattacaatggatgtttgtcatgtaagcccagactattttttgctctggaaagaattggcatgaagcagattggagtatgtctcatcttcatgtccaagtggatattatggaactcgatatccagatataaataatgtgtacaaaatgcaaagctgactgtgatacctgtttcaacaaaaatttctgcacaaaatgtaaaagtggattttacttacaccttggaaagtgccttgacaattgcccagaagggttggaagccaacaaccatactatggagtgtgtcagtattgtgcactgtgaggtcagtgaatggaatccttggagtccatgcacgaagaagggaaaaacatgtggcttcaaaagagggactgaaacacgggtccgagaaataatacagcatccttcagcaaagggtaacctatgtcccccaacaaatgagacaagaaagtgtacagtgcaaaggaagaagtgtcagaagggagaacgaggaaaaaaaggaagggagaggaaaagaaaaaaacctaataaaggagaaagtaaagaagcaatacctgacagcaaaagtctggaatccagcaaagaaatcccagagcaacgagaaaacaaacagcagcagaagaagcgaaaagtccaagataaacagaaatcggtatcagtcagcactgtacactagagggttccatgagattattgtagactcatgatgctgctatctcaaccagatgcccaggacaggtgctctagccattaggaccacaaatggacatgtcagttattgctctgtctaaacaacattcccagtagttgctatattcttcatacaagcatagttaacaacaaagagccaaaagatcaaagaagggatactttcagatggttgtcttgtgtgcttctctgcatttttaaa

SEQ ID NO: 1975 - DNA, 426 bp, Homo sapiens
  misc_feature (1)...(426): n = a,t,c or g
ctgagcatgctgagcaccatcagcaccgagcaccgcctgtccgtcctgtggcccatctggtactgctgccactgccccacacacctgtcagcggtcatgtgtgtcctgctctgggccctgtccctgttgcagagcatcctggagtggatgttctgtagcttcctgtttagtgatgttgactctgataattggtgtcaaatattagatttcctcactgctgtgtggctgatttttttaatctgtggttctctgtgggttcaccctggtcctgcttgtcaggatcatatgtggatcccagaagatgccgctgaccaggctgtatgtgaccatcctgctcacagggctggtcttcctcttctgcagcctgcccctcagcattcagtgattcctattatactggatcgagaaggatttggatgacttacn

SEQ ID NO: 1976 - DNA, 1353 bp, Homo sapiens
ttttttttttttggagacggagttttgctcttttgcccaggctggagtgaagtggcgtgatctcagctcactgcaacctctgcccccctgggctcaagtgattctcctgcctcagtctcccaagtagctgggattacaggcgcctgccaccacgcccggctaatttttgtacttttagtagagatggggtttcgctatgttgagactggtctcaaactcctgacctcaggtgatccacctgtctcagtctcccaaagtgctgggattacaggcgtgagtcactgcgcccagccagcaaatcttatgtagaatttttaaggagtggtgagtttggattgccagagagaaaagataaccattcattcattcatcaaagatttattgagtgcttactgtgtgccaggcactgttctaaagacacagcagcaaacaaaactgttatagaacaggataaggcaggtcatctcccagatacgacactttgataggaacacaaaatacaaataggagagtagaaagagatcgaaatacaaaggggaaagagctgatattggggcttatattaatattgaaaggccttacatgctagatattctaaatggggagaaacatgctgggaaagatacttgggcatgaatgaacttatgtcccctatgttcagaacagactgctttcccttctctgttggttggctcttctagcctcctaggaacttttataatcaccagtatgatccaatataaatactgcacatatgaaggttcccagttgaggagtttggaagcaaaaagggaaagaatggctggcaaaggcttcaatcttctgtctccttttatcttcccaatggctagtagaaaatactatcatcaatctcttccttgcaacaatctcccatttgatatttgtctgcattgtgactcaattcctgaaggttctgttcttcattcctttctggtagaatcacagttctaagactttggggcagatttcttaatctgaacctcaggtgtcctcatctggtaaagttgttccgaggcttaagtgcgataacccctgtaaagcgctggagaacggcaaaagctctacaagccggcagggcggttttaaatgcacgtgtatccatatactaggtctcattgatacattccgttgtttggagtttagacactggctgtaagacgtttttcttttctcctaagcaggacccgtatttgtttacctccaacgtagactaaatgcctgtgggctggtagctataagacgacccctcggccccacaacctctaagttcacttcacctccgcggctttgcaaaagcgctacacgcacgcgcaagaagcaagaggactgcaa

SEQ ID NO: 1977 - DNA, 3418 bp, Homo sapiens
ttcccatcccacctcccgagccttcctcttcccgcagcacgcccggcccggcccggccgtggccctcctcagtgccggccgccatggcagaggcgtccggcgcggggaaaatctagcccggggatttcatgcggcctagctcggttccgcctcctcctcgcgcggccccagcggctgcccgcaccccagccccactccgggcctccgtgtctctcctgtgatcgcactgacacggccggggggttagaatggaacaaactgaaggcccgatgagagaaagggaaagttaaggatgctggagcagaacaatggatttctctttctctttcatgcaagggatcatgggaaacacaattcagcaaccacctcaactcattgactccgccaacatccgtcaggaggatgcctttgataacaacagtgacattgctgaagatggtggccagacaccatatgaagctactttgcagcaaggctttcagtacccagctacaacagaagatcttcctccactcacaaatgggtatccatcatcaatcagtgtgtatgaaactcaaaccaaataccagtcatataatcagtatcctaatgggtcagccaatggctttggtgcagttagaaactttagccccactgactattatcattcagaaattccaaacacaagaccacatgaaattctggaaaaaccttcccctccacagccaccacctcactccttcggtaccacaaactgtgattccaaagaagactggctcacctgaaattaaactaaaaataaccaaaactatccagaatggcagggaattgtttgagtcttccctttgtggagaccttttaaatgaagtacaggcaagtgagcacatgaaatcaaagcatcgaaagcagaaaagaaaagaggaaaaaaagcaacaagcatgactcatcaagatctgaagagcgcaagtcacacaaaatccccaaattagaaccagaggaacaaaatagaccaaatgagagggttgacactgtatcagaaaaaccaagggaagaaccagtactaaaagagggaagccccagttcagccaatactatcttctgttccaacaacggaagtgtccactggtgttaagtttcaggttggcgatcttgtgtggtccaaggtgggaacctatccttggtggccttgtatggtttcaagtgatccccagcttgaggttcatactaaaattaacacaagaggtgcccgagaatatcatgtccagttttttagcaaccagccagagagggcgtgggttcatgaaaaacgggtacgagagtataaaggtcataaacagtatgaagaattactggctgaggcaaccaaacaagccagcaatcactctgagaaacaaaagattcggaaaccccgacctcagagagaacgtgctcagtgggatattggcattgcccatgcagagaaagcattgaaaatgactcgagaagaaagaatagaacagtatacttttatttacattgataaacagcctgaagaggctttatcccaagcaaaaaagagtgttgcctccaaaaccgaagttaaaaaaacccgacgaccaagatctgtgctgaatactcagccagaacagaccaatgcaggggaggtggcctcctcactctcaagtactgaaattcggagacatagccagaggcggcacacaagtgcggaagaggaagagccaccgcctgttaaaatagcctggaaaactgcggcagcaaggaaatccttaccagcttccattacgatgcacaaagggagcctggatttgcagaagtgtaacatgtctccagttgtgaaaattgaacaagtgtttgctcttcagaatgctacaggggatgggaaatttatcgatcaatttgtttattcaacaaagggaattggtaacaaaacagaaataagtgtcagggggcaagacaggcttataatttctacaccaaaccagagaaatgaaaagccaacgcagagtgtatcatctcctgaagcaacatctggttctacaggctcagtagaaaagaagcaacagagaagatcaattagaactcgttctgaatcagagaaatccactgaggttgtgccaaagaagaagatcaaaaaggagcaggttgaaacagttcctcaggctacagtgaagactggattacagaaagggtcggcggaccggggagtgcagggctctgtcagattcagtgacagctccgtctccgcagcgattgaggaaactgtggactgagattcctgtacaatttcatcccagaaactccagacttgtagtctccatgcaagatttctttgtcggcggcttgataaacagtttctttgttttcgattttgatttcgccaatcatcattattggcattttcctgcctggtttcttcttcaagactctgaacaattgctttaacagtcaaatgatttttttttttcggtttgagctggatgggtacagcttaaatcatgggtccagcctaaaaaccaccatttaacttacactgatcaatttcaacatggactgtttttggttttttgtttttaaataaagcatcattaatgcacatctgcaggggtttgccaaacagcccaaactgtatacattacaatcattaaaagttcttattttttttaatattagtgccgttatcatggagaacagcatgacagctgtctttggcagtctgtcatttttctagcattttcagaaactcatcggaaatggcggtacctgtgtttcccttcgaaagcctctcagtacagcactcctgttcctctgttaaaactccttgttaatccagtgatcttttaggccaaggaaatattttgtgatggtgttctgggtccatacaccagcaatgaaggagatagatttgtgtacttgtgttttttaatcagcattaacatgggcaggcaccctcatttatagatgtcaggaaacattcagtgaaaaacttgtagaatgggatgtgataacgaggttccagtaatctgagcagtctaacgaggcccacctcctccaccacagaacgtggctatgttccaagtgctactctcactcagcctgttgcggatcttcatggcctcaggagacttgtttctccatgggctcttctggactgcacacttccaccatagcttgctgggttgatctagatgtctgtttgttgtatggaaattttgggggaaaaaatccaaaacacaaactgtgggttgaaatattaaccgtctccttggttccttggtattcaccgtgcctgatctgcacatttcatcgtggctgtttctgtatagcctatactgcattagcccaagagattgttgctttgtaactttttgcactattgttttggctggatttgtattacacacagttttaaaaaaaacaattccccactataaaaaaaaaa

SEQ ID NO: 1978 - DNA, 2406 bp, Homo sapiens
  misc_feature (1)...(2406): n = a,t,c or g
ttttttttttttcatttagcaaagtttttattcaaaagcttctcaccaccatctagttatcagaaagaatggatatcaccttttcctgcccacccaatccccagttccacaggcagaagttaaacccatttggctagagttccccctaatgattatgactgagaccatgataagattttggttgttctcacccaactgtctctaagcctctactcaaacctgactcaagcagagatgtgcacaccccacagttcagaacaggaaggaatcatgtcagatctgatcaacctcccattcttgggctattagaggcacaagaaattaccttgaaaaaatggaattcagtgactgccatctaggaaagacagtgatactgtccagcagcatgcagttccgagagctcaactcttaggccaccctccctccactctactctaggaacaaggagcattaggtctgttttctctccatacacctcaatcgctcgtcctctcgtcttattaaaacacagacacagaaccaaactttttgacagttaaagacaaacaattacatctaattaaaatgctaagagatcctgagctgttagagatgaggagagtagatagtatgacctgatcttcccccctcttttttttcctttaacagtattctgtttcagcataaagcacactttctgaagaggttcctggtggagactggaaaatcttggacttgtgtcctgtggcaaacaacacaagtccccttgcataactttggcttcagtccctggatctgtcctttgcaagctacgtcaggttccatggaaggaaggaaagagctggagggcagtatcactcagccaaagctcccatggggtcccatgctggcaggacaaatgggttccctgctcctaacacagctagcacctcttccagggacatgcttcctgtcccaccaaccacttcgtagacatactcaagagacccaactcaatctgtcatgcacaggtaacctttggtggccatggtcttcaccccattgaaattctccaactctcccattttgtgaaaagcaccatccctgaatcatcccggctctgagcacagcagtgaaggtcatggtgtgggtcataacgtgactcaccaaaagtcacgcctctccgctttattcatgttcttcaaggagacaccaaacactaactcatggtcatagagattcatgtcactgagggcccagcttgctattgaaagtgttttccaacatcacagccaaaccacacagccgtctccatctttgatggaggcagcaaccatctttttcaggaagtcaatgggctggttgttgtaaaagagtttttctcccctccaaaccatattgccttaagtattcccactgtgtaaagtttgttgtacttgtgctggggcctagggtcattcactaaacaaatcttatcttccatattgaagagtggcttgacatgttncccctgtwaaactccaagggtgttcatggggccaattttctkatwawttttatctttgtctcgatattcccaggtgaatgtctctggtggattacccaaacagatgcacaccactcggaatatctcctccatcatgacgtcctgtgtggccgagatttctcctttcgttgctccactgtgtaccaggttccgcagtcgtatacagaattctctcatcttgtgattcagaatatcattcatccttctggttgcctctgttgtataagattcagggaagcatttcttagggataacaccatatttttcaacaatattaacaagcatatcccattggccaccatcatttgcagggttcataagcaaaaactgcaccagcctcccatcctcaggctcctttctctgggctgtgtccacaaaagcactcaagaagaaataacagcgttcaaccttgtcccaaaaaaacaggtaagattggctaaactcaaattcttcaatatttaactttttcatgaatggaagcctcataacattcagacaagaaaagatccagcatcgccctgagctcttctggttggtgattggcttgccctcctggggcacggcgtgctggaacacatgctgcgcgcgctgcaccgtggcccgcttcagacagatgtccagcaggtcgtgggtggtcccgacattctgggcaagtacgaactgggggtcggaattcagtttctgtatcagagcagctaccttctccgaattcagtcccgagctgctcatggcgcccacgctgcccggcggggtaacggtagcttccagggtccttgggcgagcgccgggattgcgctgcggctcgctgcctagggggcccgacctgtctctcgcacccggagcgccggaaaaaggaaaccggctcggcggcggcggcggcggcggcggcggggaggctgagg

SEQ ID NO: 1979 - DNA, 1781 bp, Homo sapiens
tccggtcgacgatttcgtcgccattttcgagtgatgcctgatctcatcaatctagcgggagagacaggataacctgtccgagagtatagcgccactatgactccgccggaaaaattactttaaaaatcgccaaaaattacttggagcaaagggcagtcggcggagcttcgccaaggctggcgcagtcggttttgacctgtagcagagaaccaattctggagaacagcctcacttctttgattgaatacttacataatgcattggaacatgacatgagattaaggtttaataatgatagaatgaagaccacaataaaagagacctctacttagctcagcaattcttaccttgtttttcccttgatgtgaagtcttacctatttgatgaagatgtcttttgaaaggtgtactgcaaggaacaaaatgtttgtaaattctccttttaccaaggtggataattactgtaccttcctccatggaaaaagttttatttaaagtgttatttctcattgaatactatcaaaaaggaaaaaaaaatgacctaaacttttgagatagatttggctctagtaagtatttagttatatcacttgcatatctgggagaagaaataagagactatcatcagtacattcccatctactaaaaaaatttattttacacatgtcaagggattacttataacttccattttattactaatagcttgaacccttttaatgaagacctaactcctccaccagaaatttaagtttatgttcttactttgtttacttataaaatacatctcaggtatttcggatgtcttttttttttctaagcctatatgaaatgaaaaatatattggcaaagtaaatgtttaaaccttttacgttaaaattactttgaaagatgaaaagttagtgctgtttttgtcacgttatactgaaattaaatgtttataatttatattttgggtttatgtataaatcatggaatttatgcaaaaatatgagtagtacagattctcctctaattctgtaggactttgaataatgtgatatttttcttataattggacccttgtgttttgaagaaatgccaactgcttgaagaatctccttgttatttgtattatttgctatagggttagatgttgagaaattctgctgacaaaaaattttaagccagttttacactaaatgttcctcagtctgattaatttgttattggatgtattctgtatctttcttttgtaatttgtgacttttatccacttagcacgaatgattctattaaagaaaatcattaggaagtggtagaaactttaaatcgccccagagtttgcctgtttccatattttattatcttataatcttcgggagtgcttacacttatggagctaacattttcagagatacagcttcttatagtaacactaaaactttcttcctctttggactgaatacctataattataactatatggtagtttaagtttccttgtgattagtcaaaaataccattttagtatgaagcaatgaagtctattatttgttgtcccataattgagaaagcttaaatacaccttttattaagagtttgtaaattctagcttagtctacacagatttttatatcaatttgtttatatttttattaatgtcatttctggaagtgtgaaaatgttaatgttcaacaagcaacattaaaaatagatttgaaacatttatatatagagaggtacacatttatttactgtttaggtactgaagattatcacttaataaaaaatatatatccc

SEQ ID NO: 1980 - DNA, 2454 bp, Homo sapiens
  misc_feature (1)...(2454): n = a,t,c or g
gttttgatacttatagaggactcccttcaatttccaatggaaattatagccagctgcagttccaagctagagagtattctggagcaccttattcccaaaggatctcagcaatcaccacagtatctgttgcttggaaggtactcagtgggaagataggagaaggtgcagagggcaactgtaaatgtgtcataagtgaaggggcctgggctgtttgccctacccagccctgtggcaaggctaaaccagacaaacacttgaaggatctactgtctaaattgctgaactcaggctattttgaaagtatcccagttcccaaaaatgccaaggaaaaggaagtaccactggaggaagaaatgctaatacaatcagagaaaaaaacacaattatcgaagactgaatctgtcaaagagtcagagtctctaatggaatttgcccagccagagatacaaccacaagagtttcttaacagacgctatatgacagaagtagattattcaaacaaacaaggcgaagagcaaccttgggaagcagattatgctagaaaaccaaatctcccaaaacgttgggatatgcttactgaaccagatggtcaagagaagaaacaggagtcctttaagtcctgggaggcttctggtaagcaccaggaggtatccaagcctgcagtttccttagaacagaggaaacaagacacctcaaaactcaggtctactctgccggaagagcagaagaagcaggagatctccaaatccaagccatctcctagccagtggaagcaagatacacctaaatccaaagcagggtatgttcaagaggaacataagaaacaggagacaccaaagctgtggccagttcagctgcagaaagaacaagatccaaagaagcaaactccaaagtcttggacaccttccatgcagagcgaacagaacaccaccaagtcatggaccactcccatgtgtgaagaacaggattcaaaacagccagagactccaaaatcctgggaaaacaatgttgagagtcaaaaacactctttaacatcacagtcacagatttctccaaagtcctggggagtagctacagcaagcctcataccaaatgaccagctgctgcccaggaagttgaacacagaacccaaagatgtgcctaagcctgtgcatcagcctgaggtttccttccgttanaannccccttccgaaggatccagtattgaggaaagaaaaactgcaggatctgatgactcagattcaaggaacttgtaactttatgcaagagtctgttcttgactttgacaaaccttcaagtgcaattccaacgtcacaaccgccttcagctactccagggtagccccgtaggcatctaaaggaacaaaatctgtccagtcaaagtgattttctttcaaggagccgttacaggtatttaacgttaatgcacctctgcctccacgaaaagaacaagaaataaaagaatccccttattcacctggctacaatcaaagttttaccacagcaagtacacaaacaccaccccagtgccaactgccatctatacatgtagaacaaactgtccattctcaagagactgcaaattatcatcctgatggaactattcaagtaagcaatggtagccttgccttttacccagcacagacgaatgtatttcccagacctactcagccatttgtcaatagccggggatctgttagaggatgtactcgtggtgggagattaataaccaattcctatcggtcccctggtggttataaaggttttgatacttatagaggactcccttcaatttccaatggaaattatagccagctgcagttccaagctagagagtattctggagcaccttattcccaaagggataatttccagcagtgttataagcgaggagggacatctggtggtccacgagcaaattcgagagcagggtggagtgattcttctcaggtgagcagcccagaaagagacaacgaaacctttaacagtggtgactctggacaaggagactcccgtagcatgacccctgtggatgtgccagtgacaaatccagcagccaccatactgccagtacacgtctaccctctgcctcagcagatgcgagttgccttctcagcagccagaacctctaatctggcccctggaactttagaccaacctattgtgtttgatcttcttctgaacaacttaggagaaacttttgatcttcagcttggtagatttaattgcccagtgaatggcacttacgttttcatttttcacatgctaaagctggcagtgaatgtgccactgtatgtcaacctcatgaagaatgaagaggtcttggtatcagcctatgccaatgatggtgctccagaccatgaaactgctagcaatcatgcaattcttcagctcttccagggagaccagatatggttacgtctgcacaggggagcaatttatggaagtagctgga

SEQ ID NO: 1981 - DNA, 2454 bp, Homo sapiens; identical to SEQ ID NO: 1980
  misc_feature (1)...(2454): n = a,t,c or g

SEQ ID NO: 1982 - DNA, 2194 bp, Homo sapiens
  misc_feature (1)...(2194): n = a,t,c or g
atattattcttgtaagaagtaggaaaatatttcttttatttattaatccaatcaaaaatgatgagtgctaaactaaaattcccaaccaaaattccaaagatgagcaaaacgaatgcctgtggaaataagaaaaaagataaaagataagaaagataaaagaaaaaagataaaaaaatacaattggattatttgttaaatctctactctctgcaataatgtattctatattttaaaatatattgactttcttgatgcaggtaaaataatataaactgacaaactatttcttaaaatagaagtcttgaaagaaagaaacaaaaacaacctaccccaagctttttccatgacagaaaatcctctctgctaagtttaagataaaatagtcctgggaatataaaaatcaaacatgttgatgtactggcaccaactacaccaaatacatttctaatgtcaggaacatatattgcaagtaaaacgatgataatattgagtgctagagtgatcaaaaaatggcgaatccatgagaatggaaaattggagaaaaacatcattgttacagcttttctggcagggaagtggattaaagggactgtccaaaagcacagcaaatagtatgcataacttcacaggtcatgaccacaacatcatgtgattaaggtatttactattaaccttttagtaattctgactccactttgtctttaattctgtgacaggtcacttcacctctctgggctttagttgttcatcataaaaagtgaggtacccaaagagtgcagatataaaataaatgagaaaacttaaagcaattgctgtattggtaacattctgcattcttttctttgaaggactttgaagttcacagtatatgggcaatattgaggtatggcagagaaatgaaaaagccatggttggtaaggcataagcactctctttggagaaatgaaagagctttggcttacaatcatctgtaacatttgaaatctggaagcctttctctacataatttaatgtcagaggacaagggatggaccattttttaattattaccacaagagcaaagaacatcataaagaaaaatgataaactacttgtgtagccaagaaagcctattttgggaagaagtgcaagagggaacacaatgccaacacatatgattattagtagtgtttgtccatcaagataccaatatctactatagtctccagtcaaaaattctgcaatagcagcaggaagctctgttttaataattaaaagataagatgacatagctccaatattctgaattattatggtgcctgccaccaccaactttccaggtaatccaaatgcaaagagtccaagatcttcataagatgttacagctccacagagaattttacaaagattgaaggaattcaatcaacggaagacaggtgagtcaatgtgcaggcagaaccatgaagtagttagttcatgggcccaagtaggctgtctgaatacacatactaagcagaagatggactgagtaagaagccaggagagcaactgtcagcagcaagaagctaaatccaaagacaccggtattagccataacataagctaagccaaggatgccacttcccatgatggcattcatcaaattaaacactgataaaccaaatgaaacacctggggatcgctgtctgtgaagttcagcagtgagtacataatcctagggccgctcatcccatcatgttcgcagcttccactcaacgctgcatctcttccacccgacgcttttcatcttttctttctagagtatgctaggctgctatcacgttcataactgcgccaatctcatctgaatctcggcggctgccttcagaccccatcccccagggttcaggctccagcatctcccctgtcccggtgcggtcctccttttctgggtcttatttggcaggcacttgagggaagccggagggcgtcagcgcggggaagcgaacacagcccacttacgttgcttagcaacggactcaactcttcggcctccgcttcttcaggctgctggacagagacataccagccccgctcagcgttgaagctcccccaggacgcctccatgctgctatccagctgactaccagttccatgtacgagcctcgtacccgtgccctgcgacttccgccgctctcgccgatagtctcaagtttctcatttnnnngacgcacct

SEQ ID NO: 1983 - DNA, 3507 bp, Homo sapiens
caagtgggattgtggtcagagctttgtggagggaaaaaaaacctggtgggggcaggagagtaaaaagaagaaacccaggcagacaggcagttggacacactgaggaagaccccccacgagtgggaaccccctggaaggaacacaccggccccggcccccaggaagggagcacaatggaggccgctcatgctaaaaccacggaggaatgtttggcctattttggggtgagtgagaccacgggcctcaccccggaccaagttaagcggaatctggagaaatacggcctcaatgagctccctgctgaggaagggaagaccctgtgggagctggtgatagagcagtttgaagacctcctggtgcggattctcctcctggccgcatgcatttccttcgtgctggcctggtttgaggaaggtgaagagaccatcactgcctttgttgaaccctttgtcatcctcttgatcctcattgccaatgccatcgtgggggtttggcaggagcggaacgcagagaacgccatcgaggccctgaaggagtatgagccagagatggggaaggtctaccgggctgaccgcaagtcagtgcaaaggatcaaggctcgggacatcgtccctggggacatcgtggaggtggctgtgggggacaaagtccctgcagacatccgaatcctcgccatcaaatccaccacgctgcgggttgaccagtccatcctgacaggcgagtatgtatctgtcatcaaacacacggagcccgttcctgacccccgagctgtcaaccaggacaagaagaacatgcttttctcgggcaccaacattgcagccggcaaggccttgggcatcgtggccaccaccggtgtgggcaccgagattgggaagatccgagaccaaatggctgccacagaacaggacaagacccccttgcagcagaagctggatgagtttggggagcagctctccaaggtcatctccctcatctgtgtggctgtctggcttatcaacattggccacttcaacgaccccgtccatgggggctcctggttccgcggggccatctactactttaagattgccgtggccttggctgtggctgccatccccgaaggtcttcctgcagtcatcaccacctgcctggccctgggtacccgtcggatggcaaagaagaatgccattgtaagaagcttgccctccgtagagaccctgggctgcacctctgtcatctgttccgacaagacaggcaccctcaccaccaaccagatgtctgtctgcaagatgtttatcattgacaaggtggatggggacatctgcctcctgaatgagttctccatcaccggctccacttacgctccagagggagaggtcttgaagaatgataagccagtccggccagggcagtatgacgggctggtggagctggccaccatctgtgccctctgcaatgactcctccttggacttcaacgaggccaaaggtgtctatgagaaggtcggcgaggccaccgagacagcactcaccaccctggtggagaagatgaatgtgttcaacacggatgtgagaagcctctcgaaggtggagagagccaacgcctgcaactcggtgatccgccagctaatgaagaaggaattcaccctggagttctcccgagacagaaagtccatgtctgtctattgctccccagccaaatcttcccgggctgctgtgggcaacaagatgtttgtcaagggtgcccctgagggcgtcatcgaccgctgtaactatgtgcgagttggcaccacccgggtgccactgacggggccggtgaaggaaaagatcatggcggtgatcaaggagtggggcactggccgggacaccctgcgctgcttggccctggccacccgggacacccccccgaagcgagaggaaatggtcctggatgactctgccaggttcctggagtatgagacggacctgacattcgtgggtgtagtgggcatgctggaccctccgcgcaaggaggtcacgggctccatccagctgtgccgtgacgccgggatccgggtgatcatgatcactggggacaacaagggcacagccattgccatctgccggcgaattggcatctttggggagaacgaggaggtggccgatcgcgcctacaacgggccgagagttcgacgaccttgcccctggctgaacagccgggaagcctgccgacgtgcctgctgcttcgcccgtgtggagccctcgcacaagtccaagattgtggagtacctgcagtcctacgatgagatcacagccatgacaggtgatggcgtcaatgacgcccctgccctgaaaaaggctgagattggcattgccatgggatctggcactgccgtggccaagactgcctctgagatggtgctggctgacgacaacttctccaccatcgtagctgctgtggaggagggccgcgccatctacaacaacatgaagcagttcatccgctacctcatttcctccaacgtgggcgaggtggtctgtatcttcctgaccgctgccctggggctgcctgaggccctgatcccggtgcagctgctatgggtgaacttggtgaccgacgggctcccagccacagccctgggcttcaacccaccagacctggacatcatggaccgccccccccggagccccaaggagcccctcatcaagtggctggctcttcttccgctacatggcaatcgggggctatgtgggtgcagccaccgtgggagcagctgcctggtggttcctgtacgctgaggatgggcctcatgtcaactacagccagctgactcacttcatgcagtgcaccgaggacaacacccactttgagggcatagactgtgaggtcttcgaggcccccgagcccatgaccatggccctgtccgtgctggtgaccatcgagatgtgcaatgcactgaacagcctgtccgagaaccagtccctgctgcggatgccaccctgggtgaacatctggctgctgggctccatctgcctctccatgtccctgcacttcctcatcctctatgttgaccccctgccgatgatcttcaagctccgggccctggacctcacccagtggctcatggtcctcaagatctcactgccagtcattgggctcgacgaaatcctcaagttcgttgctcggaactacctagagggataactgttccccctcctccatctctgagcccgtgtcacagatccagaagatgaaagaaggaagtgaacatccttttgctctgtcctccccaccccgatagtgacacatctttcaggcagagctgtggcacagatcccccgttcctgtccccccacacccgtgtcatgtgtctgtttataaacatgtcccctttcccttgcttgcccccttcgggccacccgcctccctcctcaaccttgtttaattcccctttcccaaaccccgaggggctttgcaggggacaaggcgaacggactgcgctgagctgcttatttattgaaaaataaaacgacggaaaagtcaaaaaaa

SEQ ID NO: 1984 - DNA, 5273 bp, Homo sapiens
ggggagcacggagctgcagccggttgggccggtgtactttcccgctctggaaaggaagagaaatggaagtgagaaagttgagcatttcctggcagttcttgatagttctggttctgatcctgcaaattctgtctgcgttggattttgacccatacagagtcctaggggtcagccgaacagccagtcaggctgatattaaaaaggcttataagaagctcgcccgggaatggcatcctgacaaaaacaaagatcctggagcagaagacaagttcattcaaatcagtaaggcttacgagattctttcaaatgaagaaaagagatcaaattatgatcaatatggagacgctggagagaaccagggctaccagaagcagcaacagcagcgagagtatcgcttccgccatttccatgaaaatttttattttgatgaatccttttttcacttcccttttaattctgaacggcgggactcaattgacgaaaagtatttattgcacttttcacattatgtgaatgaagtggctccagatagcttcaagaaaccctacctcatcaagatcacctccgattggtgctttagctgcattcatatcgagcctgtgtggaaagaagtcattcaagaactggaagaattgggtgtaggaattggcgtggtccatgctgggtatgagagacgcctggcccatcacctaggggcacacagcacgccctctatcctaggaatcattaacgggaaaatctccttcttccacaatgcagttgtccgtgaaaatctgcgacaatttgtagaaagtcttcttccagggaacttggtggagaaagttacaaataaaaattacgtcagattcctctctggctggcagcaagagaataagcctcatgtccttctgtttgaccaaacgcccattgtgccactgttatacaagttgactgcctttgcatacaaagattatttatcatttggatatgtatatgtgggtttgagagggacggaagagatgacaaggcggtacaacatcaatatctacgcccctaccctcttggtctttaaagaacatataaacaggcctgccgatgttatccaggcccgaggtatgaagaagcaaatcattgacgacttcatcacccgaaacaaatatctattggcagccaggctcaccagccagaagttgttccatgaactctgccctgtgaaacggtcgcatcgacagaggaagtactgtgtggttttattgactgctgagactaccaagttgagcaaaccctttgaggctttcctgtcctttgccctggcaaacactcaagacacagtgagatttgtgcatgtctacagcaatcggcagcaggagtttgccgacaccttactaccagacagtgaggcgtttcaagggaaatcagcggtgtctattttagaaaggcgcaacacagcaggaagggtggtgtataaaaccctggaagacccttggattgggagtgagagtgacaaatttatcctcttgggctatctcgaccagctgcgtaaagatccagctcttctgtcctctgaagcagtgcttcctgacctgaccgatgaacttgcccctgtttttctccttcgatggttctactctgcttctgactacatctcagactgctgggatagcatttttcacaacaactggtagggaaatgatgcccctgctgtccctgatcttctctgccctcttcatcctcttcggcactgtcatcgttcaggctttcagcgactctaatgatgagcgagagtcaagccctccagaaaaagaggaagcccaagagaagactgggaaaactgagccaagcttcaccaaagaaaacagcagcaagattcctaaaaaaggctttgtggaggtaactgaactcacagatgtaacatacaccagtaacttggtacgtctgaggccaggccacatgaatgtggtcctcatcctgtcgaattctaccaagaccagcctactacagaaatttgctttggaggtctacacatttactgggagcagctgcctacacttctccttcctgagtctagataaacacagagaatggctagaatacttactagaatttgctcaagatgcagctccaatcccaaaccaatatgataagcatttcatggagcgtgactacactggttatgtactggctctgaatggccacaagaaatacttctgcctcttcaagccccaaaagacagtcgaagagggagggaagccataggggtcgtgcagtgatgttgactcttccctctacctgggtgaatctcgagggaaaccttcctgtggccttggatccaggcccatcaaaggaaagttgagcaagctctctttatggatggaacgcctgctggagggctccttacagaggttttatatcccatcatggcctgaactagactgagaggattttccaaagagatttgaactcttcagactttttaacatgcccctgtgaacaggtattttcaggactcaaactaccacaatgaacagagtatagattttagattgctcttctagaaccatggctagaagaatctttcctttgtcctgttctaacctaggaatgaaaaacaccaccagtttgaatcgcctaaatgaaaatcttttcctctgggtgttatttttccccactgaatgccacaccattgaaaatagactgctcatcccctcttcctttcttgtccttgtcccatgctcaccccaccctcctgtcctgtgtcttggagaagcacagggctccaccctggcaagcggcatctggcggaccctcatgagcctgttcgtgcaggccaggtcattggcccctttcccaattccggccctgctgtgctgctgccatggcgcatgctcctaactctgaacaacccacggcagcttctagccccgcatctggaaaaaggcccctttccaagcaatctcacgtttactggttgttctgggagtaagtggctaaatgtatattttgggggtatcccccaacaacagtttgttggccacaggttgaaaaggaaaggaataaacgggagttctgcatgtgagttctcaagaaaaggaaagggaggctgagcagtggctgaagcgatgcagccttgagacacgctgtgagcatcccatccgccgccccagcgctgctggtagccaggggaggggtctgcacagcgagaagtactgtgatgactttgagccgttgacatgtatgtcttcagatgcctttctgcctctgtcgattttagggtatggatattaggagccataacttgtaatcttgttctctgaacgtagagataagctgctataaagccagtagatgttaaactgaagagaaattattcccacctgctatgagtcaggcttaaggaatctcttcaatagtgtctctttagtaaaataccaaacatgtctttgtatcaaggaacttaaaatttctcaacaattgtattttgaacactgttaccctaaaagtgctgtctcttcaagtcatcttttgcaggaagtgagccaagatttgttctagactcccattttgcaaaaggcttactttccacttctgggctgtattttgatgtctcatcttcattgttttcactcttaacttagagctgcttcaccagtattggggtcagactggccatcagcacctgagcgtgctgagctccaggtatagtggaccccagggtgcctcataccagccagttagagagcataccttttatttttcagggcagaatgaccagtggttctgagtttgagtttggacagcttcaaagagtggtccgttcaaatgtcaaagcaaggtgcctttggtggctttgtgaagggtgaaaatcagtgatgggacatttactaagtatttctttttttttttttttttttttagttgttgagacagagtttcactcttgttgcccaggctggagtgaaatggtgcgatctcggttcaccgcaacctccacatcccaggttcaagtgattctcctgcctcagcctcctgagtagctaggattacaggcatgtgccaccatgtaattagcccggctaattttgtatttttagtagagacgggatttctccatgttgatcaggctggtcatgaactcctgacctcaggtgatctgcctgcctcagcctcccaaagtgctgctgggatcacaggcgtgagccaccactcccggctaagttagtatttctttaatcttaatgctttaaactaagccacttggatcctgaataatttaaatcttgagctacattggtaagtaataaattatttaaggccaggaattcctgtagttttcatggagtctgtagctttattaaaaaataaatcactgccaggcttcattcttccatatgatcctctaaaaatggacacttcctctgaatgctgtatctcatggcacctggtccaactagaaatggtcaaggaattcatttggctccttgatacatcagtcctcaatattactttctaggtattttatggccagattgcttatatgagtggtcttttggtttggtagtaggtttttatttttaatttctgtactaatgaaattcctgactttaatttctgaaaaccaaaaactctccaagtgtatttatttatattttttttaatagagacgaggtcttgctatgttgcccaggctggtcccaaactcctggcctcaagcagtccttccaccttggcctcccaaagtgctgggattatcagtatgagccaccatgccagatttgttcatttttaaacatttttatctcttcaagtcatcttttgatcttttaaaaagcaccttcaaacagctgcaccttccatttgcactaggaaatgaaggtagtgatgggattggcaatgttcctggcagatgtttcagcccaaaagctcttctacagaccggtttagagctggtgccctatgagaatattagggagcttttattttaaattgaactttacccttgtccatgcaaggcattcctcctgaatgcatccatgaatttgtttacttttgcgtcaaacatatgagccattgtcatgctcagcctgtgccaccattggctctgtctgatgtaagtaatcatacaagacctgattttgggttctaacacagtgggtctttggactattcaacattggatggtttttagagatgggttcttctggttgatacagactactgcattgcgtttagcagatggggtaaaactggcctaaaacaagtctttgcagaatacatgccaatttccaaaaaaaaaa

SEQ ID NO: 1985 - DNA, 1135 bp, Homo sapiens
gtaaccagtactagaatagtcagtacctagaagccactcttctttgaaaaggattatcacctgatcaggttctctctgcatttgcccctttagattgtgaaatgtggctcaaggtcttcacaactttcctttcctttgcaacaggtgcttgctcggggctgaaggtgacagtgccatcacacactgtccatggcgtcagaggtcaggccctctacctacccgtccactatggcttccacactccagcatcagacatccagatcatatggctatttgagagaccccacacaatgcccaaatacttactgggctctgtgaataagtctgtggttcctgacttggaataccaacacaagttcaccatgatgccacccaatggcatctctgcttatcaacccactgcagttccctgatgaaggcaattacatcgtgaaggtcaacattcagggaaatggaactctatctgccagtcagaagatacaagtcacggttgatgatcctgtcacaaagccagtggtgcagattcatcctccctctggggctgtggagtatgtggggaacatgaccctgacatgccatgtggaagggggcactcggctagcttaccaatggctaaaaaatgggagacctgtccacaccagctccacctactccttttctccccaaaacaatacccttcatattgctccagtaaccaaggaagacattgggaattacagctgcctggtgaggaaccctgtcagtgaaatggaaagtgatatcattatgcccatcatatattatggaccttatggacttcaagtgaattctgataaagggctaaaagtaggggaagtgtttactgttgaccttggagaggccatcctatttgattgttctgctgattctcatccccccaacacctactcctggattaggaggactgacaatactacatatatcattaagcatgggcctcgcttagaagttgcatctgagaaagtagcccagaagacaatggactatgtgtgctgtgcttacaacaacataaccggcaggcaagatgaaactcatttcacagttatcatcacttccgtaggtatgtgtgacatacaaggaagggatcctaataaaacatgaatgcatgcaaaaaaaa

SEQ ID NO: 1986 - DNA, 1514 bp, Homo sapiens
aagtttaaacttgtaagcttaagcttccgtttataaacagaagtttaaaattataggtcctgtttaacattcagctctgttaactcactcatctttttgtgtttttacactttgtcaagatttctttacatattcatcaatgtctgaagaagttacttatgcagatcttcaattccagaactccagtgagatggaaaaaatcccagaaattggcaaatttggggaaaaagcacctccagctccctctcatgtatggcgtccagcagccttgtttctgactcttctgtgccttctgttgctcattggattgggagtcttggcaagcatgtttcacgtaactttgaagatagaaatgaaaaaaatgaacaaactacaaaacatcagtgaagagctccagagaaatatttctctacaactgatgagtaacatgaatatctccaacaagatcaggaacctctccaccacactgcaaacaatagccaccaaattatgtcgtgagctatatagcaaagaacaagagcacaaatgtaagccttgtccaaggagatggatttggcataaggacagctgttatttcctaagtgatgatgtccaaacatggcaggagagtaaaatggcctgtgctgctcagaatgccagcctgttgaagataaacaacaaaaatgcattggaatttataaaatcccagagtagatcatatgactattggctgggattatctcctgaagaagattccactcgtggtatgagagtggataatataatcaactcctctgcctgggttataagaaacgcacctgacttaaataacatgtattgtggatatataaatagactatatgttcaatattatcactgcacttataaacaaagaatgatatgtgagaagatggccaatccagtgcagcttggttctacatattttagggaggcatgaggcatcaatcaaatacattgaaggagtgtagggggtgggggttctaggctataggtaaatttaaatattttctggttgacaattagttgagtttgtctgaagacctgggattttatcatgcagatgaaacatccaggtagcaagcttcagagagaatagactgtgaatgttaatgccagagaggtataatgaagcatgtcccacctcccactttccatcatggcctgaaccctggaggaagaggaagtccattcagatagttgtggggggccttcgaattttcattttcatttacgttcttccccttctggccaagatttgccagaggcaacatcaaaaaccagcaaattttaattttgtcccacagcgttgctagggtggcatggctccccatctcgggtccatcctatacttccatgggactccctatggctgaaggccttatgagtcaaaggacttatagccaattgattgttctaggccaggtaagaatggatatggacatgcatttattacctcttaaaattattattttaagtaaaagccaataaacaaaaacgaaaaggcaaaaaaaaaa

SEQ ID NO: 1987 - DNA, 3194 bp, Homo sapiens
ggaatccatctccttttttgtggaggctgtgaagccccatggctagtcttgccccaggcctacctgtgggctgccctatgagccgcctgcagcattgctcaccttctcagcagtctggcatctcattgaaagaaaggaatgatggtccttaagaactccacttccgaagactgtccctccatagttagagcaaattcattcccttgctgggttgctgggctctggcactgcgctggccctcgttggaggtctgcagaagtgcacagaaagtgtgggcaatggactggccatttccacagttttggaaacttttaaaaatccatattcttgctgggattacagatgtgagccatcgtgcccagcccacccactttgttaatcatgatcagagcaggggtgccattctaccaccttggcacacctgcctagaggagtgagtggcgctgggagcagactgaggaacatcttagctgagcagtgaatccagcactgttctaaggaagctcagatggtctgtgactcatccctgtcctctggactgaatctgaggccttggaactcacccagggtcttagtggaggcacagctctgagctatgggtgaagagcatctgaacccatctacacattgaccaaacacaggcaggttccagtctgcgggggagatggagaaggtgccaccatgctgctgcacaaatcccaggatagctggggaatgagaatccagcactttgggcctaggacctggaaggagaggtcttttgggagaggtatggggacatctgaaggaggacttcttggaaggggaggggctggagcagaggcaagagtgattttgtcagatggagagaaggttctccacatgggcggggctggcagaggcagatgcccagacaggtcacaactctctaggtgcccaattacctgccctcggtgagctcagccatcggcggggaggtgccccagcgctacgtgtggcgtttctgcatcggcctgcactcggcgcctcgcttcttggtggccttcgcctactggaaccactacctcagctgcacctccccgtgttcctgctatcgcccgctctgccgcctcaacttcggcctcaatgtcgtggagaacctcgcgttgctagtgctcacttatgtctcctcctccgaggacttcagtgggtgcctggatgagggaggagtggggaagtgttccctgaggggacgggcctgcccctaccacattcggaccttcctacttcgtggtgtgggcactccctgcaatgtggctcccaatcctctttccctccagccatccacgaaaatgctttcattgtgttcattgcctcatccctcgggcacatgctcctcacctgcattctctggcggttgaccaagaagcacacagtaagtcaggaggtacggtctatccctagcgggggctccaaggcagcccagaagaaaatcaaggacatctgtcctcaggattcgggtaatggtgaggtgggaactgagttctaatgggaaccctggcagaggggtgctggggttggggctggggcttgggaacaaactgagggtggttggtcagaatctaggactatagcactgtgtttgggtagtgtgggagactggagaatagaagagatggaggctgcaaatggggatagaatgaggagtcgcatctaggcggcagtgagttaggaacagtgtcagaggactggtctgtcataattccagcgccccacccatgtacatgggtttcttttcccccacagtatttggaggtggggttggtgggtgactccatgtaactttcatactccatccccctgaagtggaagcggcaggaataccactgctcctcggcccatcactcccccagaggcagggacgtgaacacatagtcgtcattcttgctgcccctgcctgtgctcccttccatgaccgctagtgggagccaagggagataaggcccagcccttaggagttagggctgagaggggagcccacgctctcatacccagcaagctgcagagtgatcagacagcccattccctaggatcgcaagtcctacagctggaaacagcggctcttcatcatcaacttcatctccttcttctcggcgctggctgtctactttcggcacaacatgtattgtgaggctggagtgtacaccatctttgccatcctggagtacactgttgtcttaaccaacatggcgttccacatgacggcctggtgggacttcgggaacaaggagctgctcataacctctcagcctgaggaaaagcgattctgaacccttcagtcctgcttgggaggacgcagcccactgcccagaaacaagaaacacgataccattctggccttccccaccccacatcctctcttggccttactgaagatgggggaagggtaagaaggaagggtgtaggccaaggctcaccccagtgctgctggcttctcctctccacccctcatatgggcgtggggtcctcaaacatcacctttacctgagaggccccaagaagctgagctggcagagagctccaccatttggtgctaaaaaaaaaaaacgtcctgaggttcatgaccaccatccagtttctggcctttacacagtcacctttcactgaggtcaggagcccctgagcaggggctgctccctgacaaccacagccatttttttgcacgggggtcattcataggactaatgtatttcatgatctactgtgcacatccaggcctgtggccacagtcccctgctaaagttgctcaggtgttctagtcctgacttcacctttttgatttggtgtgtgccctagggtatgtacccttccccatctgagcctcggtgtgtccatgtgtctggcgggggatgggtggactgtatgatttccaaggactctaccagtcagtggttctgatgtcatcgggtggaggtggtgttctatacctaaaggatgacctgctccagaaacagcaccagcacagcatgtattttcttctcttctgaaagttctggcttgtagacccctcccttcctttgcaaaggtatgggatagaggggtcagatgcagatctctactgtaaaatgggctccctggtatctcctgtcttccctactgctccaaaccctaaattttggttgtacattttatttgaaaggaaaataaattttttttttgggccaacaaaaaaaaaa

SEQ ID NO: 1988 - DNA, 1734 bp, Homo sapiens
ttttttttttttggaaacaaatcaatgtgaagagactttaatggcaaagtgcactggagagttaaaatggttacatgggtaatttaagaaaaaatttagtgggaaaaagggaaagggctgaactgccaaaataattttcttatccagttttacatttgctttctccatgtgctacaattatagacacctgatagttcctagccttagacataacttgcagcatcagccactctgctgcactttagatcacattagttagggctagagcccagccccatttacacggcatctgatgaatggttagctgtggcagttctaccataatgccattttgctccaaagaaatccagttaagtggctgtccatggcccagtagtttcacctctgttgcccccagaatagctttgggatggccaaggaacagctgtcctgatgtgggccatttaagaaaaatggcatagactaatttttctttaggcttggatgtgtaccacacatctggggtgacagtgtcattctgggatcgccaggtatgggtttcataaatagcttctccattgacttttagccaggaccccatttgcctcagtcgctcctcaaaaactacagaaatggtgccatctagtgtgggcccaatattcatcaaaagatttcctccacatgaaactgtctctacaagttgcttcaccaattcttcaattgtaagatagtcagagattccagcttccctcctatagccccaggacagtttgtctattgtcatgcagttttcccatttatgtggcaaaagatgtcctgggttataacgatcactgcaggtatagaagccaccatgcttacagatgctaccagctccccaacgatcattggtgactactgtgccccgaactgggctttcattatataaccaggccaagaagcctgtgctgttccagtattgatccggtgctcctccgtcaccatccgaccacagaacctcaggctgatagttgttcactaactcatagagctctggcaatgtcttagaaactggaaattgccgcttatggaatgaactggattcatcctcaaggaagagcggatgaaaccattcaaaaagggaatagtacagtccaaaacgcaggtcagttctgttcctaatggctacctcaagttccttgacaatgtccctcttgggcccctcatctatggcattccagttccacgaatattctgaccccccacaaggtaaagccttcatgatgtttggaagttaagacaatgtatttggcaccagaggcctgaaaaatatctgcccaactggttggcattaaaaaattttgctgtaaatagtggtccaaaatcttcatatttgaaactaggagggtaattatctttcataaattccacatacttcggtatcttttccttttgccaataccaccagaaccactcgctaccgaagctgggcacggaaaacactccccagtggatgaagatgccgaacttggcctggtcaaaccacgcgggcagctggcgggcgtccagggactcccaggtggggtcgaagcgcgtggcgctgtgggcagggcacggcggcggcggcagcagcagcaacagcaacagcagcaacgggaacgcgagcctggggagctcctggggccgcatgtcccggcgcaggccggctgtcctctctgcaggctcccgcggcctcgggagcgctgttcttccgtctctgccgctgagtatgccgcc

SEQ ID NO: 1989 - DNA, 4790 bp, Homo sapiens
tttcgtcggcgctgtgtgtgtgaagcgtacctagggcgggaggcgacatggagacaggggcggccgagctgtatgaccaggcccttttgggcatcctgcagcacgtgggcaacgtccaggatttcctgcgcgttctctttggcttcctctaccgcaagacagacttctatcgcttgctgcgccacccatcggaccgcatgggcttcccgcccggggccgcgcaggccttggtgctgcaggtattcaaaacctttgaccacatggcccgtcaggatgatgagaagagaaggcaggaacttgaagagaaaatcagaagaaaggaagaggaagaggccaagactgtgtcagctgctgcagctgagaaggagccagtcccagttccagtccaggaaatagagattgactccaccacagaattggatgggcatcaggaagtagagaaagtgcagcctccaggccctgtgaaggaaatggcccatggttcacaggaggcagaagctccaggagcagttgctggtgctgctgaagtccctaggggaaccaccaattcttcccaggattcaggagcagttccagaaaaatcccgacagttacaatggtgctgtccgagagaactacacctggtcacaggactatactgacctggaggtcagggtgccagtacccaagcacgtggtgaagggaaagcaggtctcagtggcccttagcagcagctccattcgtgtggccatgctggaggaaaatggggagcgcgtcctcatggaagggaagctcacccacaagatcaacactgagagttctctctggagtctcgagcccgggaagtgcgttttggtgaacctgagcaaggtgggcgagtattggtggaacgccatcctggagggagaagagcccatcgacattgacaagatcaacaaggagcgctccatggccaccgtggatgaggaggaacaggcggtgttggacaggcttacctttgactaccaccagaagctgcagggcaagccacagagccatgagctgaaagtccatgagatgctgaagaaggggtgggatgctgaaggttctcccttccgaggccagcgattcgaccctgccatgttcaacatctccccgggggctgtgcagttttaatgaccagaaggaaaggaaaccctcgccggtggggaggcagagccttatcctcggctgcccttcttggctccctgcattccagggacttgctcgtcttgtttacccctagccatcctttctttcaagggtgaaccaggccttccaccctgaccttgcatctccagactgttccagagaaggtgcggggccagctgctatgtggtggccgctgtggctgacactgagtgaaggtgcttgaaatgcaggagaggatatcccagcaaattgggatcacatgcttttgtctccacagcaaccagccactgcaggcagcatgtctttcctcccctgctctctgcttgctgttgttttgacgctattctgcttgcatgtcttctggttgggatgtggagttgttgctggactctcaggcgaagctgaagtcattgaagtgtgtgaagctctgtgcttgcatgagggcaagcaaggaatggctgtgcctgaggctgctctgggaaactccttgccccttgacctcttttgagagcattcacgtggtcttcttgctcatccccttataaatgtgctttgcctgcctcagcctcatggtcagagcagtggagactggagccctgtttgcacgttctggttgttcggagaaagcctaggttctgggctcaggtccagatgcagcggggattctgttctctgactgtggcgaccttgctttggttcttgttgaagtgaaccaagcccggccaccacgcatggcatgctgtgcttggctccccataagacgtcctctttgggtgcacggtgtcaaagtgtgggcaggagtggagagctggtgccctcaggaggagaccacagcatgtccatcagctcagcagagctcgacagccacaagtcctgagaagctttgaccttgaagggcttctgggagaggaggaatttctgcatggggcgtgaaggcacactgtcccaccacaactgaaccagaagagagtgaagactcccctcttcccatcctctgtgccaggtgccagactgtgctccttggaacttatggcccaatcttacctgttctccagggactggtcactgcctcaggacccccaagcctatgccctgagccatggctgctgactgactccagccaaggtgcaaagacgagattatgagacaggtcctcaggcctgtgttccaagtactcacaggggctctgggtgcccatcgccgggagtatggttcagctgccaccggcactgtccatttgcctgtctgtcaagctcagagcatggataagccacacagcagggcagtgcaccctgggcaccatgcacggccagcaagaatcaaggcccgcagatgctaagagggcctattgtcaggggaaggtccccgctcctgcacactctctatggatacttgggttgtgggggctctcttggagagtaagtttgtggtttgtttctggtttacagtggtggctgacaccccttgtaagaaagcattcctgggaagtcttctgtgggtccaaacatgttgctccgatcatcacaggagagcaaaaggccctagataccccctttggaatgtgagagtcttgttgtctgatatttgccactgagctggtgaagcccctctaaagagatctcgaccctggggagcagaattcttgtcatctatgaggggtcctgagaaagacttgtcattttttttcctggagttcttcccattgaggtcctaggatttgcacaccactgtcccacaagagctttcctgcctaatgaaaggaggtcttgtggtgtgtgtctcctctcttctctatagttcccgagttggcccccattgcagcccccaccctgtgggtagtcttccagaagtgatgcagtggtgtgagatgccctacaccttgttatttgggagactttgagagtcattcacttccatggtgactagtgtttgttttgcctgattttatattctgtgttgcatttctccccactccctgccctgctttaataaacagcaaaccaatatctaggaagaatgactgagggatagtattgggtattggccccatggcaggaacagccacttgcatctggtcccggtgccacactgcggtgcttggtgtggttgtggagcctgtccctgcgcgccttgctcccgttgagccacgctgtctggtgggtgattctctgccctgagccaccaccctggactggcccagtctccagagctggcacaccctgcctgttttctctttttagacacaacagccgcagtttggccagccactaagtcccaccagctgaggtccgaggaaagcggggtgactcatttcccttgtccagggcccgaggagagtgaggtgtccagcctgcaaagctattccagctccttggtgttggtttgcaataaattggtatttaagcagttctgggtctgcgtgtgacatttgctgctgagacagttctgtctgtgcatggtcattattgttgcattctagccttgaggtcccaggccaacgtacacagcaaacaccagcatggggaattcttaggggttgtttcccatctggtctgaatgcactgggcaagatctcaatacagctttagaaatcctgtaagattttgaccagtggggagaaaaagaatgtagctatagatcttacatcctttcaaacaggttctggaattctgtagttactggaaagcttagggtgagtgcagagttgggaatgattccactgaagggccacctttgcccaccaggctccaaggccctccttggtctccaggtgcatacctgctgttaactttgctgagccctcgcaatgggcttcctccaggacataacgccgtgtctgacacagaagtctcccaggtggctggccacctgcttcttcctcagtcagatctttgactctccttctctgtgcccaccccatctccagcctcctctgaccctgctcacccctggggacaggacctaggggtgtgagaagtacttggctgaataaagactgtttcaaaggcaatccttagaattgcctagcatactcccagggccagaaataacccgccagaaaggagaggcgtatttgcccctgaagagtgcaggagggagaacagttgagaagtgttttgtgtggaaatgtgtccaagaggcgtcagctgctgcacagagaactcactgcccagaacactgcgcttggggaacagacctcaccccccacctcaaatctgctctccactgggcctgttggcagccagctcagctggggaagggacagcatgactcgctttgtcgatgaaaagcacgaagttgtcagcacagaacctggccagtccttgagaaactccctccttggtggtcagaggtccaaccagcccatgtggcccacggtcctgaagaactgggctatgtccctgaggctcctctctaccgtctgactgtggggtctggggaacaggcatttaaaccaggctgctgccctggggagtgcccactggacgccagggtgccccatagggacagggtcacaaagccctggggcttcccctgccagtcctggtgaggacagtgtggtcactatctcagagagacgaaaaatgaatattctgtcatttcagactaaactactcacccagctcacactaaaaaaaaaa

SEQ ID NO: 1990 - DNA, 2372 bp, Homo sapiens
ggaaaggaagacacatttacaaatggatatttattacctgtacataggaaaatttatgccctgcatttatacaaaaaagggagggcaaagagcaaattggtttcagctcaaaacaattcttacatgaaagtggcatattttggggtagcatacactgatcctcttcaaaaggaataatttgcttttctcttatcatggttatgagagctactttgaattaatttttgctttttgaaagtacatttaattctcaaatgtttctgcttttgaatgcagtttgggagagcccatggtgactgcgtgagtggagcccagctgtgtggatgccccagcatggatgactacatggtcctgagaatgattggggagggctccttcggcagagctcttttggttcagcatgaaagcagtaatcagatgtttgccatgaaagaaataaggcttcccaagtctttctctaatacacagaattctaggaaggaggctgttcttttagccaaaatgaaacaccctaatattgttgccttcaaagaatcatttgaagctgaaggacacttgtatattgtgatggaatactgtgatggaggggatctaatgcaaaagattaaacagcagaaaggaaagttatttcctgaagacatgatacttaattggtttacccaaatgtgccttggagtaaatcacattcacaagaaacgtgtgctacacagagatatcaagtccaagaatatcttcctcactcagaatggaaaagggaaattgggagactttggatctgcccgtcttctctccaatccgatggcatttgcttgtacctatgtgggaactccttattatgtgcctccagaaatttgggaaaacctgccttataacaataaaagtgacatctggtccttgggttgcatcctgtatgaactctgtacccttaagcatccatttcaggcaaatagttggaaaaatcttatcctcaaagtatgtcaagggtgcatcagtccactgccgtctcattactcctatgaacttcagttcctagtcaagcagatgtttaaaaggaatccctcacatcgcccctcggctacaacgcttctctctcgaggcatcgtagctcggcttgtccagaagtgcttaccccccgagatcatcatggaatatggtgaggaagtattagaagaaataaaaaattcgaagcataacacaccaagaaaaaaaacaaaccccagcagaatcaggatagctttgggaaatgaagcaagcacagtgcaagaggaagaacaagatagaaagggtagccatactgatttggaaagcattaatgaaaatttagttgaaagtgcattgagaagagtaaacagagaagaaaaaggtaataagtcagtccatctgaggaaagccagttcaccaaatcttcatagacgacagtgggagaaaaatgtacccaatacagctcttacagctttggaaaatgcatccatactcacctccagtttaacagcagaggacgatagaggtggttctgtaataaagtacagcaaaaatactactcgtaagcagtggctcaaagagacccctgacactttgttgaacatccttaagaatgctgatctcagcttggcttttcaaacatacacaatatatagaccaggttcacgaagggttcttgaaaggccccctgtctgaagaaacagaagcatcggacagtgttgatggaggtcacgattctgtcattttggatccagagcgacttgagcctgggctagatgaggaggacacggactttgaggaggaagatgacaaccccgactgggtgtcagagctgaagaagcgagctggatggcaaggcctgtgcgacagataatgcctgaggaaatgttcctgagtcacgctgaggagagccttcactcaggagttcatgctgagatgatcatgagttcatgcgacgtatattttcctttggaaacagaatgaagcagaggaaactcttaatacttaaaatcgttcttgattagtatcgtgagtttgaaaagtctagaactcctgtaagtttttgaactcaagggagaaggtatagtggaatgagtgtgagcatcgggctttgcagtcccatagaacagaaatggggatgcctagccgtgcccacctaccctacttgtgtgattgtggggaaattaccttaaccctcttcaagcccccaatttccctcaacccataaaatgaagataataatgcctacctcagagggatgctgaccacagacctttatagcagcccgtatgatattattcacattatgatatgtgtttattattatgtgactcttttttacatttcctaaaggtttgagaattaaatatatttaattatgaaaaaaaaaa

SEQ ID NO: 1991 - DNA, 3792 bp, Homo sapiens
gcggccgcagcgtggagccgggtgattgtgaccgccgggggagccgggagccggccgcggcgccctctctccgtgtggccccctgagcggcccccctcccctgcccgggagggaggcggggggcacctgtgggcagccagtgaaccccgtcttcgatttgtcccgccggaacccgcaggaggacttcgagctgattcagcgcatcggcagcggcacctacggcgacgtctacaaggcacggaatgttaacactggtgaattagcagcaattaaagtaataaaattggaaccaggagaagactttgcagttgtgcagcaagaaattatcatgatgaaagacttgtaaacacccagagtattgttgcttatttttggaagctatcttcaggcgagataagctttggattttgcatggagtttttgtggaagtgggtcctttacaggatatttatcacgtaactggacctctgtcagaactgcaaattgcatatgttagcagagaaacactgcagggattatattatcttcacagtaaaggaaaaatgcacagagatataaagggagctaacattctattaacggataatggtcatgtgaaattggctgattttggagtatctgcacagataacagctacaattgccaaacggaagtctttcattggcacaccatattggatggctccagaagttgcagctgttgagaggaaggggggttacaatcaactctgtgatctctgggcagtgggaatcactgccatagaacttgcagagcttcagcctcctatgtttgacttacacccaatgagagcattatttctaatgacaaaaagcaattttcagcctcctaaactaaaggataaaatgaaatggtcaaatagttttcatcactttgtgaaaatggcacttaccaaaaatccgaaaaaaagacctactgctgaaaaattattacagcatccttttgtaacacaacatttgacacggtctttggcaatcgagctgttggataaagtaaataatccagatcattccacttaccatgatttcgatgatgatgatcctgagcctcttgttgctgtaccacatagaattcactcaacaagtagaaacgtgagagaagaaaaaacacgctcagagataacctttggccaagtgaaatttgatccacccttaagaaaggagacagaaccacatcatgaacttcccgacagtgatggttttttggacagttcagaagaaatatactacactgcaagatctaatctggatctgcaactggaatatggacaaggacaccaagggtggttactttttaggtgcaaacaagagtcttctcaagtctgttgaagaagaattgcatcagcgaggacacgtcgcacatttagaagatgatgaaggagatgatgatgaatctaaacactcaactctgaaagcaaaaattccacctcctttgccaccaaagcctaagtctatcttcataccacaggaaatgcattctactgaggatgaaaatcaaggaacaatcaagagatgtcccatgtcagggagcccgagcaaagccatcccaagttccacctagaccaccacctcccagattacccccacacaaacctgttgccttaggaaatggaatgagctccttccagttaaatggtgaacgagatggctcattatgtcaacaacagaatgaacatagaggcgaaaacctttcaagaaaagaaaagaaagatgtaccaaagcctattagtaatggtcttcctccaacacctaaagtgcatatgggtgcatgtttttcaaaagtttttaatgggtgtcccttgaaaattcactgtgcatcatcatggataaacccagatactagagatcagtacttgatatttggtgccgaagaagggatttataccctcaatcttaatgaacttcatgaaacatcaatggaacagctattccctcgaaggtgtacatggttgtatgtaatgaacaattgcttgctatcaatatctggtaaagcttctcagctttattcccataatttaccagggctttttgattatgcaagacaaatgcaaaagttacctgttgctattccagcacacaaactccctgacagaatactgccaaggaaattttctgtatcagcaaaaatccctgaaaccaaatggtgccagaagtgttgtgttgtaagaaatccttacacgggccataaatacctatgtggagcacttcagactagcattgttctattagaatgggttgaaccaatgcagaaatttatgttaattaagcacatagattttcctataccatgtccacttaaaatgtttgaaatgctggtagttcctgaacaggagtaccctttagtttgtgttggtgtcagtagaggtagagacttcaaccaagtggttcgatttgagacggtcaatccaaattctacctcttcatggtttacagaatcagataccccacagacaaatgttactcatgtaacccaactggagagagataccatccttgtatgcttggactgttgtataaaaatagtaaatctccaaggaagattaaaatctagcaggaaattgtcatcagaactcacctttgatttccggattgaatcaatagtgtgcctacaagacagtgtgctagctttctggaaacatggaatgcaaggtagaagttttagatctaatgaggtaacacaagaaatttcagatagcacaagaattttcaggctgcttggatctgacagggtcgtggttttggaaagtaggccaactgataaccccacagcaaatagcaatttgtacatcctggcgggtcatgaaaacagttactgagaattgttgtgctttgacagttaactctagaaagaaagaacactaccactgcaacattaatggatgcttgaagctgtacaaaagctgcagtaacctgtcttcagttactttgtaatttattgtggcatgagataagatggggaaaattttgttttaagtggtatggatatatttagcatattgaaccacacaagtgcttaattcattgttatgtaatctttgtacatataggcagtattttttctgtgaaacttcatattgctgaagacatacactaagaatttatgtagataatgtacttttatgagatgtacaagtaagtgtcttatctgtacagatgtaaatgttgatgaaaatgcaattggggttaatattttaagaattctttagtatattcttgggtgtggctatattacaaaatgggatgctggcaatgaaacaatacatttaacactattgtatttttattatatgtaatttagtaatatgaatataaatcttgtaacttttaaaattgtaatggaggctgtaatcattttataatctttttaattttaatgcaagtacactggtgtttatatttgcacagagtattgatatgtgatgtattaagtcacaaaagtaagctgtgacattgtctataagcatttggctccacaaatgtatttggattgttttctatgtgaagcaaaccaattataattaaccacatgttgtagtaactggtctttttatatttaagcagaatcctgtaagattgcttgtctttgcttaaaaacaatacctttgaacatttttgaatcacagaatagcggtaccatgatagaatactgcaattgtggtcagaattacagtatgcacaaagaattaattagcattattaaagagtcctcactaaacatttcatatgatcacactgaagaactgtaacattccatagagtgaagtggktcactttc

SEQ ID NO: 1992 - DNA, 3792 bp, Homo sapiens; identical to SEQ ID NO: 1991

SEQ ID NO: 1993 - DNA, 2526 bp, Homo sapiens
tttcgtctgcggagaccgtccgcctggctcgcccgagctcgcccgctgtccgccagcccgcgggagggaggagagaagcgaagcgtttccgcggttggctactcagtgtcttggtctcaagttgcctcattgcggctggcgttcccaatacagacgcatcgtttcttttttaatactccctaagaaagggaataaccttcaagctggcgggagcaatggttcacataaagaaaggcgagctgacccaggaggagaaggagctactggaagtcatcgggaaaggtactgtccaagaagctggaacattattatccagcaagaatgttcgtgtcaactgtttggacgagaatggaatgactcctctaatgcatgcagcatataaaggaaaactggatatgtgcaaattactactgcgacatggagccgatgtaaattgtcatcagcatgaacatggatacacagccctcatgtttgctgcactttctggtaataaagacatcacatgggtaatgttagaagctggtgctgagacagatgttgtcaactctgtgggaagaacagcagctcagatggcagcctttgtgggtcaacatgattgtgtgaccataatcaacaatttctttcctcgagagagactggattattacactaagccccagggactggataaagagccaaaactgcccccaaagttggcaggcccgctgcacaaaattatcaccacaacgaatcttcatcctgtcaagatcgtgatgcttgtaaatgagaatcctctgctgacagaagaagcagccctgaataaatgctacagagtgatggatttgatttgtgagaaatgtatgaagcaaagagacatgaatgaagtattggctatgaagatgcattacataagctgtatctttcagaaatgcattaacttcttaaaagatggagagaataaactggacaccttgatcaaaagcttgttaaaaggcccgagcttctgatggctttccagtgtatccagaaaagatccttagagaaagtatcagaaaaattcccttactgtgaagctacactcctccagcagctggttcgaagcattgctcctgttgaaattggttctgatcccactgcattctccgtccttacccaagccatcactggccaggtgggttttgtggatgtggaattttgcactacctgtggagaaaagggagcaagtaaaagatgttcagtttgcaaaatggtaatatattgtgatcaaacctgccagaaaacacactggtttactcataagaaaatctgtaagaatctgaaggacatttacgaaaagcaacagttggaggctgccaaagaaaagagacaagaggaaaaccacggcaaacttgatgtcaattctaactgtgttaatgaagagcaaccagaggctgaagtaggtatctctcaaaaggattccaatcctgaagattccggggaaggaaagaaagaatctcttgaaagcgaagctgagttggaaggcttacaggatgctcctgcagggccacaggtgtctgaggagtaaaagccagagcaagtgccagtgtggatggtcctcaccctgcaagaagctggaaaactcctaggaatgcattgtcctcaccttgttatacctgcgtggcaccatggcaggattccacatttcatagaatacaggttttcaagcaaacccctgttgaccatgccctaatttcctattgatttctgttgtataattgaatggatattcctatggaaaattttttgtttcaaaatacaggaaaaacattcctattacctttctgaggctggctttccagcaattgtttcaaaggaaaatagatccccttaaagaaaaaatacaggctttagggaacaaagggacaagcagaacaggtgtggaagagagattttcaggaagggaaaaatttatagctacagagggtagttagaaaaatcataacttatatgtgaataaaatacatataagcagcatttacggtagtggcattctacttattaagatgcaatgaaatgaagaaaggctttatgttcaaggacctttgccatagttcagctaattgtagttttatatagaaatgatcctgaacactctgaacttgacgtagtcctgcggtgatattctatctgcagtatttgtacctccagaatggcagatccctcagcaggaacaaaggcatattgacggttctctcagcgtatgcattaaaaaaggtacttcctgaaacttttgattcaataatgactaaacatactatgtacacaattactgtaaggctaattcacgtgccatactccacctgaaagcctgagttatcttgctataagcttttcatggagcacttcctttccagaaactgatttgtaactcatttagagaatgtcctggcgtcggtttttagcatatgtggtatttaaacagagctagaatgtgatgtctgaagataatgctgcatttctgggtttcttgtgtggattttaaaataaattgtgcctacaaatataaac

SEQ ID NO: 1994 - DNA, 7113 bp, Homo sapiens
gttcagatgacctacggacaggtctatttcaggatgtacaggatgctgaatctttgaaattgcctggcgtctatgaagtcttattttataatgaaactgaagattgcccagggatgatgttatggagatatccagaacctagaggactcacccttgtacgaataactcctgtaccttttaacaccacagaggatccagatattagcacagcagaccttggtgatgtgctacaggatccttgtagcttggaatactgggatgaactccagaaggtttttgttgcatttagagaatttaatctgtctgaaagcaaagtttgtgaactgcagttgccggatatcaatctcgtgaatgaccagaagaaattagtatcttcagatctttggagaattgtcttgaacagcagtcaaaatggagctgatgaccaaagctctgcaagtgagtctggttctcaaagcacttgtgatccacttgtgactccaacagccctggctgcctgtaccagagttgactcctgctttaccccatggtttgtcccatccctttgcgtttctttccagtttgctcacctggaattccatctttgtcatcaccttgaccaactaggcacagctgcaccacagtacctacagccatttgtttccgacagaaatatgccatctgaactagaatacatgattgtttccttcagagaaccacacatgtatcttcgacagtggaataatggttctgtctgtcaggagatccagttcttagctcaagcagactgtaaacttctagagtgcagaaatgtcactatgcaaagtgtggtgaaacccttcagcatcttcgggcagatggcagtttccagcgatgtagtggaaaagctgcttgactgcaccgtgatagttgattctgtatttgtaaaccttggacagcatgtagtccattcactaaacactgcaatacaagcttggcaacagaacaaatgccctgaggtagaggagttggtcttcagccattttgtgatctgtaatgacacacaggagacactgcggtttggccaggtggatactgatgaaaatattctgctggcgagtctccacagtcaccagtacagctggcgctctcacaaatccccacagctgttacacatctgtattgaaggttggggcaactggcgttggtcagagcctttcagtgtggaccatgccgggacttttattagaacaattcagtacaggggtcgaactgcttctctcatcatcaaggttcagcaactcaatggagtacaaaaacagattatcatctgtggaagacagatcatctgtagttacttgtctcaaagcatagaactaaaagtcgttcagcattacattggtcaagatggacaagctgtagttcgggaacattttgactgcctcacagccaaacagaaattgccttcgtacatactagaaaacaatgaactgacggagctgtgtgtgaaggccaaaggagatgaagactggtcaagagatgtgtgcctggaatccaaagcccctgagtacagcattgtcattcaggtgccatcttcaaacagttccattatttatgtctggtgcacagttttgactttagaacccaactctcaagtgcaacaacgaatgattgtgttcagccctctttttatcatgaggagtcatcttccagaccccattatcatacatttggagaaaaggagtctgggattgagtgaaacacaaattattccaggaaaagggcaggaaaaaccactgcaaaacatagaacctgaccttgtacatcacctgacattccaagcaagagaagaatatgatccttcagattgtgcagttcccatctcaacatccctcattaagcaaatagccactaaggtacaccctggaggcacagttaatcagatccttgacgaattctatgggccagaaaagtcgcttcaacccatatggccctataataagaaggattctgacaggaatgaacagctaagtcagtgggatagcccaatgcgagtgaagctgtcaatctggaagccatatgttagaactttgttgatagaacttctgccctgggccctgcttatcaatgaatccaaatgggacctctggctatttgaaggagagaaaattgttctacaggttcctgctggcaaaattattattcctcctaattttcaggaagcttttcaaattggaatatactgggcaaatacaaacactgtgcacaagtcagtagcaattaaactggtccataacctgacatctccaaagtggaaagatggaggtaatggtgaagttgtgacactggatgaagaagcgtttgttgatactgaaataagacttggtgcttttccaggacatcagaagttatgtcagttctgcatttcctccatggtacagcaaggtatacaaattattcagattgaagacaagactacaataatcaataatacaccatatcaaatattttataaaccacagctatctgtctgcaatccccattctggaaaggagtattttcgtgttccagacagtgctacttttagcatttgcccaggtggagagcagcctgctatgaaatccagctcccttccttgctgggacttgatgcctgacatcagtcagtcagtactggatgcatccctgcttcagaaacagatcatgctgggcttttctcctgccccaggtgctgacagctcacagtgctggagcctgccagctatagttagaccagagtttcccagacagagtgtggcagtacccctcgggaatttccgggaaaatggattctgtaccagggctatagtgctgacatatcaagaacacctcggagtgacttatttaaccctctcagaagaccctagtcctcgagtaattatccacaatagatgtccagtaaaaatgcttataaaggaaaacattaaagatattccaaagtttgaggtttattgcaaaaaaattccctccgagtgctcaattcatcatgagctgtatcatcagatttccagttatccggactgcaagaccaaagacttacttccaagcctacttttgagagttgaacctctagatgaagtaacaactgagtggagtgatgccattgacatcaacagtcagggaacacaggttgtgttcctgactggctttggctatgtgtatgtggatgttgtacatcagtgtggcacagtcttcatcactgtggccccagaaggaaaagcaggacctattttaaccaataccaacagagcgccagagaagattgttacatttaaatgttcatcactcagttaagcctggcagtgtttgatgacctcacccaccacaaagcatcagctgagcttctgagactcacactggacaacatttttctctgtgtggccccgggagctggtcccctccctggggaagagcctgtggctgcgttgtttgaactttactgtgtggagatctgctgtggggacctgcagctagacaaccagctttataacaagtccaatttccactttgctgtcttagtctgccagggagaaaaagcagaacccattcagtgttccaaaatgcagagtctcctcatatccaacaaagagttggaagaatacaaggaaaaatgttttatcaaactttgcatcaccttaaatgaaggcaagagcatcctctgtgatattaatgagttcagctttgaattaaaacctgctcggttatacgtggaagacacatttgtatactacatcaagactttgtttgacacctaccttcctaacagcaggttggctggtcactccacacacctctccgggggtaaacaggtgttgcccatgcaggtcacacagcacgccagggccttggtgaatcctgtgaagttacggaaactggtgatccagccagtaaatttgctcgtcagcatccacgcttccctcaagctgtacatagcctcagaccacactcctctctccttctcggtgtttgaaagaggacccatcttcaccactgcgaggcagcttgtgcacgccctggcaatgcactatgccgctggggccctttttagagcaggctgggtagttgggtctctggatattcttggcagccctgcaagcctggtgagaagcatcgggaacggggtcgccgacttcttcaggcttccgtatgaggggctgacccggggccctggagccttcgtgagtggcgtctccagagggaccacatcgtttgtaaagcacatctccaaaggtaccctcacatccatcaccaacctcgccacaagcctggcccggaacatggaccggctctcactggatgaggagcactacaaccggcaggaggagtggcggcggcagctccccgagagcctgggcgaggggcttcgacagggcctgtcccggctgggcatcagcctgcttggtgcaattgctggtatagttgatcagccgatgcagaacttccagaaaacatctgaggcacaggcttcagcaggacacaaggccaagggtgtcatctcgggtgtggggaaaggaatcatgggggtgttcacaaagcccatcggaggagctgctgagctggtgtcacagactggctatggtattttacatggagctggactttctcagcttcccaaacagcgccatcagccaagtgatggtacatgctgaccaggctccaaacagccatgtcaaatatgtctggaaaatgcttcagtctctgggcagaccagaagtccacatggccctggacgtggttctggtgaggggctcaggccaggagcatgaagggtgcttgctgctgacatcagaagtgctcttcgtggtgagtgtcagtgaggacacacagcagcaggccttccccgtcacagaaatcgactgtgcacaggacagcaagcagaacaacttactcacagtgcagctcaagcagccaagagtggcctgtgatgtggaggtagatggagtccgagagagactgtcagagcaacagtacaacagactggtggactacatcacaaagacatcttgtcacctggcccccagctgttcttccatgcaaataccatgccctgtggtggctgcagaacctcccccctccactgttaaaacataccattacctggttgatccacattttgctcaggtcttccttagtaaatttaccatggtgaaaaataaagccctgaggaaagggtttccttgagtcccctctgaggtgtttattcctgcttgtgtgatttagtttttgggtttctttgagacagggtctcactgcattgcccttgctgacctcaaattctggggttcaagcaatcctcccacctcaacccacaagtagctacgactgacaagcacctgccaccataaagggctgcattttgccaccataaagggctgcatttttttaaaaagcctaggcagctctaacatcatctgatatggacacaaggccaacagtttccttatttacatccttacctctaaaagatacttcaaagtgacaaaaacgtgttccttccccacttagagacaatgattaacagggccctatatgttcttaccacatacagaggatgcatttatttttgctctatgacacttgcaaaaatctctactgtaattaatttgggtctattaactctctgttccatcatagaatgtggccaggccttacaatggagagccagagttaaaacttcaagttgcatctgtttttgggctgagtcaccacctttgcctcatgctcctttgtctgcaaaggcctaggattctttctttaaatgaaatgcttaggactttttgtggcttgttacatttgtcatttaactgcagtgctattctttgaaagctgctatgtgtattttctctgaagtctgcattttactaaaatttacaacagtctgatgattgattgattactgtccaggtacattttagaaaaagtgttcttcttccagtttgttttactaagcaaactttgagtaaatcctttgtcctatattgaatccagtcccaaagtgttcaggtgagtttctctagttccataaacaaaacatacatagtgggaactccctggtatgccatagagcacacaagaaccccaatattaatgctaacaattataccagtccattttgtttattctgtggaattgacttgacaaagcatgaagatattcccagtgtctgtctgataatattttgcatctaagaatgggtttgactcaagatcttgggttaccaagatgtcttaaatgttcagtaaatatctttcttacagtccagtagcttagagcatgtttgctgattgatattacatttaaacttggggctacagcttgttacctagaattttgagatactaagagaatgcaattttaaatgcccactgggttttatttgttttggagagaggggtctcattctgttcacccggggttagagtacagtgggaacagtcatggctcactgcagcttaagctcactgcctgggctcaagtgatcttactccagcctcccaagcagctgggactacaccaccacaggtatgcaccaccatacctggctgatttttaaaaattttttctagagatgaggtctcactatggttgcccagctggtctcatactcctcagttcacgcaattcctcccactctccacctccccaaactgctggggattacaggtgtgagccaccatgcccaacacccactgatctttaactctccaccatgttgggccataagaagtcactatataattgttactggaaagcaagacttaacgaacaattctgactatgaaaaatgtctctttcagtttgttctgtaaatatttagaaaagtgacagctgtcaacctcagagtaactatttctaaaaatgtaaatatgtattaatccttgtatcttttatggtaattttgcatattgatatgaattatataaaattgtttaaaataaaaggtgtccttgaattactgaccacccatagatgtctactgttaccaggttttacaatgcaaattttcactaatacctgggtttaatacagctcacatcactgaatgttacacatgaatttaaatgggtaatatacaggttttgttataataaagttactgattaaattaaaaaaaaaa

SEQ ID NO: 1995 - DNA, 2979 bp, Homo sapiens
tcctggaattgcacgcgcttcctgaccaccaggctctggcccttgagaagccagcggggctttgtccctgttgctctccttgccaaacccagtctctctgctagtggtggtttcggttgcgacaccgtccaggttcccaggcaggaaccgctcggcctggctgcttagctacttttcactgaggaggtggtggaaggtgtcgcctgctctggctgagtaagggtggctggctgagccggcagcccccgccctaggcctggctcttcccggcctctgtactttgccctcgctgcctgacaggttctgctgtgggctctgctgaatggaagtcgctggtagtccttttccctttctccagtcggcccaccttgggacaccttgactccaagcccagcagtaagtccaacatgattcggggccgcaactcagccacctctgctgatgagcagccccacattggaaactaccggctcctcaagaccattggcaagggtaattttgccaaggtgaagttggcccgacacatcctgactgggaaagaggtagctgtgaagatcattgacaagactcaactgaactcctccagcctccagaaactattccgcgaagtaagaataatgaaggttttgaatcatcccaacatagttaaattatttgaagtgattgagactgagaaaacgctctaccttgtcatggagtacgctagtggcggagaggtatttgattacctagtggctcatggcaggatgaaagaaaaagaggctcgagccaaattccgccagatagtgtctgctgtgcagtactgtcaccagaagtttattgtccatagagacttaaaggcagaaaacctgctcttggatgctgatatgaacatcaagattgcagactttggcttcagcaatgaattcacctttgggaacaagctggacaccttctgtggcagtcccccttatgctgccccagaactcttccagggcaaaaaatatgatggacccgaggtggatgtgtggagcctaggagttatcctctatacactggtcagcggatccctgccttttgatggacagaacctcaaggagctgcgggaacgggtactgaggggaaaataccgtattccattctacatgtccacggactgtgaaaacctgcttaagaaatttctcattcttaatcccagcaagagaggcactttagagcaaatcatgaaagatcgatggatgaatgtgggtcacgaaggatgatgaactaaagccttacggggagccactcccgtgactacaaggacccccggcggacagagctgatggtgtccatgggttatacacgggaagagatccaggactcgctggtgggccagagatacaacgaggtgatggccacctatctgctcctgggctacaagagctccgagctggaaggcgacaccatcaccctgaaaccccggccttcagctgatctgaccaatagcagcgccccatccccatcccacaaggtacagcgcagcgtgtcggccaatcccaagcagcggcgcttcagcgaccaggctggtcctgccattcccacctctaattcttactctaagaagactcagagtaacaacgcagaaaataagcggcctgaggaggaccgggagtcagggcggaaagccagcagcacagccaaggtgcctgccagccccctgcccggtctggagaggaagaagaccaccccaaccccctccacgaacagcgtcctctccaccagcacaaatcgaagcaggaattccccacttttgggagcgggccagccttcggccagggcttccatccagaatgggcaaagacagccttaaccatgccagggtcccgggcctccacggcttctgcttctgccgcagtctctgcggcccggccccgccagcaccagaaatccatgtcggcctccgtgcaccccaacaaggcctctgggctgccccccacggagagtaactgtgaggtgccgcggcccaggcaagtgtgctggggcagctgcacagccccccagcgtgtccctgttgcctccccatccgcccacaacatcagcagcagtggtggagccccagaccgaactaacttcccccggggtgtgtccagccgaagcaccttccatgctgggcagctccgacaggtgcggggaccagcagaatttgccctacggtgtgaccccagcctctccctctggccacagccagggccggcggggggcctctgggagcatcttcagcaagttcacctccaagtttgtacgcaggaacctgaatgaacctgaaagcaaagaccgacgtggagacgctcagacctcacgtggtgaagcagtggcggcaacgacaaagaaaaggaagaatttcgggaggccaagccccgctccctccgcttcacgtggagtatgaagaccacgagctccatggagcccaacgagatgatgcgggagatccgcaaggtgctggacgcgaacagctgccagagcgagctgcatgagaagtacatgctgctgtgcatgcacggcacgccgggccacgaggacttcgtgcagtgggagatggaggtgtgcaaactgccgcggctctctctcaacggggttcgatttaagcggatatcgggcacctccatggccttcaaaaacattgcctccaaaatagccaacgagctgaagctttaacaggctgccaggagcgggggcggcgggggcgggccagctggacgggctgccggccgctgcgccgccccacctgggcgagactgcagcgatggattggtgtgtctcccctgctggcacttctcccctccctggcccttctcagttttctcccacattcacccctgcccagagattcccccttctcctctcccctactggaggcaaaggaaggggagggtggatgggggggcagggctccccctcggtactgcggttgcacagagtatttcgcctaaaccaagaaattttttattaccaaaaaga

SEQ ID NO: 1996 - DNA, 4578 bp, Homo sapiens
aaaggcaaatctaatggtacctggctgttcttaagaatgcatagagaggcttagcaggctgggattgattgaagcttatttcctgcttgaaactgacagtgtttatggccccaacttaaaactgcctattacttcaggccaaagggttccatggcgaaattgaggatttgcagcagtggctgactgacacggagcgtcatctgttggcatctaaaccgctgggaggtttaccggaaacagccaaggagcagcttaatgtccatatggaagtctgtgctgcctttgaagctaaagaagaaacatataagagtctgatgcagaaaggccagcagatgcttgcaagatgcccaaaatctgcagagacaaatattgaccaagacataaataacttgaaagaaaaatgggaatcggtggaaaccaaactcaatgaaagggaaaacttaaactggaagaggctctcaacttggccattggagttccacaattctcttccaagacttcatcaactggcttactcaggctgaacagaccctaaatgtagcttctcggccaagtctcatcttggacacagtcttatttcaaattgacgaacacaaggtttttgccaatgaagtaaattctcatcgtgagcagataatagagctggacaaaactggaacccacctaaaatattttagtcagaaacaagatgttgttctaatcaagaatctacttatcagtgtacaaagtcgatgggaaaaagtggttcaacggttggtagagagaggaagatctttggatgatgcaaggaagagagccaagcagttccatgaagcttggagtaaacttatggagtggctagaagagtcagaaaagtctttggattctgaactggaaatcgcaaatgatccagacaaaataaaaacacaacttgcacaacataaggagtttcagaaatcactcggagccaagcattctgtctacgacaccaccaacaggactggacgttctctgaaggagaaaacctccctggctgatgacaacctgaaactggatgacatgctgagtgaactcagagacaaatgggataccatatgtggaaaatctgtggaaagacaaaacaaattggaggaagcccctgttattttctggacaattcacagatgccctacaggctctcattgattggttatatagagttgaaccccagctggcagaagaccagcctgttcatggagacattgatttggtgatgaatctgatcgataatcacaaggccttccaaaaagagttggggaagaggaccagcagtgtgcaggccctgaagcgctcagcccgagaactcatagaaggcagtcgggatgactcctcctgggtcaaggtccagatgcaggaattaagcacacgctgggagaccgtgtgtgcactttctatatcaaagcaaacacggttagaagcagccctgcgtcaggcagaggaattccactcggtggtacatgccctcttggagtggctggctgaggcggagcaaaccctgcgtttccatggtgtcctcccagatgatgaggatgctctccggactctcattgatcagcataaagaattcatgaagaaactggaagaaaagagagctgaactaaataaagccaccactatgggcgacaccgttttggctatctgccaccccgactccatcactaccattaagcactggataacaatcatccgggcgaggtttgaggaggtgctggcctgggcaaagcaacatcagcagagattagcaagtgctctggctgggcttattgccaaacaggaattgttggaagctttgctggcttggttgcaatgggctgaaactacacttactgataaggataaagaagtcatcccccaggagatcgaagaggtgaaagcactcattgcagaacaccagaccttcatggaggaaatgaccagaaaacagcctgatgttgataaagtaacgaagacctataagaggagagctgctgatccttcctcattacaatcccatattccagtcttggataagggacgagcaggaagaaaacgctttccagcatcaagcttgtatccctctgggtcacagacacaaattgaaaccaaaaatcctagggtaaacttactggtgagcaaatggcagcaagtctggctcctggcgttggaaagaaggaggaaactcaatgatgccttggacagactagaggagctgagggaatttgctaactttgattttgatatctggcgcaaaaaatacatgcgatggatgaatcacaagaaatctcgagtgatggacttcttcaggagaattgataaagaccaggatgggaaaataacgcggcaggaatttattgatggaattctttcctcaaagtttccaaccagtcgcttggagatgagcgcagttgcagacatctttgacagagatggcgatggatatattgactactatgaatttgtagcagcccttcacccaaataaagatgcatataaacctatcacagatgccgacaaaatcgaagatgaggtgacaaggcaggtagctaagtgtaaatgtgcaaagcgatttcaagttgagcagattggtgataataaatacaggttcttcctgggaaatcagtttggagactcccagcaactgcgactggtccggatcctgcggagtactgtgatggttcgtgttggaggtggatggatggcacttgatgagttcttagtgaaaaatgatccttgcagggccaaaggaaggacaaacatggaactgcgtgagaagttcattttagcagatggtgccagccagggtatggctgctttccgaccccgaggccgaagatcccggccatcatcacgaggcgcttcacccaacagatccacttctgtgtccagtcaggctgcgcaggcggcctccccacaggtccctgccaccaccacacccaagattctccatcctttaacacgcaattatggtaaaccatggttgacaaacagcaaaatgtcaactccttgtaaagcagcagagtgctcagactttcccgtgccatctgcagagggaacgccaatacaaggaagcaagcttcgacttccaggatatttatcagggaaaggcttccactctggggaggacagtggcttgataacaactgcagctgccagagtccgaacacagtttgctgattccaagaagactcccagccgaccaggaagtcgagctggaagcaaagctggcagcagggccagcagccgccgaggcagtgatgcatcagactttgacatttcagaaatccagtccgtgtgctcagatgtggaaactgtcccccagacacacagacctacaccccgagcaggttctcggccatccacagcgaagccttcaaaaatccccacgccccagaggaaatcacctgccagcaaattggacaagtcctcaaagagatagtgcaattggttctaccaaggcccttccttgagcatttattatttaagtttgaacgatgtaaaatatggtgtagaaattcttgtgaaatattgcaagaggcgagtttaaaattctgcagatggccttatttgtgtatttgtctttttattttatctgtataattttttttgtcagatattctggggttaaagtcacatcatatgtgaggaggaaaagtttaacatgaactaacatttctgcactgtaacgtgccgggcacacactaaactcagttactgtacctacaggtaagtctacatcctctctgacagccacagcactacatcaatccctgacgttagggatacctcatgacattttcctgtttttatggaaactctgagaagctgaatgatacatgcaggggatattttttgagatgatttaaatgtaaaccaaaagatggaagacaaaaagacaaacacacccacacgcagtctttgcagtatctgacagagaactcacaggaagttacttcaagcacttgccagtactatgatattcaagtaccttgcagcatttctctgccattgctttcaatgaggccagaggcatcctggatattagacctattatactgtaagaatataagtataaagtgcgttcatatacatgtgaggttttcttttgcttgagtggacagtagcacctgtatcattgaactcattttgtatcagagcaattttgcttgcagaaagctatgaaataaaacacgtcccttaactgcattgctatggaattaattttttttccccagggaaaactagtgtatttttttatgagcaatatcaatttggagtgaccaaaagatacttaaaaatgggtttattttgatttctcatctgaaataatcatgttctggatattagacctattatactgtaagaatataagtataaagtgcgttcatatacatgtgaggttttcttttgcttgagtggacagtagcacctgtatcattgaactcattttgtatcagagcaattttgcttgcagaaagctatgaaataaaacacgtcccttaacacgcaattatggtaaaccatggttgacaaacagcaaaatgtcaactccttgtaaagcagcagagtgctcagactttcccg

SEQ ID NO: 1997 - DNA, 4578 bp, Homo sapiens; identical to SEQ ID NO: 1996

SEQ ID NO: 1998 - DNA, 3309 bp, Homo sapiens
atggcggcgggcggcgcggagggcggctcgggccccggcgccgccatgggggactgcgcggagattaagtcgcaattccgcacgcgcgagggtttctacaagctactcccgggcgacggcgccgctcgcaggtcgggtccggcttccgcccagactccggtgccgcctcagccaccgcagcccccgcccggccctgcctccgcctccggtcccggcgctgcaggccccgcgtcgtccccgccgcccgcaggccccggacccgggcccgccctgcccgccgtgcgcctcagcctcgtgcgcctcggggagccggacagcgccggggccggggagccgcccgccacgcccgcggggctgggctcggggggagaccgcgtctgcttcaacttgggccgtgagctctatttctacccaggctgctgtcgtcgtgggagccaacggtggcatacaccattaactccttttctcccacccctcaagtccattgacctcaacaagccaattgacaagcggatctacaagggcacccagcccacctgccacgatttcaaccagttcactgctgccaccgagaccatctcgctgctggtgggcttctcagcgggtcaagtgcagtacctggatctcatcaaaaaggacaccagcaagctgttcaatgaggagcggttgatcgacaagaccaaggtgacatatctgaagtggctgcctgagtcggagagcctgttcctggcatcacacgccagtggccacctgtacctgtacaacgtcagccacccctgcgcctcggccccgccccagtacagcctgctgaagcaggtcatggggcttctctttctatgctgccaagagcaaggcaccccgcaacccgctggccaagtgggcggtgggtgaggggcccctcaacgagttcgccttctcgcccgatggccggcacctggcctgtgtgagccaggatggctgcctgcgcgtcttccacttcgactccatgctcctgcgtgggctcatgaagagctactttgggggcctgctgtgtgtgtgctggagccctgacggccgctacgtggtgacgggtggcgaagatgacctggtcaccgtgtggtccttcaccgagggccgcgtggtggctcgaggccatggccacaagtcctgggtcaacgctgtggcctttgacccctacaccacaagggcagaggaggcggcgacagcagccggtgctgatggggagcggagcggcgaagaggaggaggaggagcccgaggctgcgggcacaggctcggccgggggcgccccgctctctccactgcccaaggctggctccattacttaccgctttggctcggcgggccaggacacgcagttctgcctgtgggacctcactgaagacgtgctctacccgcacccccccctggcccgcacccgcaccctccctggcacacctggcaccacgccaccggccgccagcagctcgaggggtggcgagcctggcccaggccccctgcctcgctcgctgtcccgctccaacagtctcccgcacccagctggcgggggcaaggcgggcggcccgggtgtggcggcagagcctggcacaccattcagcattggccgcttcgccacgctcacactgcaggagcggcgggaccggggggcagagaaggagcacaagcgctaccacagcctgggcaacatcagccggggtggcagtggcggcagtggcagtggtggggagaagcccagcggccctgttccccgcagccgcctggaccccgccaaggtgctgggcactgcgctgtgcccgcgcatccacgaggtgcccctgctggagccccttgtgtgcaagaagatcgcccaggagcggctcacagtcctcctgttcctggaggactgcatcatcactgcctgccaggagggcctcatctgcacctgggcccggccgggcaaggcgttcacagacgaggagaccgaggcccagacaggggaaggaagttggcccaggtcacccagcaagtcagtggtagagggcatctcctcccaaccaggcaactccccgagtggcacagtggtgtgaagccatggatatcgggcccccccaaccccatgcccccagcctcctagccataaccctccctgctgacctcacagatcaacgtattaacaagactaaccatgatggatggactgctccagtccccccacctgcacaaaatttgggggccccccagactggcccggacacgggcgatgtaatagcccttgtggcctcagccttgtcccccacccactgccaagtacaatgacctcttcctctgaaacatcagtgttaccctcatccctgtccccagcatgtgactggtcactcctggggagacactccccgcccctgccacaagagccccaggtctgcagtgtgcccctcagttgagtgggcagggccgggggtggtccagccctcgcccggcccccaccccagctgcccttgctattgtctgtgcttttgaagagtgttaaattatggaagcccctcaggttcctccctgtcccgcaggacctcttatttatactaaagttccctgttttctcagcgggtctgtccccttcggaggagatgatgtagaggacctgtgtgtgtactctgtggttctaggcagtccgctttccccagaggaggagtgcaggcctgctcccagcccagcgcctcccaccccttttcatagcaggaaaagccggagcccagggagggaacggacctgcgagtcacacaactggtgacccacaccagcggctggagcaggaccctcttggggagaagagcatcctgcccgcagccagggcccctcatcaaagtcctcggtgttttttaaattatcagaactgcccaggaccacgtttcccaggccctgcccagctgggactcctcggtccttgcctcctagtttctcaggcctggccctctcaaggcccaggcaccccaggccggttggaggccccgacttccactctggagaaccgtccaccctggaaaggagagctcagattcctcttggctctcggagccgcagggagtgtgtcttcccgcgccaccctccaccccccgaaatgtttctgtttctaatcccagcctgggcaggaatgtggctccccggccaggggccaaggagctattttggggtctcgtttgcccagggagggcttggctccaccactttcctcccccagcctttgggcagcaggtcacccctgttcaggctctgagggtgccccctcctggtcctgtcctcaccaccccttccccacctcctgggaaaaaaaaaa

SEQ ID NO: 1999 - DNA, 3853 bp, Homo sapiens
ttttttttttttggctccactggctttaatctgccccacctcttccacaccaacctcccaccttggggttcgagggggctgggttacaaaccccctgtttttttaggagaccgaaaacccccccccggttcctgtaaaaattaagtcccaggtccacaggtaaaggcttgatttggggcccaccccaagggagtgtgggctgtgaggcaggagcgagctaaacctgtaggagcagcgccacggctgccaggatccacttcgctgccttctctttggtcttcaagttaaaggtccagacataggtggggccgcggatgcgtgttttgtacacgggacactcatagatgttcttggtctccatgcgggccacaggaatggccttgatgaagatgacaggcatggccggggtcagctctttcagccgcgcttcagcgatgactccagtctgggtgtcccagcgagccccttccatgaagagtccgtacacgtaggagccctctcgtgggggagcggtcatgtcctctcggtttttcttggtcacctcgacagacagacacatcttgtccaggggccactcgttcttcctggccatggactgcatgatggccgtgaggaacgactgggggttgaagaagccggccagccacacggtggtgggcagggcaaagtctgtcgtccaggcctcgagttccctgatgcggagcagcaggtttgcgtaccaggccgccaggcccatcatggaggggtaggcccgggccacccacgtatcaggcacggtgtcatagaagagagccgtggacagatcttccacgtcggtcgtgatggtcagttctcccttcagccccaggttcagctccttgagcgaacggcgcatttcgttggtcaggatgttcattctttcacattcttgaaaggcgactaccacatagggggtcttttccgctgcctttgccatgatctcagccatgttgaaagtctccggaatcttctccaggatgtcgtccagcacggccttcaccttctcctcgcgggacactcccgtgcctgcccccgagtccgtctcttttggctgcatttccaggacagtgcggaacagcttctctgaggtgaccgtcagaaagccaatctctgcgttggggtgcaggccatacagatagggactctcagggggcaggttctcatcgatgtattcgtggtaacccttgtagtccaggttgggggggatctgaaagccgggggccagcaggacgtctccctccagcatctccgtccggatgtattcagccaggtaggtcctgcacagccgacggtcccagtcatctgtgatgtggccgccatacatgatttcaccaaaaaggtagcggagatcgtcccagggcaccttggggttggcctccaggtagttgtagagcacgttgatggagatggtgaggtccccgttgttgaaggggtacgaccggttccagccctgggcgccgaacttgcgcctctctgccaccacagcgtggaagtagcacagggcgaagagcatgcacttgaactccatctccttggtgcacatctccagggtgtcctgggtgaacaggtccagggccttgtacaagttggcgtacatgcccgtggggggctcgttggtgatcttgatggcgttctccagaatgccctgggggatgatgtgggtctcgggactgggggcaggctccgctctgatgaacacccggtagtcctcatgtctgcccgtgctgtagcgctccagcttcttgtccagtgttcccagccaccgggccaccaggtggatattctgcagaatgacccagtgtcctttctctgcagccacgtccagggcgttctcagccaccacctcttgtccctgccccagggacacattatggagttttccattgtctatggtaaaccctagtttttttcccagggcttccacgtctttcaaggggtcaacccccggggagaggatgaagaagattgacgtggaggggctgctctcctcgtaggacttagaaaactcaacactccggccttccacgaacttgctgcccatcttttcctccacgaagttcttgatagcgtaggtcatgcgatctggccgcaggcagcgcaccatgcacagcttctgcagggccgtcttgttcttccactccttggggaagatctccttctcgggggcttccgactccaccagctttttccagcgcttggcagatccttcgatgtcactgtccagatttttgaactcatccatctccgagagggccttgatcccgccccagccttgatgctggaggaagtccactggtgagaccactccggccttaaaagggaaccgcaggaggaaatccagctccactgggttcagctccttcttcatggacaggacctgaaacgtaacttgtgccaggaaaatgagtttgtccctctcgaagagtccccgggccgtgtacatgtagacggagtaggtgatctcgtccgtcaggttgatcacccgctgcttcacctcgttggcaggggtggtcctctggatggctttctcaaacaccacgttgaaggccttgagggagaactggtagacggggttgattttgttgagatcgttcagtatgaagtagagcagagatgccctctccgcagccgggcggtagttctctctcgcttcgttgattttaacttctgtgatttttgcctccaccaccttctcctcgatctcgctggctgtgtgcttggtggtctccagattctccaccaaggccgtgtctcccagaaagttccccgacgcagccgacagacgggccaggagcgaatcttccagctctttcagaacaatcttaaattcgttttgagacttggtgaggtttgccttcagctgttccagatctgggcgctctttggccaccacagcggccaagagttggtcctcgagtccatccctggtgaccaggaagttgatgagggtgcactgagcctgcatctctggcttgtagtgtgggttgaagtacttggtgtgtaggatcaggcggaacttggggtggtactcccacctccttgtcaccgatcttaatgtactttccctttttaatcgtgttcctgcccagtagagggtccagcgcggggtccacggtttcgccgatgttctcaatgagcaacgtgtccccttccgaggtggcctgctcgatgacatccaggtagctcttctgtcccaggcggatggctttcagttcactcctgtatttgtttttgatccacttgattccttggagctgggcgtccacgatcagcggccaccgctcggtgttgcccaggatggtggcattctcggtggacatgcggtcgctggggaggccctggttgttccaggtggccacgtccgcgtcatctgtcagcaggctcaagggatccaggccattcgtgatcgggatggggacctttaagttatgtatgtaagggatccagaatttctccatcagctcattccggtatttcttggtgaagtagcccacgtaggacacgaaggcagagatgagcaggacgtccccacacagcgtgaccccctggctcctgaagttctccacagactcagcccagcggatgttttccgatgctaatcccccgaccagcctgttcgccagtaagatcaccctgttcgtggcatcggcctcttgctgacacttgattttctcagctgttgctttttcaaacgctgaggttaggttgctcaggttggcgttaagttcctgcaaaaccaagttggaaagctgctggaaaaccccacgaggcatctctagccccctgcagcggcagcagggctgggccctgtgagcgctgagacgaaatcgtcgac

SEQ ID NO: 2000 - DNA, 1732 bp, Homo sapiens
tttcgtgctttttcctgggatagcgatggagacgccgggcgcatcagcgtcgtccttgttgcttcccgccgcgtccaggcccccgaggaagcgcgaggcgggagaggctggggctgcgacgagcaagcagcgggtcctggacgaggaagagtatatcgagggcctccagacggtcatccaaagggatttctttcctgatgtggagaagctccaggcacagaaggagtacctggaagccgaggagaatggagacttggaacggatgcgccagattgccatcaagtttggctctgccttgggcaagatgtcccgggagcccccgccaccctatgtgactccagccacatttgaaacccctgaggtgcatgcaggcactggagtggtgggcaacaagcccaggccccgcggccgaggcctggaggatggagaggctggagaggaggaggagaaggagccgctgcccagcctagatgtcttcctgagccgctacacgagtgaggacaatgcctccttccaggagatcatggaggtggccaaggagagaagccgggcacgccacgcttggctctaccaggctgaggaagagtttgagaagaggcagaaagataatctcgaactcccgtcagcagagcaccaggccatcgagagcagccaggccagtgtggagacctggaagtacaaggccaagaattccctcatgtactatccagagggtgtccctgacgaggagcagctgtttaagaagccccggcaggtggtacataagaacacgcgcttccttagggaccccttcagccaagccctgagcaggtgccagctccagcaggcagccgccctcaatgcccagcacaaacagggcaaggtgggccccgatggcaaggagctgatcccccaggagtcccctcgagtgggtggatttggatttgttgccactccttcccctgcccctggtgtgaacgagtccccgatgatgacctggggggaggttgagaacacacccttgagagttgaagggtcggaaacgccctacgtggacaggacacccggcccagcttttaagatcctggagccaggccgcagggagcggctgggtctgaagatggccaacgaggccgctgccaagaaccgggccaagaagcaggaagccttgcggagagtgacggagaatctggccagcctcacccccaaaggcctgagcccagccatgtcgccagccctacagcgccttgtgagcaggacggccagcaagtacacagaccgggccctgcgggccagctacacaccatccccagcacgctccacccacctcaagaaccccgggccagtgggctgcagacccccacaaagcacaccgggcgctctggctctgccacacgcacccctcttcacacaggacccggccttcaatcacggacaacctgctgcagctccctgcccggcgcaaagcttcggacttcttttagagccaggcctgggctgggctcatagacgcttcacagagcctgcagggcagctgtacacccagcagaggactccagccttctcggggcccaggcctgggccagaagctgttgaccataccaggagtcactggagaaaggggctgtgctggggccagactggcacaaggcactcgtgcccacaccacaccccagggccttgccaagctgtttgctgtttaattggccccttgaactgtcattaaagaacacctaggtacagtcaaaaaaaa

SEQ ID NO: 2001 - DNA, 2213 bp, Homo sapiens
ttttttttttttaactaaaatggtcacttttaatgggaaccagaggtatagttacaattacatagtccgacacaaaaaaacccttgggtgatcaggaattggaaggttacaaaataacgagggtaacactgggtacaggacaaaaagctgttccagaacctggggagccaggctaattaatacggcctctccctgcgatcctgtctgtgctcacccctggaatccatcttgccagggccaaagccacctctgtccccaccaccccggccccctcggaagcctccacggtccccgccgcggccccggtagccgcctcgatcatagcctcctctgccaccacgacgatcatccccgtagttaccccccatgtgagagccacctggtccccctcctgggccatctggtttaggggccttacactggttgcattcattcctccaagagaagttcatattctcacaggtgggattaggacacttccagtcaccagctcgctgctgtcctccaccgccaccacctccactgggaaatcctcctcggccaccaccaccactgccaccacctccatagcctccacggcccatgggtcctcctcgccctcggcctccacgaccattgccaccaccccgattaaagtctgcccggcgagtagcaaatgagaccttgataggatttccggagaattctttaccatcaaaccagtcaatagctgctttagctgaaggtgggtcatcaaaagagaccgttgcctctcccttcagcttgccagtttccctgtctgtgtacaaattaatcatgggctgtcccgttttcttgtttgtcttaataataccaatctgcttgaagtaatcagccacagactcaattgtaacattctcacccaggccttgcacaaagatggtgttgttgtctgaattatcctgttcggagtcatgacgtgatccttggtcccgagggccaccaaatttattgaagccaccacggtcacttccgcccatgccacctctgcctccacggccacctccacgacctctgggttcatagccaccactgctgcggttgtaaccagcagcgccgccgcgagccgccgccaccactgccacccctgcagcggcctccacggtcctggctgtcgatagccacggctgccagctgcaccagtctggtcttgattgccataaccaccaccaccaccactgccgccgccgccgccacctccgccgccaccaccactaccactcatggaggattgatcttggccatagctacctccacctccacctccacctccaccaccactgctgctgttgtactggttctgctgtccatagcctcgagggggattatagctttgctgctgtccatagctttgctgctgtccaccatagctaggctgctggctgtagctcccactctggggctgcccatagctgctgctctgagaactgctaccgtaacttcccgaggtgctgctgggagctggctgctggccatagccaggataggaggactgctgcccgtaagacgattgggagctctggctactgccatagccgccagtcgagccatatccctggggagttgactgagttccatagctgttctggctctggccataagaagaatagctgctctggccatagcctgaagtgtccgtggactggctataaccactgtaactctgctgtccgtagggctgactgctctgctgggaatagccctgcccgggctgggtggggtaggccccatagctttgggttgcttgttgggtataatcgtttgaggccatgtccgcgcacgcgcgcacaggcaagcaagcaacgaagttccaacaccgctgagcaccgacgcctggaggactgagcagccccgcctcctgcgtcgaagcttaagtacgctccgccgcctacgcaccgcgcaggcgcgcaccaaacgcggaagagcagggggaggcaggaacgcactccgcccccttcgtagggcaggtagagggtccgagcaggcagaagggaaacaagttaactagaatcatgcgaatactatacataatcatattttttgaggaagaacccctctctcctcggcaggactagcccacgatctatctccacccccatgaaggcacagtggtacggcctgagtgcccgctgggggcggggcgagggggcggtcccggcggctggggacgaaactggagtcacagccggggagag

SEQ ID NO: 2002 - DNA, 2213 bp, Homo sapiens; identical to SEQ ID NO: 2001

SEQ ID NO: 2003 - DNA, 1418 bp, Homo sapiens
ttttttttttttcttttccattggtttatttgtatattggtccacaacacattgaagcctcacagttccaagaatttttttttttttcatatttgtggcaaactgaggtagagacaatgcttggcacagaataggtactagataaatattagtggaatgaacagccgaagcgactgacttctaaatggagcagattgctcatttcacttctgttcctccacctcaacaaacctttacatcctcactgggtttgtgagggccagaggacaggtgtgggccttgggtgtgatagggaaatgctaattttatacaacctgagggcatctgggtctcaccttttgacccccaaatgccctcaaaatgggattcaatgagccagggagggctttgaggaaggagggagccatttgcccttcctcctggccagaagagaatttgaatttgctttgagtagcttatgggcagggctggaaggtgcagttcatgactggtcagcagctttgaggctgatggaggcatggggaaggattaggggcctgggagaaagcattttatttccctgtaccccaccaccccaacatgggggagaaaaacacaacagcaaactgaacagagcagaggccgaggcagcaagaacccaaagacggaagctgcttctagcatcaggctccaggatgcaactgcggctctcagctctgccggctgagcttccagatcctgcgaagcaagtcaggttccttccttccctgccaggctggagtaaggaggctgttctaggcaggcagtctgcagctgctcaccaaggtctggaacaagctgccttccttctttgccgagcagatgtggatggcggtgggcctggctaatcaggggtgttctgctccggacaggctcatctagatttccatcctgccaaaagtttgtccttctctcaaacgattccgggaggagcgcaaactcggctcttggggagggcaggcgggccgggtacccttgaaggcgcaggcgcctgatacagagcaggccccggggaagcaggactcgggggcacggtcgccaaagtggggacccgagcagcgatccggagggagagcattcaggcgcccgggctgggggctacactgctggcgcgggatggcccaggacagagtgggcgctatagcgtgagtggccatcagggccgggcgggcccggggaactggagggagaggtccctgggtccctggcgacgtctctcgctttctccagtttctgccgtgctggcgtgccccagcccacaacattccctcgacctcttctggggcggcgctcaggccccccacatggcgaaaagggagggtgaagggatgaggcgcccctcccgccttagcccctcctcagcccccacgccacagcccccactttctccccagacgaaa

SEQ ID NO: 2004 - DNA, 1014 bp, Homo sapiens; identical to SEQ ID NO: 36

SEQ ID NO: 2005 - DNA, 4956 bp, Homo sapiens
ttctcccgggacgacgatttcgttgaaaatcacagttattttgtttctgggtgggaaaagcaggtgatattctcagtggagaccaggacaaggaacagaaagacccttactttgtggagaccccctatggttatcaactagacttagatttcctcaaatatgtggatgacatacagaagggaaataccatcaaaagactgaacatccagaagaggcggaagccgtccgtgccatgcccagaacccaggaccacatctggtcagcaaggtatatggacttccactgaatccctctcatcctccaacagtgatgacaacaagcagtgccccaacttcctcatagccagaagtcaagttacatcaactccaatctcaaagccacctccccctctggagacctcactcccttttcttaccatcccagaaaatcgacagctgccacctccctcaccacaactcccaaagcataaccttcatgtcaccaagacactgatggagacccggagaagactggaacaggagagagccaccatgcagatgacaccgggtgagttcagaaggcccaggctggccagttttggaggcatgggcaccacaagctccctcccttcttttgtgggttctggaaaccacaatcctgccaagcaccagcttcagaatggataccaaggtaatggggattatggtagctatgccccagctgctcccaccacttcctccatggggagctccatccgccacagccccctgagctcagggatctccaccccagtgaccaacgtgagccccatgcacctgcagcacatccgcgagcagatggccattgctctgaaacgcctgaaggagctggaggagcaggtgcgaaccatccctgtgctccaggtaaagatctctgtcttgcaagaagagaaaaggcagttggtctcacagctgaaaaaccaaagggctgcatcccagatcaatgtctgtggtgtgaggaagcggtcctatagtgcggggaacgcctcccagctggaacagctctcccgggcccgaagaagtggcggggaattatacattgactatgaggaggaagaaatggagaccgtagaacagagcacgcagaggataaaggagttccggcaactttacagcagacatgcaagccctggagcagaagatccaggacagcagctgtgaggcctcctcagagctcagggagaatggagagtgccggtctgtggctgtgggtgccgaggagaacatgaacgacatcgtcgtgtaccacagaggctccaggtcctgtaaggatgcagctgtagggacacttgttgagatgagaaattgtggggtcagcgtgacagaggccatgcttggagtgatgactgaagctgacaaagaaattgagctgcaacagcagaccatagaatccttgaaggaaaagatctatcgcctagaagtacagcttagagaaaccacccatgaccgggagatgactaaactgaaacaagagctgcaggctgctggatcgaggaaaaaggttgacaaagccacgatggcccagccgcttgttttcagtaaggtggtggaggcagtggtgcagaccagagaccaaatggtcggcagtcacatggacctggtggacacgtgtgttgggacctccgtggaaacaaacagtgtaggcatctcctgccagcctgaatgtaagaataaagtcgtagggcctgagctgcctatgaattggtggattgttaaggagagggtggaaatgcatgaccgatgtgctgggaggtctgtggaaatgtgtgacaagagtgtgagtgtggaagtcagcgtctgcgaaacaggcagcaacacagaggagtctgtgaacgacctcacactcctcaagacaaacttgaatctcaaagaagtgcggtctatcggttgtggagattgttctgttgacgtgaccgtctgctctccaaaggagtgcgcctcccggggcgtgaacactgaggctgttagccaggtggaagctgccgtcatggcagtgcctcgtactgcagaccaggacactagcacagatttggaacaggtgcaccagttcaccaacaccgagacggccaccctcatagagtcctgcaccaacacttgtctaagcactttggacaagcagaccagcacccagactgtggagacgcggacagtagctgtaggagaaggccgtgtcaaggacatcaactcctccaccaagacgcggtccattggtgttggaacgttgctttctggccattctgggtttgacaggccatcagctgtgaagaccaaagagtcaggggtggggcagataaatattaacgacaactatctggttggtctcaaaatgaggactatagcttgtgggccaccacagttgactgtggggctgacagccagcagaaggagcgtgggggttggggatgaccctgtaggggaatctctggagaacccccagcctcaagctccacttggaatgatgactggcctggatcactacattgagcgtatccagaagctgctggcagaacagcagacactgctggctgagaactacagtgaactggcagaagctttcggggaacctcactcacagatgggctccctcaactctcagctcatcagcaccctgtcgtctatcaactctgtcatgaaatctgcaagcactgaagagctgaggaaccctgacttccagaaaaccagtctgggtaaaatcacaggcagttatttgggatatacctgtaagtgtgggggccttcagtcaggaagtcccttaagctcccagacatcccagcctgagcaagaagtggggacctcagaaggaaagccaatcagcagcctggatgccttccccactcaggaaggtacgctgtctccagtgaacctgacagacgaccagatcgccgctggcctctatgcatgtacaaacaatgaaagtacactgaagtccatcatgaagaagaaagatggtaacaaagattcaaatggcgcaaaaaagaatcttcagtttgttggcattaatggagggtatgaaacaacttcaagtgatgattccagctcagatgaaagctcttcttccgagtcagatgacgagtgtgatgtcattgagtatcctcttgaagaagaggaggaggaggaggatgaagacactcggggaatggcagaagggcaccatgcagttaatattgaaggtttgaagtctgccagggtggaagatgaaatgcaggttcaagaatgtgaacctgagaaggtggaaatcagagagaggtatgaattaagtgaaaagatgttgtctgcatgcaacttactgaaaaatactataaatgaccccaaagctttgaccagcaaagatatgaggttctgtctgaacaccctccagcacgagtggttccgcgtgtccagtcagaagtcagccattccagccatggtgggggactacatagctgcttttgaggccatttccccagatgtcctccgctatgtcatcaacttggcagacggcaacggcaacacagccctccattacagcgtgtcccactccaacttcgagattgtgaagctgctgttagatgccgatgtgtgtaatgtggatcaccagaacaaggcaggctacacccccatcatgttggcggccctcgccgctgtggaagcagagaaggacatgcggattgtggaagaactcttcggctgtggggatgtgaatgccaaagctagtcaggcgggacagacggccctcatgctggcggtcagtcacggacggatagacatggtgaagggccttctggcctgtggggctgatgtcaacatccaggatgacgagggctccacggccctcatgtgtgccagcgagcacgggcacgtggagattgtcaagctgctgctggcccagcccggctgcaacggtcacctagaggacaacgatggcagcactgcgctctcaatcgccctggaagcaggacacaaggacatcgctgttcttctgtatgcccatgtcaactttgcaaaagcccagtctccgggcacccctaggcttggaaggaagacgtctcctggccccacccaccgaggttcatttgattgattgtatgcaaatagccctttatttacatgccactattaagctgctaattgttcctgttggggtgacagatactgaatgtatacgtattgtgcctgagctcaccagcaaacagaagcatcaagcccaggggtaaaggctgaagctttcacagtgcagagactgctagcctgggcacacgcacctcctttctggccgtcttctgtgtagggcacactttaacccagtctctgttgctgttgagtctctgctccgttttgtacagtcacagggaattctgatctgaaggggcaccttctgttcactcccacaaagtggtgtctggttctcactgagacgttttaagatttttccacaaatatttatatgtactaaatgtggaaccattagaaagttcttccaaaatctcattccagcatagttttggatttttcttttgtcttattttaaaataaggaagtcgagatgactttgatcattggtaacttgggcctgggccagacaaagtataaaacttacaaaagaatattctcatttggtcttaactaggtagatgtaatatatgactttttataaaaagggtatctatatgaacttgacacagtattttcagcttttgtattccatactaaagccatgaagaactacacgtaacatcatcatttgtattaattgcacaactccaatgctaaaggttggattgtgttagaggaatcggctctgtatttgcctctagagaaacacagtgttctctttgtatttatggattcctttttaccgtgtcacatttactttggtcctctatgtatttaaatgtttgaagtgccttagactcttgccatattttcaaaataaaattccattaagctcttaaaaaaaaaa

SEQ ID NO: 2006 - DNA, 1687 bp, Homo sapiens
gccgcggtcgctatggaggagccggagatgcagctcaaggggaagaaagtcacggacaagttcactgagagcgtctacgtcctggccaacgagccatccgtggccctgtaccggctgcaggagcatgtgcgtcgctccctccccgagctggcccagcacaaggcagacatgcagcgttgggaggagcagagccagggagccatctacactgtggagtacgcctgcagcgccgtgaagaacctggtggacagcagcgtctacttccgcagcgtggagggtctgctcaaacaggccatcagcatccgggaccatatgaatgccagtgcccagggccacagcccggaggaaccacccccgccctcctcagcctgatcctggaagagactcggggccccccagcctccgccaacccagacaaagatcattccactcagcctgggacgatggggaggaaaaaaatccagatctcccgcatcctggaccaaaggaatcggcaggtgacgttcaccaagcggaagttcgggctgatgaagaaggcctatgagctgagcgtgctctgtgactgtgagatagccctcatcatcttcaacagcgccacccgcctcttccagtatgccagcacggacatggaccgtgtgctgctgaagtacacagagtacagcgagccccacgagagccgcaccaacactgacatcctcgagacgctgaagcggaggggcattggcctcgatgggccagagctggagccggatgaagggcctgaggagccaggagagaagtttcggaggctggcaggcgaagggggtgatccggccttgccccgaccccggctgtatcctgcagctcctgctatgcccagcccagatgtggtatacggggccttaccgccaccaggcgtgtgaccccagtgggcttggggaagcactgcccgcccagagccgcccatctcccttccgaccagcagcccccaaagccgggcccccaggcctggggcaccctctcttctcaccaagccacctcaccagcaagacaccacccccactgtacctgccgacggaagggcggaggtcagacctgcctggtggcctggctgggccccgagggggactaaacacctccagaagcctctacagtggcctgcagaacccctgctccactgcaactcccggacccccactggggagcttccccttcctccccggaggccccccagtgggggccgaagcctgggcgaggagggtcccccaacccgcggcgcctccccgccgacccccccagtcaagcatcaagtctgagcgcctcttcctccggcccccgggggccccggcgactttcctaagaccttcccctatcccttgctcctcgcccggtccctggcagagcctctgcggcctgggcccgcccctgcgccggttgcccttggccgacggctggccccggtaggagatcacccggtggcaccagcccagagcgctcgccaggtacggcgagggcacgtggggacccccacctccctccaggccttttcagagaagacccatacagtgacagcccccctccgcggtgggggcttggaggtgggcggctggactcaatccagcgctggggggctcctttccttcttcctatttgtgtgtatatccacaaataaaaacgcgcgtggcgtccgtggaccagaaaaaaaaaa

SEQ ID NO: 2007 - DNA, 1708 bp, Homo sapiens
cgatccctcaacccctgcactgcgctagtcctaaagaggaaatgtctctacgctgcggggatgcagcccgcaccctggggccccgggtatttgggagatatttttgcagcccagtcagaccgttaagctccttgccagataaaaaaaaggaactcctacagaatggaccagaccttcaagattttgtatctggtgatcttgcagacaggagcacctgggatgaatataaaggaaacctaaaacgccagaaaggagaaaggttaagactacctccatggctaaagacagagattcccatggggaaaaattacaataaactgaaaaatactttgcggaatttaaatctccatacagtatgtgaggaagctcgatgtcccaatattggagagtgttggggaggtggagaatatgccaccgccacagccacgatcatgttgatgggtgacacatgtacaagaggttgcagattttgttctgttaagactgcaagaaatcctcctccactggatgccagtgagccctacaatactgcaaaggcaattgcagaatggggtctggattatgttgtcctgacatctgtggatcgagatgatatgcctgatgggggagctgaacacattgcaaagaccgtatcatatttaaaggaaaggaatccaaaaatccttgtggagtgtcttactcctgattttcgaggtgatctcaaagcaatagaaaaagttgctctgtcaggattagatgtgtatgcacataatgtagaaacagtcccggaattacagagtaaggttcgtgatcctcgggccaattttgatcagtccctacgtgtactgaaacatgccaagaaggttcagcctgatgttatttctaaaacatctataatgttgggtttaggcgagaatgatgagcaagtatatgcaacaatgaaagcacttcgtgaggcagatgtagactgcttgactttaggacaatatatgcagccaacaaggcgtcaccttaaggttgaagaatatattactcctgaaaaattcaaatactgggaaaaagtaggaaatgaacttggatttcattatactgcaagtgggccctttggtgcgttcttcatataaagcaggtgaatttttcctgaaaaatctagtggctaaaagaaaaacaaaagacctctaaaacttcaacaagaccttcaagatcacagaaatttttaaaatttgattccagttaataacagaggtggtgccagaatgcctggactgcagtggatgtaccccacctctttgcttaaaaaaaaaaatgtcaatagccaggcatagtggctcacgcctgtaatcccagcactttagggaggcccaaggcgggtggatcacctgaggtcaggagtttgagacccagccctggccaacatggtgaaatcctgtctccactaaaaacacaaaaattagtcaggcgtggtagtgggtgcctgtaatcccagctactcgggaggctaaggcaggagaatcacttgaacctgggagggggaggttgcagtgagccaagatcgctccattgccctccagcctgggtgacaagagcaaaactccatctcaaataaataaaaaggaaaaaaaagtcaataaactgtacaaatttaattacagtaattcatttggcttttagtgtatcttctttgtcccaattaaacagttgcttgctgtgatgtaatcttaaaaaaaaa

SEQ ID NO: 2008 - DNA, 1966 bp, Homo sapiens
agccggttcctggtgtccccacttcgcctccctcctgctgcccccaagacatgcaggggccctgggtgctgctgctgctgggcctgaggctacagctctccctgggcgtcatcccagctgaggaggagaacccggccttctggaaccgccaggcagctgaggccctggatgctgccaagaagctgcagcccatccagaaggtcgccaagaacctcatcctcttcctgggcgatgggttgggggtgcccacggtgacagccaccaggatcctaaaggggcagaagaatggcaaactggggcctgagacgcccctggccatggaccgcttcccatacctggctctgtccaagacatacaatgtggacagacaggtgccagacagcgcagccacagccacggcctacctgtgcggggtcaaggccaacttccagaccatcggcttgagtgcagccgcccgctttaaccagtgcaacacgacacgcggcaatgaggtcatctccgtgatgaaccgggccaagcaagcaggaaagtcagtaggagtggtgaccaccacacgggtgcagcacgcctcgccagccggcacctacgcacacacagtgaaccgcaactggtactcagatgctgacatgcctgcctcagcccgccaggaggggtgccaggacatcgccactcagctcatctccaacatggacattgacgtgatccttggcggaggccgcaagtacatgtttcccatggggaccccagaccctgagtacccagctgatgccagccagaatggaatcaggctggacgggaagaacctggtgcaggaatggctggcaaagcaccagggtgcctggtatgtgtggaaccgcactgagctcatgcaggcgtccctggaccagtctgtgacccatctcatgggcctctttgagcccggagacacgaaatatgagatccaccgagaccccacactggacccctccctgatggagatgacagaggctgccctgcgcctgctgagcaggaacccccgcggcttctacctctttgtggagggcggccgcatcgaccatggtcatcatgagggtgtggcttaccaggcactcactgaggcggtcatgttcgacgacgccattgagagggcgggccagctcaccagcgaggaggacacgctgaccctcgtcaccgctgaccactcccatgtcttctcctttggtggctacaccttgcgagggagctccatcttcgggttggcccccagcaaggctcaggacagcaaagcctacacgtccatcctgtacggcaatggcccgggctacgtgttcaactcaggcgtgcgaccagacgtgaatgagagcgagagcgggagccccgattaccaccagcaggcggggggtgcccctgtcgtccgagacccacggaggcgaagacgtggcggtgtttgcgcgcggcccgcaggcgcacctggtgcatggtgtgcaggagcagagcttcgtagcgcatgtcatggccttcgctgcctgtctggagccctacacggcctgcgacctggcgcctcccgcctgcaccaccgacgccgcgcacccagttgccgcgtcgctgccactgctggccgggaccctgctgctgctgggggcgtccgctgctccctgagtgccccactccggagttatcctgctccccacctccgggcgtcctgccctgttccccgtcctgagccgccacttccagcgaacacacacaggtgtcctgccgttggaccttcacctcctagagataaaccagcctcagctggcgcagcggggcccttcttccctccgcatccccttcagggagcaggagcccagggcgccctgggagctgagcctgggacttccaggacctcccctcaggttgttctctgattcttcctcccaaccccagagactgcagatttgtgccatgcggctgcctgcaccccagacaataaagggaccaaaac

SEQ ID NO: 2009 - DNA, 1343 bp, Homo sapiens
cggacgcgtgggcgcggctgctcaagatgaaccgactcttcgggaaagcgaaacccaaggctccgccgcccagcctgactgactgcattggcacggtggacagtagagcagaatccattgacaagaagatttctcgattggatgctgagctagtgaagtataaggatcagatcaagaagatgagagagggtcctgcaaagaatatggtcaagcagaaagccttgcgagttttaaagcaaaagaggatgtatgagcagcagcgggacaatcttgcccaacagtcattcaacatggaacaagccaattataccatccagtctttgaaggacaccaagaccacggttgatgctatgaaactgggagtaaaggaaatgaagaaggcatacaagcaagtgaagatcgaccagattgaggatttacaagaccagctagaggatatgatggaagatgcaaatgaaatccaagaagcactgagtcgcagttatggcaccccagaactggatgaagatgatttagaagcagagttggatgcactaggtgatgagcttctggctgatgaagacagttcttatttggatgaggcagcatctgcacctgcaattccagaaggtgttcccactgatacaaaaaacaaggatggagttctggtggatgaatttggattgccacagatccctgcttcatagatttgcatcattcaagcatatcttgtaaaacaaacacatattatgggactaggaaatatttatctttccaaatttgccataacagatttaggtttctttcctttctttgaaggaaagtttaattacattgctcttttattttttccattaagagactcattgcttgggaaatgctttcttcgtactaaaatttgattcctttttttcttatgaaaaacgaactcagtttaaaagtatttttagctcgtatgacttgttttcattcattaataataatttgaaataaaactaaggaaatggaatcttaaaagtctatgacagtgtaactctacagtctcaaaatgacctgataaattgataagacaaagatgagattattggggctgttcatattatgattcagaatcattttctattgtggtattataggttggttaaagtgatggcctttttgatgggttttgttgtgtcttgtgaacaagtcgttactgtgtccattattggaatggaattatcactactgtatcatgagtgggtattttgattctatggttccctcagtattacatcttgacttgtaatcaattatgaatatttcttgatatttaatgtataggacatttatttatactcaataaatatttttcaaaaaaaaaa

SEQ ID NO: 2010 - DNA, 2062 bp, Homo sapiens
ttttttttttttcagagacaaacactttttaatttcagtagcagtagggaaaaataacagcatccatgcattaaaactaagagccttcacaaagacgtttcaagatgtattttgaacaaaagaggacaggctcttgggccccctctgggtcctgcctcagcacatcgagtcctcaaatccgagtgaggaaagtctggggagctgcactgtggagccatcagaaagtacctggagcggctgctgctgggctggaaaagccgcagaagtcctcggcggtagctggggttgctatggcaacaggagtcccaggctgcccgtgctttctggccacaacctttacctcatcattaatgacttcaaagtggctcctcttcctcttcttcaatgtccaaatcattctgcctaagatatgcttgtaatggtccatacagtctctccttgaaagctaagaaatccatcatgttcccttgaaagtgttgcaagaaaaacagttcaatcaaatactccttgaagacctccttcagagcctgcatctcctggtgatgatagtccaggcactgcttcctcatctgtgccatctccggagaggctgggggaatctcctctaacttcttgggaaccttcttcattcccgtgttccccacagacgtgagtgggaggctggaaaggcctgggggcacggcagtcctggaagggctggtgggcgggggtggggacgtcatcccaaaccccgctgcgcccccagccccggggagcagcacgccgggcgtcctctcgaagcccaggggccggggcagcggcggcccctgcagcacctgctgctgctgaaccagctggccctggatgatgctgctgatctgcggtggcaagttagccgtggtgatgtggcttgggctggccaggggctgcaggccggccccacccgcggctgcagggctctggggtcccaggtggtggatggtgccccctgactgtgtgtggggctgggagggtctccgctctcggactgtgatgggcgtacccgggtgctggagctgaacctgggctccctgggcgatctgggtgagccctgacccatcctgaaacacaaagtgtccaccactggaggggctcaagctgatctgcctcaccagcacgctggcatccacgaagtcccctgtagggctgctgctgcagaggcccagcccagggccaggggcacctgcacgcacattctgcaaggcctgccccggccccggactgggctgcgtgggactctgggtctggacctgctgggacaagggggacgtgacctgaatgtatgatggagacccatgctcaaaccgccgaggctgagcgctgaactggaagcctggagaggtggggctggggagcggcagtggggccagcgtgacctgtgggcttccctggagcccagggcccacgccctgcaggtcaacattcatgttctgcccacccgcagggccccctctcaccatcagctgctgtagttggtggctgggggatggcagtgtgaggggcagggacggctgggagcacgctggctgctcctcgcccgcgccggggcaggccccaggccactggacatggcgctggctgctctgggagctgctgacgtgctgcatgactacgtcttcaggaaatgctccccagctcttgggcaagataagtgtctttattataaaaggcgtcaattcgcagcgtctttactgtaaaggtggtggtattattagattcttcctttccactaacacaaaactcccagtgccggaaggcccttgtcaggagcaggacccgcggaggggtccgtggtcagttctgggacagctgccgagcagcgcagcgcgtggaatcaacttcactgctcacgtgcagcgcacactaagcgcactcgtctttcctggagtgcagaccaggccccgacctcagggatcaggacagcggggccaaggggtcaagaggcagaggcggcgtcagcgccgtagacagcggtctcgcgaggctggaaccaggcgggcggcagtgacgggggtgggcaccaggggactgctcgtgccgaatt

SEQ ID NO: 2011 - DNA, 998 bp, Homo sapiens
gcagcgcgccgtccggaattgacgcatcgacccacgcgttcgcccggtgcaagcacccaatcaatgtgagacgagaccccagcatccctatctatggactccgacagtccatcttattaaataccaggcttcaggactgctatgtggactcgccggctctcaccaacatctggatggccagaacatgtgcaaagcagaacattaatgccccagcaccagctaccacttcctcttgggaagttgtaaggaacccattaattgccagttccttctccctggttaagcttgtactcaggcggcaactgaagaataagtgctgcccaccaccatgcaagtttggagaaggaaaactctcgaagagattaaagcacaaggacgattcagtgatgaaagccacccagcaggccaggaaaagaaacttcatcagttccaagagcaagcagccagcagggcataggaggcctgcaggaggcatcagagagagtaaagaaagttcaaaggagaaaaaactaacagtccgccaagatcttgaggacagatatgctgaacatgtggctgccaccccaagcgctaccccaggacagtgggacagcagcctggaagggcccgagtgttgcttcctgaaacccaaaagagacagcagttgtcggaggacacgctaaccatccatggtctccccacagagggttaccaggctctgtaccacgctgtggtggagccaatgctgtggaatccttcagggacccccaagaggtacagcctggagctgggcaaggccattaaacaaaagctctgggaggctctttgcagtcagggtgccatctctgaaggtgctcagagggaccggttccctggcaggaagcagccaggtgtccacgaggagcctgtactcaagaaatggcccaagttaaagagcaaaaaataggaacaagaactcatgggattagagtattctctgctagagatctgaaaaataaacacaactttgcaccttcaaa

SEQ ID NO: 2012 - DNA, 1716 bp, Homo sapiens
atgggaaatttggaattaagccttcccagaggagaatttctgggaaatctacatttcatagtgaaatggagggtgaagacacaagagatgattcattatactctattttagaagaattgtggcaagatgctgaacagataaagagatgtcaggaaaaacacaacaaacttctgagtcgcactactttcctcaataagaaaatattgaatacagagtgggattatgaatataaagactttggaaaatttgttcatccaagcccaaatctcattctttcacagaaaagaccccataaacgtgattcatttgggaagagttttaagcataatttagacttacatattcataataaaagcaatgcagcaaagaacctggataaaactattgggcatggtcaagtttttacccagaactcttcttatagtcaccacgaaaatacacatacaggagtgaagttctgtgaacgtaatcaatgtggaaaagtcctcagcctcaaacactcactcagtcaaaatgtgaaatttcccattggagagaaagcaaacacatgtactgaatttgggaagatcttcacccagaggtcacatttctttgctcctcaaaaaattcatactgtggaaaaacctcatgagcttagcaaatgtgtaaatgtttttacacagaagccactactcagtatatatctgagagttcatagagatgaaaaactctacatatggtactaaaatgtgggaaagggccttcatcccagaaattcagaattaattatgcatgagaaaactcatactagagagaaaccctataaatgcaatgaatggtgggaaatcatttttccaggtgtcatctctactcaggcatcagacaactcatactggagaaaaactctttgaatgcagtgaatgtggtaaaggcttctccctgaactcagccctcaatatacatcagaaaattcacactggagagagacatcacaaatgcagtgagtgtgggaaagcctttacccaaaaatcaacactcaggatgcatcagagaattcatacaggagagaggtcctatatctgtactcaatgtgggcaggccttcatccagaaggcacacttgattgcacatcaaagaattcatactggagagaagccttatgaatgcagtgactgtgggaaatctttcccttctaagtcacaactccagatgcataagagaattcatacaggagagaaaccctatatatgcactgaatgtgggaaggctttcaccaacaggtcaaatctcaatactcaccagaagtctcatactggagaaaagtcttatatatgtgctgaatgtgggaaggccttcaccgacaggtcaaatttcaataaacaccagaccattcacactggagagaaaccctatgtttgtgctgattgtgggagggccttcatccagaagtcagagttgattacacatcagagaattcatactacagagaagccttataaatgtcctgactgtgagaaatccttctccaagaaaccacatctcaaagtacatcaacgaattcacacaggggagaaaccatatatatgtgcagaatgtgggaaagccttcactgataggtcaaatttcaataaacatcagacaattcatactggagataaaccgtataaatgcagcgactgtggaaaggggttcacccagaaatcagttctcagtatgcatcgcaatattcatacatga

SEQ ID NO: 2013 - DNA, 2057 bp, Homo sapiens
  misc_feature (1)...(2057): n = a,t,c or g
cggccgcgtcgacccgcaccatggggtcccgccacttcgaggggatttatgaccacgtggggcacttcggcagattccagagagtcctctatttcatatgtgccttccagaacatctcttgtggtattcactacttggcttctgtgttcatgggagtcacccctcatcatgtctgcaggcccccaggcaatgtgagtcaggttgttttccataatcactctaattggagtttggaggacaccggggccctgttgtcttcaggccagaaagattatgttacggtgcagttgcagaatggtgagatctgggagctctcaaggtgtagcaggaataagagggagaacacatcgagtttgggctatgaatacactggcagtaagaaagagtttccttgtgtggatggctacatatatgaccagaacacatggaaaagcactgcggtgacccagtggaacctggtctgtgaccgaaaatggcttgcaatgctgatccagcccctatttatgtttggaggccctactggaatcgggggacttttggctactttttctgacaggctaggacgccgggtggtcttgtgggccacaagcagtagcatgtttttgtttggaatagcagcggcgtttgcagttgattattacaccttcatggctgctcgcttttttcttgccatggttgcaagtggctatcttgtggtggggtttgtctatgtgatggaattcattggcatgaagtctcggacatgggcgtctgtccatttgcattccttttttgcagttggaaccctgctggtggctttgacaggatacttggtcaggacctggtggctttaccagatgatcctctccacagtgactgtcccctttatcctgtgctgttgggtgctcccagagacacctttttggcttctctcagagggacgatatgaagaagcacaaaaaaatagttgacatcatggccaagtggaacagggcaagctcctgtaaactgtcagaacttttatcactggacctacaaggtcctgttagtaatagccccactgaagttcagaagcacaacctatcatatctgttttataactggagcattacgaaaaggacacttaccgtttggctaatctggttcactggaagtttgggattctactcgttttccttgaattctgttaacttaggaggcaatgaatacttaaacctcttcctcctgggtgtagtggaaattcccgcctacaccttcgtgtgcatcgccatggacaaggtcgggaggagaacagtcctggcctactctcttttctgccagtgcactggcctgtggtgtcgttatggtgatcccccagaaacattatattttgggtgtggtgacagctatgggttgggaaaattttgnccatcggggcagcatttgggcctcatttatctttatacagctgagctgtatccaaccattgtaagatcgctggctgtgggaagcggcagcatggtgtgtcgcctggccagcatcctggcgccgttctctgtggacctcagcagcatttggatcttcataccacagttgtttgttgggactatggccctcctgagtggagtgttaacactaaagcttccagaaacccttgggaaacggctagcaactacttgggaggaggctgcaaaactggagtcagagaatgaaagcaagtcaagcaaattacttctcacaactaataatagtgggctggaaaaaacggaagcgattacccccagggattctggtcttggtgaataaatgtgccatgcctgctgtctagcacctgaaatattatttaccctaatgcctttgtattagaggaatcttattctcatctcccatatgttgtttgtatgactttttaataaattttgtaagaaaattttaaagcaaatatgttataaaagaaataaaaactaagatgaaaattctcagttttaaaaactgctttcttattgctgcaaaatatttttcaacatttgtttttctatgtagttgattctcaacctttccccaccacccccctaccaagctcgtgccgaattctgcgc

SEQ ID NO: 2014 - DNA, 3111 bp, Homo sapiens
cgcagcgtcccgccagccagctccttgcacccttcgcggccgaggcgctccctggtgctccccgcgcagccatggctcagcacttctccctggccgcctgcgacgtggtcggattcgacctggaccacactctgtgtcgctacaacctgcccgagagcgccccgctcatttataatagctttgcccagttcctagttaaggagaaagggtacgataaggaattgctcaatgtgaccccagaggattgggatttctgttgcaaaggtttggcattggatctagaagatgggaacttccttaaacttgcaaataatggcactgttctcagggcaagccatggcaccaagatgatgactccagaggtgctggcagaggcatatggcaagaaagagtggaagcacttcttgtcggacactggaatggcttgccgctcaggaaagtattacttttacgacaactactttgacctgccaggagctcttctgtgtgccagggtggtggactatttaacaaaactgaacaatggtcaaaaaacatttgatttttggaaggatatagttgctgctatacaacacaattataaaatgtcagcttttaaggaaaactgtggaatatattttccagaaataaaaagagatccaggcagatatttacatagtcgtcctgaatctgtgaaaaaatggcttcgacagctaaagaatgctgggaaaattcttctgttaattaccagttctcacagtgattactgtagacttctctgcgccatatattcttgggaatgattttacagacctttttgacattgtgattacaaatgcattgaagcctggtttcttctcccacttaccaagtcagagacctttccggacactcgagaatgatgaggagcaggaggcactgccatctctggataaacctggctggtactcccaagggaacgctgtccacctctatgaacttctgaagaaaatgactggcaaacctgaacccaaggttgtttattttggtgacagcatgcattcagatattttcccagctcgtcactatagtaattgggagacagtcctcatcctggaagaactcagaggggatgaaggcacgaggagtcagaggcctgaggagtcagagcctctagagaagaaaggaaaatatgagggaccaaaagcaaaacctttaaatacttcatctaaaaaatggggctcttttttttattgattcagttttgggactggaaaatacagaagactccttggtttatacatggtcttgtaagagaatcagtacttacagcactattgcaattccaagtattgaagcaatcgcagaattacctctggactacaaatttacaagattctcttcaagcaattcaaaaacagctggctactatccaaatcctccactggtcttatcaagtgatgagacactgatatccaaataagttgtctttactgaaaaatgaagtgaagacccatatatgcagttaaaaaaaagttaattttcaaaaaatactgtaaaagactttaaggaacaagttttattgaccaataagttgatatttgtccataggtctcctttctataaatcatcttgatgtttaacaactcttattatattaaaatctcagtatcctaaaacttagaaccttattgatattttctatacagtagttttgtgattagaattcacctggggacacacactcacacgcacagtcactcttacacatatgcctagtccagtggttctcaaagtgtgatccatagactaatagcatagcattacctgagaacttgataatgcatatttgcaggccccacgcaaaacctgctgaatcagaagctctgagagtaaggcctacccaatctggtttaacaagcccgtcaggtgattctgatttacagtacagtttgagacccactggctagaacatatcctccagagacttggcttaattggtctgggtaaatatggctgagcgttgttatcttttgttatcttttatatgccctaggaaagtacaaccagaattgaaaaccaactgaggtataccagttctttcaattaatagtcaagaacattgagtccagtgagattaagtgatttttgcaggctatgaggttttatgctattcctgtgttctccaaaacaagaaaataaaaagacatgacttattctctgttcatacagcaagtatggaaaaaagatgatctagaagtcaactatctcaacctccattgttacccactaggtttttttctaataatgttaaaggctatttaatttatttaatcaactttaagcattacattctcaattggggacaaaaattggttcttggggtgaaaaaatattagatatggcttgtggacttccaatatcatcctatccaacaaaatcttattccttagtattaatttatctcattgggaagaaatttgtagttaaaactaatataatttgaatttaatttctgtaattgggaaggagggtaataatgaacaaaaagtttgagaaaaaaatgctttaatgggttttacaggcatgctacaatccaggactgtggtgttctatgtgccgtgtatggtcatattagtagctatttgttgcaagatacttgaagccaaatgtttgcagtataggttcctggctactgtttatgctgtgatttcactctgtctatcatgggcagtattagaaaacacactggttttcactatctggtttacaaaccctatcattattttacctggattgaagtgcagaatttggcatatcgatgcatgcaatggaaagaaaaaaaatttgttaaaatttgtaaatgttcagctaaatctcagatatactgtgggatgagtatctcagggtaggtaacaaaaaaacaaacaaaaaaaaatcactgaaatttttccctcacagtcagtagctttgtttgatatttaacaataagtatatggtgatatacttgaaatttatgtccagaatgtcactggaatattacaatgagcataaataatcaagcttaggactaaatgaaagatactatctcatgtatgctttaaatagagaatttatttcttttaaaaataaagctatttttccttaaaaaaa

SEQ ID NO: 2015 - DNA, 4113 bp, Homo sapiens
aatgaagccttgaggacgtcgcaccggactggaattcctgggtcgacgatttcgtggcagcggggaccagggctggcaggttaagcctctgggggtggatcctgaaaggtggtccagccgcctggccctgcgtgggaccctccacctggcagcaggtacccaaacaagggctggacagcagggtctcgctctgtcacacaggctggagtgcagtggtgtgatcttggctcatcgtaacctccacctcccgggttcaagtgattctcatgcctcagcctcccgagtagctgggattacaggtggtgacttccaagagtgactccgtcggaggaaaatgactccccagtcgctgctgcagacgacactgttcctgctgagtctgctcttcctggtccaaggtgcccacggcaggggccacagggaagactttcgcttctgcagccagcggaaccagacacacaggagcagcctccactacaaacccacaccagacctgcgcatctccatcgagaactccgaagaggccctcacagtccatgcccctttccctgcagcccaccctgcttcccgatccttccctgaccccaggggcctctaccacttctgcctctactggaaccgacatgctgggagattacatcttctctatggcaagcgtgacttcttgctgagtgacaaagcctctagcctcctctgcttccagcaccaggaggagagcctggctcagggccccccgctgttagccacttctgtcacctcctggtggagccctcagaacatcagcctgcccagtgccgccagcttcaccttctccttccacagtcctccccacacgggcgctcacaatgcctcggtggacatgtgcgagctcaaaagggacctccagctgctcagccagttcctgaagcatccccagaaggcctcaaggaggccctcggctgcccccgccagccagcagttgcagagcctggagtcgaaactgacctctgtgagattcatgggggacatggggtccttcgaggaggaccggatcaacgccacggtgtggaagctccagcccacagccggcctccaggacctgcacatccactcccggcaggaggaggagcagagcgagatcatggagtactcggtgctgctgcctcgaacactcttccagaggacgaaaggccggagcggggaggctgagaagagactcctcctggtggacttcagcagccaagccctgttccaggacaagaattccagccaagtcctgggtgagaaggtcttggggattgtggtacagaacaccaaagtagccaacctcacggagcccgtggtgctcaccttccagcaccagctacagccgaagaatgtgactctgcaatgtgtgttctgggttgaagaccccacattgagcagcccggggcattggagcagtgctgggtgtgagaccgtcaggagagaaacccaaacatcctgcttctgcaaccacttgacctactttgcagtgctgatggtctcctcggtggaggtggacgccgtgcacaagcactacctgagcctcctctcctacgtgggctgtgtcgtctctgccctggcctgccttgtcaccattgccgcctacctctgctccagggtgcccctgccgtgcaggaggaaacctcgggactacaccatcaaggtgcacatgaacctgctgctggccgtcttcctgctggacacgagcttcctgctcagcgagccggtggccctgacaggctctgaggctggctgccgagccagtgccatcttcctgcacttctccctgctcacctgcctttcctggatgggcctcgaggggtacaacctctaccgactcgtggtggaggtctttggcacctatgtccctggctacctactcaagctgagcgccatgggctggggcttccccatctttctggtgacgctggtggccctggtggatgtggacaactatggccccatcatcttggctgtgcataggactccagagggcgtcatctacccttccatgtgctggatccgggactccctggtcagctacatcaccaacctgggcctcttcagcctggtgtttctgttcaacatggccatgctagccaccatggtggtgcagatcctgcggctgcgcccccacacccaaaagtggtcacatgtgctgacactgctgtgcctcagcctggtccttggccctgccctgggccttgatcttcttctcctttgcttctggcaccttccagcttgtcgtcctctaccttttcagcatcatcacctccttccaaggcttcctcatcttcatctggtactggtccatgcggctgcaggcccggggtggcccctcccctctgaagagcaactcagacagcgccaggctccccatcagctcgggcagcacctcgtccagccgcatctaggcctccagcccacctgcccatgtgatgaagcagagatgcggcctcgtcgcacactgcctgtggcccccgagcccggcccagccccaggccagtcagccgcagactttggaaagcccaacgaccatggagagatgggccgttgccatggtggacggactcccgggctgggcttttgaattggccttggggactactcggctctcactcagctcccacgggactcagaagtgcgccgccatgctgcctagggtactgtccccacatctgtcccaacccagctggaggcctggtctctccttacaacccctgggcccagccctcattgctgggggccaggccttggatcttgagggtctggcacatccttaatcctgtgcccctgcctgggacagaaatgtggctccagttgctctgtctctcgtggtcaccctgagggcactctgcatcctctgtcattttaacctcaggtggcacccagggcgaatggggcccagggcagaccttcagggccagagccctggcggaggagaggccctttgccaggagcacagcagcagctcgcctacctctgagcccaggccccctccctccctcagccccccagtcctccctccatcttccctggggttctcctcctctcccagggcctccttgctccttcgttcacagctgggggtccccgattccaatgctgttttttggggagtggtttccaggagctgcctggtgtctgctgtaaatgtttgtctactgcacaagcctcggcctgcccctgagccaggctcggtaccgatgcgtgggctgggctaggtccctctgtccatctgggcctttgtatgagctgcattgcccttgctcaccctgaccaagcacacgcctcagaggggccctcagcctctcctgaagccctcttgtggcaagaactgtggaccatgccagtcccgtctggtttccatcccaccactccaaggactgagactgacctcctctggtgacactggcctagagcctgacactctcctaagaggttctctccaagcccccaaatagctccaggcgccctcggccgcccatcatggttaattctgtccaacaaacacacacgggtagattgctggcctgttgtaggtggtagggacacagatgaccgacctggtcactcctcctgccaacattcagtctggtatgtgaggcgtgcgtgaagcaagaactcctggagctacagggacagggagccatcattcctgcctgggaatcctggaagacttcctgcaggagtcagcgttcaatcttgaccttgaagatgggaaggatgttctttttacgtaccaattcttttgtcttttgatattaaaaagaagtacatgttcattgtagagaatttggaaactgtagaagagaatcaagaagaaaaataaaaatcagctgttgtaatcacctagcaaaaaaaaaaaaagggggggcccttttaaaagaacccttggggggcccaattttaacgggggagggcaaggaaaaatttttttctttatggggggcggaataaaaaccactttgggaattttggaaaggaaccttttttttgggggggggccatatgggcccaccccccccacggattttaagggctttagggaaaaaaaaaatttttaaggggaaaaggggggaaaacaaccccaaaagccttgctgttgaa

SEQ ID NO: 2016 - DNA, 4357 bp, Homo sapiens
aagcggctcgggctgcggctggctcagagtgccgcggggggcgtggggcggtgctgaggagctgaagccgtggccagctcgacgccggacagtccagcgagcagcacggcgggaaccggcagccggagcagtcccggagcagaagcagcagcagcagcagcagccctcgccgttcgcggagcgcagccgagccggccatggcgttgtcgatgccgctgaatgggctgaaggaggaggacaaagagcccctcatcgagctcttcgtcaaggctggcagtgatggtgaaagcataggaaactgccccttttcccagaggctcttcatgattctttggctcaaaggagttgtatttagtgtgacgactgttgacctgaaaaggaagccagcagacctgcagaacttggctcccgggacccacccaccatttataactttcaacagtgaagtcaaaacggatgtaaataagattgaggaatttcttgaagaagtcttatgccctcccaagtacttaaagctttcaccaaaacacccagaatcaaatactgctggaatggacatctttgccaaattctctgcatatatcaagaattcaaggccagaggctaatgaagcactggagaggggtctcctgaaaaccctgcagaaactggatgaatatctgaattctcctctccctgatgaaattgatgaaaatagtatggaggacataaagttttctacacgtaaatttctggatggcaatgaaatgacattagctgattgcaacctgctgcccaaactgcatattgtcaaggtggtggccaaaaaatatcgcaactttgatattccaaaagaaatgactggcatctggagatacctaactaatgcatacagtagggacgagttcaccaatacctgtcccagtgataaggaggttgaaataggcatatagtgatgtagccaaaagacttcaccaagtaaaatcgcgtttgttaaaagaggtgtctttcatgtcttccccttaaggaatacggttttcctaacaggctactccttcctgtagagcagaaattgtattttgcacgaacatgcagttattgaagattaggatcaaggatagacaaggtatagtagttatcttaaaatatacactcctaagcagtattattttaaaatcctttaccctggctacctcccctacccgggttcccctctctttaatttggagacactccaccacaaacttttcactttagaggtagcttgccatctctcaggagccctcaccattgtgtccattcactgtgtatagatggcagaacttttgaggtgcaatgtttaattgttaaaaatagtagccacgactttatcaggcagccccaaactggtgcataatgcatggtacaagaaatatttatgtattttttggaattttgtaatatttagtaagagtatatgaaaggattgctactgtatcagaaatattgtttcaatttagtctatcctggatatgtactaacgaatattaccaccagagaagagagctttctacaaaagtcactacagattttgctatattgctttgtagatagatttttacttttgcctaaaagcatttatccttcataccaattgtaacatctgacaccatgtagaagctaaaagtttagagggagtgagcgttttctcaagaccttcctcaagcattttatctttagaagagaaactgatgggcacctgatactctgtctaaatacgtttgttatatgtgttttgccctgtgccattcatttggaactttattgcattctttattttaaaaaccttgtttttacgtaatcatagagcttgctatttgtacatctgttgagcaacactacataactgatttttagttgacttagctatagcagtacaatgattagtaatgtaaaaattaacacagaaattaacctaaggaatgaagggtgggtttgtcaaaatatcaagtaaatttttgtttctaaagtacatttaatgtagatgacctaaagaatgcgttatccatcctatataaaagaaagataaaacacaggtcaccaattttctcatttcaccccatttaccttgtatagaggattgttcattcctttgggactaagttatagttatggtgagtgtgtatttactgtagttttgcctgatctcactcattgcacttcctggagttaaattttccaacagccatgttgaggaatagcactctgcatgtttttgttttgtttttcggggttttttttaattgaagccctaaaccaggaattatttgtgttctaacaggaggatgaacttgctgaaaataaaactttgctatgtatttactcttttttaaaagacaaaagcaaaaccagactttctacgtactactccaaagactgtgattgtgactataatacatttttggtaatttttttatacctaatttgtataggaagtgctatttctcataggctgtttcttgaaattttaagtttattgctttaaaatggcagtgtttctcccactttgatatgctaacatttagtaagcactggctttatgaaagcggctttttataagtatactgcattatttgagcctatcattaattagcttagtatgaaagataaggaaaaatctccatgttgtatccatttggctcaggaagattctttgccttacctttcttagaactctttattgcttatcaaaagtttgagtacccgcttggtttttttttggtaattaaatattgtatgatttatctggttcaaggaagatgcactattcagttatctattgagaaattattttgcagtggttttagtgggtgaaaatgtcccatctgcaccagtacacaggcaggcattatcattcttcacctactttttaaatagtggcaacttgggattcattctggtgattctgaaccttgcctcatagcttaaagtataaaaaagattcaagagcagtgaggtttgttctttccagtgaatggtggactgagtggtgcgaggtggagggctaacaagaggaaagaactacattcttcagaatacagtgatgaaaattcattttgaaactcaaatattttcattttggatattctcctgtttttattaaaccagtgattacacctggccatccctctaaatgttctaggaaggcatgtctattgtgattttgatgaagacagaattatttttctctgtagaaacacagataccactttatcagggaagttagtcaaatgaaatggaaattggtaaatggacaaaagctagctagtaaaaaggacgacccagcaacatgctttaaccccattgtatgtttgtggaaagagcatagtttaacatcttgagaaatttgggacataaagttttcatggtagacagttcatgcagtatatgaattgacataatggaaataatctgattttatttttacaactaacatccattccccttcatttaaacaccttttgtgttttacttcagtgaggagattggagtctgaatggatctgttttccaagagattctgagaaatttttgtattcagcagttggaaagctctctattctagttgataaaacttcccttttttgatgtagatgcagatattctatacagttctgttgtcttttactaggactgtaaacttttgtgataaaattcaaataagattttatttcttggtaattttggctttcacaatttatctttaaatccttgagcaatctgtatacaattaagagatttctgacatttattcttacactaaatggatcaactctaggatttaggcatgttaacttctgttgtgttttgaatctctccagagttgcatgtagatagcatttatttctgtgcccttaaacccatttagaaaataactacaaagtaaaaatgtagaggaaatagaaatgtattttttcatgaacattttgatacaaatttcatcatttaatgattcaccaatttcttgcattaatttgaatttaagcatttaattcaaagagaggggagcatccattattgatacatgtgggcttttaaaaactccatcctttataaatagtcaaggtttgggccacacaaagtatatttttatcatggaaaaatttcaactcctcaagccgtaatgttgaacagaattggagtattttctttataatttcttgaacaggcaaatgaaagcttattatagaatgcatgtattttcttttatctttggaacatcagcaccagtatattgctggcagctattgtattaaaaaataaagtatattttcactatcataaaggattcttttttcccccctcatgaaaataaacaacaacttggggtaaaaaaaaaa

SEQ ID NO: 2017 - DNA, 2317 bp, Homo sapiens
tttttttttcagttgagcagacatttattaagcacctatcaagtgcaaggcactgtgctaggcgccgtgggaaatacagagaacacaggcggtccctgcccacgaggagctcacagtctagaaagggcagcaagacagtacacaatcagtggcagcagcaccagccagagtggcaagtgctcaaagcgagacacaaagtgctgtgcggtcacaacatcatggggatgcttctggcagaagcactggaaaggagacgaggactcaggctgggccttccaggagggaagccatttgggagaagggcatctctagcggagagaggtccatctgcagagcccacaggtcatgggaaacatgtggctgcagggagagtttggggacagtcaagtatggctgggaggtggacagccacggacactaagctcaggagatgtgaactttgtggtctggtcaaacagccactgcagatcacttcgcaggaggaggggtgactagaagtatgttactggaaggtaaatctggccacactgcagcatctggacggcagagggcagcgctgggaggggccagccagttagggccccaccacccctgggtgtctgagagtgggagtagcgggcaggggccagcaaagcacgagggcagagcaggggaccatacggagggtgggtgtggaagaagggaggggccccatgcaagctgcaggtctggggagcctgaggatgtcatagggcttcctggtagagtggaaagtgcactcctgaaggtcagggccagtcactacagagaggggacagcgaggagagggacggtgtggccctaagggtgactgcagtttctcaacatgtggtccgtggatcacctgcatgggaactgcctggggaatgcgctcatttgcagattcccgggccttcctccagaactactgggcaagcatctgccgggtcatgcccggtaacctacattcttaacaccagctgccctctccaccaccacgagccccaaaggtggggaaaagtctgcaagccacctgcagaggaagaatagggtgttaaggactggctttaggcaaaaagaagagacaaaaagaatgagggaggtctgggagtgagggaagtggtgggaagcagggaaagtccggtcaagccatgtgcaccaagacagagccccagcgcggccttgcagccaggcaccgggccgtccccaagggctgctctcagtccgctttcacttggtgggcgaaagccacatttgcaaactgggaagtggagagtgggaggtgaggggaagcactagcaatgaatgaagaggattcttccgggaatcaggctgtttcaatctaaaacatccaagataagtggaaaacactggggaggaaggtgatgaacagacggaggtgagccagagacaccgcctgggcaagtcggccaggaggcgggaggcgtgggtcagagacactgcaggaactgggtgaggacaaggaggtgcgaggaaaggggttgggggatggtcccacaggcagccacacctgaggcgtgggaggcaggtaggagctgggggagggcggggagaagaggggtttctgtgtgtagatctgagtcctccctcacatcccagccgtgccacaagccgcatcggcatgaggccggctctcccttcttcactggtctcaaaagccacccaggcccaacgtcccggccagacagccgagcctgcctagcaacgctgaccggccgcccaggatggcccagacaccttctgtctcctgaatgcagcctacaggggttcaaacagactgcttgcattaaggtaagacaaggctcttttacttccagagacagcggcctggagcctcgggaagaatgtaggcccaggaatcacccagcccctcaggacaacctctctgagcaacagacatcctccctgttgaatgagagtgacatctctgccctgccacctactttacatggatgccacgaagtgggagagcctgagcagtagacagggaagcggcgagcggccccactgcaggaggtagacaggctacagatacttatgcagcagccacactgaggctagtactggaggaggctgggaaccagtaatgagttcttaatggtttgattaatttgggtttttaaatattaaatattaaatatcaaggggtttcggaaggaatgatgaattccgtctcatgctgtaactgatgaaggcaaccaatgagcaatccttccttcccatagccgagaaagggaaaggggacaggccaatccctctgaagcagtaagtcagaacacgaagacttacagaactcaaa

SEQ ID NO: 2018 - DNA, 2959 bp, Homo sapiens
ggatccagagcccggagccctgtgcgctgttccggcagctgaggctcggctgggtcctcctctccctggccctgggcggggcgctcacgctagggctctgaccttgttccagaaggcgggaggcggcaggagagcgctgggtgcgcctgcgaggaggccgcccccgcgggggtgctgcctgagctgcctacggaggcgccccctggggacgcccttgccgatcccccgtcgggcaccactgaggaggaggaagagcagcctgggaaggccccggacccgcaggacccccaggacgcggagtccgactctgccaccggatcgcagaggcagtccgtcatccagcagcctgccccggacaggggcacggcgaaactgggaaccaagaggccgcaccccgaggatggggacgggcagagcctcgagggcgtctctagctccggcgacagcgcagggctggaggccgggcagggccctggggctgacgagccgggcttgtcccgcgggaagccctatgcctgcggcgagtgcggggaggccttcgcgtggctctcgcacctgatggagcaccacagcagccatggcggccggaagcgctacgcctgtcagggctgctggaagaccttccacttcagcctggccctagccgagcaccagaagacccacgagaaggagaaaagctacgcgctggggggcgcccggggcccccaaccgtccacccgcgaagcccaggcgggggctagggcgggcggtcccccagagagcgtggagggcgaggctccccccgcacccccagaggcgcagagcagacgttcccgagctcagaaggaaaaaaaggacgaggaaggggctgcttatgagtgtgtcggtgttgatttagtagttgtggaatgtgagccctggggaaataagtggaagaggcatggaccgtgtggctccactggggcgttcgcgaatgcctcctggaggaggagaccaaccagaaagaagaggcagcgtccagcaactggacaaaggccagagggcctttctggcaagaggactgggtttgggatatgagattgaaaatgacgactcggaattttcctgagagagaagtaccctgtgatgtagaagtggaaagattcacaagggaagttccctgcttgtccagtttaggtgatggttgggactgtgagaaccaggagggacacttgaggcaatcagctttaactctggagaaaccagggactcaggaagcaatttgtgaatatcctggttttggggagcatttgattgcaagctcagaccttccaccgtctcagagagttctggcaacaaatggtttccatgcacctgactcaaatgttagtggtctggattgtgaccccgccttacccagctatcctaaaagttatgcagataagagaactggtgacagtgatgcctgtggaaaaggcttcaaccattccatggaagttattcatggaagaaatccagtgagagagaagccctacaaataccctgaaagtgttaagtcttttaatcattttacctctcttggtcatcagaaaataatgaaaagaggcaagaaatcgtatgaaggtaagaattttgagaacatctttactctgagctcatcgcttaatgaaaaccagagaaatctccctggagagaaacaatatagatgtactgaatgtggcaaatgcttcaaacggaactcttctcttgttttgcatcaccgaactcacaccggagagaagccttatacttgtaatgagtgtggaaagtccttctccaagaactacaacctgattgtgcatcaaagaatccacacaggagagaagccctatgaatgcagtaaatgtgggaaagctttcagtgatggctcagctctgacacagcaccagagaattcacacaggcgagaaaccttatgaatgcctagagtgtggaaaaaccttcaaccgaaattcatccttaattttgcaccaaagaactcatacaggggaaaaaccatatagatgtaacgaatgtgggaaacccttcactgacatctcccaccttacagtgcatctcagaatccacaccggtgagaagccctatgagtgtagcaaatgtggaaaggctttccgggacggctcgtacctcacccagcatgagaggactcacactggagaaaagccctttgagtgtgcagagtgcgggaaatccttcaacagaaactctcacctcattgtgcatcaaaagatccattctggggagaaaccctatgaatgtaaagaatgtggcaagactttcatcgagagtgcgtacctcatcaggcatcagaggattcatactggcgagaagccctatggctgcaaccagtgtcagaaacttttcaggaatatcgctggcctcattaggcaccagaggactcatactggtgagaagccctatgagtgtaatcagtgtggcaaagccttcagggacagctcctgtctgaccaagcaccagagaattcacactaaggagaccccatatcagtgtccagaatgtgggaagtccttcaagcagaactctcacctggcagtacatcagagactccatagcagggagggtcccagccggtgtcctcagtgtggaaaaatgttccaaaagagctcatcccttgttcgacatcaaagagcacacctgggagagcaacccatggaaacataatggttgggggccacatgagtcttccagttcactctcactcctgtgtttaggaggcgtgtcttagatctgactcctctctggtcagtagaaaagaatcctttaagctatccagtgaattgatgaatgtgagacattgctgagccacactgttaagtctgctcattggggaactccagagacaacttaggcatgagggcagaaaagtctttggggatgattcagtctgtaccagacatgacaacacacacactggaatgaaatgtgcaaacatgggggtgact

SEQ ID NO: 2019 - DNA, 1653 bp, Homo sapiens
cagccttactgaacatctttccttctttcagccaactgctcactcgctcacctccctccttggcaccatgaccacctgcagccgccagttcacctcctccagctccatgaagggctcctgcggcatcggaggcggcatcgggggcggctccagccgcatctcctccgtcctggccggagggtcctgccgtgcccccagcacctacgggggcggcctgtctgtctcctctcgcttctcctctgggggagcctgcgggctggggggcggctatggcggtggcttcagcagcagcagcagctttggtagtggcttcgggggaggatatggtggtggccttggtgctggcttcggtggtggcttgggtgctggctttggtggtggttttgctggtggtgatgggcttctggtgggcagtgagaaggtgaccatgcagaacctcaatgaccgcctggcctcctacctggacaaggtgcgtgctctggaggaggccaacgccgacctggaagtgaagatccgtgactggtaccagaggcagcggcccagtgagatcaaagactacagtccctacttcaagaccatcgaggacctgaggaacaagatcattgcggccaccattgagaatgcgcagcccattttgcagattgacaatgccaggctggcagccgatgacttcaggaccaagtatgagcacgaactggccctgcggcagactgtggaggccgacgtcaatggcctgcgccgggtgttggatgagctgaccctggccaggactgacctggagatgcagatcgaaggcctgaaggaggagctggcctacctgaggaagaaccactaggaggagatgcttgctctgcgaggtcagaccggtggagaagtgaacgtggagacggatgccgcacctggcgtggacctgagctgcatcctgaatgagatgcgcaaccagtacgagcagatggcagagaaaaaccgcagagacgctgagacctggttcctgagcaagaccgaggagctgaacaaagaagtggcctccaacagcgaactggtacagagcagccgcagtgaggtgacggagctccggagggtgctccagggcctggagattgagctgcagtcccagctcagcatgaaagcatccctggagaacagcctggaggagaccaaaggccgctactgcatgcagctgtcccagatccagggactgattggcagtgtggaggagcagctggcccagctacgctgtgagatggagcagcagagccaggagtaccagatcttgctggatgtgaagacgcggctggagcaggagattgccacctaccgccgcctgctggagggcgaggatgcccacctttcctcccagcaagcatctggccaatcctattcttcccgcgaggtcttcacctcctcctcgtcctcttcgagccgtcagacccggcccatcctcaaggagcagagctcatccagcttcagccagggccagagctcctagaactgagctgcctctaccacagcctcctgcccaccagctggcctcacctcctgaaggcccgggtcaggaccctgctctcctggcgcagttcccagctatctcccctgctcctctgctggtggtgggctaataaagctgactttctggttgatgcaaaaaaaaaa

SEQ ID NO: 2020 - DNA, 1869 bp, Homo sapiens; identical to SEQ ID NO: 52

SEQ ID NO: 2021 - DNA, 2618 bp, Homo sapiens
caacactgtcctgacctatcttagtcgcatccgactaccattatccagaagctgataaaaaagctttgggaaacatgaacaaaacattgatgaaatgttggaaaccagttgaaacacagtaaaaccaactgggtaaaataggaccacttctcttcatctacactgggatttgtcaagaagtgaactatgacaatacatcaatttttgctactgtttctattctgggtatgcctgccacatttctgctctccagaaataatgttcagaaggacgcctgtgccacagcaaagaattttaagttcacgtgtaccaaggagtgatggcaaaattctccatcgtcaaaaacgtggttggatgtggaatcaatttttcttacttgaagaatatacaggatctgattatcagtacgtaggcaagctacattcagaccaagataaaggagatggatcactcaaatatatcttatctggagatggagctggtactctttttattattgatgaaaaaacaggtgatattcatgccacaaggcgaattgatagggaggaaaaggccttttatactctacgcgcacaagctattaacagaagaactctgaggccagtagagccagagtcagagtttgtgatcaaaattcatgatatcaatgacaatgagccaacgttcccagaagaaatctatacagctagtgttcccgaaatgtctgttgtaggtacttctgtggtgcaagtcacagctacagatgccgatgacccttcatatgggaacagcgccagagtcatttacagcatacttcaagggcagccctatttctctgtggagcctgaaacaggtatcatcaggactgctttaccgaacatgaacagagaaaacagagagcaataccaagtggtcatccaggccaaagacatgggcggccagatgggaggcttatcggggacaaccactgtgaacatcacgctgacagatgtcaatgacaacccaccacgtttcccccagaacactattcatcttcgagttcttgaatcctccccagttggcacagccattggaagtgtcaaagcaactgatgctgacactgggaaaaatgctgaagtagaataccgaattattgatggtgacggtactgatatgtttgacatcgtgactgagaaggacacacaggaaggcatcatcactgtgaaaaagccactcgactatgagagccgaagactttatactctgaaagtcgaagcagaaaacacccatgtagatccccgtttttattacctaggaccatttaaagatactaccatagtgaaaatctctatagaagatgtggatgaacctcctgtttttagtaggtcctcctatctgtttgaagttcatgaagatattgaagtgggcacaatcattggtactgtaatggcaagggacccagattctatttccagccccattagattttccttggatcgccatactgaccttgacagaatctttaacattcattcaggaaatggatctctttatacatcaaaacctcttgaccgtgaactatctcagtggcataatcttactgttattgctgctgaaatcaacaatcccaaagagacaacacgcgtggctgtttttgtgagaattttggatgctaatgacaatgccccacagtttgctgtgttctatgacacttttgtatgtgaaaatgccagaccagggcagctaatacagactataagtgcagtagacaaagatgaccctttaggtggacagaaattttttttcagtttagctgctgtcaatccaaacttcacagtacaggataatgaagataatactgccagaatcttaaccagaaaaaatggattcaatagacatgaaatcagtacctatctcttgcctgtggtgatatcagacaatgattacccaattcagagcagcacaggcacactgaccattcgagtgtgtgcttgtgacagccaaggcaacatgcaatcctgcagtgctgaagccctgctcctccctgccggcctcagcactggggccttgatcgccatcctcctctgcatcatcattctactggttatagtagtactgtttgcagctctgaaaagacagcgaaaaaaagagcctctgatcttgtcaaaagaagatatcagagacaacattgtgagctataacgatgagggtggtggagaggaggacacccaggcctttgatatcggcaccctgaggaatcctgcagccattgaggaaaaaaagctccggcgagatattattccagaaacgttatttattcctcggaggactcctacagctccagataacacggacgtccgggatttcattaatgaaaggctaaaagagcatgatcttgaccccaccgcacccccctacgactcacttgcaacctatgcctatgaaggaaatgattccattgctgaatctctgagttcattagaatcaggtactactgaaggagaccaaaactacgattacctccgagaatggggccctcggtttaataagctaccacaaaagtatggcggtggtgaaagtgacaaagactcttaacgtaggatatatgttctgttcaaacaagagaaagtaactctaccgatgctgtgtgcacttcacaa

SEQ ID NO: 2022 - DNA, 645 bp, Homo sapiens
cggccgcgtcgacaagacctggtggggcaagtccgtgggcatcatgttgaccgagctggagaaagccttgaactctatcatcgacgtctaccacaagtactccctgataaaggggaatttccatgccgtctacagggatgacctgaagaaattgctagagaccgagtgtcctcagtatatcaggaaaaagggtgcagacgtctggttcaaagagttggatatcaacactgatggtgcagttaacttccaggagttcctcattctggtgataaagatgggcgtggcagccttgaactctatcatcgacgtctaccacaagtactccctgataaaggggaatttccatgccgtctacagggatgacctgcagaaattgctagagaccgagtgtcctcagtatatcaggaaaaagggtgcagacgtctggttcaaagagttggatatcaacactgatggtgcagttaacttccaggagttcctcattctggtgataaagatgggcgtgggcagcccacaaaaaaaggttgcttcttatttttgaatttgctgtagtttggatgagacattttttattttttaattcttttttcccttgaggatatgactgtggtatatgttgtgtatgattgtttggctttgtttctg

SEQ ID NO: 2023 - DNA, 4850 bp, Homo sapiens
atgtatgaaggcatcagatgcctgctgaaggcccttctggggtttgtatctctagcgataggaactctctactgcccaaggcagtaccgcccttttccaggcagtcttggaattgaggcaataaatgtcccggagcccattcccgactcctactacagagacatggccacgtggcctacacatgctccaagcgtggaggaaggaggccaggggcgctttgggaaccaggccgatcacttcttgggctctctggcatttgcaaagctgctgaaccgttccttggctgtcccttcttggattgagtaccagcatcacaagcctcctttcaccaacctccatgtgtcctaccagaagtacttcaagctggagcccctccaggcttaccatcgggtcatcagcttggaggatttcatggagaagctggcacccacccactggccccctgagaagcgggtggcatactgctttgaggtggcagcccagcgaagcccagataagaagacgtgccccatgaaggaaggaaacccctttggcccattctgggatcagtttcatgtgagtttcaacaagtcggagctttttacaggcatttccttcagtgcttcctacagagaacaatggagccagagattttctccaaaggaacatccggtgcttgccctgccaggagccccagcccagttccccgtcctagaggaacacaggccactacagaagtacatggtatggtcagacgaaatggtgaagacgggagaggcccagattcatgcccaccttgtccggccctatgtgggcattcatctgcgcattggctctgactggaagaacgcctgtgccatgctgaaggacgggactgcaggctcgcacttcatggcctctccgcagtgtgtgggctacagccgcagcacagcggcccccctcacgatgactatgtgcctgcctgacctgaaggagatccagagggctgtgaagctctgggtgaggtcgctggatgcccagtcggtctacgttgctactgattccgagagttatgtgcctgagctccaacagctcttcaaagggaaggtgaaggtggtgagcctgaagcctgaggtggcccaggtcgacctgtacatcctcggccaagccgaccactttattggcaactgtgtctcctccttcactgcctttgtgaagcgggagcgggacctccaggggaggccgtcttctttcttcggcatggacaggccccctaagctgcgggacgagttctgattctggccggagcaccagaccctctgatcctggagggaccagagtctgagctggtccttccagccaggcctggcagccagaggtgctccgggattgcaaactcctcttctcacctgccaaagatggagaagagtgccagggacccctcaaggagggagacgctccatatcccagggcataggacttgcaggttcctaggagcaggagcatctcccatcgcacgtgctttctgctcttctgggaatttctcacactggcaaagcagtccagcctccgtcttctggtccactctgctctgagcagcctgggatgctgaactcttcagagagatttttttatagagagatttctataattttgatacaaggtcatgactatcctagaactctctgtggtttttgaaaatcattgaattctattaatgtaggtacctaaagtgaccttaactgaatgtggatgaggctggggctggtgtgggtcttttggctgcttttcaaggtgtcccccaatgtggccctcaagagccatccccactgcctggccagagccattgttgtcccctacttcctaggccatttctggggcttgggggatgaatgctgtcctgtgctgtaaacactatgcaaatggaagttatcggttgtggtgctgtgcagcgctctgtgggcgactaagtgccactcacgcagcatgttcctggcaaggagcacataccatcaagccacactatcatggtattgttctcacagtcttttggtggttgatggccactgcaaacctggcaccatcagatctcttctgatctcttgccccagtggggcctggttggtagaatgttggcattcggttgatatccaaagcctgttctcccagccgtcctcctgcagctggagccttcaggccgtattctcacgagggaacgtttgccaaggctctgacctcacagaagatgcccagggcccagaagccatcagaattatcagtggagaagcaccttttgactcttcccttccaatgtaatctctgccaacaccatgaggcttaaggtgctctaagtcatgagtgttttggtctcaaatgctgcagttttaataatctgtgactcctgagagcccatggttttttgaccttgtggttctaaaattccttgtctgacccctgtagatcttttccttgccatgtcacctcccttggcctttgatcctggaaaggtggcagagcctccactgagccaggcccagagctccttgcagtgccttcttccttgtttacctgtgggaggaaacactttttttgtcaggggcagcctggttcagagctcagaggtcacactgtatcaaagatctcaaacagcaaagtcagcatttgctgtatagagctgccacccaactctaagcaggagaaactgtacagaaagggctttgctatttttcccttttgggaaaacaatgaagtgttttaagtcctgggtggactgagagatggtttgcctgtccagacttgctctcaagcctcatccagagaaggagctgcagatgagggagcccgtacactccctgccaccactaggttgtaagcctgtagctggctggctgatttcattttggaattcatttgccatccacagccttacactaggcacacactttagagtctggggctccagtggggcccgcctaattttttttccccccaagacagggccttgctctgtcctcccaggctggagtgccagtggccatggatccatggccttactgccagcccttgatcctcccccaggctcaagcgatcccttcctgccctcagccctctctggtagcctgagacctgcatgccccagctcccaaatcacccttgattcatatccagcagtaataatcacttgtgttcctgaaagaaagggcaccagaagttctagcaaaattcagttgtgttctgtgagctagcactttttcctctgacccaattttcttacctataaaatggtgataaaaaccgacaggttgttcaaaggcccagatcagctaaagcatgtatataagagcacgttgtaaacttgaaagagacaaaggcacaaatgtggctgttgattaatttgactgcttctcgttgctcgtcacctccatgccaggcactgtgcttgctaattgctttatgggggcattctcttatttattccccagccctgggaaataggagctgtcattatccttctctttctgcacaaggaaaaattaatgccctgagaattgtcataattttcccaaggctgcccagctggtggtgttaagccagaatttgacctcccagagccagtttccattagctgccatgctctgctgcctctaattcacagaatgcactttctaccctgtgtgccatggagacctcctatggaaaaatgatcagccaccttaccttctactgggtacctgctgtgagtctgcctatgccagaaggattaaggaggggaggttacccaagaaacaaagcctacatgccgcttacagcccccgttggatggttgctcagtacaacagtcttgcattcagcaggtgtttgttcatcacctactatgtgtcaggctctatgctaggtactggggatacaggagagaatcaagcgtaaagtctttgttctcaaggaatttgcattctagaaagtagaagatgtaataaatgtactgtgggacatgttaataagtgctataaagaaatataaagggtttgggagcaaaaagagggagtggatctattttagatgagcccaggtaagacctctctgaagagctgtcatgaaggagggagggagcacattcctggcagagaaaacagcacgtgcaaaggccccgagactggagtgtgttcctgaagagcagccaggaggccagcatggctggagaggcaggcataggcagggaaccgagcagcaggtcagagcaggcgagctgacattctgcagcctggacggccatggcaggaagcttttagttggagagatacaggaagcctcctagggttctgagcagaagaggggcatgagctgattcacattctgaaggacctctctagctggccagtgctgaggaggttggagagagaaagggtgaaagcagagagaccagtgcagggctgttaacagggttgcaggcgagagactggggtgctgggctcccctagactaggactccagtgccctcctctcccaagagacaaaggccattgcattgaaggaggtgggaaatgattagattctgaacatatgtaattatttttcagtctttttcaaagatacaaatatttacatagttttaatcatgtaatatatacaatttaatgtcctagtgttttacttaatagtgtatcatgttttccctgttggtatgtagcctggataaatgctcttaattataaaaaattctgtcgaggagtgttccatagtttattgttttcctattatgagaatttaggccaagtgtggtggctcatgcctgtaatcccagcactttgcgaggccgaggtgggcagatcacttgaggtgaggagttcaagaccagcctggccaacatggtgaattatctctactaaaaatac

SEQ ID NO: 2024 - DNA, 3327 bp, Homo sapiens
ttttccagaagataatttagaaatttattacaaaacttttaataaaaaatacaatgatattacaaatttggttttccaaagctttcaaatttttcttaacattatctttcgttttaagaacacttttgaagtcggcagttatttaaaatccttactagaaaaaaaccaaagcccaaggattttgcatttagtcatcatctaggtatacagcgtgttttccgaaagcatcctttaagagtttggagatttgatgaaattgctcatgtaataagcagttagtgaatactattgaatcctaaacccagataagtcatcttgggctggctgtgtttttcatgtgaagaaactcatttatagcacaggcaccccaggccaatagagatgattacagatctctggtttcagaagttctgaccccttattcagctaccaaatacttaattgctaaaggaattactcccagcaggcacagaacggtttctgaatatgacagaaaaggtacacaaagaatcatttaagacatcctggttacaacatactttatctttaaaagggtgtgagagtagttggggaacttagaaattctgtgacttaggtgtgggtggatcttatttaggaagactaaagctatggacacaacacgtgaaagaaccactcagaagcagccctaggaagcccaggtgcccacatcgaaagcactcccaggtgaaagcagccaggcaggcgtgggcattgtacaaccagcctcaggcctcagttcttgattgtggttgacggggcgtcaccatgaaggagcccatttagtataaagcttccaaccttttctcttaatcgtttctttaatcttttaaaccatcttcaagtgcataggggagtttccgatgccagaggatgaaagcaagtgctttctccaccctctcctcccagagtgaaaacaaatccttttgctgatacttgtttcaaaagcatccattgtaaagcttctcagtgacacaaaatactgagaggtaactttttatcaatcaaaccacataccccaatttaacacctttcagtgctctgaattcaactgacagactaaagggtgtttcctgtaacagtctgaaatattaagtgttttttttgttttgtttttaaatcttatttcagaaaacttcctcttggggtaggaaagtacacatgaagcagcaaagtaacgaagaaaaacttaaatagggccttcagagatcccacacactacaaagattctgccaagccataagataagtgtgaagcccagtatatgtccagcttttctcctcaggacatcttcagtgtttcttctcttttaaacaccacatcaggttctagccacagacttgtgttttgggtgtgcctgctttgaggggtccatgcccagtgtgtctgctggtgacccaggactcagcagtaatgactaacggccgcccttcaggatcacagatgtgcttggtggtggtggcaaagcatggcacttgtgtgcagtgatgagaagcagcacacggcaaggctgagccctttatcagcaggcctccgtagagcgtgtctgcgttgtcagctgccaatgggctgagtggctggccgtacccactcagtccaagagaggaaggaaacagcaggagaagctgtcagcttgccattcatgagctgctgctgcccaccaaagctgcttactggcaagaagagatgtggggaagacatgagctggtgaacaccaacctggtgcacatgctgccaagtctggcccctgaagaggagagggggtgcagagtccaaaattgaccggggctcctgctctggcatggagctgggtcagaggtgagagaggacctggatcctagggctcacgcaggtgtcgggcgggtgccagggtcttttcactccaactttttggctggcacccgtgtccgagcaacaaggatgggcacaagggccaggccggcaatgaggagggcccacaggggtcggtagaagagccagccagccgccacggtcagcagggtcagcgaggtggccacacagaaggcaaaggctttcaggccaatgttgaccaggtctcggaaaacaggaaaccagtccaccaaggtgtagaggatccgtgtcataaggttgaggcccatgaacatggccatccagccagctgcccgcaggccccaggtcttcatggagttgctccttagttctctatgaaacacctcctctgctgagaagtccccgtggtgcaggagcagtaaggtatccccagacttggtggagaatgggactagctggtcaccccgctgccgggcaatcacagtgaccacgtgagctgggcccaggtcagggtcatcgccgctcagtccagcataggaaaaggagacacgcaagtctcccacctctggatacttgggattttcgctgtggtagaaaaagtctccacggcgaatgatgtccacatgagggtcctccagcttggataggctcagggacttgaagttgtcgactttgtcgatgaggcctgacgagaggaaaaacctgccaatttggacaaagggggctgttgccatgaatgactcccctgccatggccctggggtttttgtggccaatctctcggtcgaagtttttgctgttgatgatttctgacctccattcagtgttgtaggaatacctcgtctccttcttcacctgcccatcctcggtgtactccctggactcctcagtttctacccattggtacatctccacgtgcctccgcagtttcacagccggaagatggaccccatagtttggatcagacaaaagcttggatgtccgtaaggcgccaatgatgtgcaccagccttccttcattctccggagccacactgtggatgctgtcgggagacaccacaagcgagagcccctcagccaatgaggttgccgtcttcaatgcgcggccctcattggtgaaaattaggtagaaggagagcaggaaggccatgagccccacaaacatcccacccgaggtctcgctcagccgttccaggaagcctggctgggagctggttttaactttgacatgttctctccgggtactggtactggaataattcgcggccatggtgggacccggctcgctgccgccgcctcgcgctgttcagctaggaagtgggctgacgactggagcgtggtgtccagcggcctcttgccagccccagcttcgaaaatccgcgtggactccagggccaagcgggacttactgcagttacctccccctgtgcccagtgtttctgcgcatgcgcgcgacgagaaatcctggaaactatacggtccgggacattgcaacgaaa

SEQ ID NO: 2025 - DNA, 1032 bp, Homo sapiens
ggcacgaggcatttgcagagtgagacaaagcggagaacgctggtgggcctgttgtggagtacgctttggactgagaagcatcgaggctataggacgcagctgttgccatgacggcccaggggggcctggtggctaaccgaggccggcgcttcaagtgggccattgagctaagcgggcctggaggaggcagcaggggtcgaagtgaccggggcagtggccagggagactcgctctacccagtcggttacttggacaagcaagtgcctgataccagcgtgcaagagacagaccggatcctggtggagaagcgctgctgggacatcgccttgggtcccctcaaacagattcccatgaatctcttcatcatgtacatggcaggcaatactatctccatcttccctactatgatggtgtgtatgatggcctggcgacccattcaggcacttatggccatttcagccactttcaagatgttagaaagttcaagccagaagtttcttcagggtttggtctatctcattgggaacctgatgggtttggcattggctgtttacaagtgccagtccatgggactgttacctacacatgcatcggattggttagccttcattgagccccctgagagaatggagttcagtggtggaggactgcttttgtgaacatgagaaagcagcgcctggtccctatgtatttgggtcttatttacatccttctttaagcccagtggctcctcagcatactcttaaactaatcacttatgttaaaaagaaccaaaagactcttttctccatggtggggtgacaggtcctagaaggacaatgtgcatattacgacaaacacaaagaaactataccataacccaaggctgaaaataatgtagaaaactttatttttgtttccagtacagagcaaaacaacaacaaaaaaacataactatgtaaacaagagaataactgctgctaaatcaagaactgttgcagcatctcctttcaataaattaaatggttgagaacaatgcataaaaaaaaaaaa

SEQ ID NO: 2026 - DNA, 1340 bp, Homo sapiens
acttattgacagtgccaaagctcggtactggacacaacgagggacctgggtctacgataacgcgcttttgctcctcctgaagtgtctttggtccaacgttgttccagagtgtaccatggcttccagtaacactgtgttgatgcggttggtagcctccgcatattctattgctcaaaaggcaggaatgatagtcagacgtgttattgctgaaggagacctgggtattgtggagaagacctgtgcaacagacctgcagaccaaagctgaccgattggcacagatgagcatatgttcttcattggcccggaaattccccaaactcacaattataggggaagaggatctgccttctgaggaagtggatcaagagctgattgaagacagtcagtgggaagaaatactgaagcaaccatgcccatcgcagtacagtgctattaaagaagaagatctcgtggtctgggttgatcctctggatggaaccaaggaatataccgaaggtcttcttgacaatgtaacagttcttattggaattgcttatgaaggaaaagccatagcaggagttattaaccagccatattacaactatgaggcaggaccagatgctgtgttggggaggacaatctggggagttttaggtttaggcgcctttgggtttcagctgaaagaagtccctgctgggaaacacattatcacaactactcgatcccatagcaacaagttggttactgactgtgttgctgctatgaaccccgatgctgtgctgcgagtaggaggagcaggaaataagattattcagctgattgaaggcaaagcctctgcttatgtatttgcaagtcctggttgtaagaagtgggatacttgtgctccagaagttattttacatgctgtgggaggcaagttaaccgatatccatgggaatgttcttcagtaccacaaggatgtgaagcatatgaactctgcaggagtcctggccacactgaggaattatgactactatgcaagccgagttccagaatctattaaaaatgcacttgttccttaaaggaaagtttcatttggccgggcgcggtggctcatgcctgtaatcccagcactttgggaggccgaggcaggtggatcacttgagctcaggagtttgagaccagcctgggcaatatcgtgagaccccatctctgcaaaaatacaaattaactgggcatcctgtcatgcgcctgtcatcccagctacttgagaggctgaagcagaagaatctcttgagcccggaaggcagaggttgcagtgagctgagactgtgccactgcactccagcctgagtgacaggagttaagccctgtctcaga

SEQ ID NO: 2027 - DNA, 1966 bp, Homo sapiens
accctggagctagcgtcatcgcgaaggaactcccacgaccggatggaagagcccagctgacacaaccaagacgagtctcagtgtctagggaagcttggggttctgctccttttacttcaggcgaacctgaactcagttaatgcaattttgaagcatgccctgaatagattcagtcattatcaagtcaaactaaaaacggtgaaaggttgcgactattaccaaataggaaaaacctgaagacataagaactacacatgaggaatatgtcatttagcactttcactttttgatctccacagaagacaatgagaagtcataccataacaatgacgacaacttcagtcagcagctggccttactcctcccacagaatgcgctttataaccaatcatagcgaccaaccgccacaaaacttctcagcaacaccaaatgttactacctgtcccatggatgaaaaattgctatctactgtgttaaccacatcctactctgttattttcatcgtgggactggttgggaacataatcgccctctatgtatttctgggtattcaccgtaaaagaaattccattcaaatttatctacttaacgtagccattgcagacctcctactcatcttctgcctccctttccgaataatgtatcatattaaccaaaacaagtggacactaggtgtgattctgtgcaaggttgtgggaacactgttttatatgaacatgtacattagcattattttgcttggattcatcagtttggatcgctatataaaaattaatcggtctatacagcaacggaaggcaataacaaccaaacaaagtatttatgtctgttgtatagtatggatgcttgctcttggtggattcctaactatgattattttaacacttaagaaaggagggcataattccacaatgtgtttccattacagagataagcataacgcaaaaggagaagccatttttaacttcattcttgtggtaatgttctggctaattttcttactaataatcctttcatatattaagattgggaagaatctattgaggatttctaaaaggaggtcaaaatttcctaattctggtaaatatgccactacagctcgtaactcctttattgtacttatcatttttactatatgttttgttccctatcatgcctttcgattcatctacatttcttcacagctaaatgtatcatcttgctactggaaagaaattgttcacaaaaccaatgagatcatgctggttctctcatctttcaatagttgcttagatccagtcatgtatttcctgatgtccagtaacattcgcaaaataatgtgccaacttctttttagacgatttcaaggtgaaccaagtaggagtgaaagcacttcagaatttaaaccaggatactccctgcatgatacatctgtggcagtgaaaatacagtctagttctaaaagtacttgaggtaaacatactaaaatgaattatataatgcagcctcttatttctttgaagaactaaaaaattaggaaacaaagttctagccatttaccaaaactcagatcttcaaggcttctgcttggtattttgtggatatttccatttgccttaactgtaaacccatttcaaggtacctatccttttaaatcctgtatgtaaaatcttttcaaaatacatttttaagcctaatactcttaacatagattatgaagttaagtgaaatttatgggctctaacaggcaaaataattaaagtgccatagtttctcaagtgactaaagtaggttatttaaaatcaaggcacttggtactaatttgaagtgtgtttaaaagtaaatgatttgggaactgacaatgtgtcagaaaatatatgttcatttatcattttaaaatcttgtataatttgcccctgtattcatttatgcctaaatctctataacagatgaaaagataattaataaaatcctaattaaaaaatgg

SEQ ID NO: 2028 - DNA, 1464 bp, Homo sapiens
actagttctagatcgcgagcggccgctcgcgatctataatgcctcttctgaagcagccatcccggcctcttggtactgctgaccccagccaggctacagggatcgattggagctgtccttggggctgtaattggccccagctgagcagggcaaacactgaggtcaactacaagccacaggccccttccccagcctcagttcacagctgccctgttgcagggaggcggtggcccttctgttgctagaccgagcctgtgggatataccaaggcagaggagcccatagccatgaggagcctcggggccctgctcttgctgctgagcgcctgcctggcggtgagcgctggccctgtgccaacgccgcccgacaacatccaagtgcaggaaaacttcaatatctctcggatctatgggaagtggtacaacctggccatcggttccacctgcccctggctgaagaagatcatggacaggatgacagtgagcacgctggtgctgggagagggcgctacagaggcggagatcagcatgaccagcactcgttggcggaaaggtgtctgtgaggagacgtctggagcttatgagaaaacagatactgatgggaagtttctctatcacaaatccaaatggaacataaccatggagtcctatgtggtccacaccaactatgatgagtatgccattttcctgaccaagaaattcagccgccatcatggacccaccattactgccaagctctacgggcgggcgccgcagctgagggaaactctcctgcaggacttcagagtggttgcccagggtgtgggcatccctgaggactccatcttcaccatggctgaccgaggtgaatgtgtccctggggagcaggaaccagagcccatcttaatcccgagagtccggagggctgtgctaccccaagaagaggaaggatcagggggtgggcaactggtaactgaagtcaccaagaaagaagattcctgccagctgggctactcggccggtccctgcatgggaatgaccagcaggtatttctataatggtacatccatggcctgtgagactttccagtacggcggctgcatgggcaacggtaacaacttcgtcacagaaaaggagtgtctgcagacctgccgaactgtggcggcctgcaatctccccatagtccggggcccctgccgagccttcatccagctctgggcatttgatgctgtcaaggggaagtgcgtcctcttcccctacgggggctgccagggcaacgggaacaagttctactcagagaaggagtgcagagagtactgcggtgtccctggtgatggtgatgaggagctgctgcgcttctccaactgacaactggccggtctgcaagtcagaggatggccagtgtctgtcccggggtcctgtggcaggcagcgccaagcaacctgggtccaaataaaaactaaattgtaaactcctaaaaaaaaaa

SEQ ID NO: 2029 - DNA, 499 bp, Homo sapiens
ggcacgaggagagattcacgcaccctcaagagtgtgggtgagacatatacagcctgttagacctgaaggcagatggctcttcttaaggccaataaggatctcatttccgcaggattgaaggagttcagcgttctgctgaatcagcaggtcttcaatgatcctctcgtctctgaagaagacatggtgactgtggtggaggactggatgaacttctacatcaactattacaggcagcaggtgacaggggagccccaagagcgagacaaggctctgcaggagcttcggcaagagctgaacactctggccaaccctttcctggccaagtacagggacttcctgaagtctcatgagctcccgagtcacccaccgccctcctcctagctcagggacccagcccctcctctctgagaaactctgaccttcatgtccttaggctgtgctcctgccactctaccctgacacctcaataaagaccagtgctggtttttgttgggaaaaa

SEQ ID NO: 2030 - DNA, 373 bp, Homo sapiens
ggcacgagctggagtaccttgcgtgcagttatgtcggcgtcggtagtgtctgtcgtttcgcgggtcttagaagagtacttgagctccactccgcagcgtctgaagttgctggacgcgtacctgctgtatatactgctgaccggggcgctgcagttcggatactgtctttttgtgttgacctttcactttaactctcttctcttgttcttcttcttttgtgtgggtagttttcattctaacgtttattttttattgtttacattatcttttttatgttttctttttattgcttattttttcttaattcgttttttctctttatttatttggttttttcatgttttcttcattgagttgtctttattttattttt

SEQ ID NO: 2031 - DNA, 1554 bp, Homo sapiens
agcggccgctgaggggaccgccccatccccgggccgcgtctctccgccgaccccggcgcgcggcgagccggaagtcacggtggagatcggagaaacgtacctgtgccggcgaccggatagcacctggcattctgctgaagtgatccagtctcgagtgaacgaccaggagggccgagaggaattctatgtacactacgtgggctttaaccggcggctggacgagtgggtagacaagaaccggctggcgctgaccaagacagtgaaggatgctgtacagaagaactcagagaagtacctgagcgagctcgcagagcagcctgagcgcaagatcactcgcaaccaaaagcgcaagcatgatgagatcaaccatgtgcagaagacttatgcagagatggaccccaccacagcagccttggagaaggagcatgaggcgatcaccaaggtgaagtatgtggacaagatccacatcgggaactacgaaattgatgcctggtatttctcaccattccccgaagactatgggaaacagcccaagctctggctctgcgagtactgcctcaagtacatgaaatatgagaagagctaccgcttccacttgggtcagtgccagtggcggcagccccccgggaaagagatctaccgcaagagcaacatctccgtgtacgaagttgatggcaaagaccataagatttactgtcagaacctgtgtctgctggccaagcttttcctggaccataagacactgtactttgacgtggagccgttcgtcttttacatcctgactgaggtggaccggcagggggcccacattgttggctacttctccaaggagaaggagtccccggatggaaacaatgtggcctgcatcctgaccttgcccccctaccaacgccgcggctacgggaagttcctcatcgctttcagttatgagctctccaagctggagagcacagtcggctccccggagaagccgctgtctgacctgggcaagctcagctaccgcagctactggtcctgggtgctgctggagatcctgcgggacttccggggcacactgtccatcaaggacctcagccagatgaccagtatcacccaaaatgacatcatcagtaccctgcaatccctcaatatggtcaagtactggaagggccagcacgtgatctgtgtcacacccaagctggtggaggagcacctcaaaagtgcccagtataagaaaccacccatcacaggtgggtggggggctgctgtgtgtcgggggcggtgggggagtgtcagtatatggactggtaggagtcaaggcctccttattgctgtcacatgatcccaaaccagtcagaccagctcccaggatggagcccggggcaggcctctcattcctgggcttccctgcccctccccagcacagcctgcccttttgttctcacctggaggaggtgaaactggcctgagcccagaggagggcagccaggtgtgagctggcctggcccaggcccagccctgcctcccgccccttctccccacagtggactccgtctgcctcaagtgggcaccccc

SEQ ID NO: 2032 - DNA, 1554 bp, Homo sapiens; identical to SEQ ID NO: 2031

SEQ ID NO: 2033 - DNA, 1534 bp, Homo sapiens
ccaccgctccgaattcccgggtcgacgatttcgttgagaggcgcacccgggcggccagctgggctcggagcggaacggggtcaggatggacgaggacgtgctaaccaccctgaagatcctcatcatcggcgagagtggggtgggcaagtccagcctgctcttgaggttcacagatgatacgtttgatccagaacttgcagcaacaataggtgttgactttaaggtgaaaacaatttcagtggatggaaataaggctaaacttgcaatatgggatactgctggtcaagagaggtttagaacattaactcccagctattatagaggtgcacagggtgttatattagtttatgatgtcacaagaagagatacatttgttaaactggataattggttaaatgaattggaaacatactgtacaagaaatgacatagtaaacatgctagttggaaataaaatcgataaggaaaatcgtgaagtcgatagaaatgaaggcctgaaatttgcacgaaagcattccatgttatttatagaggcaagtgcaaaaacctgtgatggtgtacaatgtgcctttgaagaacttgttgaaaagatcattcagacccctggactgtgggaaagtgagaaccagaataaaggagtcaaactgtcacacagggaagaaggccaaggaggaggagcctgtggtggttattgctctgtgttataaactctgggaaattccatctcttgcatatttgatcagatagtgacatctttctgtatataaactctttaactgctattttagggaccttgcagtttgcacataattgttttatatcatagcagtaaatatttgcaagaaatcccactcatcgaccccgggtaaaatgttatggtaagcatgcacagtttgcagtctacagtttttttatgtagcacaaaataggtgtacctttataagtacattcaattttatgatttacatttatcatgtaatttttaaaaaaatccatctatctaggatatgttgatacaaagtctgcttttgctattctttttgcttaaatactcctatcattttctgaattacttggtatttagaactcctagcaccacggggaagaatagaggtatcatcaaacgtggcaaattttctttcaggaataataaagagcatgattccacagcttttctgggatgtttgagattcttttttagtactaagcaaaattctcatcacagaatgtagcccaggccaatttataactaaatctctatttgttcggatgatgcttctaaaacagcattgataggttaaagaagcttggtatttttaatttacttcaatgattagctcagttgcttaactggagttttaatcctgtgatatgtacattggattcatgactgtgcagcatttttagttatgtggtgtttggcagaatgacaataaggttttcccccattttggtttcaggaggacatgaatagtgtgtttattgtaactcctcatacacttttaaaaccaacatcttttttcataaatgttggg

SEQ ID NO: 2034 - DNA, 3378 bp, Homo sapiens
  misc_feature (1)...(3378): n = a,t,c or g
caggcatgagtgacggtgcccagccattcgtgacatgtttatacaaatataactttagcaaatatttagcataactatcaaaattacaaatcatattaaatttgtataaatgtatgcaatttttggaacacgcatatcaacaacatacccataaatataactgagatgagatctaatgtcacctcacttgacagtgccctcccatgcagtatcgccacatttgacaatgcctgcccatttaatctaccaaataaatcgaatcacttaatacctctacaagatgagagatacattctttagactccccaagggatgcagctgaaaaaaatcccaaagttagttttaagccaaaaagacttgatttaggattttgacactggagaaacccatcaaagatgtcaagtttgaaaacacttgatcaaaacagaatcacaggtcactattaaaagagtattaatttaaccagagacttccaaagcaatacagaaacttacatggatataaaaaccctaacccttttaaaggtcagatttgctaagtgatcaaaaggggtacttgaattgaatcgacacaggaagagtgtgtacagggttatgagtgtaggcaggtggttactttggtcatatctccatttgccacctgattacacatgagaatggcatctttactcaccagaaagccagtattataggaggtgtaggaggcattcttggacttgagacaagaacattgttgtgtagaaatttcattgactgtgttaaaattattctccatgggctggagaacacataacatggcctttataatgagacgggcattgattggatgcaaggtctccannnnnnnnnnnnnnnnnnnnnnnnacagagtgcttcatcattccgagactcagtttttaaaggaaaaacaactaactaccttgcaagcttgctagcaggtttaagtgtaataatgtgtgggaatgactgcaccgtgactaacatgcagtgacagcttaattaatgttaacccttatcattatcatataagaatgtgagttacataagagaggagtcctgtcagttcgttctctgctgtgtccccaagaccatgaatcatggctggcatgtagtaggcatttaataatatatgttcaacaagtatttggcagtcttggagggcagaaaaggaggtggggaagatttttaaataacattttttaaaaagtcacattgtcctacaatactgatttttcttgcatatttaggaaattgagggtttttttctaaaacatgcggacatatgggaaataggatgcaacatttgcactaatgtttcagacacagttagaggtttccaagagattttgcgctggggaggctgcttgctacaagctcccaaagctctgggaggacatagtattcattcctccctcagcagaagcggtgaggcaagaagctctggggagcacccagcgttggacttttagcatagtgtgtcaggtcttcatagtttgggcccagggcacagagaagtcacagctctctggcatcctgtgccctttaccctctttgccaagggaaaatgtggcccaccaaagcaagaaacttgagggcatgggtcaccccagccctggcatctgcccagagcccgagaaggaaggaacaatgatcctccagctacctcacagggctggcacaggtgaccactgccctggcatcacccatctgtgtccggcagcctgaaccccatctgtggggatgcgaggaggaaaatacaaaagtccttaggtgaacactgagaaggcagatgcagcagaaacctccaggccagaactacccagtcttggacctatggtggagatagagcatagctggcgatcatgtgtacttacactctaaggtcacctggttgcactatggcctcatctgtggctctgaaaatgaagatttggaaggagatcatcacagctaatgtttaacaagcccctcctgtgtgccaaatcattcacccctcaccacaaccgaatgagctaaggattctcattatatatagtttatggagagggaagtgcagacataaagaggtgaattatcttacccagatcacacagctgataagtggtggaggcagaatagaatctaaacagtgtggctccggagcccacatgcattgattcgacaagtgtttattgagcacctgccacggacaaggccttgtgtgattaaatagggttataattagtaatataaaaatgagaaatcactaatgctttttagacttaacattttgtttttttgtaggtttcaggcacagaactgtatatccaataatagtgaaatggatcccactaattatgacagaaatgatgatacatttaaatgacttggatgttttataggtatgatctcgtgaaatcttgagagaaactgaatgacgaatgaaactattgttcctgtttcacacagaagaaaactgaggttaaaaggggtaaagtaattttgcatggcatgaagtagaaattcaaagtacaggaatttgaacttggttctgtccttttctgaagcccttgaccactatagactcaaacatcaccttgtttttccactcattcaacactttttttttaaaattatctaataggttggcactcatcatgagcccctgttctcattctgcaaatggtgaagctctctattgtcctgaccccacagttcctgtcccatgaccagggccagctcaccaaggagctgcagcagcatgtaaagtcagtgacatgcccatgcgagtacctgaggaaggtgagtgagtgcagacagatggggcctggtgcccttgagcagttcccgggtctcagctgccacacatctcatagcgggtgatgctgggggaagcttacgcagtcacagtactggcttcttcctctttttctttccatacaagtggcttagggatggggtagagtagttgacttatttggatgaaaaccactatcttctgtcagaaactcaaaaggaatcattgctggcatggtaacctaaagaaaaacaaccagacaagtgcccaacgacacttaaaaaggtgatttattatcttgccaagtttaggctgggcatggtgactcatgccctctaatccccagcattttggggggctgaggctggtggatcacctgaggcccaggacttcgagaccagcctgaccaatatggcaaaacctcgtccctgcttgaaaatacaaaaattagccgggcatggtggtgtgagcctgtagtcccagctactcaggaggctgaggacagggagatttgctttggattcagggaggttggaggttttagtgggccgagatcacgccattgcactccacactgtgcgacagagcgagactctgtcaaaa

SEQ ID NO: 2035 - DNA, 1443 bp, Homo sapiens
taaaccccaggtcccggggaaaaaatttttataaaacaaaccccggaaagaaaactttccaacagccaggatatggaggttgttttaccccctttaccccttaaaaattttttttttccctaaagcctttaaattttggaggggggttgggccaatatgtcccccccccaaaaaaaaggttctttccaaaaattcccaggtaggttttaaaacggccccccataaggaaaaaaatttttccttgcaagcccgggtaaaatttgggccccccaagggttctttaaaacggcccccccttttttttttttttcaaaacagatatagctggtttattttggaaacaagtctcatccagaaatgttatttactgcatttaaaaaccatggaaggcgatttgcatggttcctccccacgccctcactcccaccaagtacagctttaccacccaaggtcctttcaggaccccaggcctggcggctgtaggagagagcagtgaatcctaagggcaagagaatggcgtccacttgccagagtttctcagagcagagccagctgctcctccagacaggccggtgaggctactcgacaccctcacaaaggggaaaccctgaaggaagtacttcagggggtgcctgcccgatgcgggaggttttgggctagccctccccagatccccggcctgaggggcctcctccagctgcagaagtcaagctgccaaactgccaaagtactcctgcagctccagcagggcccggaagcgatgggagacagcgttcttctccgccttaggcatctctgcgtacgtctgctcatatccatcaggctgaaagcaggggtcccagccaaagtcctggcagcctctgggtgccacgatccggcccgaggtccggcccctgaacaggcgcacgggctggcttgggtccccggtgctgagtgcaaacgtgcagagcgcataggctgacttgtcctcgaacccggccaggagctggtggagaccttcaggctttaacttctccagaaaccactttatgtaggggccggggagccctccaagggcattgaagcacagacaagtgtcctcaaccagcacgggcccctgtacctggcgaactgcctcctgacatttctgtatggaaatctcatccggctccccttggtactccggcaggtcaattttctgtgccaccaaagtgcatggaaacttatctcctagaatctgaacgacctcctccagcttcttggcgttccccgttacaaacacgatcttcttccccaccaatgaggccgccatggtgatccccggttacccagctgagccaccgaaaactccttggcgtccagtgacagaaaacttccggctggtggcggaagtgaacggctcagtttccggccaggtcccggggaaagcgacccggaccccaaggcgcgtagtcggcggagtcg

SEQ ID NO: 2036 - DNA, 1458 bp, Homo sapiens
  misc_feature (1)...(1458): n = a,t,c or g
ttttttttttttgaataattcacaaaaatgttttatataagtttttaaaatgaagataatgaatttattttttcaagagaaaagggacttgatagtattatacagaatatccattgacgccagagtagttagtgaagtgaattttgatgggattgaaatgaaagaaccttattattcataacatttcactgtttatattgcttagtgaccgtagactaccagatcggaaactttttctgcgcatgcttcgaaggtaattacggtatagcatgacactaatgactcgagcctgaaattgttttgaaacgatgtagtagagaatcacatccagacacgtgctgaggttcatgaggaaggtggtaaaggctccccagggattgtaactgttctcccccgttcccagcatcaggaaagcgaaacagatgtggaagggcataaagcagacgagcacctgcaccagcagcgtgatgatgatccttatggacttctccttgactttgggtttcagcttagacgtcctgccgtgaaggagattatgaataatgaccaagtagcacccaatcatgatgaacaaaggaatcaagaaaaaaaatgtcagtcgagtgaggttcagcacgttcacagcttttagatagatgatgtcagaaatcttgaggcaggtggcgggagtggagtctttatctgggtctttatagagcagtagcagaggggtggtcgtggtcagggtcattatccagactcccacacacgccagcacggctttgcacgtgtttttaagttctttggcgtacttcggctgtacaatggccatgtatctgtcagcactaataaaggcaagaagccataaagcaatgcttgggtaaaacactgtgagagctccaagaatctggcagaagtactctccaaatggccattcatcttttgcataataaaacattcgaaagggtaaagtcattataaatatcaagtccactaatgccacattcatcatatagatggttaccgtggttctcttcttggtggtacaactgaaaacccataatgcagtgatgttaacaaataatccaattatgaagatacagctatagaagacaagggctgcaattttgtattcatctggatgtgagctgttaaaagggacaggttgatcttgattgttcagggtgatcattttacagcttgttggtaggcatgatacttagaaactcctgtccatcaaaagtctgtgtgagagatgagcatttttcagcacttccacttctgtcgaagggatatctttgagttgcttctgttaaaatagctctttctggaaccagtgtatttaagaaatgttgtattttgttttagactcttttgttgctttaaaaagtagtttccagtgtaacgcgtggcgtcgtagttggtgctggggnngcgcctacggnaatcaaanttccggccggtcccacggctgtctaa

SEQ ID NO: 2037 - DNA, 2075 bp, Homo sapiens
tttcaagccgactgtgtggcagctgagaggagttttgcacgtggatcgccgttcgggtgggcgagatggagacagcccccaagccgggcaaggatgtcccgcccaagaaagacaaacttcagaccaagagaaagaaaccgcggcgatactgggaggaagagaccgttccgaccacagccggagcctctccagggcctcctcgtaacaagaagaatcgggagctccgtcctcagagaccaaaaaatgcttacatcttaaagaagtctcggatctctaagaagcctcaggtcccgaagaaaccccgagaatggaagaacccggagtcccagcgcggcttgtccggggcccaagatccattcccaggccccgcccccgtccctgtggaagtggtccagaagttctgtcgcattgacaaatcccgaaagctaccacattctaaagccaaaactcgaagccgacttgaggtggctgaagctgaggaagaggaaacaagtatcaaagctgctcgttctgagctgctgcttgctgaagaacctgggtttctggaaggggaggatggggaagacacagcaaagatatgccaggctgacattgtggaggctgtggacattgcaagtgcagccaagcactttgacttgaatctgcggcagtttggaccctacagactaaactactctcgaactggaagacacctggcttttggagggcgccgaggtcatgtggctgcccttgattgggtaacaaagaagcttatgtgcgagatcaacgtcatggaggcggtgcgggacatccggtttctccattctgaggcactgcttgctgttgctcagaaccgctggctccacatctatgacaatcagggcattgagctccactgtatccgccgctgtgaccgagtaacacggcttgagttcctgcccttccacttcctcctggctacagcttcagaaacagggtttctaacctacctggatgtgtcagtggggaagattgtggcagctctgaatgctcgagctgggcggctcgatgttatgagtcagaacccttacaatgccgtcatccatctcggacacagcaatggtactgtgtctttatggagtccagctatgaaggagccactggcaaagattctctgtcatcgtggtggggtccgggctgtggcagtagattctacaggcacgtacatggccacctctggcctagaccaccagctgaagatctttgacttgcgagggacgtaccagcctctgagcactcggaccctgccccatggagcagggcacctggccttctcccagaggggactgctggtggcgggaatgggtgacgttgtcaacatctgggcagggcagggcaaggccagcccaccctcccttgaacagccctacctcacccaccggctctcaggccctgtgcatggccttcagttctgcccctttgaagatgtgctgggggtggggcacactgggggcatcaccagcatgctggtccctggggccggtgagcccaacttcgatggcctggagagtaatccatacagaagccggaagcagcgccaggagtgggaggtgaaggccctgctagagaaggtacctgcagagcttatttgtctggacccacgagccctggccgaggtggatgtcatctccctggagcagggaaagaaggagcagatagagaggctgggctatgacccgcaggctaaggctcccttccagccaaagccaaagcagaagggccgcagctccacggcaagcctggtgaagaggaagaggaaggtcatggatgaggaacacagggacaaggtccggcagagccttcagcagcagcatcataaggaggcgaaggccaagcccacgggggcccggccatctgccctggacagatttgtgcgctgagccagactccagggttgcctgggaacagtctctccccaagatcacctgtagggaaatgagtgttccctggaacaaggaggtgggggcagtgtggccccttccccaactgggggtggacagctgtctcctggggtgggttggtattaaagaggaaagcgattttttggaaaaaaaaaa

SEQ ID NO: 2038 - DNA, 2714 bp, Homo sapiens
atgacagcccaggatagcaacacttccgcgcacgcgcagcgcgacgggccggaacttccggcgtcctcctcgtggcggtcattttggcctctgtcctgtttgtccagcccgccagtttctgcagtggaggtcgcgactgagggacgggacagagaagtcgcgaaagtgggccagaggttctgcgacaccacctcgggtgagctgcgccaggcccgggatagggactgttgtgttcgaatgcccgccccggtcggccgccgctccccgcctagtccacggagctcaatggcggcagtcgcgctgagggactcggctcagggtatgacctttgaggatgtggccatttatttctcccaagaagagtgggagctccttgatgagtctcagaggttcctgtactgcgatgtgatgctggagaactttgcacatgtaacatccctgggttattgccatggaatggagaatgaggcgatagcttctgagcagagtgtatctatacaggtcaggacttctaagggcaatacacccacccagaaaactcacctcagtgagattaagatgtgtgtcccagtcttgaaagacattttgcctgcggctgagcaccaaaccacatcccctgtgcaaaagtcatacttgggtagcacaagcatgagaggcttctgcttcagtgctgaccttcaccagcatcaaaagcattacaatgaagaagagccctggaaaaggaaggtggatgaggctacatttgtgaccggctgcagattccatgtgttgaattatttcacctgtggggaggccttcccagcccccacggacctactccaacacgaagccactcccagtggtgaggagccacacagtagcagcagcaagcatatacaggcatttttcaatgcaaaaagttattacaagtggggtgaatacagaaaagcttcaagccacaaacacacacttgttcagcatcagagtgtctgttctgaaggagggctttatgagtgtagcaaatgtgagaaagccttcacttgcaagaacacacttgttcagcaccagcaaattcacactggacaaaagatgtttgagtgtagtgaatgtgaggaatcctttagcaaaaagtgccacctaatcttacacaagataattcacactggagaaaggccttatgaatgcagtgatcgtgagaaagcctttatccataaatctgaattcattcaccaccagagacgtcacactggaggagtgcgtcatgagtgtggtgaatgtaggaaaacctttagctacaaatctaacctcattgaacaccagagagttcacactggagaaaggccttatgaatgtggcgagtgcgggaaatcctttagacaaagctctagcctttttcgacaccagagagttcactctggagaaaggccttatcagtgctgtgagtgtgggaaatcctttagacaaatcttcaatctcattcgacatagaagagttcacactggagaaatgccttatcagtgcagtgattgtgggaaatcttttagctgcaaatcggaactcattcaacaccagagaattcacagtggagaaagaccttatgaatgcagagaatgtgggaaatcctttagacaattctctaacctcattcgacaccgcagcattcacactggtgataggccttatgagtgcagtgaatgtgagaaatcctttagccgcaaatttatcctgattcaacaccaaagagttcacactggagaaagaccttatgaatgcagtgaatgtggaaaatcctttacccgcaaatctgacctcattcaacaccggagaattcatactggcacaagaccttatgagtgcagtgaatgtggcaaatcttttagacagcgctctggcctcattcagcaccggagacttcatactggagaaaggccttatgaatgtagtgaatgtggaaagtcttttagccaaagtgctagcctcattcaacaccagagagttcacactggagaaaggccttatcagtgctgtgagtgtgggaaatcctttagacaaatcttcaatctcattcgacatagaagagttcacactggagaaatgccttatcagtgcagtgattgtgggaaatcttttagctgcaaatcggaactcattcaacaccggagaattcacagtggagaaagaccttatgaatgcagtgaatgtgggaaatcctttagccgcaaatctaacctcattcgacatcggagagttcacactgaagaaaggccttaaatgtgaagggaatgtgctatttctttattcagtataatagcactggaggagactgtggtagccatcttcgtaaatttaaactttgagcacccacagtggggtattcttcataagtttcaggtatgtgggaagctctgaggaggttcattgtaatttctaatctgccgaggcctatagcctgatttatgtcactgccaatttctgaggctgaagccatttcacatttcacccctaccacctggcaggtgcacaccatgtgcatgagtcacttccccacagtgctcagagaagcaaacctctgtactctcccatttgcttggggaaattattaatagcccaagcatgtagggtcttcatgtcttttctctgactttagagtatacacctgacccagttgtggtccagagaatctgagttgtgctgtcagctttctaaggattacttttttaaggaacattgtcgcc

SEQ ID NO: 2039 - DNA, 3193 bp, Homo sapiens
tttttttttgtgttcagaaaagtacagtgttgacattttattttttatgtaaagaagccatatttacataatacattcatatttttaagtatgttacagctcctgtagaaaaccatttccattaagacagcaacaagtgatctggattcaatctttaaaatattaagtcaaattaaaatgttcttatcaagactccaatttaatttcacagcccatctgccacaggggaactgaggagaaacaggaatgaagagtgggcgacaaagagaaagcatcccttcccacacgccaagagtccagtgcaacgatccctgccacacggtcagccgaccccacttggtgccacagggtccagcctcggccactctgggctcaacctttccagcacgtctgggagcccaatgaggctatgggacagtgtgcatttccctcaaggcctccggaaagtcacctgccacccactgtgacctctgaggctgaaaggactaaggactcctttccccatcatttcagctgggccagtggctggctaaaatcagcgcagcattcccattcttctgaaagccacagctgaaataatgcaccagctgaaaccacagtggacagactgagatggcctccctctgggcctctagttggcaactttctcacccgggggctcctctttctccttttcccgctccttgttccagtccttaaggccttctggaagtgaggtgtcctcatccaagctgccagtgccttccacaaattcttcataggtagatttttccgcaaatggtctggggcccaaaagttcaaccatatcattcttatctaatacttctttttctaacaacagaagagcaaccttctccacgtcagctttcttttctgtgagaagagctactgttcttttataagcatcattaataagtattcgtacttcatcatctatcaatcttgcagtggcttcactgtaaggtttctccaataccatgtccccctgacgtgggaggtcaaaggagatttgcccaaccttttcattcatgccaaactgaacaatttgggcatatgcactctgagttacttttctcaagtcatcttgagcaccagttgtaattcttccaaagaagatttcttcagagactcgaccacctaaagtcatacacatcctatccaagagctgctctttggtatagaggtattgttcttttggtaaatactgagcataacctagtcctttgccacgtgggatgatggatacctttaaaagcgggtctgcgtgctccagataccagccggcaaccgcatggcctgcttcgtggtatgccacagtcttcttctcctcaggctgcagaacctgcgttttcttctctaagccaccaatcactcgctcaattgcctgttcaaagtgtttctgatttatggaatctgacagatgccttgcagcaatcaacgcagcttcattacagacattagcaacatcagcacctgaaaaccctggagttaaagatgccagttttcttgccaatttatccttctccagggtactgtccagttttagcggtcggagatgaactttgaaaatagaagctcttccttttatgtctggtggtccaataaagatctgcctgtcgaaacgccccggcctaagtagcgcggggtccaggatatctggtcgattggtgccggccaaaatgacgacatttgttgttgtattaaaaccatccatctccaccagcagctggttgagtgtgttctcctgctcactctgccctccaaagttgcctcttcctctcttccttcccaccgcatcgatttcatcgatgaagaggatgcaaggggcattcttccgagcaagggcaaataagtctcggactctagcagggcccacaccaacgaacatctccaaaaactcagatccactaacggtgatgaaggggacattggcttctccggctgtggccttagctagcagcgtcttcccagtgcctggaggaccagtgagaatggcaccctttgggatttttgctcctaggtcttgatactgctttgggtttttcaagaaattcacaaattccatgatctctagcttggcctcctcacagccagccacatctttgaacttcacatcaatttcatcctttaagaccttggcagtggtttctccgacactgaagagtccgcccatccctcggcctgtccggccaatggcagcaggccctcttctgatggtgtagagcaagaaggcgatgatgagcaccgtaggcagcatgctcagcagaaaagagccatcactttcagcaatgtagacaacaggcacccgattttctccttctatgcccaattcctgctgtaaagtttccagattccgttcaaaggtgtccacactgccaatattaaaccaaacgtattgcccatcaacaggagtttttcctggtgtaaaggtcactcgaacaaaacgcttgttgacgacttccaatctgtctactactccttttgaaagatagttattgacaaagtccttccaagtgatttctctcccggatctcttgagcagcaagtaaaacatgactccaccccagaacagagcagtccagaggaagaacatcctgaaatccttgtcgtcccatggaatgtcacccttctgaaacctggaccaccagtgagaatcatctttcttgccacctcgttttccaccgccaccacctcctcctccagaagagcgtgtggtagcagctggctttgattcttttttctctcccataacttctttaggttcactagctttttttccattttttccattaggaaagtattttccaaatccttttgggggtcgagaacagaatctttgataagcagcaattatatctgtcaaaagagaatttctgctggcccttgcttgagttgtaacaaatcggtaaagcgtccggaggcagggctgctcgcccgggcccacgccgccaggcacgaggagctgctgtaggccgcggggccagcagccgccccggccccacagccgcaaacagcggtgcgccatggccgccgccgtggccctctcggcccgggacgctgcgcaggcgcgggcaggcgacgactggcggcctcgggaagcgggctcggctcggggaaaggccgccaggcagcgaagcgcgccggcggctcacggaggagcccaagctctcaacgcggcgtctcccctcgtgcc

SEQ ID NO: 2040 - DNA, 2655 bp, Homo sapiens
agcgctcctccttccggtgaaagtcgtcgggttcccagccgggagtctgcggagttctcatactctgttacccagcttcctttgtatgagggctgttgcgcacttccggtggaagcgctgaagcgagtgggtggagtttacggagccggtgggcggtaggcggtgctacgggtagctgggtgctgtccaaaggcgacagggcgtcgttaggggagcgagtcgtgaccggttgggccacactcaacgtgggacgaagcttcgcctactgtttgactacgtgcgtgcagcctcccctcgatgtcggccctcgaaaagagcatgcacctcggccgccttccctctcgcccacctctacccggcagcgggggcagtcagagcggagccaagatgcgaatgggccctggaagaaagcgggacttttcccctgttccttggagtcagtattttgagtccatggaagatgtagaagtagagaatgaaactggcaaggatacttttcgagtctacaagagtggttcagagggtccagtcctgctccttctgcatggaggaggtcattctgccctttcttgggctgtgttcacggcagcgattattagtagagttcagtgtaggattgtagctttggatctgcgaagtcatggtgaaacaaaggtcaagaatcctgaagatctgtctgcagaaacaatggcaaaagacgttggcaatgtggttgaagccatgtatggggaccttcctcctccaattatgctgattggacatagcatgggtggtgctattgcagtccacacagcatcatccaacctggtaccaagcctcttgggtctgtgcatgattgatgttgtagaaggtacagctatggatgcacttaatagcatgcagaatttcttacggggtcgtcctaaaaccttcaagtctctggagaatgctattgaatggagtgtgaagagtggccagattcgaaatctggagtctgcccgtgtctcaatggttggccaagtcaaacagtgtgaaggaattacaagtccagaaggctcaaaatctatagtggaaggaatcatagaggaagaagaagaagatgaggaaggaagtgagtctataagcaagaggaaaaaggaagatgacatggagaccaagaaagaccatccatacacctggagaattgaactggcaaaaacagaaaaatactgggacggctggttccgaggcttatccaatctctttcttagttgtcccattcctaaattgctgctcttggctggtgttgatagattggataaagatctgaccattggccagatgcaagggaagttccagatgcaggtcctaccccagtgtggccatgcagtccatgaggatgcccctgacaaggtagctgaagctgttgccactttcctgatccggcacaggtttgcagaacccatcggtggattccagtgtgtgtttcctggctgttagtgacctgctgtccacccctcctcaacatcgagctctgttgtaaatacgtcgcaccagaggccactgtgatgccactgtctcctctccatcccgcccagccatgtgacactggctcccggtagacgggcaccccgagatgtaccaaccttttcatgtattctgccaaaagcattgttttccagggcccttgaccaacatcggcttccccagtccagggctcccctgctcctttcccttccctgtactggggtagctcctgcctgctctccctgcgttgcctagggtaaagcctccagatttgccatactgagcccctcttcctagcatcaggcgatacatctgagttcaaatgtcttcccaggctcagggacctccattccttgagattgtcttggcatggcccagccctgcctcatgggatggacaatgcatggggtggtctttatttttccctttcaaataaaacactagtcaggtaccgttttatcccagtcgtactcttccaggtttggaagacccagagaggccaagatcccatccttagccatagcgagcggtggtggtggatagcatcacaagaaacgagcctgaaaatcaggtccagccggtccaagcacatggcctcccatctgggagagcccactgtcccactcccacatgtctgggcacctgccctgggctgaggccaggctgctccaggggcctcctgcgccctcacctgccacagagcaacccaggttaaatacagcccatgcacaaagccacaggccaaagcctatggaattgtttttaatcatcaaatttaaccattttcataactggttcctggaggtgtgcagtgcccccttgcctcttcaaacctacagcttctctttgccatttgtggatttcacatcactccacacagaaacattacagcctggcatccccagtctttgccttcttccagctgcctcgacacagcactgtggcctgtccctattgcccaggcacgccatttccaagggcaggaaggggcagtgtcctgaagcccatcttttctgtgactgtcttaggtgatgtgtagccccctccacctttccactcaacaacctcccacccctgtcctgctgcatggtccggagtctgggacctactttgttttttgttatttatgaccttgtttaaagaaaataaatatctcccaacctttaaaaa

SEQ ID NO: 2041 - DNA, 694 bp, Homo sapiens
aggccaagaatattgcgcgaggtgatattcaggccataaattgatgcaatgcaatgctgccagtgacagacaatacagcacattccccaggatggcaacagctactggcttgtgcttaaataccatttcattctgactgaggtcatcatctttgagctcctgcaatgaggagctcaatagggtgggggatgctgtcctttgcctcaggtgctctttgggtgctttcataaaagagggtcagagccgccgatggggtctaggagaccctaagagttctgatggtcaggctgagaattgtgtcctcagggagtgggagctgctgcaggtctgagcaccaagggctccagcaccaggacaggagcctccagccacctccaccttgcagcccctgaaggtagcatatgtggaccctctagatggggtggggagtgacctctgcccagttcctttctgtcccgtggccttcccatctgcaggttgtagaggggaaacagaaggctagaaaggcccttccagctcaggcttttactggttctaaatggattcctgagctggcctccccatccctggacagagcggaagctaccccctgccctgcctctctgacccccatggtatcagcctctgtctcatctgcccccagatcccagccatggccctggagcccaaagaagggcatctgagaaaagttgga

SEQ ID NO: 2042 - DNA, 1695 bp, Homo sapiens
ttttttttttttaatcagacaaagatgatttattttcatacctaaagcactttataatattctctggaaaatctaaaatcattctgttatcctaacatttttatactatcatcattttagaaaataaaaggcctgcgttatatactagaaaaatttcttcattatatgcaaaatatttatctcctctagtaaaggagattaaagaacaactgcaagaggaaggaaggtcctgaaagtgtttcatttggtatctacctaccccaaccccaagacataaagacagataaaggcactaagatgctagtatgtggctagtcctttcaataacccagtcagtccatacagataacccatgggatatattcaagccactctttgagccatcgatggtcattatttggttagttcacccaaggtaaggccataccagctgttaaaatgatgtagagattaatcaacagggctgccacttgcgaatcccctccaaggatgctgtgcaaagggtctcattggtcctgatgagtaatcttgtgactgtacatattcctgggtgcatgtccacaaatactgaggtatagcctgcatgccactaaaaataacaaaggtttcagggctggagacattgtcaaccacactgtcatgaccatctatagctccaggactcagtggtgggggaacaatatttaacggatgtccctggcagaagaagcctgtgagtacttcagcctcaaacacatagatcagcttatctgcagcagagattttcttggccttctctgccaggtttttgaggttcttggtgaagtatatgccagctccgtattttggatcgcaaggtgtcgagtacattctttgaaagccaactctgcataccacattgcagaactggtatgggacttgctgaaacagcctatggctcacaggttgcctgtgcagtttttcttccatcattttcttctttctttgaaaggcagccataaggacctcattgtctatcttctccacctttagaacctgcaaaccacatttttcaaactgtttcttttgatctagaagctcttgagttggaggcacaggacatttcagaaatatgatattttctttcatttcgtcttgggttttttgttgctgaatagtccactgtcctaacgagcgccaaaggcctcgctcctttttccttgccatttcctcctgtactttacaaagcatatcttcaatgttcataaccacctcaatgaggtcagcccgggctccttcaatctctaactctgtccttcctgggctgataatttctgtgatggagacacttgaagttttctgaagctgagacaaaatgtcatgttcctttctcccaaggtacagaatatgattattctcaatgatgtggtggttctggagactcaggattctttggatccatgcgtgggcctcatacatctcttccacgttgaatcccatcagattgatggcaggagatctagcttcaagcccattttctcttttctcctctctggttgactgggggactttggcttatttattcttcttctcccctccgttagttcagatgatcaagaatagaatgagccaatggtgggcgaccctacttattggcctgtgaatttcttactcaccactgtaattgttcaaactcagcatcaaggacctatttgccatttcagaactgaaagccta

SEQ ID NO: 2043 - DNA, 981 bp, Homo sapiens
atctactgtgtctgggcgccaatcccgacgctgggcggagcgaggcccggtccctgcagcgggcgaaaggagcccgggcctggaggtttgcgtaccggtcgcctggtcccggcaccagcgccgcccagtgtggtttcccataaggaagctcttcttcctgcttggcttccacctttaacccttccacctgggagcgtcctctaacacattcagactacaagtccagacccaggagagcaaggcccagaaagaggtcaaaatggggtttatattttcaaaatctatgaatgaaagcatgaaaaatcaaaaggagttcatgcttatgaatgctcgacttcagctggaaaggcagctcatcatgcagagtgaaatgagggaaagacaaatggccatgcagattgcgtggtctcgggaattcctcaaatattttggaactttttttggccttgcagccatctctttaacagctggagcgattaaaaaaaagaagccagccttcctggtcccgattgttccattaagctttatcctcacctaccagtatgacttgggctatggaacccttttagaaagaatgaaaggtgaagctgaggacatactggaaacagaaaagagtaaattgcagctgccaagaggaatgatcacttttgaaagcattgaaaaagccagaaaggaacagagtagattcttcatagacaaatgaaatcatgcttaccaatcaaatctcaaagcacagaattattgacttgaatcatggtttttacagttttttaaatgctcaagattttgatattatagattttattttaaaatattaaaatgcaagatagttttgagctattttaaaataaaatttataacattcaacacaaaatcatggaggtgctctaaataacttttagatttcctctctctgtgtgcattaccaatatctaagtgtaaaattaataaattgttttgaattcctggaaaaaaaaaaaa

SEQ ID NO: 2044 - DNA, 1236 bp, Homo sapiens
tttttttttcggttcccggggatttattttgatgcacgcacgaaacggtatctaaacttgcaggcacacacacgtctgtttttaggctcaacttcaaaagcgggtgtgcagttccataggagttctgtattcgtgtccacgttgcacccaggaaaccttagcctgaacaccaatttgaactgtcagttggccctagcttcacacaaacaggagaaaaattgtttaacccctggagctgtcaagtaacctcttcagggtacaacttttattttacacgctgcaattaagggattgcaaaccccagcagagccaccggagccgcttggcagaatctccaacctgggggaaagctcaaagccaataaaactcccaaggcgctgcggcccgagggggtggctgcctcgagcggaggcgatcccttgttggggaaaaaatctgggagtgacttcgccggtcttggtttggtggttatgtttaattgcgaaagggataatgatttctaataaaattgcacggggccaaaagggcagctcggatcgtggtagcagggttaagggagaagtgctagaagctgggccccaggcgtggcgcttggaccttgagcagtgccgggctttgcagaaggcatctctggagaaaaggaagcggagaaagaaaggaaggggaatgtggcggaattggggtaagatagggggtgttggggcaggctcgcggcggagctcgaggaaggttttatcagttcgcaggctggagtgcgctctagaagcaagttcgccgcgtagagaggcctttatacctgtgtcggagcggccggcggcagattgtggtactggcgagcaattggactattgttgatatgctaatgaggcgattaggctgttggtaaagagccagagagtagctccacttgggtgcgagaccgagaggggcatatccgttcacgccgatccatgaaaatgctttggaaattgacggataatatcaagtacgaggactgcgaggtaagcgcgacgccggctcgatcatccgtgcggtcacaggctccgagcttgaccctccctctcctcctcctctccttgcaaccagctgcgaaacgcgggtgggacaaactttccccagcgcagcgcccgtccctcggattcgcccgaagaacgcgggggagaagctgcagagagaggacgtggatgctcccttctttggtttccgaattcctccacagggactagagactacgaa

SEQ ID NO: 2045 - DNA, 2188 bp, Homo sapiens
tatttcgtgaaggccgtttcggttcttcgtgcgcggtagccgccccacttgcgggattccaaggcctcatcgagtgcgggtatctggctgtggattcgccgccgtcctgctggacgcctggaggctcgaaccccgccgcccccctaccccaggctttactcccaccccggcttccgcccactgtgctgcccttcctcggacctgggctgtcgggagagctggagatgttcacccttcctcaaaaggacttcagggctcccaccacctgtctgggccccacctgcatgcaggacctgggcagtagccatggggaagatctggaaggagaatgctccagaaaactggaccagaagctgccagagctccgtggagtgggtgatcctgccatgatctcctctaatacctcctacctgtcctctagaggaagaatgattaaatggttctgggattcagctgaggagggctacaggacctaccacatggatgagtatgatgaggacaagaaccccagtggcatcattaacttgggcaccagtgagaacaaactctgctttgacctgctgtcctggcggctgagtcagcgcgacatgcagagggtggagccatccctgctgcagtatgctgactggaggggacatctgttcctccgggaggaagtggccaagttcctgtctttctactgcaagagcccagtacccctcagaccagagaatgtggttgtcctgaatggtggtgcctcgctcttctctgctctggccacggtgctgtgtgaggccggggaggctttcctgatccccaccccttactatggcgctatcacacagcacgtgtgtctctatggcaacatccggctggcctatgtctacctggacagtgaggtcactgggctagacacacgccccttccagctcacagtggagaagctggagatggccctgagagaagctcactctgagggtgtgaaggtcaaaggcctcatcctcatcagcccccagaaccctctgggtgatgtatactcccctgaagagctacaggagtacctggtatttgccaagaggcacaggctgcatgtgattgtggatgaggtctacatgctgtccgtgtttgagaagtctgttgggtaccgcagtgtcctaagcctggaaaggctccctgacccccagaggacccatgtgatgtgggcaaccagcaaggacttcgggatgtctgggctccgctttggcacgctgtacacagaaaaccaggatgtggccactgccgtggcttccctctgccgctaccacggcctcagtggcttggtccagtaccagatggcacagctgctccgggaccgtgactggatcaaccaggtgtacctgccggaaaaccatgcccggctcaaggctgcccacacctatgtctcagaagagcttagggcattggggatccccttcttgagtcgtggggctggcttcttcatctgggttgacttgagaaagtacctgctcaagggcacctttgaggaggaaatgctgctctggcgccgctttttggacaacaaggtgctgctgtcctttggcaaggccttcgagtgtaaagagcctggttggtttcgctttgtcttctcagaccaggtccaccggctttgcctggggatgcagagggtccagcaggtgcttgcaggcaaatcccaagtggcagaagacccccgtccctctcagagccaggagccaagtgaccaacgcaggtgagctggtcattgtctcgtggccagagggcccagcagccactgtggacctggggcgttctggggctgcagaagactgactgtggatgtgccatttgccaggaaggtatctaacttggctttgtgcctgaagaactgtttcttgtctttcgctgtagcagtgggaaactccttaagctgtggttcagcctgggccctccctctctcctattaaacaaaactaggagagtccatatgtctccattgtgagttatttagaatggaggagtcgtgactgcttctaaccagagcctcagcccccctgaggatgtgaaaagaaaacaaacaacttgtaccttctttctgatatcaccgtcattcctctttctttgtcaccaaggaaacgagtcaaaggaacagcacatacaggagagtttgtagaaaaataaaaaaaagtgataacttccaaactcaaaaaaaaaa

SEQ ID NO: 2046 - DNA, 836 bp, Homo sapiens
ccgtggctgccgtggtcggatggccgggcggctaggagttcccggaagtgcccgcgcagccggtttccggtgcaggtggggaaaatggcggtgtctacagtgttctcgacttcgtcgctgatgcttgctctgtcaaggcacagcctattgtctcctttgctcagtgtgacatcattcagacgcttctacagaggtgacagcccaacagattcccaaaaggacatgattgaaatccctttgcctccatggcaggagagaactgatgaatccatagaaaccaaaagagcccgcctgctctatgagagcagaaagaggggaatgttggaaaactgcattcttcttagtctttttgctaaagaacatctgcagcacatgacagaaaagcagctgaacctctatgaccgcctgattaacgagcctagtaatgactgggatatttactactgggccacagaagctaaaccagccccagaaatatttgaaaatgaagtcatggccctgctgagagactttgctaaaaacaaaaacaaagagcagagactgcgtgccccagatcttgagtacctctttgaaaagccacgttgagctgtgctccacggcctggcatgggggttcagtctgtggatggtaactacttatgatggacgttagccttgcttccggcttcttagatgcccagctgccctaccccagaccactggtcctgcctcaagtgatggacataaccctctcctaggacatacatgtaaatgcacaatgtgactcattctcatacttttttggttcagctctgagcctcaaaagtgatttgtcagcagcgtgggccatgcaggctt

SEQ ID NO: 2047 - DNA, 1176 bp, Homo sapiens
ttttttttttttttagtttctaaaaatattgttttattaaataactgttaaataggatttttacaaaataaatggcatagaaaagggtaaaaatgtttatgttcccagaactttctatgccttttcaacagaaaggaaaaggcacagaaagttgtcagctgctattacttctggagagctgccacaactggacggtgttggagtatcaccagttctctctctcatgggaaagaaggggatcaacactttgtagagaggtagcacgtcttcaggtaacagctgctacacacagctggcttcaactttagctcccctgttgatgactgtcagcttcaaggtgtagcatcccatggcactcaggaagaattaaggagctgcacgaggttttcaagacatttcaaataataggcatttagagggtttgcttctgagtttgggaaagttttctttgctaaggagtatgcttcatccactcttctttttactgatgggcttttcaaagctgtttttgccttctgataattgtaaatcagagcccaaagggcagctgctccaatcctctgagcattttgattctcactttccagacaggcagcaagcacagtaatgactttttcattagccaggatcttgggtttatttgcaggactgaagcaaacattatgaaagataagaagaggcaataaagggctgctcttgtgcttgtatttgctcatctctgttagtaagtctagacagccatcaagcctcagaatcatttgttgcccatcttctccagatgatatattcaggagtaacttcaaccaaagaatagtcagattacttagatgtttatttcctccttttggcaatgctagagagaggaagttctgtaagaagttactcttctgaattactcctttacagtcatgcgacaaggccaggtttgaaagaagcataaaaaccatctgctgaaccgtggtgttctccagtggcatctgggaagccaactttaggatacacagcatcagagagttgctcacggctcctctatgtgtagcttgaacagggtgttgtccacaacttgaccaacaaagagaactgcaaccatttggaaaatttgcagtatagacacaaaggagctgcagagaaatttgcatcaatgaatcatccatcaaaatccaaggccagagagag

SEQ ID NO: 2048 - DNA, 1799 bp, Homo sapiens
cggaatttccgggcggccgccgaggccggctaaacgcagaatggggaagaatcctgtgcgtcctccacgagctcttccacctgtgccaagtcaagatgatattccacttagtcgtcctaagaaaaagaagcccagaacaaaaaacacaccagcaagtgcttctttggaaggccttgctcagactgctggtcgaaggccctctgagggcaatgagccatcaactaaagaactcaaagagcacccagaggctcctgttcaaagaagacagaaaaagacaaggctacctcttgaattggagacttcctccacccaaaagaagtcatctagttcatctttattacgaaatgaaaatggtattgatgcggagccagctgaggaggcagttattcaaaaacctcggaggaagacaaagaaaacccagccagcagaattacagtatgccaatgagctaggagtagaagatgaagacataatcactgatgagcaaactactgtggaacagcagtctgtattcactgcacccactggcattagccagcctgtaggcaaagtatttgtggaaaaaagccggagattccaggctgctgatcgttcagagttgataaagaccacagaaaacatagatgtgtcaatggacgtgaagccttcctggaccaccagagatgtggcacttacagtgcaccgggctttcaggatgattggtctcttttctcatggattcttggctggctgtgctgtgtggaatattgttgtgatatatgttctagcaggagatcagctatccaacctctcaaaccttctgcaacaatacaagaccctagcgtatccattccagagtcttctgtacttgcttttggctctgagtacaatttcagcttttgacaggattgactttgctaaaatatcagtagcaatccgaaattttttggccctggatcctacagctttagcatctttcttgtactttactgctcttatactatctctgagtcagcaaatgacaagtgacagaatccacctttacacaccttcttctgttaatggtagcctctgggaagcaggaattgaggaacagattctccagccatggattgtggtgaatctcgtggtggctcttctggttggattatcttggctatttttgtcttataggccaggcatggatcttagtgaagagttaatgttctcctcagaggtggaagaatatcctgataaagagaaagaaatcaaagcctcttcataataccagctcacctttggaggaataatgacccagtatttgtcccatttttgtttttaaatgtatttttataagatgtatacatgtgtatttgtaatagattttttgattatataatactgaaacatctctcaatattatggaaaatggttaaaattgtgtttgctgtttatgtctaaacattaatttgtctagcattatcatcttaatgacaaagggaataatgaactagaaaccagcaagtgaaagtgtttatttcctattttctcaaaacagttgtatttataactattaccttaaaaagcactggtttagaaaaagccataacttaaatagtgttataaaatatatatcaggtttaaacataaatttagcgaatatggtagaagggaaaaaagccttcatttttgacctccccttactgaataaattgaaatatgaagtttgtcttttctgaaactggcttagtgattgagtatcatgtaataattataatataatttagcttgaaagatgctctacattatgaccaataaaaagggaatgtatgttttgtttg

SEQ ID NO: 2049 - DNA, 2253 bp, Homo sapiens
ccacagccacctccggagggatctggctgaggaggaagtggaggtgtcactggccccggcctttgccccaatcttgtgtgggcactgaagggggactacaggttcgagatacttcctcgcgtattgctaaaggaggagttgaccacaccaaaatgagtctacatggtgctagtgggggacatgagagatcaagagatagacgaaggtcaagtgacagatcacgagattcatctcatgaaagaacggagtctcagctcactccttgtattagaaatgtgacttctccaacacgacagcaccatgttgaacgagaaaaagatcacagttcctctcgtccaagcagtccgcgtcctcaaaaagcatccccaaatggttccattagcagtgctgggaacagcagcagaaacagtagtcagtcaagttcagatggtagctgtaagacagctggggagatggtgtttgtatatgaaaatgcaaaagaaggagctcggaatataagaacgtcagaacgagtgacactaatagtggataacactagatttgttgtagacccatccatttttactgcacagccaaatacaatgttgggcaggatgtttggatctggccgagaacataactttacacgacccaatgagaaaggagagtatgaggtggcagagggaattggttccactgtgtttcgagcgattctggattactataaaacaggaataatccgttgtcctgatggcatatctattcctgaactgagagaagcatgtgactatctttgtatctcttttgaatatagcactattaaatgtagagatctcagtgccctaatgcatgagttatcaaatgatggtgctcgtagacaatttgaattttatctggaagaaatgatcctccctctcatggtagctagtgcccagagtggggaacgggaatgtcatatagtggtgcttacagatgatgatgtggttgattgggatgaagaatatccaccacagatgggagaagaatattcacaaattatttatagcacaaaattatatagatttttcaagtatattgaaaacagagatgtggccaagtcagttttgaaggagaggggtcttaagaagattagattgggaatagaaggttatcctacctacaaagaaaaagtaaagaaaaggcctggaggccgcccagaagtgatctacaactatgtccaaagaccctttattcgaatgtcctgggagaaggaagaaggaaagagtcggcatgtagactttcagtgtgtaaagagtaaatctatcaccaatcttgcagcagctgcagcagacattccccaggaccagctggtagtcatgcatccaactccacaagtggatgagctggatattctccctatccatcccccttctggcaacagtgacctcgatcctgatgcacagaatccaatgctgtgatgctgatcttccttgaaaccatagcatgctactcttcacagtgacgttgtactctcctcattctgcactgcaaggccactcttcttcattgtgagatgcacataacaatgtttaggatattgcagtgtaggcttttttaaagaccaaaggtagctgaatggtttttttttaaatgagtacaactctagcattttgaagttccagttgtaaatgtatttgtttaccagtaggtttgtgaaattggttctttgtatgggggatggtcctttttcacacagctaggtcttttcagaagtggtggaaattggcagctggggtactttcagtttggactgatattcatcacacctcagataaaatgcagagtaatatatagttgcactttataaatggtggttaaatggaaatgttcaagccattttatagttgtgatgcacaatataatttaagtgcttctgtcaaagtattcctccagtacaatttgtatagtttgctgcccttgatgagcaaaaagtatttatcttgggcttatctgaatgatcaggatgagatttaatgcccatatcttaccagttcagttatctccagagccatttcaccctttagagtgagtcacatgcagggagtgtgaatgtcagaggtggtttattatccagtctgccttacccttaatctgttcacagatatttatttactaatgctttttttttcttaagagttatgggataggaaaatgaagtgtttgctcttcatttactaaatgattgtaaacttgagtttttcatcaaaataaaattccattgttttaaaaaaaaaa

SEQ ID NO: 2050 - DNA, 2579 bp, Homo sapiens
  misc_feature (1)...(2579): n = a,t,c or g
tttcgtcgctggcccagcatcggagtgtggcagtgctgggctggccggcgggctgggctgcggcccgcgcgcggccggcgatgcaggggggcaactccggggtccgcaagcgcgaagaggagggcgacggggctggggctgtggctgcgccgccggccatcgactttcccgccgagggcccggaccccgaatatgacgaatctgatgttccagcagaaatccaggtgttaaaagaacccctacaacagccaaccttcccttttgcagttgcaaaccaactcttgctggtttctttgctggagcacttgagccacgtgcatgaaccaaacccacttcgttcaagacaggtgtttaagctactttgccagacgtttatcaaaatggggctgctgtcttctttcacttgtagtgacgagtttagctcattgagactacatcacaacagagctattactcacttaatgaggtctgctaaagagagagttcgtcaggatccttgtgaggatatttctcgtatccagaaaatcagatcaagggaagtagccttggaagcacaaacttcacgttacttaaatgaatttgaagaacttgccatcttaggaaaaggtggatacggaagagtatacaaggtcaggaataaattagatggtcagtattatgcaataaaaaaaatcctgattaagggtgcaactaaaacagtttgcatgaaggtcctacgggaagtgaaggtgctggcaggtcttcagcaccccaatattgttggctatcacaccgcgtggatagaacatgttcatgtgattcagccacgagcagacagagctgccattgagttgccatctctggaagtgctctccgaccaggaagaggacagagagcaatgtggtgttaaaaatgatgaaagtagcagctcatccattatctttgctgagcccaccccagaaaaagaaaaacgctttggagaatctgacactgaaaatcagaataacaagtcggtgaagtacaccaccaatttagtcataagagaatctggtgaacttgagtcgaccctggagctccaggaaaatggcttggctggtttgtctgccagttcaattgtggaacagcagctgccactcaggcgtaattcccacctagaggagagtttcacatccaccgaagaatcttccgaagaaaatgtcaactttttgggtcagacagaggcacagtaccacctgatgctgcacatccagatgcagctgtgtgagctctcgctgtgggattggatagtcgagagaaacaagcggggccgggagtatgtggacgagtctgcctgtccttatgttatggccaatgttgcaacaaaaatttttcaagaattggtagaaggtgtgttttacatacataacatgggaattgtgcaccgagatctgaagccaagaaatatttttcttcatggccctgatcagcaagtaaaaataggagactttggtctggcctgcacagacatcctacagaagaacacagactggaccaacagaaacgggaagagaacaccaacacatacgtccagagtgggtacttgtctgtacgcttcacccgaacagttggaaggatctgagtatgatgccaagtcagatatgtacagcttgggtgtggtcctgctagagctctttcagccgtttggaacagaaatggagcgagcagaagttctaacaggtttaagaactggtcagttgccggaatccctccgtaaaaggtgtccggtgcaagccaagtatatccagcacttaacgagaaggaactcatcgcagagaccatctgccattcagctgctgcagagtgaacttttccaaaattctggaaatgttaacctcaccctacagatgaagataatagagcaagaaaaagaaattgcagaactaaagaagcagctaaacctcctttctcaagacaaaggggtgagggatgacggaaaggatgggggcgtgggatgaaagtggacttaacttttaaggtagttaactggaatgtaaatttttaatctttattagggtatagttggtacaatgcttcgttgtatttagtaagcctttacaagacttgttaaagatgtcagagtgccccaagctgccgttccttcccttcctgccccacaagctccttttcctgaatttcctacctaaatattaaccatatgcctagtctctgaaactaaaaacttggacctcatcctcaattattttctcctttcaactctgttgaccctctgtctggtcttcctctagaaggtaccgcagaaattgatgtgtgctccctgccctcgtcactggcccaagcccgggcctgcacatactcactggactgttccagttttgacagctgccagtcttcctggcccctttcacactgcagctgaagttcattacctgaaggacgcctcatcatttcattccttggctccaaaccttctgctgcctctaagataaaagctcaacttcttaacaagggtacaagtngtgcaacttccaacctttttatctgttctctccaccttcagtttagcgtcattccaaaaccacacccttgcanagctntgtact

SEQ ID NO: 2051 - DNA, 1870 bp, Homo sapiens
tcgatacgacttttttttttttttttttttttccggtaggtcgccagctgaggcggtttgtaagttttgggtcgcagtatgctagaattttgaggctcccttctgatgaaaattgagctgtccatgcagccatggaacccgggttacagcagtgagggggccacggctcaaggctggagtgcagtggcatgatcttggctcactacaacctccaccttctgggctcaagcagtcctcccacctgagcctctcaagtagctgggacttcaggcacgcaccaacacacccagaaacttacacatgtccaaaaatgattgagatggagcaggcggaggcccagcttgctgagttagacctgctagccagtatgttccctggtgagaatgagctcatagtgaatgaccagctggctgtagcagaactgaaagattgtattgaaaagaagacaatggaggggcgatcttcaaaagtctactttactatcaatatgaacctggatgtatctgacgaaaaaatggcgatgttttctctggcctgtattcttccctttaaatacccggcagttctgcctgaaattactgtcagatcagtattattgagtagatcccagcagactcagctgaacacagatctgactgcattcctgcaaaaacattgtcatggagatgtttgtatactgaatgccacagagtgggttagagaacacgcctctggctatgtcagcagagatacttcatcttcacccaccacaggaagcacagtccagtcagttgacctcatcttcacgagactctggatctacagccatcatatctataacaaatgcaaaagaaagaatattctagagtgggcaaaggagctttccctgtctgggtttagcatgcctggaaaacctggtgttgtttgtgtggaaggcccacaaagtgcctgtgaagaattctgggcaagactcagaaaattaaactggaagagaattttaattcgccatcgagaagacattccttttgatggtacaaatgatgaaacggaaagacaaaggaaattttccatttttgaagaaaaagtgttcagtgttaatggagccaggggaaaccacatggactttggtcagctctatcagttcttaaacaccaaaggatgtggggatgttttccagatgttcctttgggtgtagaaggacaatgacatcaagagtagttgaaaagtatcttgccactgttggccttttgatttttttttcccactttttcttgaaagattaagtaattttattttagttccattctagaatgttggggagtggggcacaagaaaaaatagtaaaaatgaaatgcatctgttaaaaatgtcatggattgaaagcagaactggagtttcaaattacaaccttaaaattgttgttagatatttccttcacattaccagctgccccattttgaaaaagaaattatcccataaaggtaatgttggtgctccaaatttgcccagcccattccccaaccccccttctccccttacctgcccttcacctaaagaaccccagaaaagctaattgctccccctttcagcctctgttgcaactaacaactctcagtggcctcaggacacagctttggccttggggaattctgggaaaacttttacttcctgattaaagatacatatgcagttaggccacctcctcccccccttactgccataaacaccaaagtgatgactggagctggaggagttatttgaaccacgacggaagggccaagagaaccacgaagatgccagttgccacattgttgagctgctgacccaacaccagccattgcctgtctctaaacatcttatgaaataaaaccagttttgtttaaaaaaaaaa

SEQ ID NO: 2052 - DNA, 3329 bp, Homo sapiens
tttcgttttgccgagcgcagagctgcagccgccgagtcggacgtgtccgcgaagatggcgggccggagcatgcaagcggcaagatgtcctacagatgaattatctttaaccaattgtgcagttgtgaatgaaaaggatttccagtctggccagcatgtgattgtgaggacctctcccaatcacaggtacacatttacactgaagacacatccatcggtggttccagggagcattgcattcagtttacctcagagaaaatgggctgggctttctattgggcaagaaatagaagtctccttatatacatttgacaaagccaaacagtgtattggcacaatgaccatcgagattgatttcctgcagaaaaaaagcattgactccaacccttatgacaccgacaagatggcagcagaatttattcagcaattcaacaaccaggccttctcagtgggacaacagcttgtctttagcttcaatgaaaagctttttggcttactggtgaaggacattgaagccatggatcctagcattctgaatggagagcctgcgacagggaaaaggcagaagattgaagtaggactggttgttggaaacagtcaagttgcatttgaaaaagcagaaaattcgtcacttaatcttattggcaaagctaaaaccaaggaaaatcgccaatcaattatcaatcctgactggaactttgaaaaaatgggaataggaggtctagacaaggaattttcagatattttccgacgagcatttgcttcccgagtatttcctccagagattgtggagcagatgggttgtaaacatgttaaaggcatcctgttatatggacccccaggttgtggtaagactctcttggctcgacagattggcaagatgttgaatgcaagagagcccaaagtggtcaatgggccagaaatccttaacaaatatgtgggagaatcagaggctaacattcgcaaactttttgctgatgctgaagaggagcaaaggaggcttggtgctaacagtggtttgcacatcatcatctttgatgaaattgatgccatctgcaagcagagagggagcatggctggtagcacgggagttcatgacactgttgtcaaccagttgctgtccaaaattgatggcgtggagcagctaaacaacatcctagtcattggaatgaccaatagaccagatctgatagatgaggctcttcttagacctggaagactggaagttaaaatggagataggcttgccagatgagaaaggccgactacagattcttcacatccacacagcaagaatgagagggcatcagttactctctgctgatgtagacattaaagaactggccgtggagaccaagaatttcagtggtgctgaattggagggtctggtgcgagcagcccagtccactgctatgaatagacacataaaggccagtactaaagtggaagtggacatggagaaagcagaaagcctgcaagtgacgagaggagacttccttgcttctttggagaatgatatcaaaccagcctttggcacaaaccaagaagattatgcaagttacattatgaacggtatcatcaaatggggtgacccagttactcgagttctagatgatggggagctgctggtgcagcagactaagaacagtgaccgcacaccattggtcagcgtgcttctggaaggccctcctcacagtgggaagactgctttagctgcaaaaattgcagaggaatccaacttcccgttcatcaagatctgttctcctgataaaatgattggcttttctgaaacagccaaatgtcaggccatgaagaagatctttgatgatgcgtacaaatcccagctcagttgtgtggttgtggatgacattgagagattgcttgattacgtccctattggccctcgattttcaaatcttgtattacaggctcttctcgttttactgaaaaaggcacctcctcagggccgcaagcttcttatcattgggaccactagccgcaaagatgtccttcaggagatggaaatgcttaacgctttcagcaccaccatccacgtgcccaacattgccacaggagagcagctgttggaagctttggagcttttgggcaacttcaaggataaggaacgcaccacaattgcacagcaagtcaaagggaagaaagtctggataggaatcaagaagttactaatgctgatcgagatgtccctacagatggatcctgaataccgtgtgagaaaattcttggccctcttaagagaagaaggagctagcccccttgattttgattgaaaatgaactatttgaaacacacagtgaccaagggaagtgaccaaggtgaagatggcctaggatcttcactgtcttactcaagatactggactaagtggaacgttctctaccttcaacatgtgctcgctctgcatgattagtgcaataaaactcccttccttatgcatactgagatagcttagtgtctcgtggaaggtgtcaatttggtttagaatgctgcgcttaccttcccatgcaggctaaagtgattccttcttgctcagtccctctgggtgggaaccatccagtacttgtggacactacacgtttcaacctctctactagcaccatcacccttgaaaactctcagtcagtgtcatgaatgttgcatgacaacagttggccgattagaaggcagactttctacatgcaaatctggcttagtaaatcgaggtgtgggccagagatcctctgacagctgtcctgagctaacactaaaagtcactgggtatttggttaaaggtctcccacaagactgggtattctctttgcctgaagaaacaaggcattgaatctctaaaatgctgttctcaatcattgtcagagaatgttttcaagttgcagtcaagaagatctttcctaatagaaagtcagatggctaccgtgttgggttgtgacttccccttaagtataactaatttgctctgtggtaagagatatgctcattattaccacttagaagatgttgttaaaaacatgtgaaagataggtatggaaaaagcatacacccccaaacagaaaggagttattaaagtaatttacaaacctctcagcactaattagtgtccaactccaagtgggtcaattccttagtataatattaaggcttactagtatcactgctttttccttagcttaatgacttacttagaatttatcctttattttaaatgatctgtactatctagtgtctaaaacactattctccagaaaaatcaatcattttctagccctctccctcagtcctttattgtccattccaatacattgaacacatttcc

SEQ ID NO: 2053 - DNA, 1350 bp, Homo sapiens
atgctggacacaggttctgagcacctgaaccggatactgaaggctctgccagccctccagagcgctggcagtgaaggacagaacggctccgcagaaagcctcggagaaggcgggacccgggacagcgacagagcacggagaaagctccgcgggggaaacaaggaaatccccaccttctatccctgtctcgtggtgcggtcccctgtgacggcctcagacctgcggggaacccaggactttgccgcctaccacggtctcagccttattctcgagcctctgggcgcctgcaaccggctgtctgtctgtgtgcctgttcactctcccccggggatgcgggtctctccgaggtcgccttctttgcgcactttggttattgatcctgctgaaccggccggagcgcagcggctgcgcttctctgggaaagaacggagtggggaggctggctccgccgtagaggggttggcagtggcggtcagcatgggcgatgggggcgccgagcgcgaccggggccccgcgcgccgggcggagtctggtggcggcggtgggcgctgcggagaccgcagcggagcgggggacttgcgagctgatggcggtggccacagcccaacggaggtggccgggacctcagcctccagtcccgcaggctccagggagagtggagccgacagcgacgggcagcccgggcccggcgaggcagaccactgccgccgcatactggtgcgagatgccaaagggacaattcgggaaattgtcctgcctaagggcctggacctggaccggcccaagcggacacgtacattcttcactgccgagcagctgtaccgcctggagatggagttccagcgctgccagtatgtggtgggccgcgagcgcactgagctggcccgccagctgaacctctccgagacccaggtgaaggtctggttccagaaccgccgcaccaagcagaagaaagaccagagcagagacctggagaagcgggcgtcctcctcagcctccgaggcctttgccacctccaacattctgcggctgctggagcagggccggctgctctctgtgcccagggcccctagcctcctggcgctgacccctagcctgccaggcctacctgccagccacaggggcacctccttaggtgaccccaggaactcctccccacgcctcaacccgctgtcctcggcctcagcgtcccccccactgccgccccctctgccagctgtctgcttttcctcggccccgctcctggatctgcctgccggctacgaactgggttcctcggccttcgagccatacagctggctagaacggaaagtgggcagcgccagcagctgcaagaaagctaacacttaa

SEQ ID NO: 2054 - DNA, 1066 bp, Homo sapiens
acctcctgtaagctttagaaggattcggtgctgctggcctgctcagacctccgcctgttttgtggagtttctcctgttggcccctcctctctgtaccacaaaagctctaggcgggccagccacccctgtgaaagcggcgcccgtagccagacgccaaggctgccgtcccgagccgagggtggcaccttgcccagcgcacgtgcattctcctgtgggaactcggagggcatgtggtgagcagtctcctgtcagttgaggtggaggctcccggcccatctttgctctcctcaggctgcccagctcctggcggcacatggtggcctggcaaggctgacttggcctcctcagttccccacccatccgcggatcatcgccttccctagccacctctctctatagccaccgacatctgcggagcgtcacagactggttctgagctgtggtttacaaattcaacccaacacagagtgaattcaaatttgcttttggaacagcctttatctccaattaagtgcaagtatatttacactatgtgatattaaaggacttctccaatgactgggaggtactgaaccaagatgtttgtaaagaaacggtggggtgaggtggttaggtagaatataccgtcctggccatttctcttccttcaggcgagtaagcgctccttcagcagaaaggctgcggattgctggctgtgctctgtggactgggccagtaggtgtggcccaggtccaggtcctggcacctctgctgagtgcccagcctgagatgacacatgccatcctggagagaagcagagagggtgctgtctccaggcgttctccagacagcctgggcctggcttgctgagccagctgcaggaggggatctcctgactggggcttgggaccagatctgctgcagagaggcaataactctgtctaaaaagaaaacttgtcccgtgtgattacaaaaacaggaaaaggctccaagctaggaaatgagatttgaggtatggagaacattctcacctgatggaagcatcctgttcctgtacaggaggaggagctggtgcaagccctaggcc

SEQ ID NO: 2055 - DNA, 1261 bp, Homo sapiens
ttttttttttttattgacatttcgatctaagtggtcataaaccagataggtagttttattaaaagatttaccctaagaacactccttctattcccatttctgacatcctacccacacccacattcatcgactaccatgtcttcataatgtcgtagaatgacattgtcattattgtcctggtagagcatggaaatgggagacagcttggtggggatacacacagcctgggggatctctgggtcaacggcatgcatcagggcttgcatgaaagcataattggagctgttgagagagatggtcagtgagaagggacactctccatggcagtaatttgccatgaaccccttgggggcaatgatccacttgtgccaacccaggtcccggaagttaatgaatagctggtgacggtggcagaggttcttacaagaaagcttggggacagggatggctgctctccttttccgagaagggtggcactgatcagggttgagagtcaccaccagcagggaagcatgaagggagcatcttagtctggcacaggtgtcttcaggctgaaaattcacccctgagtctctatcttctttgaccagtatctccaggaataacccgaaatttttccgggggttgtcattccaatccttagctacatccagcaggttgaagtgaacagcaccttgtggccatgggactgaccgcaacacaaacattttacctggcttaggggtggtctggccccacacatgaggctcctgaaccaggaacagagccagttccagctctggtcccaggttatagtaagaattgggccccaagtccaggcccagctgggccaatgtcaactgttccctttctttgatggcagacaggttaaagtagaggagcttctgcaggcaggaggaagcttgggaaattttctttgggtaaagaaagaaaccttggtctgggagaaagcgaagtacattcccgcggacgcccagctcctttacgtagcataagtctcgggagaccccagtggtcgctgctgcctcgcgatcctggaaaattttcttcaagatataaggcacaggttggaacttctggggtgaaggcgccttatctaagcccagaaattggagaaagacatattcttgaaattggactgcctggcccaaagccagaattaacaggaagctgaaagccaaatctggcaagaaacgaagcatggcctctggagtggctgtcagaccggggagagctccctcgtgccgaataccgcaggcaa

SEQ ID NO: 2056 - DNA, 1375 bp, Homo sapiens
cggagtgcaagtgagcttctcggctgccccgcgggccggggtgcggagccgacatgcgcccgcttctcggcctccttctggtcttcgccggctgcaccttcgccttgtacttgctgtcgacgcgactgccccgcgggcggagactgggctccaccgaggaggctggaggcaggtcgctgtggttcccctccgacctggcagagctgcgggagctctctgaggtccttcgagagtaccggaaggagcaccaggcctacgtgttcctgctcttctgcggcgcctacctctacaaacagggctttgccatccccggctccagcttcctgaatgttttagctggtgccttgtttgggccatggctggggcttctgctgtgctgtgtgttgacctcggtgggtgccacatgctgctacctgctctccagtatttttggcaaacagttggtggtgtcctactttcctgataaagtggccctgctgcagagaaaggtggaggagaacagaaacagcttgttttttttcttattgtttttgagacttttccccatgacaccaaactggttcttgaacctctcggccccaattctgaacattcccatcgtgcagttcttcttctcagttcttatcggtttgatcccatataatttcatctgtgtgcagacagggtccatcctgtcaaccctaacctctctggatgctcttttctcctgggacactgtctttaagctgttggccattgccatggtggcattaattcctggaaccctcattaaaaaatttagtcagaaacatctgcaattgaatgaaacaagtactgctaatcatatacacagtagaaaagacacatgatctggattttctgtttgccacatccctggactcagttgcttatttgtgtaatggatgtggtcctctaaagcccctcattgtttttgattgccttctataggtgatgtggacactgtgcatcaatgtgcagtgtcttttcagaaaggacactctgctcttgaaggtgtattacatcaggttttcaaaccagccctggtgtagcagacactgcaacagatgcctcctagaaaatgctgtttgtggccgggcgcggtggctcacgcctgtaatcccagcactttgggaggccgaggccggtgattcacaaggtcaggagttcaagaccagcctggcccaagatggtgaaatcctgtctctaataaaaatacaaaaattagccaggcgtggtggcaggcacctgtaatcccagctactcgggaggctgaggcaggagaattgcttgaaccaaggtggcagaggttgcagtaagccaagatcacaccactgcactccagcctgggtgatagagtgagacactgtcttgacaa

SEQ ID NO: 2057 - DNA, 1324 bp, Homo sapiens
ttttttttttttgttcttcaactttgatattttattgaaaaaagtacacaaaaaccactgaggtacacaagcccaggtaagcataccaagcaagccccctcacaccttttgtctgaaaaaagcttgacttctttgcagcaatgtctcgcccattccagcagcagtatctcagttaacttggttccttttcctccaggctcaaaacaaaatcaaactcttcctgggtcaggggctggattgataatctctggcgagtgaagagaaccatattttttaaggggccaccagtagctttgtgagcttgatgataggatttgagctcagccaggggaatgaaacgtttcatcatccgaacaaactgtacatccaccatggaccacttagggttgtcctctttgctagatgggtcataatggggattgtttttctcaaactgtgtgtggtctgggtaagcctctttcacgatcttcatgagtcctgcgatgcctggctctttgcagttgctatggtagaagaaggcttcttctcccagcttcatggctctaaggaagttccgagcctggtagttacgaacaccatcccagcatgttgtctgtttgggctgtgctttgagatcctcaatgctgaacttcacatctacacctttctctaggcggctctctggctctgacttcatcagccagtggctgcttagattcttcaaacagtttttagtggctgaagtcttctgagggttggagtcctccactttagctaatgcctcacctgagttctcagttttggtgcgttttcctgatagtcccttgtctgaaccagaagtcccagccagcctcttccggggtctcgacatggtcacgctgcaggggactttagtgcggacgattctggaatcaacggagatacaagaaagaatgctaatgtcctccaaaacccgcgcagagcgagatggaggcaacgagaggcagcctagaacgtctccaacttttgcgaaacacagacgcctacgtttgagccctcaaatccttccctccgttatctgcgccatttccatctcgcataacctgcccctaaactcttctcggttctgtccttggtccttctcatccaggaacccctatctcagtatgtagttcactgggaagtggctccacagagacacttttgttgggtgaatataagtaagccttgtgttaccttgttatccttgctaattaggatcaactgaatggataatctagatgatgaagtaatttgctggctacagacccaacactctgcagactcgactgcggtccgcctccgctgcgccgcaggctgtgcagcg

SEQ ID NO: 2058 - DNA, 1324 bp, Homo sapiens; identical to SEQ ID NO: 2057

SEQ ID NO: 2059 - DNA, 1527 bp, Homo sapiens
gaattcccgtgtcgacgatttcgtgagcgcggcagcccgcgcagccggtgactgggggactgggtttggagtaggacctgcggcgtgctcgagactccgacttcggtcttgcggcgcgctcgcgcccgcgggccatgccccactgactctaagtgggcactgccccggctccgggagggcgagaccgagcgccggccatgggaagcttccagctggaagactttgcggcgggctggatcggaggtgcagccagtgtcatcgtcggccaccctctggacacagtcaagactcgcctgcaggctggcgttggctacggaaacaccctcagctgcatccgcgtggtgtacaggagggagagtatgttcggcttcttcaagggcatgtccttccccctcgccagcattgccgtctacaactccgtggtgtttggggtcttcagtaacacgcagcggttcctcagccagcaccgctgcggggagccagaggccagtcctccccgcacgctgtcagacctgctcctggccagcatggtggccggcgtggtctctgtcgggctgggagggcccgtggacctcatcaagatccggttgcagatgcagacacaaccgtttcgggacgccaacctcggtttgaagtccagggcagtggctcctgcagagcagccagcataccaggggccagtgcactgcattacaaccattgtgaggaatgagggcctggcggggctataccggggggccagtgccatgctgctgagggatgtcccaggctattgcctctacttcatcccctacgtgttcctgagtgagtggatcacacctgaggcctgcacaggccccagcccctgtgctgtgtggctggcgggcggcatggcaggagcaatttcttgggggacagcgactcctatggatgtcgtgaaaagtcgactccaagctgatggggtttatttaaacaaatataaaggtgtcctggactgtatctcccagagttaccagaaggaaggtcttaaagtgtttttcagaggcatcactgtgaacgcggtgcggggcttccccatgagtgcggccatgttccttgggtacgagctgtcgctgcaggctatccgcggggaccacgcagtgacgagcccataagcgccagggtctcatcccattaacaggtcaatgctaaaagtgtctgcagaacccatgatgtgaatttactgaagagaaagactctccaccaggtgggctttcagccaggcaggctgtcctcagaacctcttccttccttcacaattacaagcattctcatccccaccccggctggggcagcggagcttctgccttggagggattcaactgaccattggtcaactgatcaccaactattccagctttggacctgcacctggtaacaaacaaacgaacagaacaaaacaaaactggagtaaaatagaccctccccccatggccattgtaaactcactgtgaattcatgggaagagctggagttggctctaagtttcaaaataaaagcattaaaaac

SEQ ID NO: 2060 - DNA, 2521 bp, Homo sapiens
ggcacgagccgtcccggcggtaatgcgctcccggccgtgacccccgctgggggcgggggccgggatccatgcgcggagcccccacccggcccggcgcctgcggctgacggcggcgggggttggggggcgcgcgtctggcctcctgcccaccccctggcgtcgacatcacgggccgtcgggggctgcgccctaccccgcggccaggctctggcagggaccctggaggtgccgccggcctcagcccatggcccaaaggtacgatgagctgccgcactacccaggcatcgcggatggccccgcagccctggctggcttcccagaggcagtgcccgcggcaccagggccctatggccctcaccggcctccccagcccctacccccaggcttggacagcgacggcctgaagagggacaaggatgagatctatggacacccgctcttccccctcttggccctgggctttgagaaatgtgaactggctacatgctctccccgtgatggggccggagctgggctggggacaccccgcggcggcgacgtctgctcctctgattccttcaacgaggacaacactgccttcgccaagcaggtttgctctgagaggcccttctcctccaacccagaactggacaatctgatgatccaggcaatccaagtgctgcggttccacctgctagagctggagaagggaaagatgcccatcgacctggtcatcgaggatcgggatggcggctgcagggaggacttcgaggactacccagccccctgccccagcctcccagaccagaataatatatggattcgagaccatgaggatagcgggtctgtacatttggggaccccaggtccatccagcggggggctggcctcccagagtggggacaactccagtgaccaaggagtcgggctggacaccagcgtggcctctcccagttctggtggagaagatgaggacttggaccaggagccacggcgaaacaagaagagggggatcttccccaaggtggccaccaacatcatgcgagcctggttgttccagcacctctcacacccgtacccctcggaggagcagaagaaacagctggcgcaggacacggggcttaccatcctgcaagtcaacaactggttcattaatgcccggagacgcatcgtgcaacctatgatcgatcaatccaaccgcacagggcagggtgcagccttcagcccagagggccagcccatcgggggctataccgagacagagccacacgtggccttccgggctccagcatcagtggggatgagtttgaactcggaaggagaatggcattatctatagaggctgatgcgggagagacccagcctccggctgtgacccccagcctcacacctggctctggttcccgcctggtcctctggcttcaggatcccacctccaaaggcctctccgctcaacgcctacctccctaaggccctgctgggacatgggggcctgagtgcccacccaaggggctctcaaggacaccggcaaggcctccaggctctgagccccgcttctgccttcacctctgcctgggacccgagctgggctcctgggccttggtccccagaagatggcagctagggcctcgccgcgaggacagagaagggacagggtggctgggcagtcagggaaggagggtcgcccggatccgacattttggagagattctttcaccctcctgtcccccccacctcccttctctaatttcttctttttttaatgataaagtcttaaaacacagaaaaaaaaaagacttcagagaattaggtagatgaagcactttatacagtatatatcttcagcttaaatttgttttgagtattttttttatttttaagtaggcaaagatttaaaattttttatttttagtttgcttcaaacatttactaaaaagacgtgggcaatatttaccaaaacaaaacagaacccaaaaaattgtacatcttgatcttagcaaatatccttattgtagagacacttaataaagagatggtattttaatatctgcagttctgaggtagggtgtaacttagttctacattgtgatttaggaatttttaaacctttcttcttcaggggagaagtgacccaggcctcgagtttagtgctaaagccactagtgtacttatgctgtcacctaaccaccacatgcgacatggaggcagaggctaaatataggggctttcttaagaaagtgagaggaaattagcaagcattattagtgtttgactactgctatcaagtgaattcaaaggaaacaggtttttatgccatatttaagttacagaaaccaggcatgcttagaatagtttctagaggttattggagaatagaaagctaagaaaacttggtatacgatttacaatggaaatataattacactttttactctcagaatattgttcacattagacttcctgtttatcttttatattcttgcatttatataatgcctcatcctttcaaagttctttcacatattatatgatcttctttatg

SEQ ID NO: 2061 - DNA, 968 bp, Homo sapiens
ctgttgcacacacacagtggcacacatgccaaagactctctcagctgacccacagatccattctcaagtatttactgatagacactcatgcgtgccaagtcctcatcctcaaacatacacatgcctctctttctctcccgtcttgccaggagtgtttcccctcctccatcccctctgcctcccatatggtgtcccaccctcaccccccacccagcccaaggtggggacagacacctgaggggctgccagctgcttccccgtgtgggcccgggccgcgctcatgcttctcgtccatcctgcccacaggggactcgtgggggatgttagcgtgcctgtgcacggtgctctggcacctccctgcagtgccagctctcaatcgcacaggggacccagggcctggcccctccatccagaaaacctatgacctcacccgctacctggagcaccaactccgcagcttggctgggacctatctgaactacctgggcccccctttcaacgagccagacttcaaccctccccgcctgggggcagagactctgcccagggccactgttgacttggaggtgtggcgaagcctcaatgacaaactgcggctgacccagaactacgaggcctacagccaccttctgtgttacttgcgtggcctcaaccgtcaggctgccactgctgagctgcgccgcagcctggcccacttctgcaccagcctccagggcctgctgggcagcattgcgggcgtcatggcagctctgggctacccactgccccagccgctgcctgggactgaacccacttggactcctggccctgcccacagtgacttcctccagaagatggacgacttctggctgctgaaggagctgcagacctggctgtggcgctcggccaaggacttcaaccggctcaagaagaagatgcagcctccagcagctgcagtcaccctgcacctgggggctcatggcttctga

SEQ ID NO: 2062 - DNA, 1948 bp, Homo sapiens
ttttttttttttgccacatttcacatttgagaacccagaattcagctcctgttatacaaaatttgtaaaaatttattgccttggcgtaaagtgacaatcatgccttggcgtaaagtgaaaatcttcacagaagggtatgctttgtgtcaccaaatgggggtgcagctgtgtgatatctgtgcagtttgtgataaaattaaaaattttctgtgaaagattcttaactggaaattggaagggaaaacaagaagaaacaatgtaatgtagcagtggaaacaaaattctcacaatgaatagcagtctttccagcttctttgacacggatttcctcatcatcaatgggcggctctcctggaactaggggatgagtgtgaatctccatttgagggaaggggaagaagagcttggaggggtgacagcctccccctgaggagagccagttgtgttcatgattttggttccttcttcctcctaattaagcatctgcccaggagcccaggagccagggcttagcttcctggctattttcaactcttgttagtgaagaccagcattgccagcccactgaccccagtagggtcacccctgcccactgagaaccagccaccccctcaccccccaccagagttccctgcaggaaccagctgcctctagtgggagacagagtaaaggcagaggggcccctcctttctcaggtgccctgtgctagtgttgggcagctctaaggttggaaactgctttccccactgagctgaaggctgcctcctgggatatgcacccggcggtccccattcagccccgggagccactcgggtcaagtctggctgtatcccgagggcgaccaggacagccctgtgagcggcagttcccctcctggaacactgcttcaccagcccatcaccccagccctgtggactgctcctccctcacctggtttctacgtggacccaccattcttgccctcctggacccctaaactggcccatgtgtttagttgcagaatgggggccaggaccggacatgtggtttgattgctaaggacctagcagaggctcatcatgtggtagactctgtattttatcgtgtgtgtatgtgtgtgtatatttacacacacatacacacaagatagatatatatattaagtggacactgtatgtgtatatatacacatacatatattatagatgtatgcatatatgtatatatgtacacatatatgtatatgtgcatatagaggtatacatatagatgtatatctatacatgtgtatatatatacatatatggatacatacatatttatgtgtacacatatatgtatatgtgtatatatgtacacatatatgtatgtgtatacatacatatgtatatgtgtacacatatatgtatgtgtatacatacatatgtttatgcgtatacatatgtttatgtgtacacatatatctatgtgtatacatacatatgtatatgtgtacacatatatgtatgtgtatacatacatacgtacacatgtgcatatgtgtatacatacatatgtacacatgtgtatatgtgtatacatacacatgtgtatatatgtattaagtggacattgtacttctgatgtggatacggtgatgaagctacaaagtcacactatccctatggccttgtgtttagatggagcaaagcaactaaaaattgcctcaacaatcctgcaactcccagatcttcaatttacactgaacaccgtacgcaattgttctgggcccatctttccaatctattgaaataatagggactgcatcccctgcttccatcccctgttcattccttccatggtctacccactgggagggagcgctcaagggggaaactagaagttttaaaaagacaggaaagtctagagaaagaactagtcaaaaagcgaaaaatcctcatctgcccaattattgtttttttttcctacc

SEQ ID NO: 2063 - DNA, 809 bp, Homo sapiens
ttttttttttttgagactgtatccagcaggctttatgggctttttaggggagctgtgccgaggctggggggctgggggcaggggattaactctttccctggggcagcgctcctggctctgaacccatcaggggattttcttgggcaggggattaatgatcccactctcgatgtattcgaagactgtgtatgggtcctggtccccattgagggtgatggccgacccatacaactgctccaagtcagctgagttcctgtagaacaggtccattttcagcttgacctgctcttcagcatcctttgggttctgcaggaggcgagcctggatctccatggtgggaggtggcttgtacatgaggtggtacctttccccagtgactggatcaattcttctcagagtcagccgctccatgatggaatcaaatggcacattcaggaaaaactccctgttgggattgtagcccaggcggttcagcaggtgtgcctggtcgaggtcccgcgggacgccgtgtagcacccagcctttctggatgcagtcctgctggtccaggcgctggctcagcaccttcatgaggaggctgtcaggaactacaccgcacccacactgcctctcctcatccctcacattcgcttcaaactgcccggtgtaacttctttccttcttcaagccctccttgaaattgatgtcaagatgagcatcagtgttcatgggggaggctggcatttgcttctctttctcctgtggtccctgggtccctgggtcccgcccctcctgaaggatcccaataggacccaggaggtccagggaat

SEQ ID NO: 2064 - DNA, 1168 bp, Homo sapiens
gcggccgcggcggggccaggggcttgtacaggaagtacagacagagaacgtgacagtggctgagggtggggtggctgagatcacctgccgtctgcaccagtatgatgggtccatagttgtcatccagaacccagcccggcagaccctcttcttcaatggcacccgtgccttgaaggatgagcgtttccagcttgaggagttctccccacgccgggtgcggatccggctctcagatgcccgcctggaggacgaggggggctatttctgccagctctacacagaagacacccaccaccagattgccacgctcacggtactagtggccccagagaatcctgtggtggaggtccgggagcaggcggtagagggcggcgaggtggagctcagctgcctcgttccgcggtcccgtccggctgccaccctgcgctggtaccgggaccgcaaggagctgaaaggagtgagcagcagccaggaaaatggcaaggtctggagcgtggcaagcacagtacggtttcgtgtggaccgtaaggacgacggtggtatcatcatctgtgaggcgcagaaccaggcgctgccctccggacacagcaagcagacgcagtacgtgctggatgtgcagtactcccccacggcccggattcatgcctcccaagctgtggtgagggagggagacacgctggtgttgacgtgtgctgtcacggggaaccccaggccaaaccagatccgctggaaccgcgggaatgagtctttgccggagagggcggaggccgtgggagagacgctcacgctgccgggtctggtatccgcggataacggcacctacacttgcgaggcgtccaataagcacggccatgcgagggcgctctacgtacttgtggtctacggtgagagcaggctgcggccgactgagggcgggggcggggcgccagaccctggtgcggtggtagaggctcagacgtcggttccctatgccattgtgggcggcatcctggcgctgctggtgtttctgatcatatgtgtgctagtgggcatggtctggtgctcggtacggcagaagggttcctatctgacccacgaagccagtggcttggatgaacagggagaagcaagagaagccttcctcaatggcagcgacggacacaagaggaaagaggaattcttcatctga

SEQ ID NO: 2065 - DNA, 3163 bp, Homo sapiens
cagcgcttgcgcgctcgcgggccgctccctccgctcggaagggaaaagtctgaagacgcttatgtccaaggggatcctgcaggtgcatcctccgatctgcgactgcccgggctgccgaatatcctccccggtgaaccggtgcggctggcagacaagaggacagtcgccctgcctgccgcccggaacctgaagaaggagcgaactcccagcttctctgccagcgatggtgacagcgacgggagtggccccacctgtggcggcggcaggcttgaagcaggaggatggtccgcacatccgtatcatgaagagaagagtccacacccactgggacgtgaacatctctttccgagaggcgtcctgcagccaggacggcaaccttcccaccactcaacacaatggccctgcctcccaccgctttatttctttcggtttcggatgcaaaacaaaaaattttaaaagaaaatgtgacttcaaaggaaaagaacaaatttccaaagacttgggggagtgaaggcagagcctggtgcagatggacgaggtctgcagacggagggcagaggtggtggaaggggccaggggcctgcaggcctccccctggaactgggactggtctcggtctgctgacgtcagggtcagctcccccgcggagctgacttcagcagcccacagctgtggggcttcagcagccacaccagcccagcccagcccagctctcgatacgtttggtctttcatgctgaaaaataaataataaagcctgtcccgtgtctactgcctcccccaactgcacagacgccagcctctaggcctgactgccagggaggtggaaacactggccaccagcccggcagcccctacaggccccccagatgggctgcctcagtcgtcctctgagagctgcagatcctccagctcgtcctccggcccctgggccagctgctgcagctccccaggggccagccccgcctctgcgtctgggtctccatcctccgagttgctgctgtcctcctcgccctcctcctcgtcctcttcatcgtcttccaccccatgccgagtgctcaggggcctcagtatccctctctccgagaatccctcggtgtcgtcctcttcagagctgttcaggtcaaagaggtctttaaattgcttcctgtcctcatccttcctgtcagccatcttccttcgtttgatctcagggaagttcaggtcttccagccgctctttgccactgatctccagctggatctcccggtcacgcagcttgcgccagtggctgtagtacaaggtcaagggtgtcccctcttcccgggtcagcttctcccaggcttccactgcctgctgctcagagacgccgaaggaaaccctctggcggcggctgcagatgtatgccgagttctcctgaaccttcccaagcagctgctgcacctgccggcagtagttggccaccttgcactcccggaggaacgacttcagctgcaggaccacaggcagcaccagctccgggaagccgatgcagtgtgcctggctgtgcaggtactccagggtgaggtcgtacagctgctccaccaggccgtcccggtacgccttctcctgcaggttgacattggacagcttcaggatcacggagaagttgatgggcttggagctcatgcgccctggcttcctgttgaagtcgacctgctggaacatctccaggatgaaaggcagcaccgggatgaaggcccccgagctccccgagagcagcgtcagggcacggatgcagtgcattcgcagcgggtagaagcgggcagtggggatgagcttgatacagccaatgatgacttgggcaagggggtagaccaagggctggagggcttcgctggggcccgcagtgctcaggacccggcaccacaggaagaggcagtgcacatactgccagttgtacacagactggtatgtttccttcttgcgggtggtcatggcgttgcgcaggtgtatggcgagctggcggatgtagaggaaggcgtgctggtaggccacacccggctccagggccagcagctccgtcaaggtccactgcatgaaactgatgaaggggagggcaccaggcgaggtgaacttgcagttcctcacatacgtgatgtacatttgcttgaggacggggccaaggaaagtgtccttcttgtgccggcagactctgctgaggaccaggaaagccagcacccgcagagactcctccccagtgctccatacgaccaccattctcttgagcagcatgcggcactgcttggggaaggtcaggaagcagggcaccagcacgctgatgtgccgcagcacggccgccaacaccgtcgtctccgacagacaggacaccagctgtatggccgagcccaggtaagccttgatgtccacacgaagcttcccccagagcgggctgctggacggctgcagcatcctgctgctatcctttgccacctttccaaacagcagcttctggagacagccaatgaggtctctgatgcagaaggtaaccagagcattgaatgcagcactgtccgtgacctggaatttgttggcctcagcactttcctggtcccctcgggtggtggccacagctgctcggaacgcctgtaccacttcatggaacagctttggagtgaggcgttgctttgctgcctgcttccatctctcaaccatggcgacggtcacaggaacagaattcttcttccccttcagccctctggggactctgtccccatcttctccttcctccgctccatcctcctcctcactggcttcctccagcacatctggcagggagtggaacggcccctcttcctcctcagagctgtccgagtcgctgaagtttagcaggctctggtcattctcctgcaggaacttgtagaactcggggtctctgtccttcagccgagagagctggtctttgtgctcagaggcacggcctttacgccggctggccgaggggctcccgcccggcttatccggactccgggcagcctcgcgtgcttcccgtgtctccgcttgtggagaattttcggactcggattcggactcggagtcaaagcccgaagctaggaactcgtccaccgtcagctccgccaggcgcctcttgcggctccccgcagctgccatgacaccaacccgaagcgtgcaccccacttacgaaa

SEQ ID NO: 2066 - DNA, 1286 bp, Homo sapiens
gaagtagtaggcaatgagccagaaggggtcctcagtcagtttcgggagcactggtgtggagtggatgaagccagtgaggacacagtggagacagtggagcaccagagaacccagggcaaggaagctgggcagccgggcccttcaccagtcaggccacctgcagtctgcagtcagagcctcagatcttacactggcagcacacggggacacagcagctggactggcagcagcagggcttgtagcagctggattggcagcaggatgatccacagcctgagaagcagctacagggcttacagcagctggactggcagcagtagggcttacagcagctggactggcagcaggatgacccacagcctgaggagcagcagcagggcttgcagcagctggactgggagcaggatgatccacagcctgaggagcagcaacagggcttacaacagctggactgggagcagccacaagaaccacatccccccttggaacccccacaggagccacagccccccttggagcccccacaggagccacagctggtgcaggaacaggctggcacccaggagcacacgggcttgcagcagcagacaggcacataacatctggagccacatcccccacagctggagctgcagcccccacagccagagccacagcccccacggccggagccacagcccccacagccagagccacaacccccacagctggagccacagcccccacagccggagccacagcctctggagcagccacagcagcccatggttctggtggattgagggtggagcaggtagaggagcaggtgagagggaggtgcaggtgtggagctccctgagcctgggctctttatatacctgtccagatgtcaggcatgacacagggtccctttcttgtgactgtttacactatttttccagagctctatttttttcctctttgctagtgacttccttctggctcagttgagcatctactttctttgttttctaaatttgtctttttccccatttgttttggcccctacaattaaaacctcagctccaggctgtctggttcttcctgcaaagctccagggtgctggtcacctgctctctgctgaccacatgtgaccaatgggcaacagcctctgcccacgtgctctaatctttcctgtgttgactccctcaataatattaattttacatttttagatttcaaaattatccacgatctttatactcatgccagtctcagctttccgggtgtgttagaccattctttgcattgctctaaagaaatacttg

SEQ ID NO: 2067 - DNA, 5716 bp, Homo sapiens
agcgctcaaaccacacgcaccgctgctcggggcttggagatttgcgcaggctgggctcccggacccggcggaccgacgcgcggaggatcgggatccggcgctgtggggctggggtgggcgggggaggctgcccccggtgcctttggcgcgacacccgcatgaggacgcgagtgaaatataccaaggtggaatttccaagggaaaagcttcggggtggttttggtccatttctccagcgaagaagttgacatggcgagcgactccccggctcgaagcctggatgaaatagatctctcggctctgagggaccccgcagggatctttgaattggtggaacttgttggaaatggaacatacgggcaagtttataagggtcgtcatgtcaaaacgggccagcttgcagccatcaaggttatggatgtcacaggggatgaagaggaagaaatcaaacaagaaattaacatgttgaagaaatattctcatcaccggaatattgctacatactatggtgcttttatcaaaaagaacccaccaggcatggatgaccaactttggttggtgatggagttttgtggtgctggctctgtcaccgacctgatcaagaacacaaaaggttacacgttgaaagaggagtggattgcatacatctgcagggaaatcttacgggggctgagtcacctgcaccagcataaagtgattcatcgagatattaaagggcaaaatgtcttgctgactgaaaatgcagaagttaaactagtggactttggagtcagtgctcagcttgatcgaacagtgggcaggaggaatactttcattggaactccctactggatggcaccagaagttattgcctgtgatgaaaacccagatgccacatatgatttcaagagtgacttgtggtctttgggtatcaccgccattgaaatggcagaaggtgctccccctctctgtgacatgcaccccatgagagctctcttcctcatcccccggaatccagcgcctcggctgaagtctaagaagtggtcaaaaaaattccagtcatttattgagagctgcttggtaaagaatcacagccagcgaccagcaacagaacaattgatgaagcatccatttatacgagaccaacctaatgagcgacaggtccgcattcaactcaaggaccatattgatagaacaaagaagaagcgaggagaaaaagatgagacagagtatgagtacagtggaagtgaggaagaagaggaggagaatgactcaggagagcccagctccatcctgaatctgccaggggagtcgacgctgcggagggactttctgaggctgcagctggccaacaaggagcgttctgaggccctacggaggcagcagctggagcagcagcagcgggagaatgaggagcacaagcggcagctgctggccgagcgtcagaagcgcatcgaggagcagaaagagcagaggcggcggctggaggagcaacaaaggcgagagaaggagctgcggaagcagcaggagagggagcagcgccggcactatgaggagcagatgcgccgggaggaggagaggaggcgtgcggagcatgaacaggaatacatcaggcgacagttagaggaggagcagagacagttagagatcttgcagcagcagctactgcatgaacaagctctacttctggaatataagcgcaaacaattggaagaacagagacaagcagaaagactgcagaggcagctaaagcaagaaagagactacttagtttcccttcagcatcagcggcaggagcagaggcctgtggagaagaagccactgtaccattacaaagaaggaatgagtcctagtgagaagccagcatgggccaaggaggtagaagaacggtcaaggctcaaccggcaaagttcccctgccatgcctcacaaggttgccaacaggatatctgaccccaacctgcccccaaggtcggagtccttcagcattagtggagttcagcctgctcgaacaccccccatgctcagaccagtcgatccccagatcccacatctggtagctgtaaaatcccagggacctgccttgaccgcctcccagtcagtgcacgagcagcccacaaagggcctctctgggtttcaggaggctctgaacgtgacctcccaccgcgtggagatgccacgccagaactcagatcccacctcggaaaatcctcctctccccactcgcattgaaaagtttgaccgaagctcttggttacgacaggaagaagacattccaccaaaggtgcctcaaagaacaacttctatatccccagcattagccagaaagaattctcctgggaatggtagtgctctgggacccagactaggatctcaacccatcagagcaagcaaccctgatctccggagaactgagcccatcttggagagccccttgcagaggaccagcagtggcagttcctccagctccagcacccctagctcccagcccagctcccaaggaggctcccagcctggatcacaagcaggatccagtgaacgcaccagagttcgagccaacagtaagtcagaaggatcacctgtgctcccccatgagcctgccaaggtgaaaccagaagaatccagggacattacccggcccagtcgaccagctagctacaaaaaagctatagatgaggatctgacggcattagccaaagaactaagagaactccggattgaagaaacaaaccgcccaatgaagaaggtgactgattactcctcctccagtgaggagtcagaaagtagcgaggaagaggaggaagatggagagagcgagacccatgatgggacagtggctgtcagcgacatacccagactgataccaacaggagctccaggcagcaacgagcagtacaatgtgggaatggtggggacgcatgggctggagacctctcatgcggacagtttcagcggcagtatttcaagagaaggaaccttgatgattagagagacgtctggagagaagaagcgatctggccacagtgacagcaatggctttgctggccacatcaacctccctgacctggtgcagcagagccattctccagctggaaccccgactgagggactggggcgcgtctcaacccattcccaggagatggactctgggactgaatatggcatggggagcagcaccaaagcctccttcaccccctttgtggaccccagagtataccagacgtctcccactgatgaagatgaagaggatgaggaatcatcagccgcagctctgtttactagcgaacttcttaggcaagaacaggccaaactcaatgaagcaagaaagatttcggtggtaaatgtaaacccaaccaacattcggcctcatagcgacacaccagaaatcagaaaatacaagaaacgattcaactcagaaatactttgtgcagctctgtggggtgtaaaccttctggtggggactgaaaatggcctgatgcttttggaccgaagtgggcaaggcaaagtctataatctgatcaaccggaggcgatttcagcagatggatgtgctagagggactgaatgtccttgtgacaatttcaggaaagaagaataagctacgagtttactatctttcatggttaagaaacagaatactacataatgacccagaagtagaaaagaaacaaggctggatcactgttggggacttggaaggctgtatacattataaagttgttaaatatgaaaggatcaaatttttggtgattgccttaaagaatgctgtggaaatatatgcttgggctcctaaaccgtatcataaattcatggcatttaagtcttttgcagatctccagcacaagcctctgctagttgatctcacggtagaagaaggtcaaagattaaaggttatttttggttcacacactggtttccatgtaattgatgttgattcaggaaactcttatgatatctacataccatctcatattcagggcaatatcactcctcatgctattgtcatcttgcctaaaacagatggaatggaaatgcttgtttgctatgaggatgagggggtgtatgtaaacacctatggccggataactaaggatgtggtgctccaatggggagaaatgcccacgtctgtggcctacattcattccaatcagataatgggctggggcgagaaagctattgagatccggtcagtggaaacaggacatttggatggagtatttatgcataagcgagctcaaaggttaaagtttctatgtgaaagaaatgataaggtattttttgcatccgtgcgatctggaggaagtagccaagtgtttttcatgaccctcaacagaaattccatgatgaactggtaacagaagagcacttggcacttatcttcatggcgttatttctaatttaaaagaacataactcatgtggacttatgccagtctagaggcagaatcagaaggcttggttgaacatatcgctttccctttttcctctccctccgcccctcccagtacagtccatctttcaatgttgcagcctggttgagaaggagagaaaaaggtggcaggaatttcccaggagatccccaagaatgctgccttgtctgtggacaaagatggaccatgtgcccttcggaattagggatagaaacaaatattgtgtgctcttaacgattaagctgtgttatggggggttttcaggtttttaccttttttctttacccctttactctgcaagaatggggaaagaatgcatactgcgaaaatgagtcttttaaattctgtctgcctactagttttaagtatatggtatgttgtaaaatttccaatgatgagagacagcacaataaatgtaccttatctccttaggctgaaggccataactacatagtggagtaatttaagaactctcttgccttcaccaacccaaaaggttgctttttgatagcaactggctaatgaatttttaaaaagagaagaaaaatactagttttcccctcttttgggaaatagattttaaatggctaaactactagccttaaaactactagtctaataaaatcaactaccacttttgtgaatctgacaggccacatttttatatggccctttacagaatggagtgtgttgaacaggatactaacgccattgagttgagctggcctagcgatggagggacactctaacacaactttccctcagctattatgcaacagatcagggaaaaagatgggatgacagatggggtcagacagaaagagcttctgggaaacaagcttacatagtcttttttaaaatgcacaaagcctcccagctaagaggtcacttggtttgggcttcattaggactgagactttgttgagttctttctgggacttggagagtggatgatattcaggctctgaacattcccagcgctctcccgagggtgccactttctcaagatgaaaactgtgactgaaaaaattaataataaatgtttctgagcttgcctgtgttctcccctgtgtgggtgagagaagggactagactccctaaagcctgcctcagatacaagaggcatcattggctccaattttagagaacttgaaagcaaggctttggacaaaattttgagaccctaatcactttaccttcctccaaaattacccaacatacggtaaacaacatttgtgcagaagtatgtatgtatttagttcaggttgacttgtgtccttataaactcttactcaaatgatttgaacttt

SEQ ID NO: 2068 - DNA, 1026 bp, Homo sapiens
atgggccaggtggagtgtggaggacagaagctgggaaaccagttagaagatgacagtgaaccagcagaggggaaggtgtacagctcagatgaggagaagctggaggcatcagcaggagacccagcaggcagcgaacaggaggaagagggctcaggcggtgacagcgaggatgacggtttcctggacagttctgcagggggcccaggggctcttctgggacctaaaccgaagctaaagggaagcctggggactggagctgaggagggggcaccggtgacagcaggggtcacagctcctggggggaaaagccgacggcgccgcacagcatttaccagcgagcagcttttggaattggagaaggaatttcattgcaagaaatacctgagcttgacagagcgctctcagatcgcccacgccctcaagctcagtgaggtgcaggtcaagatctggtttcagaatcgacgggccaagtggaagcgcatcaaagctggcaatgtgagcagccgttctggggagcccgtaagaaaccccaagattgttgtccccatacctgtgcatgtcaacaggtttgctgtgcggagccagcaccaacaaatggagcagggggcccggccctgaatgggcacccaagaacttaggaaggcgagggatctgtacctgagcctgctctgagactgtcagggttctgtggaccagaggggctgcaactgtgattctgccttgagaggggctagttgggaattaacctagccctgggtgtgctcttcccagactcctcccagaacctgagatgtgaagcacttgggcctgagcctgttccagagaacttcaggactaggggcttcaaggttaaagggggctggggttctattgctgagggagctgttgggactgaggtggactcctggggagggggtgggttctaagatgcctaagggcctgaaggttctgtggcaaatgccctggaaccagcttctgatgggtggagggaacaggcgatacctagccaagtagatcgcagctcct

SEQ ID NO: 2069 - DNA, 2289 bp, Homo sapiens
gtggtggaattctaccagactagttcaagagccaatttcattaattcactgtcttacccaatctatcccagaaccaccaaatcaggtctcttggctgttgatgccagtgagctccagaaagatgaggcatacgcaggcagtactagaactatattcaaattaatctctgctggacagttaagcagtccttatctgattttagtttggagttagggttccttctaacactcaatgtcttgttccatctttccactgcatgcagacatctgaatgggactccgagtgccttacatccctgcagccccttcctcttcctacacccccagcagcaaatgaggcacacctgcagacagcagctatctctctgtggacagtggtggccgccgtgcaggctatagagaggaaggtggagatccacagccggcgactcctacacctagaaggtcggacagggacagcagagaagaaactagccagctgtgaaaagacagttaccgagcttgggaaccagctggagggcaagggggccgtgctgggaaccctgctgcaggagtacgggctgctgcagaggcggctggagaacttggagaacctgctgcgcaacaggaacttctggatcctgcggctccctccaggtattaagggagatatcccaaaggtgcctgtggcatttgatgatgtctccatctacttttccactccagagtgggaaaaattagaagaatggcaaaaggaactttacaagaatatcatgaagggcaactacgagtctctcatctccatggattatgctataaatcaacctgatgtcttatctcagattcaaccagaaggggaacataatacagaggaccaggcagggccagaggaaagtgagattcccacagaccccagtgaagagcctggtatttcaacatcagatattctgtcttggattaaacaagaagaagagcctcaggttggggccccaccggagtccaaggagagtgacgtgtacaaaagcacttatgctgatgaagagcttgtcatcaaagctgaaggccttgctagatcctcgttgtgccctgaggttccagtccctttctcttctccaccagcagcagcaaaggatgctttttcagatgtggctttcaaaagccagcagtctacatccatgacaccttttggacgtccagccactgacctgcctgaagcctctgagggacaagtgacttttactcagttgggtagctatcccctcccacctccagttggcgagcaggtgttctcatgccaccactgtggcaagaatctcagccaagacatgttgctgacccaccaatgtagccatgctactgagcaccccttaccctgtgcccagtgccctaagcactttactccacaggcggacctcagcagcacctcccaggaccatgccagcgagacaccccccacctgcccacactgtgccaggacttttactcacccatcaagacttacctaccatcttcgggtccataacagcactgagcgtcctttcccctgtcctgattgccccaagcgctttgctgaccaggctcgactcaccagccaccggagagctcatgcaagcgaaaggcccttccgctgtgcccagtgcggcaggagcttcagcttgaaaatcagcctcctgctccaccagcggggtcatgcacaagagcgccctttctcctgccctcagtgtggcattgacttcaacggccactcggccctgatccgccaccagatgatccacacaggcgagcgtccttacccctgcactgactgcagtaagagcttcatgcgcaaggagcacctgctgaaccaccggcggctgcacacaggcgagcggcccttcagttgtcctcactgtggcaagagcttcatccgcaagcaccacctaatgaaacaccagcgcatccacaccggggagcggccctacccctgctcctactgtggcaggagcttccgctacaaacagacactcaaggaccacctccgttcaggccacaatggaggctgtgggggtgatagtgacccatcaggtcagccacccaacccaccaggtcccctcataactgggcttgaaacttctggcctgggtgtcaacactgaaggtctagagaccaaccagtggtatggggaagggagtggagggggagttttgtaaatccaaatctctgtggcttcatgcttgtatatgctcacagcagggcacaaaatccaagagaaggtctgtgagccccatccaacacccacagtaattataatcttggcacatcaatggaattt

SEQ ID NO: 2070 - DNA, 2213 bp, Homo sapiens
gttcctgtggccacaaaagtgcttatggatcatacacagggctgcagcttttctgggaggatggccaggaactgctccagcaccagcagctccaggatctgcgcctttgtgtgcacctccggcctcagtcagagaaggtggagctctccttatggacactcttcgtggtggggaagggcgaacccagcgctgtcagggagaaactggggaaggctggcttcgcagctgcttctggtcctggtggccggccaggtgcggagcgcgcctcgacagtcctgaacattctccacttaacggctgagagccgctgggagcctaacgcctgcaaccgagtgagctcgagtccggctggggtcggaccgttggacctccccgttggccctttgttgtacttcttcgcgccctgggctcgcgcaagctttctctgccacgcgttccaacggccgctcaccggcatcgggctgaacacggtgcgcttcacctcggagttcccactccactccaaggatccaacagcgcacaagctgctcttcacgggcaactacctctgcaagcttcacccccggccccgccacgccccgcagggttccctgtctgatttttgccatggaacagagggcaaggacttaccttctgagcataacgtttctgtagaaggagtggcacaggacaggagtcccgaggcaactctgtgcccccagaagacctgcccctgtgacatatgtggcctacgtttgaaagacattttgcatttggctgaacaccagacaacacatcccaggcagaaaccatttgtgtgtgaggcatatgtgaaaggctctgagttcagtgcaaaccttccccggaaacaggtgcagcagaacgtacacaaccctatcagaacggaggagggccaggcttcccctgtaaagacctgcagagaccacacatcagatcagctttccacctgcagggagggtgggaaggactttgtggccacagcagggtttctgcagtgtgaggtcactcccagcgatggggagccgcacgaggccaccgaaggtgtggtggattttcacattgcactaaggcataacaagtgctgtgaatctggggatgccttcaataacaaatccactcttgttcagcaccagagaatccacagcagagaaaggccttatgaatgcagcaaatgtggaatcttcttcacttacgccgctgacctcactcaacaccagaaagttcacaatagaggaaaaccgtatgagtgctgtgaatgtggaaaattcttcagccagcactccagccttgttaaacatcgcagggttcacacgggtgaaagccctcacgtgtgtggtgactgtgggaaattcttcagccgaagctccaacctcattcagcataagagggttcacactggtgaaaagccatatgagtgcagcgactgtgggaagttcttcagccagcgttccaacctcattcatcataagagggttcatacgggcagaagtgcccatgagtgcagtgaatgtgggaaatctttcaactgcaactccagcctaattaaacattggagagttcacactggagaaagaccttacaagtgtaacgaatgtgggaaattcttcagccacattgccagcctcattcaacatcagatagttcacactggcgagcggcctcacgggtgtggtgagtgtgggaaagccttcatccgaagctctgacctcatgaaacatcagcgagttcacactggtgagcggccttatgaatgcaatgaatgtgggaagttatttagccagagctccagcctcaatagccatcggagacttcacactggtgaacggccttaccagtgcagtgaatgtgggaaattctttaaccaaagctccagcctcaataaccaccggagacttcacaccggcgagcggccttatgagtgcagcgaatgtgggaaaaccttcaggcagaggtccaatctgaggcagcacctgaaagttcacaaaccagacaggccttacgaatgcagcgaatgtgggaaagccttcaaccaaaggcctaccctcattcggcatcagaagattcacatcagagaaaggagcatggagaatgtgctccttccctgttcacagcacacaccagagataagctctgagaacagaccttatcagggcgctgtcaactacaagttgaaacttgttcatccaagtacccaccctggggaggttccctag

SEQ ID NO: 2071 - DNA, 6662 bp, Homo sapiens
acaggcctgccaccctgggaggagtcatcgcggattctggagaagggcgtgacagaggagatttcctttcgggaagtgtagtctggcagcggtgccccggtggtggcggcggcggtgctgctgttgctggtgatcgtgtggtggtgttagcggcgatagtgctttccactgggctttggcttggtagccgctgaaagagaacaacgctgccgctagcggcgggctggcggcgggctccgacgtctgcgccaagacctggctggctgagcccggcgcagcagcagcagccagggcagcgcggcccctactccctgtcaggtcgtagaggcgagcagggaccagctggtcgccggcccctcgggcaagatggggaaccgggagatggaggagctgatcccgctggtgaaccgtctgcaggacgcgttttcggcgctgggacagagctgcctgctggagctgccgcagatcgccgtggtgggcggccagagcgccggcaagagctcggtgctcgagaacttcgtgggcagggactttctccctcgagggtcgggcattgtaacaagacgacctcttgtgctgcagcttgttacttctaaagcagaatatgccgagtttctacattgcaaaggaaagaaatttacagattttgatgaagttcgccttgagattgaagcagaaacagatcgcgtgactggaatgaataaaggcatttcctccatacccattaatttacgagtctattccccacacgtgttaaatctaacccttattgatctacctggaataactaaagtgcctgtgggagatcagccaccagatatcgagtatcagatcagaatgattatgcagttcatcacgagggagaactgtctgattttagctgttactccagccaacactgatcttgcaaactcagatgcgctgaagctagctaaagaagttgatcctcaaggtctgagaaccattggagttatcaccaaactggaccttatggatgaaggaacggatgccagggatgttctagagaacaaactgttgcctcttcgcaggggttacgtgggggtggtaaacagaagccagaaggacatagatgggaagaaggacataaaggcagccatgctggcagagaggaagtttttcctttcccacccggcttacagacatatcgctgaccgaatgggaaccccacacctgcagaaggtccttaatcagcaacttaccaaccacattcgggataccctaccaaacttcaggaacaaactacagggacagttgctctccatagaacatgaagtagaagcctacaaaaatttcaaaccagaagacccaacaaggaagaccaaagcattgctgcagatggttcagcaatttgctgtggactttgagaagagaattgaagggtcaggggatcaagtagataccctggaactctcaggtggtgctaaaatcaatcgtatttttcatgaacgctttccttttgagatagtaaagatggagttcaatgagaaagaattgcgaagagaaataagctatgcaatcaaaaacatacatggtatcaggacagggttgtttactccagacatggcatttgaagcgatagtcaagaaacagattgtaaagttgaaagggccttccttgaagagtgtggatctggtaatacaagaattaatcaacactgtgaagaagtgtaccaaaaaactggcaaacttccccagactctgcgaggaaacggaaaggattgttgctaaccacattcgtgagcgagaagggaagacaaaggaccaggtattgctattgattgacattcaagtctcttacatcaacaccaaccatgaagacttcattggcttcgcaaatgctcagcagaggagcagtcaggttcacaagaaaaccacagttggaaatcaggtgattcgcaaggggtggctcaccatcagcaacattggcatcatgaaaggcggctcgaagggatactggttcgtccttactgcggaaagcttgtcctggtataaagatgatgaggaaaaagaaaagaagtacatgcttcccttggacaacctgaaagttcgggatgtggaaaagagctttatgtctagcaagcacatctttgcactctttaatacagagcaaaggaatgtatacaaagactatcgcttccttgagctggcatgtgattcccaggaggatgtcgacagctggaaggcatctctactaagagctggggtctatcctgacaaatctgtagggaacaacaaagctgaaaatgatgagaatggacaagcagaaaacttttccatggacccacaattggagaggcaagtggagaccattcgcaacctcgtagactcctacatgtccattatcaacaaatgtatccgagatctaattccaaaaacaataatgcaccttatgatcaataacgttaaagatttcataaattccgagctcctagcacagttgtattcttcagaggaccaaaataccctgatggaggaatctgctgagcaggctcagcgccgggatgagatgcttcgaatgtatcaagcactgaaagaagcccttgggataattggggacatcggcacggccaccgtgtccactccggcaccccctccagtggatgactcctggatacagcactctcgcaggtcacctcctccaagccccacaacccaaaggaggccaacactaagtgctcccctcgcaaggcccacatccggccgaggaccagctcctgccattccctctcctggcccccactctggggctcctccagtcccattccgtccaggcccattacctcctttccccagcagcagtgactccttcggagcccctccacaagttccatctaggcctacgagggccccgcccagtgtcccaagccggagaccacccccatcaccaactcgtcccactataatccgcccactagaatcctccctgttagactaaacgaagtgtctggcatggcaattaatcactaatgaattatgcgaaagcaacatatttgataaccgttgcagtaaatcatgagtagtcgcatgtgtggacatcagtaggcaagtaaccagttttactaatgcattcatcgctcatcttcattgctcatggtatgtcaaacctttggggtttgactcagaaactgctaaccttttagaggctttatatgttgtactgaccaaggtaggtttgtatagcagccctatactttggggatcatttgcctaccatgacatatatttgaaattgctttggacaagttttctaggctatctaccaggtagctcattaaacgtaattcttcagatatgagatagtgggcttagacctaagccatacatatttcttttcccacattctgtttaggatgacagtaattctgttgtctaccattaatgctactacctactccataattgcctatttagctcctcttttcttcctttttatttcataagactgctaggaagtgattttttaaaattaggactccttaagaataaacttttccagaagcacgaggtagtttgcaaaggaaaagtctgcactgtttgctctaaagagcttctcctcattccaatgtgttttgcttcatgctagaagcatatgcaacagtgaataaaagcttctttttttgttaatcagtcaataaatttggctaattagtttcagagttcaaggaagaagcaaaatatcacatctctagaagtgttggaaaaaatataatttctttctttacttatattcacctcatggtaggttatattgaaggctgacatggagaatgtttacttttctatttggcatagctaactacactttgatactaactccagttttactattattattttggttggaaaaaaaattcactttttacgtgctaatttgtaatcttgttttgtaagaatttatcctacccttgaaacaggctcagtgtaactgtatatccattctaggctttcttaataaatcttgaggctatgggataatcacatttaaagaatggttcctgaaatgaagtcagtagaaatggcatgggataagagcagagctcacacttttacagttgcagtatttcaaagtccctatccaggtcactccagaaaagggtattgaaacgttgaaatctaaagcaaatttgcaatttcttaagatttctaaaatttaccagaacagtttagcctgggggttaatagttaagtcttgaggctaagttttggactaccaaggaccagatgattcacatgtaggaaacagccagaagccaactggaattttgtgtgctaactgttcccagacagcagagcaagtattcactgagtaggggtgtcccatgacactatttcatattctacagaagtaaatcaggtttcaccaactgaaatgtctccctttgaaagtagcaaacatgatttgtatgttaacttaactttaatttcctgtgtagtttacacccagagcagatactcataaagtataaagtaaaaacttttaaccattattaaacagagaacttgccatgttgagtgccattgtattgaacttattctaaaggcttatgctaacccatttataattggtaaaaatcagaaaatacaagatttacataaaggtcatttcaacttttaaggttaccagtgattgtataaaaacatcacaatcctaaatcctctcgtatctcaccccaaaccccaaactgggggaaaaaaagttaactctttgtgaatggaaccaatgtgcaagatacatactgcatttttaaaatagtgtctcagctaaatggaaaactgttaagcaaacatccatagtaaaacaaataatcttcagtgagatctttttataaaacttcttgtttttaggattccctttgcttcttcctttgaattctctaaaataggcagctaacggattatatacttcagggtttggctttgtgctaaatgtggttttgtgttttgctgtatttcaaaattttccttctgttaaaggaaaatattgtgaataaccactggtgtgttcttagatcagcacaaaccatgtcaaaaaaaattggagatttttttccaattttccttccactgatcttaggcagtaataaacaatggcatttgtcatctttggcacttgcttttagattatagtcccacagttgcactgccccaattgtctacctttgtgggtacatttttgttctttactcctaagttatttctcatagaacccagcctactctagaatttcagcagtgacattggagaatatttttaatttgctgcagtactatgtcatattattagtatgaatctcatttcccaaagggtttgtattctgctaaaaggagatgccaatgttgaatgaagtctgaaactctagtatgtgcatagtttgacgtgcagcatgcacaccaggccttaagatgggaatgtagcttaatgattttctgtttcccataccatttctaatcttttgtgtaattttctcttaactgattgctctgatattgtaaacacaatagatgtagctctatcatgtctagcataatttaaaaaatcagtgtttttaggatttgggaaaataaactgtaaatgtttatttgataggtaaatatagttttattgtcacatgctaaatattgcatgcatattgactaattggaataaccatttactcaattatggacagcttattgaaatagtattgatttagaaaaagtatattgcatttctaaaaaacatctaccaaggttactcgtctgaatattgcttttagccgtgttttataacatagacgagcagtagggtctgtttattagcaaatttcctatttgttccaatacaaactcactttattctaaagtatattaatgaaaccagttcctgtgatgtaactgtaagccttctcgacttagacttaaaaagtggtcacatagattaattttgtgactttttagtatagactgtagccataattctcaaatatgaaatgggacctaataccagtatgtgataaatgttgatgttttctgtgtacaaacacattttctatgcatgtgtctctgtgtatatggcatatacctagtaagtatgtttctgtaagtatgtgtattttatgtccatttgagtaggtaggtaggttttaaaaatactagttaaaatgccacaagcatgagtgtgattgtatgtgcactgtgtgtatatatataaatatatgtatatgtatggttgtaaatatctatgtatacatgtacttagtatgtgtggtatcaggatattttttaaactgtgataatacaacagatagctttgaatgatctgccataacatgtggtaacaatagttcatttctcataacatatatgaggtatacaaaattttctaactccagattgtagtcattttgagaggtacaaagctcataattaccatgacaacatggtaatgtccatagacatttgtatctgaatccacaagaagatctgaatctaagaaggaattacctttgacaatatttttcggtaagaagtaaaacctctggagacctatctttaagatctctaattggaattataaattatttttggattgctgagctgaatcttaaaaagccaagttgatatacataggcatttttcctctatgggagaagtaaaaaaaaaa

SEQ ID NO: 2072 - DNA, 1954 bp, Homo sapiens
  misc_feature (1)...(1954): n = a,t,c or g
gcacctcacagatagttatttgttgaaggatatacaaggcctgggtttactctaaggtttctgcacagagaccataacttgtgaggcttctctgaagctcattgcattctatattcattgcctattttctgatccttctggccactgccggtgtgattccccagcaggccctctccatcaatatccctgtcccagaaataggaattgacggtgcacaaataacttcctggaatgcaggaccattcctaagttatcactaacaccctaccaagagactgtatctagagacattaacctgaaatctaggactcagcagcttctctccacagggctccttcagtggtagatgtcccctgtatggtgtggccaccctgaatggctcctccctggccttatcccgtccctcagcaccatccctgtgctactttgtagctggggcctctggcctcttggccctctactgcctcctgcttttgctcttctggatctacagcagctgcatcgaggactcccacagagggtgctataggggctgcgcattgcactggccaatctcaggctatagccgtcttcctggtcttggtgtctgcctgtatccttcgatttggcaccaggtctctctgcaactccatcatctccttgaacactacaattagctgttctgaagcccagaaaattccatggacaccccctggaactgctctgcagttttactccaacctacacaatgctgaaacctcttcttgggtgaatttggtattgtggtgtgtggtcttggtgctccaggtcgtgcagtggaagtctgaagccaccccataccggcctctggagaggggtgaccctgagtggagctctgagacagatgctctcgttgggtcacgcctttcccattcctgaagaataagcggagtgcttcctgcagccgaagactccatgcccaagtgcctgtaatcccccccctcaaggccctgtttatgttgggagtcttagttttcctttcgttggggggtgggggggaaacataatgacaggcccccctccacctcttcctgcagctgtttttgtaccaaaatattatattactgtcttcatcttagtagtgagtttttgatgttaaagtacaactagataggaggaaggagtgaaggctaagcagacatggactgaaacttagaggtactgttaggcagctgccctagggatgactgctcctttatttgttgttaatgaatcttgacctccttgtgtgaccctggttgttactccattctaagattggcgtttttttttgttttttttttttgtaaatagagacaaggtctcgctatgttgcccagcctgggctcgagcagtgctcctgcctcaccctcccaaagtgctgggattacaacagggtgtgaaccaacacacctggctccccaaggttcagtttttatcctcctcttggagaggtgagtgacttgaggtcatttcttcacaagctccggtaggcacccacagtattgtcaaagagttttgtgttagggaagtgtccagttttgtccaagaggaaatagaagcgtcggcctttgactttcagaggtagcatggcagggacttcaccccggtgggccatgcaagatacctgcttcaaaggaactgtgaaatgggcccccaagccaaagggggcatgagtggtgagggtcacctgctgccctccagctcgaagcaccactgagcgcaccaatgcctacgacgaggaggactgcgtggagatggtggcctcgggcggctggaacgacgtggcctgccacaccaccatgtacttcatgtgtgagtttgacaaaaagaacatgtaaacctcaggctggggctgcccattgggggccccacatgtccctgcagggtgnnttccngcnctttgcggtagnctntcgattaatggtctccaattnggttcnnncgggggggcgcg

SEQ ID NO: 2073 - DNA, 1954 bp, Homo sapiens; identical to SEQ ID NO: 2072
  misc_feature (1)...(1954): n = a,t,c or g

SEQ ID NO: 2074 - DNA, 4244 bp, Homo sapiens
ttttttttttttgatttttcttggcttttattagcatgtgttaaaatcatattatccaaacactaccagaagaacatgtattgttctgaataaagtgcttaaagaaaaaaaaatgcaacttattaaattggacattcttttctagttcataaattttggattacaatcagggcacaaaaggagaaacagaatgcagtattagagcgagaagcttagttaagaacttgggtgtagacacaataccatgtccactcttcccacttccttgctgactgaacactgcacctgcataaagcagcaaacagctttgtttcaataaatacatttcccttcattcaaatcagaaaagttaattatagtaaagcatttttaatttgaccatctgtttatacccacaggcaaaatttatcccacagagtttaagtgtgaaagtgttatttcattgggccttcagctttctaatgctatttgggttcaagattgtctcagcaattcattattggtttctttatatttacctagtactatttaataccaacactatagtgttttgtgttaaaaatgccaaccaaggatattttcacagttctagaaacgagtgggcctgaggctttcttcccaataaactaagttttcttttaactgggtttctcacattagcactctgatatctgcacaaaaccaagtcctgttgtgacagattttaaaatcggtgatgttctgaaaaaatagtaacttggaagtctctgtgtttgaatcttgggtggtcatgttgagagcaggaaaaattgcattaaatacatttttaaaacattcatttgcaaccaaacatttaaatcttccaaggaacgtgcagggtggtgatagggcagctgcagtgtgagcaaccccatcaggagtggctggtgggtgggcttggagctccatcagtggcacacactcaccgcaagcttctggaccgcagaccttgcatcctggttgcgaagcctttgaccttcttttagcaaagagaaaaggtaggctgcttctaccttcaaacagtcaagagcaacttctgttgagttcaccttgctgctgacccagaagttggagcaggggccaagctaaggggtgcagaaaggctaacagtacttgctgtaaaaagaagtcatcttcagtcatcctggggagattcccttgcccctctctcaacttgagtgcttttagcttcatgcaggaaagattttagttgcatcttttattaaatttcaatctcgttttacaaaagcataccaactagcagtcctgagcaactagtatgaaatttgctgaatacagctaacagaaagctttctaaactatcctgttctttgtttctttctacaggggtgtctgtagaatattctttagtttcacagtgatatatgcctgtttcaggaagcacaaggtattctgtttctgggaagtgatgacctacttttagtttgagcacaagtttccatgactggttctaaatctggccagatattgttaataccaatgacaggagttagggcaattgggaggctcttggtccccagttcctgtcaagggtaagcccatctgggtcatggctgggctttcactatcagtagttatatttccctttgatgcttcaaaaagcctatggtgaatctgttgcctcactttacttctccatttgacttgaaagcctgagaacttactgaattaggatgaaaaaaggttttgtacctgctaatattgacggcagtaagatgctagcttactattttgcccagcaccatgtatagtgcctgttaatcaggccaactatagccaactttttctttttttttctttttttttatataaagaaaatctatgtaagttgaggttcagaaatgcatatattttttacttacaaatattcatctgaccaaaattcaacataacctttatggaacacttaacaattgtttggttgttaaaaggaacatttcattcaaactgtatataattcaggagaggttttttatacagcaagcaatgcttaaaccctggggaaatctgtagaaaagagattttcacacaaaataaggaaaaggaaaaatctgaggtatccctcacacacacacatccattcattctgggcccatggtacgtggcacatacacacggcatggcctggtgtggttcacacaggacatattcattctcactccacaaagtgggctggcagcatagggcaaaaattggtagggtccaaaagggaaaatgaattgattgttctaataaagagtccgagtagctcagaaaaaaaaaaccaaaacaaaacacaagaagtcttctgaggaaattactacctcaaaaaaatgttctcaagatgaatttgaagaatctaagcctactaaactgcttttgcaaaacagctccctgcagtccaaggtgacttgtgcaaatagaaaggaatccaatgaggctggttcctgtacttccttaaacaaggaggtgggatgctcgcaggtgcccaggggcactcccatcatgccaggtactgctgcagtgccatctttgccttgtcacaaaggtttgaatctggtgactgactcagtttgtgtagaatatctacgatgcccatgtctcgtaatttatcctggcgttcttgtgaaccttcctcttcattccatatgaggtttgatatacaaaacatggctgcaagctgcagtttaacatgtgaatggcccatgtaatacttgattttctgtaggatatcatcattggtcataataagatcttttgctgttgtcccatccgctatgttggctaagatgcacagtgtctgctctttgacctcaatgttatgttccccttctagaataagagtgacggcttgcataatttgctttccatgagtactcattattttatctatatgaggacgagtggagaggagatttctaagaagtcccaatgtcttcatcagcacattcaaatctgaatctgataataaccggaatagctgttcagtactcaagcttcgtaaaatatctgcttttattttttgttcagcctgaaatgccatattcattaaagcccaaattccattcactcgtaaagcaggattttcactctgagttaatccacaaagtagctctacggctcctgattccaaaattggctctttgcttggagaaaattcaagaagaagattacacagcatggaagatgctaccactaggatttcatctggtgcattttgtaaaaccttcattaaaggtttccaaacagcatgatcctggaaactggttcgaagctgctgcacagatctggataaactgtgcaaacatctacaaagaataatcaaaattagcttcacaagaaatcaaaacttttacttttcaaacaaactggctggcattttacaatgactaatgtacacttcaagcatatctacattgttaagtgaactacatcagaccactttatggggtttggaggccaggctctctgttagacaatgttatatactctatgaattcacctgagcagatttttgaggaacatttgtagtctgtgtttactcagtgaaggaccagaaaggaaacaggttaaatatatggcaaaaggtttttattcagaccatttaaagctcatacctgacggcagctaaccgcaccttgacactagactcagacaagccagtcacaattcggtccatcatattttcagtctcaatgatctggagaaaaaggttaatgctgcataaataacaacatgaaggtgacaaacttcactgcttgtaaatgcaagtatgttaacatccattaaaagtttaacgttgtttttggcaagagtttttacctctcaaacaatcatcttgcgctgggggcgggcagctcatcagaaaggtaggtctagcccactaaggacctgccaggctgaatgacaggcgtaaggggcaggttatgttgtttatttttaaagacatttaacacaaaaattaaacggtataagtactgcagaggggttatgtaaatactcttgccactcataacctacacccgtcgggggggcccccagcccccaatcgccttatacgaacgcggacgcgttccctgcccgcctgttctacagggcgcagggacaccacacagtggcgcccggaggcgcgcggcgtcctagcgcgcccgcctcccacggtcgaacgcattggcgccgggcctccccgtcgttcgtcggcgtggcacgctgcctggcgcgggccc

SEQ ID NO: 2075 - DNA, 804 bp, Homo sapiens
ttttttacagtcaaagttttttttttatttcagaagaatgaggcatcgcttaccaagcagtggttataggaatgattaatatctagtcatcttaagttgcaaaaacacattaagctcctcagaagatgcaaatttttaaaaaatgcaataaagtaataattatattacatacttgtgacttcttgtaagaaatccaaacatggtcgactacttccagaaatacttattgaaacagccaatggggtctgtccttcatagttccgtgtgttcgtgtctgctccgtaattatataacatccgtgcacacagcacatcatccctaagggcagataagtgtaaaggagtctgtccgtcttctaagcgacccaagtttgtgtctgcccctctctgaaggaacattcggcaataagagtgattgcttttgatcacggcgtatcgcaacaggaaaccattctgaatgtcgatgttggcattgtggtccaggaggattttcacacagcttgacctctctcggataatggcgagctgaagcggtgtggtacctttatcactgagtgggtcaacctcagccttgaactccaggaggagccggacaaatgagtccctgccgtagtgggcagccacatggaggtggaaagaaggaaagtgcatttgagaactaagagaaggccaagatgactagaatacagagatcaggttacaaaatcaagttaaagacagttggcaggagccagactatgtagccttgaaggccatgttaagaatgctatagcttttctcttaaaagcagtaaactccaaatttt

SEQ ID NO: 2076 - DNA, 430 bp, Homo sapiens
aacccgcgtgcaacctgtcccgactctagccgcctcttcagctcgacatggatcccaactgctactgcgccgacggtgactcctgcacctgcgccggctcctgcaaatgcaaagagtgcaaatgcacctcctgcaaaaaaagctgctgctcctgctgccctgcgggctgtgccaagtgtgcccagggctgcatctgcaaaggggcgacggacaagtgcagctgctgcgcctgatgctgggacagacccgctcccagatgtaaagaacgcgacttccacaaacctggattttttatgtacaaccctgaccgtgaccgtttgctatattcctttttctatgaaataatgagaatgataataaaacagctttgacttgcataaacaccgtgaaatccctgaaagtccaatactaaaccgtccttattactcga

SEQ ID NO: 2077 - DNA, 1574 bp, Homo sapiens
aaatcgctcgaggggagcggcgcggcggcgcgggagtattcctgagctcagtgccacctgattcactgcacttggaaccagatgatgttgggctctttccagaagtcaaatccttcctgggaggatgaagatctgccagctctgaggattctggctgggaagaaaaagagcctcaagctttgaaggccattcccatggtagacagagctgatgtgaaaagtggccatcctgttgccccaggcacatgaccttctgaagtgaccaggctgaaagggaagcaatactcgtgtgatctctcaccccatcactcagggtggcgcaatcacgactcattggctcactgcagcctagacctcccagctggagcaattctcctgcctcagccttctgagtagctgggactacagttggttctaaagagtggtgagtcagaagagacgtcaggcagcaagcgacttgggccatggcctctgacctagacttctcacctccggaggtgcccgagcccactttcctggagaacctgctacggtacggactcttcctgggagccatcttccagctcatctgtgtgctggccatcatcgtacccattcccaagtcccacgaggcggaggctgaaccgtctgagcccagaagtgctgaggtgacgaggaagcccaaggctgctgttccttctgtgaacaagaggcccaagaaagagactaagaagaagcggtagaagaggaggcctgaggagctgggcgggcagggagagggtcttggggacagccctcctgggaatctacattgtgttcccccgcattccaggctcagggtctgaggaggctgtgacgccctatgaccgcagagatctagacagtcgtaacagtccccaggctccagctgggcaatccaccacttcctcttccttctgcttctgtgacggtttagagtcaagggggctgaaacacactgtgagcatagactgtattaggtttgttcagaagccgggtcagctcacagaatcacattttcttgcttagtcatgtgtccctccttgagttgccccctccttgtgggtttacactacattttggagtcattgtctaatgctgacaagcacaccctctcccattatttgtgcactacagatctcctcctgatcagtcacctttgttgctgctgtgtagacagagccaggcctcacctgtttgtttaggccaagatgccatggacatgcagcgttagtgatcccactagctgtgacagccaggcccagaaaatgcctggcgtgagagccagcagacagccaggccagggtaggcagtgcctgcttctgctccatcaggtgcaggggatttggctgaaggcgtgcatatttcctgggcacaaacttcctgagcctctgaaatgggaggctcgtcaatttcagaccaacctcttttcaacccatcatagcacgttcaaggtgtgccttttacttctacctgtacatcccccatcccttcaattctttcattccctgaccagtgagagggttcctgggggaagtatggtgaataaactgacatgcatgcttcagaaaaaaaaaa

SEQ ID NO: 2078 - DNA, 1587 bp, Homo sapiens
attaatttgggtacccccagggttttcccctccccgcggttttaaaacccggcccggggattttatttttggggccccaaaaaaaaaatttttccttgccagccccgggacgtaaaatttggttctttaaaaaggcccccccttttttttttttttgaaaaaataaaatttactgtttatttctttgttacacaaaggtggtccaagacatcttagtccatctcctatgtccttttggccataattacacacacaataatggcaagctagattaggagtctagctcagggtcaagtttttccactttaatgactatctctggagctaaagcggcagcaccagcttgttggttctctgcctctgactcagacaacacttcttcctttatttttacaggcttattactggcctcctcctcttcatctgaagactcatcgagctcccattcatcatctatgtccatttcaaatactctcacatgacgaagatttgagcttaacacacaggacacttttcgaaaaccattcccagcaacatactgtgctttcatactttccagtaatctccagtgcttctcgaaatgcatggtacgggtgggaatagcactacactgttcatctagccttgtagaataagtcccagtgaactgatattctgcagaatcttcactgttatatactaaagacaaaggcagctggaccaagagtctatctcttccttcacgtcctacagtgtctttaagaactactgttacagtttcatcatcataaaactgtgcatctaaacaactgtagatgcttcttctgactttttctgttgtggcatatgtaaagctcccaaatttaatagcaattagtccattactcacagattgagaaatatcagtatgtctccttaagatgcacattttataaagtgaatcttctagaatagtaaaaagaagataatgtagatttgaagttttattattccacagaaaaggaaatttgaacaatctacgtgtagaatcctcacttctggtatctctatacaatggaatacagattgcttgattcatcgattttccaattacatctgctggcttttgcaaacactgatcaataatattctccatccgccttttcacaaaatgcaatgattttcgaggataataaggaaacagcaaaggactttctttaaggtggctgctattttgaagaaagtcataccactggtttccttctgtgttagggggtgacacaagatcatcatcttcatctttcaagtactgaccaactctttcaacgttaaagtattttccttttcgattataaaggtctggagcctcattgaaatgttcagtaagaaattcagcaacaaatgtgatatctttctgagtcatcttattcagctcgggaagcacatggtcttctgtcattctcaacattgccacataaagccaccgaaaaaatgctttgaagtttttcatactactatctataacttgaagaagttcatttgccttgagtataaaagaacccacagcagttatagcttcttcgattcctgcagcatctagtccaagaggttcatatttttgcttccatg

SEQ ID NO: 2079 - DNA, 1631 bp, Homo sapiens
  misc_feature (1)...(1631): n = a,t,c or g
ggtggaattctctctctgccgggcgcagccggctggtggtggccactgagacaagatgcctagcatcttcgcctatcagagctccgaggtggactggtgtgagagcaacttccagtactcggagctggtggccgagttctacaacacgttctccaatatccccttcttcatcttcgggccactgatgatgctcctgatgcacccgtatgcccagaagcgctcccgctacatttacgttgtctgggtcctcttcatgatcataggcctgttctccatgtatttccacatgacgctcagcttcctgggccagctgctggacgagatcgccatcctgtggctcctgggcagtggctatagcatatggatgccccgctgctatttcccctccttccttggggggaacaggtcccagttcatccgcctggtcttcatcaccactgtggtcagcacccttctgtccttcctgcggcccacggtcaacgcctacgccctcaacagcattgccctgcacattctctacatcgtgtgccaggagtacaggaagaccagcaataaggagcttcggcacctgattgaggtctccgtggttttatgggctgttgctctgaccagctggatcagtgaccgtctgctttgcagcttctggcagaggattcatttcttctatctgcacagcatctggcatgtgctcatcagcatcaccttcccttatggcatggtcaccatggccttggtggatgccaactatgagatgccaggtgaaaccctcaaagtccgctactggcctcgggacagttggcccgtggggctgccctacgtggaaatccggggtgatgacaaggactgctgagacctgccagcctcttgactatccaaccacccaacaacttgcctgtgtcttgagaagatagccccggtcaggacttgcacctgcgggacactcgtggttccttcctctgtttccccttccgtgtcctccttgtcctgcgctgccctgccttgaggcagatgatggactttgtgacatctctgagcagcagcctggtgactgtggggggctgtctcgtgcatctcccctccatgaccccccccatcctctttcatttcctcctctgtgtccacagcctcccagtgaccattgtcacatgagctggtgggactgtgtcaccaggtactggggtgactgaaggatgtggcatctaaatattagcttctannnnnnnnnnnnnnnnnnnnnnnnnnnnnnnnnnnnnnnnnnnnnnnnnnnnnnnnnnnnnnnnnnnnnnnnnnnnnnnnnnnnnnnnnnnnnnnnnnnnnnnnnnnnnnnnnnnnnnnnnnnnnnnnnnnnnnnnnnnnnnnnnnnnnnnnnnnnnnnnnnnnnnnnnnnnnnnnnnnnnnnnnnnnnnnnnnnnnnnnnnnnnnnnnnnnnnnnnnnnnnnnnnnnnnnnnnnnnnnnnnnnnnnnnnnnnnnnnnnnnnnnnnnnnnnnnnnnnnnnnnnnnnnnnnctaataatgaatattacctctaaagccaggnggtctgagaaggccataacttaccgggtttaggggggggattcttattctgactagcccgcccttggggggtaaattaaggattagcggacacc

SEQ ID NO: 2080 - DNA, 2012 bp, Homo sapiens
ttttttttttttaagaacgtcagctcctttattattattattattattattattaattatttactgttatttacccctaaacaacagcataactcaaataataatgacacacacgtcccgcccatatacacaataccactagcctatctgtcaggctatctggcctttgcttggttcctgatggagctgtctggagacagctccctctgtaaaaatcccgacttaaacacaggggacagaagaaaggggggacctaggtcagatcataaactgacaggctcccagcgtccttagggagtgctaatgtggaaactttgagaacgtgctggacacatctgggcagagggcagaaggcactgtttgtttttatgtggttgatggataaattccatatggggatataagacctgtatatcaccccattttaggcccaggcatgtggaagcacagtggggttagctactgggtttcattaacccaaaccatgcggcatggtttgggagccatgggaatcgggagcccagagtaggaacctgggtgatgggggaggtccccagagaaaagtaacccttgcattcactgcaagtaagatacaacgtgaaatgttaagtccccttttatgtgttttgcacattctatagttgcaaaacacatagaatgtgcaacattttcatcaagatagaaaaggtaaagaaagcaaaactagtattttggcctaacacaaccaagcatgatttgccaattgcgctatcctgtggagaaatctaccactacactatccagggaatctgtggtcagtcctcacccccgcaccctctaacattttacttgcactaaatctgagttcagctaaagtaatgtatcctggaatcagagaagccctagggttggggacaaaacaaggatgggccagtactggcatctcaggtacaggtgacttcctggctgtcctggggaagctcgttgttgaaactgctctctccaaatgttgagtaaggagggacctggggagcttcgatgatcagcagaccctctggggaaagtgaggcaaatactgtcacaggatccacctctgcaggaagctggattttctttgtgaagttcttagaaacaatgccaccttcttgctgtttctcttcatgtttgccagacacctccacgtatccatctttggtcttcaccatcaactcctctggcttgaagctgtgcacattcacacacactttccagggctccccagggaagggtgggggggtcctgccctcggcaggcaccccaaacctggcggtggcagtggggccccggggcaccatgcccgaccttagggtgcctggccaggcggaggagagacgaggcagagcccagtcgggccaagaggctgtcaagtcgtctgggaaggggtccatgccaaagccatcatccagcaggcgagaggagaggggagagtcccgaaaggggtctcggcgcaggcggcttgggtagtggcaggagaagggcatctgaccgtcagccatggtggctgctcagctcagagagaaacagaggctcagagagacagaaccacctgcccaaggtcacacaacaaggtggtgtggctgggctagcttattcttcagcttccgaaaatgctgcttttctgcagggagaagcagaaccaaccactgccagggacggttgtgtcccctcgactggggtcccagcccccaaaggtaacccccggggcagatccagcagaatcccagagggtccccgtccgcactgcctcacgacagaccggcaagccaccgtcctcccaggcttcccaggctgcccaggctggcagccagaaccgctgaggtctagagcggagccaggagcttaataaacccagggcacgcgcgcctagaaacttcttctggctccttctgggctgcaagccttctatttatttgctgctggaggctggaggcgggttttgcaagcgtctcctgtcacaggaatattcggaggtgatgaaccagccccggacgaaa

SEQ ID NO: 2081 - DNA, 4353 bp, Homo sapiens
ttgcaggatgtgagtttgaatctatggaatgtctacagcaagatggatcctatgtctctggagagtttgctttcagatgatttggtggcttttgaacatcagtggactagcttcttcgctaattttgacacagaaattcctttcctgctagaactttcagaatctcaggcgggtgagtgtggtggtgccaggaattctactgggcaccagttaatagacgtaggaataattatccacatccctaaccggcagccatttgttctctttgggtaatcactccacacgagaaaacctgaatgctggcaactttaacttcccttctgaaggacatctggtacgaagcactggtcccggcgggagctttgccaagcacatggtagcccagtgtgtctcaccaaagggacctcttgcttgttcgagaacatacttttttggagctactcatgttccttacttgggtggtgacagcaagctgcccaagaaaactgaacaaattaggctattgtcccagatatatgctgctgttattgaggctgttttggctggcattgcatgttatgctaaaacttccagtctaacaaaggccaaggaggtagcagagcaaactctgggatctgggttagattcctttgagttgattccgtttaaggcagccctgcgctccaagatgacttttcatatacatgctgtgaataatcagggaagaattgtaccgctggacagtgaagatagcttatcctttgtgaagacggcttgtatggccgtctatgacattcctgacttactgggaggcaatggttgtttaggatctgtggttttctctgaatcatttttgacttctcagatcttagttaaagaaaaggatggcactgttaccacagaaaccagctccgtagtcctgactgctgctgtacccagattctgctcctggctggtggaagataatgaagtaaaattgtctgagaaaacccaccaagcagtgaggggggatgagtctttcctgggcacttatctaacaggaggagaaggagcatatctttattccagcaatctacagtcctggcctgaggaagggaatgttcatttcttctctagtggccttctgttttctcactgtcgtcatggaagtatcatcatttccaaggatcacatgaattccatttccttctatgatggggattccaccagtactgttgctgctcttctcatagacttcaaaagctcattgcttcctcacctcccagttcatttccatggatcaagcaattttctgatgattgcccttttccccaaatcgaagatataccaagcattttactcagaggtcttctccctctggaaacagcaggataactcagggatctctttaaaagtgatccaggaagatggattatctgtggaacaaaagagattgcactccagtgcacagaagctcttcagtgccctgagccagcctgctggggagaaacggagttccctaaagttactctcagccaaactcccagagctggactggtttctccagcatttcgccatcagcagcattagccaggagcctgtgatgcggacccatcttcctgtgctgctgcagcaagctgaaatcaacactactcacagaatagaaagtgacaaggtaattatcagcattgtaaccggcctcccaggctgtcacgctagcgagctctgtgcttttctggtcactctgcataaggaatgtggcagatggatggtgtatcgccaaatcatggacagctctgaatgttttcatgctgcacacttccagagatacctttccagtgccctagaggcccagcagaaccgctctgcgcgccagtcagcctacatccgcaagaagaccagactgctggtggtgttacaaggctacacagatgttattgatgttgtccaggccctgcagacccacccagactcaaatgtcaaggcctccttcaccattggtgccatcacagcatgtgtggagcccatgagctgctacatggagcacagatttctctttcctaaatgtcttgaccagtgttcacaaggcctggtgagtaacgtggtattcaccagtcacaccacggagcagcggcaccctctccttgttcagctgcagagcctcatcagggctgccaatcctgctgcagccttcattcttgcagaaaatgggattgtcaccaggaatgaagacattgagctgattctctcagaaaacagtttttcaagtcctgagatgctacgatctcgatatttaatgtatcctggctggtatgaaggtaaattgaatgctggatcagtctatcccctaatggttcagatctgcgtatggtttggccgtcccttggagaagactcgctttgtggccaaatgtaaagcaattcagtcctccatcaagccaagtcccttctccggaaacatctaccacatcctgggcaaagtgaagttttcagactctgagaggaccatggaggtctgctacaacacactggccaactccttgagcatcatgccagttttggaaggacccacaccaccaccagactccaaaagcgtatctcaagacagcagcgggcagcaggagtgctaccttgtgttcatcggctgctccctgaaggaagacagcatcaaggactggctgcggcagtcagctaagcagaagcctcagaggaaagccctgaagaccagggggatgctgacgcaacaggagatcaggagcatccacgtaaaacgccacttggaacccctacctgcaggctacttttataatggcacccaatttgttaacttctttggtgacaaaactgattttcacccactcatggaccagttcatgaatgactacgtggaagaagccaaccgggaaattgagaagtataaccaggagctggaacagcaggagtatcatgacctctttgagctgaagccctagaggaaggctgggcccgtacgtcctgcagaatgtccaccttggagatggacgaacgggtgtcttaacctcagctctcctggaggcctctcccttaaggggctgtctttgttctccttggcctgtgtgggctggcttgagtgcatgttgtctttattccctgtatagcgctgaagagcatcacctgcaccattgattttgggggtcgggggaatactcaaggatgagcagatggggcctgcccgtctacgtgtgcaactggcagtccaggagctctgggtttctgataacaggatctcctttgggctcttgaggttggggagaagcattaggattacacagaggagctactgggacttagaaggaaccctggctgcctgaactgtggccgtgtctgggaggcgaggccacgacaggcctcaagcctcagatgctgctccacgagagccatcttccccagtggagtgcctgcctcccctgctaggcccgtttccctgaaggagctggccgtactggccgtgggcccagtcctgggaggagcagcacagccttgcccaggcccagtccacagagccagcagcttgggttgagatgaatgatgtgttcacaaatgaggggatttcccttctggactaaactgaaggagaggcttgttgctttccagaggtgtgtggctcttaagttgacatcagcttttccccttgtgggtggttctttagctctcctgtcacaccattcgggtgtcctaatgtagggacaagagcaagcctgctgctcaggccccctggcgaggcttcacctcactgtggaagggggcgtcctgcagctggttagtcttaggcctggtggctgatcacttgtggggtcagtctccagcacccagcgctcccacaagccttgccaaggaaggcctgcttttcagccacaaacttcaggaaactcatccccccgctccccaaagtgttgttgctggccctgggcttgtgtggctcctgaggattgggaatttcaaataattgcaatacctgagttagaattccttctaatggcatcgttttaagctggaccataaagcagaggggaattacaagtgtgtcccatgcctgaccttcataattggtgtgggggacaggggagtcacagccactgatatttaggtgatgtctcttaggacttcagtgcctcagctgcctgaactgtaaatgttttctgaatttcacatatttttttttgcatgccttaggaagaagcacataggtaaaaccagcagtttccagtaatatagggggtttttgagcaaggcccctggagcagcggagagacaagatggagcacatgtagtctgtgtgcctggtcacacagaggcctgcatgcaagtagcaaagcagctctcaagggcttgtcagtaaaatatattaaaaaaaaaa

SEQ ID NO: 2082 - DNA, 1014 bp, Homo sapiens
gcagcctccgccccctcaaccttcgcggggcgcgggccgcagcttttcggttcacagcgggcagggaaagccgcgggaagggtactccaggcgagaggcggacgcgagtcgtcgtggcaggaaaagtgactagctccccttcgttgtcagccagggacgagaacacagccacgctcccacccggctgccaacgatccctcggcggcgatgtcggccgccggtgcccgaggcctgcgggccacctaccaccggctcctcgataaagtggagctgatgctgcccgagaaattgaggccgttgtacaaccatccagcaggtcccagaacagttttcttctgggctccaattatgaaatgggggttggtgtgtgctggattggctgatatggccagacctgcagaaaaacttagcacagctcaatctgctgttttgatggctacagggtttatttggtcaagatactcacttgtaattattccaaaaaattggagtctgtttgctgttaatttctttgtgggggcagcaggagcctctcagctttttcgtatttggagatataaccaagaactaaaagctaaagcacacaaataaaagagttcctgatcacctgaacaatctagatgtggacaaaaccattgggacctagtttattatttggttattgataaagcaaagctaactgtgtgtttagaaggcactgtaactggtagctagttcttgattcaatagaaaaatacagcaaacttttaataacagtctctctacatgacttaaggaacttatctatggatattagtaacatttttctaccatttgtccgtaataaaccatacttgctcgtatataccccctgcctccttctgttccagtcagccaacatatgtacataaaagaacacacaaattcaagaagttggaagattaaattatctgcttatttagtgtaggatggtcaggtagctagctataagtgaaaggaaattttgctgaagagactgagaaatgggtagtggat

SEQ ID NO: 2083 - DNA, 1963 bp, Homo sapiens
ggaattcgcccgccggagggtgtttatcgcggctagagagatgtcgctgctgcggtcgctgcgcgtgtttctggtcgcgcggaccgggagctacccggctgggtctcttctgcgtcagtcgccccagccaaggcacacattttatgctgggccccgtctgtctgcctcggcctccagcaaggagctcctcatgaagctgcggcggaaaacaggctactcctttgtaaattgcaagaaagctctggagacttgtggcggggacctcaaacaggcagagatctggctccacaaggaggcccagaaggagggctggagcaaagctgccaagctccaagggaggaagaccaaagaaggcctgattgggctgttgcaggaaggaaacacaactgtattagtagaggtaaactgtgagacagattttgtttctagaaatttaaaatttcaactgttggtccagcaagtagcccttggaaccatgatgcattgtcagaccctaaaggatcaaccctctgcatacagtaaaggtttcttgaattcctctgagctttctggacttccagctgggcctgacagagaaggctcactcaaggatcagttggctttagcaattggaaaactgggagaaaacatgattcttaaacgagctgcatgggtgaaggtgccatctgggttctacgttggctcttatgtccacggagcaatgcagagtccctcacttcacaagctggtgctggggaagtatggggccctggtcatctgtgagacgtctgaacagaaaacaaaccttgaagacgttggccgccgccttgggcagcatgtggtgggcatggcccccctctctgttggctccctggacgatgagcctgggggagaggcagagactaagatgctgtcccagccgtatttgctggatccctccattaccttggggcagtatgtgcagcctcagggggtgtcggtagtagactttgtgcggtttgaatgtggagaaggtgaagaggcagcagaaactgaataggttccagagacttttggcccaggaggaatatttacttttagctctggacatcattacaaaaaggaatatttcccaaacctcttcagaccgagaatgcatgggtaaaattattaaatagttgtataataaaaataattttttccttgtttgcgtaatactggatttagcttttctgtgcctttcaaaaacaacaggtgggccttattgacgtgatagtgtcgtggagaacaggcatcaacaatactgctgctcccttcaacatagatttattatggtatttctgaaatttctaacttatatgttctgtcttacaccttttatgacatagaactcttttgttctgtttttgctttgcgacactgtgaaccgtgcttctgcctcggaacctccctagttatattacttgtgccacatggatttctttaggattattgattcaaacctagagttgtctggaaaatgtgggttctcttctttgtgattgtctgtagtatgctttgaaggtgctctgcagtggtagacacactggttctggcctcatttaatgaaattaataacacatgcccctatttctcttttggatgatgtgtgggtgggtgggtactgaggtttcctggccagctgtaaggcagattttgacattcttgtgccagaaacagaaattagagtagtccagttacccagagagctcacttaacattgcctctttacttccccagtactgaaacatttcttcaagtattaacataaaattaccgtaacaagcagacccagaatactgaaaataactccatttgttcattataggtatcttttatttgaaaagtgaaaaatgctttggacacattacagatctgggtatttggattttgcctatggagtgcatatatgatttcaatgatttacaggctaaatagattttagaaataatcatcttaaaattga

SEQ ID NO: 2084 - DNA, 1851 bp, Homo sapiens
ggaattccagagtctggggtccctggactgagccatcagctgggtcactgagacccatggcaaggaaacaaaataggaattccaaggaactgggcctagttcccctcacagatgacaccagccacgccgggcctccagggccagggagggcactgctggagtgtgaccacctgaggagtggggtgccaggtggaaggagaagaaaggactggtcctgctcgctcctcgtggcctccctcgcgggcgccttcggctcctccttcctctacggctacaacctgtcggtggtgaatgcccccaccccgtacatcaaggccttttacaatgagtcatgggaaagaaggcatggacgtccaatagacccagacactctgactctgctctggtctgtgactgtgtccatattcgccatcggtggacttgtggggacattaattgtgaagatgattggaaaggttcttgggaggaagcacactttgctggccaataatgggtttgcaatttctgctgcattgctgatggcctgctcgctccaggcaggagcctttgaaatgctcatcgtgggacgcttcatcatgggcatagatggaggcgtcgccctcagtgtgctccccatgtacctcagtgagatctcacccaaggagatccgtggctctctggggcaggtgactgccatctttatctgcattggcgtgttcactgggcagcttctgggcctgcccgagctgctgggaaaggagagtacctggccatacctgtttggagtgattgtggtccctgccgttgtccagctgctgagccttccctttctcccggacagcccacgctacctgctcttggagaagcacaacgaggcaagagctgtgaaagccttccaaacgttcttgggtaaagcagacgtttcccaagaggtagaggaggtcctggctgagagccgcgtgcagaggagcatccgcctggtgtccgtgctggagctgctgagagctccctacgtccgctggcaggtggtcaccgtgattgtcaccatggcctgctaccagctctgtggcctcaatgcaatttggttctataccaacagcatctttggaaaagctgggatccctccggcaaagatcccatacgtcaccttgagtacagggggcatcgagactttggctgccgtcttctctggtttggtcattgagcacctgggacggagacccctcctcattggtggctttgggctcatgggcctcttctttgggaccctcaccatcacgctgaccctgcaggaccacgccccctgggtcccctacctgagtatcgtgggcattctggccatcatcgcctctttctgcagtgggccaggtggcatcccgttcatcttgactggtgagttcttccagcaatctcagcggccggctgccttcatcattgcaggcaccgtcaactggctctccaactttgctgttgggctcctcttcccattcattcagaaaagtctggacacctactgtttcctagtctttgctacaatttgtatcacaggtgctatctacctgtattttgtgctgcctgagaccaaaaacagaacctatgcagaaatcagccaggcattttccaaaaggaacaaagcatacccaccagaagagaaaatcgactcagctgtcactgatggtaagataaatggaaggccttaacaagtttcctcctccacgttggacaattatgtcaaaaacaggattgtctacatggatgatctcacttttcaggaaacttaaaatttacccattattgggaagcttaaatgaattgaagctatgcaagtcttttatattattaaatatttaaaagtaaacctgtactaatcta

SEQ ID NO: 2085 - DNA, 892 bp, Homo sapiens
ttttttttttttaaaatatatttgctttattatgtacacactatatttacatcacccaccctgaaaacagcaggttctggcttttccgtgaacccccagatgaatataaattggagcctctgagaacagttccttccccagagcggggagtgtgcacgtgtgtgtgtaaccttctgattccatgggacctggccagctcctctggagccacacagcacctccttgccttacaccctggctccagcttcactggtccgggggacgcctcagcctggggcagctgtgatgtaaaccagtcactccacctccatcttcctcttctgcaaagaatcgaggaagtcttgccactctgctgggtaaaagcgtttatagacgttgatcttactccgaatctgttttggggtatcttgatagtaattcttctcatcacgggccatggccttatagtcctccccgtggttctctaccatgtagcgtacatagtcaatgaggtcccgagacagagtatttcctttcttttctggaaggctggcttctgcctccaggtcattcagcacatagggcttccgtacaagctctttaggcctctcctctatgtccacctccatggccttcacctttctcttacggaggggcaccgccctgttggggtccacagccaaccccatctcggccaggttctgccgtaccgatttagcgtggtcccaggcatgtcggatgtgggagcattcgatccgcggcgctgccttccgtcgagcattccggttcagacgctttcggttgacactgtaaccaaacttctgcctccgggttttgcccttggccttgggcatcgcgctgaccaccgcaccagcagctcaaacacgctgcctctgtctctcagacctcgtgt

SEQ ID NO: 2086 - DNA, 2652 bp, Homo sapiens
gcagggtctaagtattccgtctgcaaaactggcaggccaccaacggccgcgtcccagggcggcctgaaggatgctgataaccgggagccccgccctgggttcggctatcccgggcaccccgggccggcggggcgaggctctccaattgctgggccagagcgggacccttcctttccgcaccctcctgggtatctccggtcttcaggcctccttcggagagccctgctccgagcccattgggcttccaatcttggcctgcctagcgccgagcagccaatcagaaggcagtcctcccgagggggcgggacgagggggtggtgctgattggctgagcctgaagtcgccacggactcggggcaacaggcagatttgcctgctgagggtggagacccacgagccgaggcctcctgcagtgttctgcacagcaaaccgcacgctatggctgacagccgggatcccgccagcgaccagatgcagcactggaaggagcagcgggccgcgcagaaagctgatgtcctgaccactggagctggtaacccagtaggagacaaacttaatgttattacagtagggccccgtgggccccttcttgttcaggatgtggttttcactgatgaaatggctcattttgaccgagagagaattcctgagagagttgtgcatgctaaaggagcaggggcctttggctactttgaggtcacacatgacattaccaaatactccaaggcaaaggtatttgagcatattggaaagaagactcccatcgcagttcggttctccactgttgctggagaatcgggttcagctgacacagttcgggaccctcgtgggtttgcagtgaaattttacacagaagatggtaactgggatctcgttggaaataacacccccattttcttcatcagggatcccatattgtttccatcttttatccacagccaaaagagaaatcctcagacacatctgaaggatccggacatggtctgggacttctggagcctacgtcctgagtctctgcatcaggtttctttcttgttcagtgatcgggggattccagatggacatcgccacatgaatggatatggatcacatactttcaagctggttaatgcaaatggggaggcagtttattgcaaattccattataagactgaccagggcatcaaaaacctttctgttgaagatgcggcgagactttcccaggaagatcctgactatggcatccgggatctttttaacgccattgccacaggaaagtacccctcctggactttttacatccaggtcatgacatttaatcaggcagaaacttttccatttaatccattcgatctcaccaaggtttggcctcacaaggactaccctctcatcccagttggtaaactggtcttaaaccggaatccagttaattactttgctgaggttgaacagatagccttcgacccaagcaacatgccacctggcattgaggccagtcctgacaaaatgcttcagggccgcctttttgcctatcctgacactcaccgccatcgcctgggacccaattatcttcatatacctgtgaactgtccctaccgtgctcgagtggccaactaccagcgtgacggcccgatgtgcatgcaggacaatcagggtggtgctccaaattactaccccaacagctttggtgctccggaacaacagccttctgccttggagcacagcatccaatattctggagaagtgcggagattcaacactgccaatgatgataacgttactcaggtgcgggcattctatgtgaacgtgctgaatgaggaacagaggaaacgtctgtgtgagaacattgccggccacctgaaggatgcacaaattttcatccagaagaaagcggtcaagaacttcactgaggtccaccctgactacgggagccacatccaggctcttctggacaagtacaatgctgagaagcctaagaatgcgattcacacctttgtgcagtccggatctcacttggcggcaagggagaaggcaaatctgtgaggccggggccctgcacctgtgcagcgaagcttagcgttcatccgtgtaacccgctcatcactggatgaagattctcctgtgctagatgtgcaaatgcaagctagtggcttcaaaatagagaatcccactttctatagcagattgtgtaacaattttaatgctatttccccaggggaaaatgaaggttaggatttaacagtcatttaaaaaaaaaatttgttttgacggatgattggattattcatttaaaatgattagaaggcaagtttctagctagaaatatgattttatttgacaaaatttgttgaaattatgtatgtttacatatcacctcatggcctattatattaaaatatggctataaatatataaaaagaaaagataaagatgatctactcagaaatttttatttttctaaggttctcataggaaaagtacatttaatacagcagtgtcatcagaagataacttgagcaccgtcatggcttaatgtttattcctgataataattgatcaaattcatttttttcactggagttacattaatgttaattcagcactgatttcacaacagatcaatttgtaattgcttacatttttacaataaataatctgtacgtaaaaaaaaaa

SEQ ID NO: 2087 - DNA, 2210 bp, Homo sapiens
tctctagggtggctagagcgtcctcccgcgctcagtcgcgctgcaggtgacggcgcccggaggctgtcgggaagtaggcggggtgacgtgtggttgacgagctcggcggcgggtttgctgagatctgtggccggcggcagctggtgcggggggcagctgagagcgagaggtggatcggggcggtgtgtggccagggccatgacgggcaatgccggggagtggtgcctcatggaaagcgaccccggggtcttcaccgagctcattaaaggattcggttgccgaggagcccaagtagaagaaatatggagtttagagcctgagaattttgaaaaattaaagccagttcatgggttaatttttcttttcaagtggcagccaggagaagaaccagcaggctctgtggttcaggactcccgacttgacacgatattttttgctaagcaggtaattaataatgcttgtgctactcaagccatagtgagtgtgttactgaactgtacccaccaggatgtccatttaggcgagacattatcagagtttaaagaattttcacaaagttttgatgcagctatgaaaggcttggcactgagcaattcagatgtgattcgacaagtacacaacagtttcgccagacagcaaatgtttgaatttgatacgaagacatcagcaaaagaagaagatgcttttcactttgtcagttatgttcctgttaatgggagactgtatgaattagatggattaagagaaggaccgattgatttaggtgcatgcaatcaagatgattggatcagtgcagtaaggcctgtcatagaaaaaaggatacaaaagtacagtgaaggtgaaattcgatttaatttaatggccattgtgtctgacagaaaaatgatatatgagcagaagatagcagagttacaaagacaacttgcagaggaggaacccatggatacagatcaaggtaatagtatgttaagtgctattcagtcagaagttgccaaaaatcagatgcttattgaagaagaagtacagaaattaaaaagatacaagattgagaatatcagaaggaagcataattatctgcctttcattatggaattgttaaagactttagcagaacaccagcagttaataccactagtagaaaaggcaaaagaaaaacagaacgcaaagaaagctcaggaaaccaaatgaagatgttttcagatatgtacacatttctgcttctgcacatattttcatggaaaccattatgtataaagaacttagagcaacatcctaattggctcagtgcacgtttggcaatagtgccagcctgtcttgtctttaatgcatggattcataaacttcttccctacctgcatcatgtgcatgtagtgcatattaaatgaaagtgatattaagaatgctttcccaaattccattatttgacattgagtctgacaactgttagttttctggttgtctaactaccatatgaagctagaaaatgcacaaacgatattccttatctgtaatttaaatacttaaaatttgcaattgtcagatcttgattaaactggttgtcttatttcttctcatcattaacggaaaaaaatcagtatttctatctttgatatctaagtgttttgaggattttaaaactgaattttatctgctataccagttatttgagaaagtatgattttaatgtaaatcatttaaaaaggacaaaagtataatttccagtgattttcactgctgtcagtagaaaagtaataaacatctcaattttattttagtaaattttcttcaagtgtttggggttatttgtttatgtattagagaattgtttcaggaaggtctgagtattatgcttcaaagcaaaatttcaggttaagaagaaattgtaaatcttaaagaatgttggtgttactctcaatggaatattgtttcaagcttgtaagctgtgtataaaaaaaactggaggtctgacagttcatgttatctgcttttttaaaaagatggtagtggtgatgggggtctttctatgccaatttgaataaatttcgtacagcctgcagttttcaagagccatatgtaatttgctcacaattgatttttaaaaattgatttgggagttgctttgtaataatcttctgcttctaatcttcctttgcaagtcagactttaaaagaagactttataaagcttttttttttaaaggaagcaacctt

SEQ ID NO: 2088 - DNA, 4677 bp, Homo sapiens
gaaattggtttttcctcggccaataatctgtttctttaaaaaaagaaaaattcgttacctattgccactgacctggctacttcagagttcggagggaaatagcgtctccgtaccctcgccccacctgggctgctcctcggaccgccgctcgtcccagactccaggaggcgccaccaggcctcgctgaccccgctccatatctccgggagccctcagctggtcggccgcggcgaccggaagctccggactgaggtactggttccgcccgccgctcttccagccgagactcggcagcggcggtcggagcggctgccacgccgcacctgcccgcgagggggcgcgccaggcccaggccgcagccgactgccgcgctctctgcccccgccctccgccatccccggactgcgctcacctgtctgggccgctggcctgggaggcgggggccggcgggagccaagccgaggaaagggcggagcggctctccgggcgcgtcatcggagcaccatggcggagctaggagctggcggcgacggccacaggggcggcgacggcgcagtgcgaagcgaaacagcacccgacagctacaaagtgcaagataagaaaaatgcctccagccgccctgcctctgcaatttcaggacaaaataacaaccactcaggaaataaaccagaccctccgcctgtgttacgtgttgatgaccggcagcggctggcccgggagcgacgtgaggaacgggagaaacagctagctgcaagagaaatagtgtggttagaaagagaagagcgagccaggcagcactacgagaagcacctggaagagcggaagaagaggttggaggagcagaggcagaaggaggagcggaggagggctgctgtggaggagaagcggaggcagagacttgaggaggacaaagaacgccacgaagctgttgtacggcgcacaatggaaaggagccagaagccaaaacagaagcataaccgttggtcgtggggaggctctctccatgggagccctagcatccacagtgcagatccagacaggcggtcagtttccaccatgaatctttcgaaatatgttgatcccgtcattagcaagcggctctcctcttcatctgcaactttactaaattctccagatagagctcgccgcctgcagctcagcccatgggagagcagcgttgttaacagactcctgacgcccacacattcgttcctggccagaagtaaaagcacagctgccttgtctggagaagcagttatccccatttgtcctcgttcagcatcttgcagccccatcatcatgccctacaaagctgcacactctagaaattcgatggatcgaccaaaactctttgtaacaccacctgagggctcttctcgcaggaggatcattcatggcacagcgagctataaaaaagaaagagagagagaaaatgtactcttcctcacatctggcacccgaagggctgtatctccatctaatcccaaagcaagacaaccagctcgctcccgactttggcttccgtccaagtctcttcctcatttgcctggcacacccagaccgacatcctccttgccacccggctcagtcaaagctgctcctgctcaggtccggcccccatcccccggcaacatccgccctgtcaagagggaagtcaaagtggagcctgagaagaaagatcctgagaaggaacctcagaaagttgccaatgagccctcactaaagggcagagcacctttagtgaaggtagaagaagccacagttgaagagcggacacctgctgaaccagaagttggccctgctgctccagccatggccccagctccagcctcggccccagctccagcctcggccccagctccagccccggtccccaccccagccatggtctcagccccgtcatccactgtgaatgccagtgcttctgttaagacttctgcaggcaccaccgacccagaggaggccacaaggcttctagctgagaagaggcggctggcccgagagcagagagaaaaggaagaaagggagaggagggagcaggaagagcttgaaagacaaaagagagaggaattggctcaacgtgtggctgaagagaggacgactcgccgtgaggaggagtcgcgcaggctggaagccgagcaggcccgggagaaggaggagcagctgcagcggcaggcggaggagcgggcgctgcgcgagtgggaggaggcagagcgcgcccagaggcagaaagaagaagaagctcgcgttcgtgaagaagcagagagggtccggcaggaacgagagaagcatttccagagagaagagcaagagcgcctggagagaaagaagcgacttgaggagattatgaaaagaaccaggagaacagaagctacagataagaaaaccagtgatcagagaaacggtgatatagccaagggagctctcactggaggaacagaggtgtctgcacttccatgtacaacaaacgctccgggaaatggaaagccagttggcagcccacatgtggttacctcacaccagtcaaaagtgacagtggagagcactcccgatttggaaaaacaaccaaatgaaaatggtgtatctgttcagaatgaaaattttgaagaaattataaacttacccattggatctaaaccatccagattagatgtcaccaacagtgagagcccagaaattcctttgaatccaattttggcctttgatgatgaagggacacttgggcccctgcctcaggtagatggtgttcagacacagcagactgcagaagttatatgagtgtttcttctgaagaaccaaagctgaaatttaatgagaatttctacaattaatggaattcctttcctgctataaaggagcatcccctccacccgttttctagagttcttgaccatcattttgaaaagatttattaaaactagctaaagacaacagactggatagcttttctaataattttcatcaataggaaaaaagaaatacgtctcattcttcaatactttaaaatggctttttccagtgtgctccttcttagcaatcaatatttttctgcattctttaaaagacaagagaatttggttataaaagaaatgggctgactaggcatgatttttttggtcttaaaagcttaacatgtaaaattggcaaaaaaaattttttaccttttataatacttgaaaaataagtacctctttgttctacaagtagaatgaataggagaagagtttaagcctgtttttttaaaatattattgcaaagagctctatttgtagaagcaaattataggcagattaccaggttcttataaatacagcttgtacatggacattctgcaaacccagctgtcacatttttcttgcaactccttttgcaaaagcagactaaaatgttttaaaatgtgaaaaaacattattttttcaaagcaagaaaataatttactgccctcttacataatgtatttataaagtttttccagataaactaatcaaataaattagaataatgtgacaacattacaaatttaatttgttagctgcattccttctgatgttaccacgatagaatgttactgatgattcagggctatttctgaagtctgtatgttgctgctgtccccagtgatggtggacttatctttgccttacctgatcacaaattatgttggggaaaataaagatttaatatttctttaaatagaaaaagaatttggttttgctcgtttaagagcaatgagaaaatgatggaatgttgactgtgtttggcacacaggacacggaccttcatggaagtccttgctctgcgtggcatctgtcagcttttcacctttcattcttattcttcacttttgctgctgagcctagctgtacaaacttgcactttcatttgctaatataaattcagttttattttaccattttagagactactaatgattaaatgtagaaggagagggtgcacatgtttttatgtggagtgtttaaaagataaatttataccactgtaatgtgcagcttttattaaaagagaaattggttgaactgctaggttgaatgagagacttcatcctattggacttttttttttaatcccaggcatatggtctttagtaatggcttgtaaatttgtgaaaacattgaatttgggggttttccctgtttttcagttgtccatgtacacatagtcattatattagaaaagaaaattattataacaaacttgtttaatttgtttaaatccacatagcatgaaacaccaaaaaaaaatgtttgacatagttttacttttagctttctcatatgttataacttcactcagattgattcttgagtcttcagattgtccttcatttaactcagtgacattttcctagcctcctgttgattaagcatataggatagccttatttaaaatttagagcagtaggtgtattttggctgtttttctttttcatgtgtgtttttaaactttagtcatcattagcaaacggaaagccttctaagtaatcaagttttaattagaagtggtgcaaaattcttaattatattgtgttaaagagcagcgctgccagagaatgaccctgacctttacaatggctggcttgctttttggccagcactggaaaaatctatatttacttgcagaccttaaggaggtcttcagtattcaccctacattaag

SEQ ID NO: 2089 - DNA, 2835 bp, Homo sapiens
cgacccacgcgtccgaggaggcggcggcggcggcggcggcacacagccggttgttgagccgcttagccacctcgtgtatgcagagaccatgtgtgtctgatctgctgggatcctatagctggaacaggagggtcacgcagcacaatgccagctctgcccctggaccaactccagatcacccacaaggacccgaagacaggaaagctgaggacttcaccagcgctgcaccccgagcagaaggcagaccggtattttgtgttatacaaaccgccccctaaagacaacattcccgccctagtggaggagtacctggaacgcgccaccttcgtagccaatgacctcgactggctcctggccttgcctcacgataaattctggtgccaggtgatctttgacgagactctacagaagtgcctggactcctacctgcgctatgtcccccgcaaattcgacgagggggtggcctcagcccctgaggttgttgacatgcagaagcgcctccatcgaagtgtttttctcaccttcctccgcatgtccactcacaaggaatccaaagatcacttcatttccccttctgcgtttggagaaatcctctacaataacttcctctttgacattccaaagatcctggacctctgcgtgctctttggaaaaggcaactcaccactgctccagaagatgataggaaacatctttacacagcagccaagttactacagtgacctggatgaaaccctgcctaccatccttcaggtcttcagcaatatcctccagcactgtggtttgcaaggggacggggccaataccacaccccagaagcttgaggagaggggccgattgacccccagtgacatgcctctcctggaattaaaggacattgttctctacctttgtgatacctgcaccacactttgggcctttctggatatcttccctttggcttgccagaccttccagaagcacgacttttgttacagactagcttccttctacgaagcagcaattcccgaaatggagtctgcaattaagaagaggaggcttgaagatagcaagcttcttggtgacctgtggcagaggctctcccattccaggaagaagctaatggagattttccacatcatcctgaaccagatctgcctccttcccatcctagaaagcagctgtgacaacattcagggcttcatcgaagagttccttcagatcttcagctccttgctgcaggagaagaggttcctccgggactatgatgcactcttccccgtggccgaagacatcagcttgctgcagcaggcctcatcagtcttggacgagacgcggactgcctacatcctccaggcagtcgagagtgcatgggaaggggtggacagacggaaagccacagatgctaaagacccatcggtgattgaggagcctaatggggagcctaacggggtcacggtgacagcagaggcagtcagtcaagcatcatcacatccggagaactcggaggaagaggagtgcatgggagcagccgcggctgtgggccctgccatgtgtggggtggaactggactctctcatctcccaagtgaaggacctgctgccagaccttggtgagggcttcatcctggcctgcctggagtactaccactacgacccagagcaggtgatcaacaatatcctggaggagcggctggcccccaccctcagccagctggaccgcaacctagacagagaaatgaaaccagaccctacacccctgctgacgtctcgccacaacgtcttccagaatgacgagtttgatgtgttcagcagggactcagtagacctgagccgggtgcacaagggcaagagcaccaggaaggaggaaaacacgcggagtttgctgaacgacaagcgtgcagtggcggcacagcggcagcgctacgagcagtacagcgtggtggtggaggaggtgccactgcagccaggcgagagcctgccctaccacagtgtctactacgaggatgagtacgatgacacatacgatggcaaccaggtgggcgccaatgatgcagactctgatgacgagctcatcagccgcaggccattcaccatccctcaggtgctgagaaccaaagtgcctagagaagggcaggaggaggatgacgacgatgaggaagacgatgctgacgaggaggctcccaagcccgaccattttgttcaggaccctgcagtgctgagagagaaggcagaagccaggcgcatggcctttctcgccaagaaagggtaccggcatgacagctcaacagcagtggccggcagcccccgaggccatgggcagagccgcgagacaacccaggaacgcaggaagaaggaagccaacaaggcgacaagagccaaccacaaccggagaaccatggccgaccgcaagaggagcaaaggcatgatcccatcctgagacctggtgcagggccagtggggaggcagcggcaccagactcaccaggccgcgctcccatcgcctggggcctcctcactaggggccccaagttcaactcaacccctcaacagcctcagctttgcagcccctgagaaggccgcctctcatctaccagccagccatgagcgccttcctgcagaacacacagtgccttatgccacagccgaagaatccgtggggccggcaagcaggcaccttcccccagctgcgctagcgggaaagagatggggatggagtcccaaggcaagcgccccaaacctcgggccacaagacaccacttcccctttaccctggacagcaggaaacctgtatattcaaaaacacaaaaagtcctgctaataaaatttttgaccctttcaaatgaaaaaaaaaaaaa

SEQ ID NO: 2090 - DNA, 396 bp, Homo sapiens
ttggagaagcccgttcaccgcctccagctgctgctctcctcgacatggaccctgagacctgcccctgcccttctggtggctcctgcacctgcgcggactcctgcaagtgcgagggatgcaaatgcacctcctgcaagaagagctgctgctcctgctgccctgcggagtgtgagaagtgtgccaaggactgtgtgtgcaaaggcggagaggcagctgaggcagaagcagagaagtgcagctgctgccagtgagaaggcacccctccgtgtggagcacgtggagatagtgccaggtggctcagtgccacctatgcctgtggtgaagtgtggctggtgtccccttcccctgctgaccttggaggaatgacaataaatcccatgaacagcaaaaaaaaaa

SEQ ID NO: 2091 - DNA, 1568 bp, Homo sapiens
tttcgtgagaaaggttgtgatggcggctatagctgcatccgaggtgagttccacccaccgtacaccgggggttttgttggtgagggttccggggagcggcctggagagaggtggaggcgaagtctagtttcgcttcagggaggctcagacactgtggggtcaagtcggcggtggaggccctaggcccagcctgtggggaccggcggggactcggcctgggcagtcctgggagaagctgagccggctctgcctgaagccagttctccttgtcgcaggtgctggtggacagcgcggaggaggggtccctcgctgcggcggcggagctggccgctcagaagcgcgaacagagactgcgcaaattccgggagctgcacctgatgcggaatgaagctcgtaaattaaatcaccaggaagttgtggaagaagataaaagactaaaattacctgcaaattgggaagccaaaaaagctcgtttggagtgggaactaaaggaagaggaaaagaaaaaggaatgtgcggcaagaggagaagactatgagaaagtgaagttgctggagatcagtgcagaagatgcagaaagatgggagaggaaaaagaagaggaaaaaccctgatctgggattttcagattatgctgctgcccagttacgccagtatcatcggttgaccaagcagatcaaacctgacatggaaacatatgagagactgagagaaaaacatggagaagagtttttcccaacatccaatagtcttcttcatggaacacatgtgccttccacagaggaaattgacaggatggtcatagatctggaaaaacagattgaaaaacgagacaaatatagccggagacgtccttataatgatgatgcagatatcgactacattaatgaaaggaatgccaaattcaacaagaaagctgaaagattctatgggaaatacacagctgaaattaaacagaatttggaaagaggaacagctgtctaatcccttcaagaactgtttatagaagcttgagaatggggtaaaaatttctgctagcaaaatcaagttctttttgaaattttatcagtaatccagaatttagtagtccatgccttctcactcagcatttagaaataaaaatgtggtttcttaaacgtatatcctttcatgtatatttccacatttttgtgcttggatataagatgtatttcttgtagtgaagttgttttgtaatctactttgtatacattctaattatattatttttctatgtattttaaatgtatatggctgtttaatctttgaagcattttgggcttaagattgccagcagcacacatcagatgcagtcattgttgctatcagtgtggaatttgatagagtctagactcgggccacttggagttgtgtactccaaagctaaggacagtgatgaggaagatggcagtggccaccggaggactggagcagtccctcctcatggcggcctgtgaccaaggtcggggaggagtggagctatccttccatgatctgatcatgtacagttccctttttaaaaagcaataaatgcttgggattagaatttct

SEQ ID NO: 2092 - DNA, 1568 bp, Homo sapiens; identical to SEQ ID NO: 2091

SEQ ID NO: 2093 - DNA, 1700 bp, Homo sapiens
  misc_feature (1)...(1700): n = a,t,c or g
tttcgtctgagacccagaagggcctgcgctcagctgctctggcaccccgctgcagggatggcctcctgggctaagggcaggagctacctggcgcctggtttgctgcagggccaagtggccatcgtcaccggcggggccacgggcatcggaaaagccatcgtgaaggagctcctggagctggggagtaatgtggtcattgcatcccgtaagttggagagattgaagtctgcggcagatgaactgcaggccaacctacctcccacaaagcaggcacgagtcattcccatacaatgcaacatccggaatgaggaggaggtgaataatttggtcaaatctaccttagatacttttggtaagatcaatttcttggtgaacaatggaggaggccagtttctttcccctgctgaacacatcagttctaagggatggcacgctgtgcttgagaccaacctgacgggtaccttctacatgtgcaaagcagtttacagctcctggatgaaaaagcatggaggatctatcgtcaatatcattgtccctactaaagctggatttccattagctgtgcattctggagctgcaagagcaggtgtttacaacctcaccaaatctttagcttttgaatgggcctgcagtggaatacggatcaattgtgttgcccctggagttatttattcccagactgctgtggagaactatggttcctggggacaaagcttctttgaagggtcttttcagaaaatccccgctaaacgaattggtgttcctgaggaggtctcctctgtggtctgcttcctactgtctcctgcagcttccttcatcactggacagtcggtggatgtggatgggggccggagtctctatactcactcgtatgaggtaccagatcatgacaactggcccaagggagcaggggacctttctgttgtcaaaaagatgaaggagacctttaaggagaaagctaagctctgagctgaggaaacaaggtgtcctccatcccccagtgccttcacatcttgaggatatgcttctgtactttttaaaagcttatagttggtatggaaaacatttttcttatttttaagtgttattaattatatctatggaaaaactattcctgaaatatatacagtcttatgtcccaatcagagtcttttaacctatgatttaaaaatgtataagtaacagaaattaacatattttaatgactttactttttatttctaagaaaagtatttgaaaaatggaataattttaaatcaatgataattctagggatcatgaactcccagaagattttattatttaattgtaaaggtagaggccagacgcagtggctcacgcctgtaattccagcactttgggaggccgaggtaggcgggtcagttgaggtcgggagttcaagaccaggctggccaacatggtaaaaccctgtctctactgaaaaacaacaaaaacaaaaacacaaattggtcgggtgtggtggcgcacacctgtggtcccgggtacttgggaggctgaggcaggaggatcgcttgaacccgggaagcggaggttgcagtgagctgagatcatgctactgcagtccagcctgggctacagagtgagactgcatctcataaaaaacccanaaaacaaaaacaaacaacaacgacaaaattatgaaggtagaggataaacctanattggtgtcgaattaagat

SEQ ID NO: 2094 - DNA, 6621 bp, Homo sapiens
tttcgtcagagagtcggggaaggctcctgtgacgtttgatgacatcactgtgtacttactccaggaggaatgggtgctgctgagccagcaacagaaggagctctgtggttccaacaagctggtggcaccactgggaccaactgttgccaatcctgagctgttccgcaagttcggacgagggccagagccatggcttggcagcgtccagggccagaggagccttctggagcatcacccaggaaaaaaacagatgggctacatgggagaaatggaggtgcaaggtcccaccagggagagtggacagtccctcccgcctcagaagaaagcctacctttcccacctcagtacaggcagtggacacatcgagggagactgggccggaagaaacaggaaacttctgaagccccggtccatccagaagtcgtggtttgtgcagtttccgtggctgatcatgaatgaggagcagacggctctgttctgctctgcttgccgagaatacccctccatcagggacaaacggtcaagactaatagaaggttatacaggaccattcaaggtggagactctcaaataccacgcgaagagcaaggcccacatgttctgtgtcaatgccttggcagcgagggaccccatctgggcagcccggttccggagcatcagagacccacctggagatgttctggccagcccggagccgctcttcactgcagattgccccatattctaccccccagggcctctgggaggatttgatagcatggctgagctcctgccaagttcaagagctgaactagaggaccctgggggggatggagcaattcctgcaatgtatctagactgcatttcagatttgaggcaaaaagaaatcactgatggcatccacagctcctcagacattaatattttatataatgatgcagtagaatcctgcattcaggacccttctgcagaggggctgtcggaggaggttcctgtggtgtttgaggagctgccggtggtgttcgaggatgtggcagtgtatttcacccgggaggagtggggcatgctagacaagcggcagaaggagctgtacagagacgtgatgcggatgaactacgagctgttggcatccttgggacctgctgctgccaagccagacttgatctccaaactggagcggagggctgcaccctggatcaaggacccaaatgggccaaagtgggggaaaggtcgtcctccagggaacaagaagatggtggcagtgagagaggcagacacacaggcctcggctgcagactccgcgttgcttccaggctctcccgtggaggcccgtgcctcctgctgcagttccagcatttgtgaggaaggagatggacctaggagaatcaagaggacatacaggccccgttccattcagaggtcatggtttgggcagttcccatggttagtaattgaccccaaagagaccaaactcttctgctcagcctgcatagaaagacctaatctccatgataaatcatctcggttagtcagaggttacacggggccttttaaagtggagactttaaaataccatgaagtcagcaaagcgcacaggctctgtgtcaacacggttgaaatcaaggaagacacccctcacactgccctcgttccagagatctccagcgacctcatggccaacatggagcactttttcaatgccgcctactccattgcataccactcaaggcccctgaatgactttgagaagatcctgcagctcctccaaagcacggggaccgtgatattaggcaagtaccgcaatcgcacggcgtgcactcagttcatcaagtacatctcagagaccctgaagagggagatcctggaggacgtgcggaactcgccctgtgtgagcgtgctgctggacagctccaccgacgcctccgagcaggcctgcgtggggatttacatccgctacttcaagcagatggaggtgaaagagtcctacatcactctggcccctctctacagtgagacagcagatgggtacttcgagaccatcgtttctgccctggatgagctggacatccccttccggaagcctggctgggtggtggggctggggacggatggctcagccatgttgagctgcagaggaggccttgtggaaaagttccaggaggtcatcccgcagctgctccctgtccactgcgtggcccaccggctgcacctggctgtggtggacgcctgcgggagcatcgatctggtgaagaagtgtgaccggcacatccgcaccgtcttcaagttttatcagtcctcaaacaagaggctgaacgagctgcaggaaggtgcggcgcctctggagcaggagatcatccgcctgaaggatctgaatgcggtccgctgggtggccagcaggaggcgcacgctgcacgcgctgctcgtgagctggcccgccctggccaggcacctccagagggtggcagaggctgggggccagattgggcaccgggccaaagggatgctgaagctcatgcgcggcttccactttgtcaagttctgccacttcctgttggacttcctgagcatctacaggcctctgtccgaggtgtgccagaaggagatcgtgctgattacagaggtgaacgccacgctgggccgcgcctacgtggcactggagagcctccgtcaccaggcagggcccaaagaggaagaattcaacgccagcttcaaggatgggcggctccacggcatctgcttggacaaactggaggtagcggaacagcggttccaggcggatagggagaggacagtcctgacggggattgagtacctccagcagaggtttgacgcagaccgacccccacagctgaagaacatggaggtgtttgacaccatggcctggccaagtgggattgaacttgccagttttgggaatgatgacattctcaacctggccaggtatttcgagtgctccctcccaacaggatacagtgaggaagctctgctggaggagtggctgggcctgaaaaccattgcccagcacctcccgttctccatgctttgcaaaaacgccctggcccagcactgccgcttccccctgctaagcaagctcatggccgtggtggtctgtgtgcccatctccacctcttgctgtgagcgggggttcaaggccatgaaccgaatcaggaccgatgagaggaccaagctctccaacgaggtgctcaacatgctcatgatgacagctgtgaacggtgtggccgtcacggagtacgacccccagcccgccatccagcactggtacctgacctcctcaggccggcgtttcagccatgtctacacctgtgcccaggtgccagcccgctcccctgcaagcgccaggctcaggaaggaggagatgggagccctctatgtggaggagcccaggacccagaagccacccatcctgccctccagggaagcagcggaggttctgaaggactgcatcatggagcctcccgagagactcctgtatccccacaccagccaggaggcccccgggatgtcctgagggacagggagtccttgggactgccttggagacgcctctgtgatcactgggacaggctctgcagattctaggctgccctaggatcttctgctggtggcgatggtctctaagcaccaggaagtgggcagtggcatcccagagcagcaggggtatcaggaggtgcatgacctgtttcctgaggccccactcagcacagccatgcctcacagcacacaaatgtgccagaaggttctatatctcaagttcatttttaaggtgctgcagaaaataaccccatcatgaaaggtttcagcccctgagttttggtggcaagaggagtgtcctggtaggggagactgttggacatccctggggaatgttccagggaggctgcccacagtctaagtgggaatgggaaagaccaccttgttagagggggaggttgcccctgctctagggacagctggcctggctgcaagagcccccagaggcattgttctgggacttcctaccctggctcccacagcagaagcagtgaggccgtggtctcgtgcggaactctacctcttcccagggcttcctttagggcgaaacaatcacaagccctttgcacagagcacccaagaaagttctcttcctgcagctccagatggtggagctgggctcttctggcagggggtctggtgcttcccggagagccgagccgcgtttaacccgtggcatgcccggcccggtttacccaggagaggatgggacgaagttggagttgggaggcttgggatgcagccccagctctgctgcaggcagtggtctgattaatcccttcctctttgtgcctcagtttccctctccatgaagtggcagcagagatccaagtgcctgctgactccccatctgccctaggattagtgaatgagagcctcgagctccctgaaagacctctggctgcagtgtggacttagctgccatctgccccatcctcgtccttagtgggacaggtaggaatttgtctccaaagtccttgttgtaggagttgctctctgaatgcaccatctgcacgacaggctagtccactcttctctgagctgccctggggactctgcaccaggatctccagggcccactgagacatccccgaatgggcgctcagtgacaagggctttgaacaacctcctccagggactttgggcctgctctagcttcagaaccacagaaccaccgccctagaggcacagaggggcttctggcactgctaggttcacaccctcctcgcccatcttccttccacctaaagtgaagcacttttccttccaagggcagctccgtcttggcaggctcaggaggccgcttatcaggaggaggatgattttgtctaggttctgccttccttaaccatgggcaggaaatgaggcaagtcagcaggcagggtttctctgccctgcctgatacttgttttaaacaggcaggaagtgggcgccatccatcccagcttgcttgctgcctggctcaggcaggtcctgtgctgtgctgcaggcccctgtgggtgggccctttctccatagtctgccgcttcccattcccagggtagatgctggcatctgagcacctgagtacccttcctattcccagggtagaagctgctgtctgagtacccttcccattcccagggtagatgctggcgtccgagcccctccccggtaccgcaggtaccctggtaccccacctgccctttcatccccaccccagtacttagccttagcactgttgctttcgtgtcattttcagttctagtcaggaattcctttcttgctttctgcctttgacctgtggaaatgtctcccagccctgtgggtctggcggtcagagggaccccacaggcctgtggtgcgggagctctgggaggtgttactatctgcgtggctaaggcacacacaggcctccttctccccatcaccgtctccatgggcgttcaggaacttgcccaggtcaggcactgtggatgtgaactcgtggaaagggagggagaaaggcttttttaggtggggctatagcctctgccctacccacagggattccacatcaaggtgctgttccagcacacatgcttcctgcggcctcttcatccttgaagaatccctcagagcaggaggccatcctgtgagcagccgtgagtgggtctctgtgggagtagttctggagctgaggtggaagctaggggaagcaactcgccctctccacgtcagcatcagcgtgctccgaggacaccggccagtgccttccttaggtggtgggaaaggggggtccctgtgcagcggggccactgagaatgctgtttgtcataaaatttgcactacccgatttctcaaggggcacaggcctgctccgttcccctttgtcagccaatggccaagaaggaagaagatgactgccatcttattcctgaacttcctcattcgggacccccgtggaaacacagtgagcatccttatcagaggccctggcccaggctggcccctttgctttgtttggagaggctggctgagtttcagcccctagtgctggagacccccttgttggagaggcttcctgtttatgcctcacaagaagaaaaaccacagggctctgggaggggaagaagcatgcactcccgctttggctggagtcccagcgcttgtcgccaccctcctccttgcctgtagtcttgacagcatccgtatgtacgtgtcctggcatttcccctccctctccctgatgactgatacccaccgggtctgacattccaagtaaccagtatgtaactggtagtttgatcccaatagccatagcgactccaggtgggagtgaggggagcccagccccctgtcctggaagataccttagagtatgtgaccgcgctccagacccttgcttctctctcctgcagaggatgagtttctagggtgctaagtacctatcagaacagtgtggaggggcgggtccctcatacaggtgtgtgcttagccaaatacagtaactgtgactggcccagggatgttctctcctctattttcaaagatgaaaggaggttttaaaaaccatgtttgattcctaaccttttgctacctgaataaagcagagtctatttcaacacaaaa

SEQ ID NO: 2095 - DNA, 2104 bp, Homo sapiens
cctccgccgcctcctcctcctccggcagccgcggcagcaggacccaccctgccccccaccccaccctctgtcggctccggctgcggctccagcctcgactattattttatttattttgggtcgtgcacaagcctcagtgcctgcagtccgcgcctcctcggcccgcgggcgcctcctcccttggctccggagccccagaccccggccaccctcgattcgacaaccccagacccctgccagctgccgcgagtctccgctgctggaatcttgttagcggctgtctttttggagggttctggtttcccgacatttttgtttccagcccaggagaggatatcgtgattttccccccttgagcccaggctctgctctctgggggggtggggggcgctccaagccggggagccgtgccagccgagtcgtgcgggctgtggcagggaaggggccaccatgggatgtactctgagcgcagaggagagagccgccctcgagcggagcaaggcgattgagaaaaacctcaaagaggatggcatcagcgccgccaaagacgtgaaattactcctgctcggggctggagaatcaggaaaaagcaccattgtgaagcagatgaagatcatccatgaagatggcttctccggagaagacgtgaaacagtacaagcctgttgtctacagcaacactatccagtccctggcagccatcgtccgggccatggacactttgggcatcgaatatggtgataaggagagaaaggctgacgccaagatggtgtgtgatgtggtgagtcggatggaagacaccgagcccttctctgcagagctgctttctgccatgatgcggctctggggcgactcaggaatccaagagtgcttcaaccggtcccgggagtatcagctcaacgactctgccaaatactacctggacagcctggatcggattggggccgccgactaccagcccaccgagcaggacatcctccgaaccagggtcaaaaccactggcatcgtagaaacccacttcacattcaagaacctccacttcaggctgtttgacgtcggaggccagcgatctgaacgcaagaagtggatccattgcttcgaggacgtcacggccatcattttctgtgtcgcgctcagcggctatgaccaggtgctccacgaagacgaaaccacgaaccgcatgcacgaatccctgaagctttttgacagcatctgcaacaacaaatggttcacagacacgtccatcatcctgtttcttaacaagaaggacatatttgaagagaagatcaagaagtccccgctcaccatctgctttcctgaatatacaggccccagcgccttcacagaagccgtggcttacatccaggcccagtacgagagcaagaacaagtcagcccacaaagagatctacagccacgtcacctgcgccacggacaccaacaacatccagtttgtctttgatgctgtgacggacgtcatcatcgccaaaaacctgcggggctgtggactctactgagcccagccgccctgcccggcacccttgccctgcctggcctgccgcccccccttccttggaaccaggctccaccactctcagaccactctttgcacttgaggaagaagacctcagaggctggcaccaagggagggaggagggagcatcctccacccgcaccccccaacagaacttgtggtaacgcaggggcggggcggggctgctgagtgcatgctgcaaggccaggagactccacgctcacagcctctgtgtcatctctgagtgcttgatcgggaagctggggggacagggcagggcccagatgggcacaccctgcacctgatgactcactggaagcctcggagtgtcctcctgtcatcttgggtggtgcaggggcgcagatggccctgcagcagggtgctggcagggtggggtcataggagccatccttcagctttgcctggggtctctggtggagggcagttccgtcaacaaaagccagggaaggggccaccatgggatgtactctgagcgcagaggagagagccgccctcgagcggagcaaggcgattgagaaaaacctcaaagaggatggcatcagcgccgccaa

SEQ ID NO: 2096 - DNA, 1797 bp, Homo sapiens
tcggcacgagccgcggcgccggcactgcagctggggctgagaagccaggacggcccgagaactgacagacggagtgacagacggactgaccatggccgaccagccaaaacccatcagcccgctcaagaacctgctggccggcggctttggcggcgtgtgcctggtgttcgtcggtcaccctctggacacggtcaaggtccgactgcagacacagccaccgagtttgcctggacaacctcccatgtactctgggacctttgactgtttccggaagactctttttagagagggcatcacggggctatatcggggaatggctgcccctatcatcggggtcactcccatgtttgccgtgtgcttctttgggtttggtttggggaagaaactacaacagaaacacccagaagatgtgctcagctatccccagctttttgcagctgggatgttatctggcgtattcaccacaggaatcatgactcctggagaacggatcaagtgcttattacagattcaggcttcttcaggagaaagcaagtacactggtaccttggactgtgcaaagaagctgtaccaggagtttgggatccgaggcatctacaaagggactgtgcttacccttatgcgagatgtcccagctagtggaatgtatttcatgacatatgaatggctgaaaaatatcttcactccggagggaaagagggtcagtgagctcagtgcccctcggatcttggtggctgggggcattgcagggatcttcaactgggctgtggcaatccccccagatgtgctcaagtctcgattccagactgcacctcctgggaaatatcctaatggtttcagagatgtgctgagggagctgatccgggatgaaggagtcacatccttgtacaaagggttcaatgcagtgatgatccgagccttcccagccaatgcggcctgtttccttggctttgaagttgccatgaagttccttaattgggccacccccaacttgtgaggctgaaggctgctcaagttcacttctggatgctggaagctgtcgttgaggagaaggagtagtaagcagaactaagcagtcttggagggcaaggggaggggaatggtgagatccgagccctgtgcatggacttggtgagactgttgccttaatgacatcctgcaccgtgtataacttagtgtgtcattttgaaacttgaattcattcttatcaatttaagggatcttaaaaggatttggaaatggaacaagtagcttccagaccagatactacctgtggcaagaatgctgcctaccagttaactgctggtcctaccacagtcaaagtattcctcattaaagagagaatctcaggttctcactggaggcactgtgcatattttcaaccagatcaccaggagctgagatcttcttcagtccctagccaggaatacccatttgatttccagggtgccatctaatcctgggctgtacatgtggatatggacttgaggcccacctctgtgtccaagtggattgagcatatatgcctaggaggagatagactgttaatcgttggattttgatttttttttttttatgcctgcaaataatcaaaagtaaaactggagtagcctaattttctgggagcagggggagaactttccctcctacacagtgaggacagtcccacgtctgctgggataacgtgagaaagcccagggtgtaggaaggccctttttacatactcttttctcatgaagacgctcactattttacacaataaacaataaacgttgtttctaatttttaaaaaaaaaa

SEQ ID NO: 2097 - DNA, 2528 bp, Homo sapiens
cgataatggcggatatggaggatctcttcgggagcgacgccgacagcgaagctgagcgtaaagattctgattctggatctgactcagattctgatcaagagaatgctgcctctggcagtaatgcctctggaagtgaaagtgatcaggatgaaagaggtgattcaggacaaccaagtaataaggaactgtttggagatgacagtgaggacgagggagcttcacatcatagtggtagtgataatcactctgaaagatcagacaatagatcagaagcttctgagcgttctgaccatgaggacaatgacccctcagatgtagatcagcacagtggatcagaagcccctaatgatgatgaagacgaaggtcatagatcggatggagggagccatcattcagaagcagaaggttctgaaaaagcacattcagatgatgaaaaatggggcagagaagataaaagtgaccagtcagatgatgaaaagatacaaaattctgatgatgaggagagggcacaaggatctgatgaagataagctgcagaattctgacgatgatgagaaaatgcagaacacagatgatgaggagaggcctcagctttccgatgatgagagacaacagctatctgaggaggaaaaggctaattctgatgatgaacggccggtagcttctgataatgatgatgagaaacagaattctgatgatgaagaacaaccacagctgtctgatgaagagaaaatgcaaaattctgatgatgaaaggccacaggcctcagatgaagaacacaggcattcagatgatgaagaggaacaggatcataaatcagaatctgcaagaggcagtgatagtgaagatgaagttttacgaatgaaacgcaagaatgcgattgcatctgattcagaagcggatagtgacactgaggtgccaaaagataatagtggaaccatggatttatttggaggtgcagatgatatctcttcagggagtgatggagaagacaaaccacctactccaggacagcctgttgatgaaaatggattgcctcaggatcaacaggaagaggagccaattcctgagaccagaatagaagtagaaatacccaaagtaaacactgatttaggaaacgacttatattttgttaaactgcccaactttctcagtgtagagcccagaccttttgatcctcagtattatgaagatgaatttgaagatgaagaaatgctggatgaagaaggtagaaccaggttaaaattaaaggtagaaaatactataagatggaggatacgccgagatgaagaaggaaatgaaattaaagaaagcaatgctcggatagtcaagtggtcagatggaagcatgtccctgcatttaggcaatgaagtgtttgatgtgtacaaagccccactgcagggcgaccacaatcatctttttataagacaaggtactggtctacagggacaagcagtctttaaaacgaaactcaccttcagacctcactctacggacagtgccacacatagaaagatgactctgtcacttgcagataggtgttcaaagacacagaagattagaatcttgccaatggctggtcgtgatcctgaatgccaacgcacagaaatgattaagaaagaagaagaacgtttgagggcttccatacgtagggaatctcagcagcgccgaatgagagagaaacagcaccagcgggggctgagcgccagttacctggaacctgatcgatacgatgaggaggaggaaggcgaggagtccatcagcttggctgccattaaaaaccgatataaagggggcattcgagaggaacgagccagaatctattcatcagacagtgatgagggatcagaagaagataaagctcaaagattactcaaagcaaagaaacttaccagtgatgaggtaagaccaaatttattcaattctaggggtttatcctgtactcaggagccaactgctttgaatgaagagctcacagatcaggcaggcacaaattagttgtctacacacgtcactgaaatccagtgagataaatgcagtaacaagacagagtgatccagaggaggatctgatacctgtgcttagagaggtcttagaaggctgcatggaggataagacttcttgctgggtgttgaagagtgatcagaagcttgctggtcaaactgtcctgtctctggtaggtcactccggatagatggaaaggcctataatactttgcatatggagtctgcaaaaatcgtgaccatctttatgttccccatgtcacactggtccactgcattgatgacattatgctgatggtatctgatctgatgagtaggaaataactccttgctttgacttccaattttttccagatgaagagactcattgttagttctctaattgtcccttctggcatctgcatctctctctggaaactgagatttcatattccttctcttctcctctctctgactgcaatcggggatattctttgtaaaagactgacgttgccacctgcctctcctcacttccactgcactccca

SEQ ID NO: 2098 - DNA, 994 bp, Homo sapiens
cggtggaattctgtcttcccgcgtccgccgattcctcctccttggtcgccgcgtccttggctggcgtcagaaaaatggctacaaacttcctagcacatgagaagatctggttcgacaagttcaaatatgacgacgcagaaaggagattctacgagcagatgaacgggcctgtggcaggtgcctcccgccaggagaacggcgccagcgtgatcctccgtgacattgcgagagccagagagaacatccagaaatccctggctggaagctcaggccccggggcctccagcggcaccagcggagaccacggtgagctcgtcgtccggattgccagtctggaagtggagaaccagagtctgcgtggcgtggtacaggagctgcagcaggccatctccaagctggaggcccggctgaacgtgctggagaagagctcgcctggccaccgggccacggccccacagacccagcacgtatctcccatgcgccaagtggagcccccagccaagaagccagccacaccagcagaggatgacgaggatgatgacattgacctgtttggcagtgacaatgaggaggaggacaaggaggcggcacagctgcgggaggagcggctacggcagtacgcggagaagaaggccaagaagcctgcactggtggccaagtcctccatcctgctggatgtcaagccttgggatgatgagacggacatggcccagctggaggcctgtgtgcgctctatccagctggacgggctggtctggggggcttccaagctggtgcccgtgggctacggtatccggaagctacagattcagtgtgtggtggaggacgacaaggtggggacagacttgctggaggaggagatcaccaagtttgaggagcacgtgcagagtgtcgatatcgcagctttcaacaagatctgaagcctgagtgtgtgtacgtgcgcgcgtgcgtgaggccctgccacgattaaagactgagaccggcaaaaaaaaaa

SEQ ID NO: 2099 - DNA, 994 bp, Homo sapiens; identical to SEQ ID NO: 2098

SEQ ID NO: 2100 - DNA, 5810 bp, Homo sapiens
ctgaggactgactggggttctgagactccctgtcccggaccgcagcgttaaaaggatctgaacaaagtctgctcaaatctcctgctgtgaaccagcagaatttttgaacaggtttcttcacatataaaaatctattgtaaaaatacggaaaagaatggcagcggaaacgcagacactgaactttgggcctgaatggctccgagctctgtccagtggtgggagtattacatcccctcctctttctccagcattgccgaagtataaattagcagattatcgttacggcagagaagaaatgttagcacttttccttaaagacaacaagataccttcagaccttctggataaagaatttctgcctatcctccaggaggaaccccttccaccattggctctggtaccctttacagaagaagaacagagaaacttttccatgtctgtaaatagtgctgctgtcctgcgattgacaggacgaggaggaggaggaacagtggtgggggctcctagaggtcgaagttcttcaagagggcgaggcagaggcagaggtgaatgtggtttctaccaaagaagttttgatgaagtagagggtgtttttggtcgaggaggtggcagagaaatgcatagatcgcagagctgggaggaaaggggtgacagacgttttgaaaaaccaggacgaaaagatgtagggagaccaaattttgaggaaggtggaccaacatcagtagggagaaagcatgaatttatacgctcagaaagtgaaaattggcgcatctttagagaggaacaaaatggagaagatgaagatggaggttggcgactagctggatcaaggagggatggagagaggtggcgacctcacagtcctgatggccctcgttctgcaggctggcgggaacacatggaacgacgtcggaggtttgagtttgattttcgagatagagatgatgaacggggttaccgaagggttcgctctggcagtgggagcatagatgatgacagggatagcttgcccgaatggtgcttagaggatgctgaagaagaaatgggtacatttgactcatctggagcattcctttctctaaaaaaagtacagaaagagcctattccagaagagcaggagatggacttccggcctgtggacgaaggggaggagtgctctgactctgagggtagccataatgaagaggccaaagaacccgataagacaaataagaaagaaggagagaaaacagatagagtaggagttgaagctagtgaggaaactccccagacctcatcatcatctgctagaccaggtactccttcagaccatcagtctcaggaagcatcacagtttgagaggaaagatgaaccaaaaactgagcaaacggaaaaagctgaagaggagactcggatggaaaatagtctaccagccaaagtgcccagcagaggggatgaaatggttgctgatgtccagcagcccctgtcgcagattccttcagatacagcctctcctcttctcatacttccacctcctgttcccaatcctagtcctactctccggccagttgaaacaccagttgtaggtgctcctggtatgggcagtgtttccacagaacctgatgatgaagaaggtctcaaacatttggagcagcaagctgagaaaatggtggcttatctccaagacagtgcactagatgatgaaagattggcatcaaaactgcaagagcacagagctaaaggagtgtcgattccattgatgcatgaagcaatgcagaagtggtattacaaagatcctcagggagaaattcaaggtcccttcaataatcaggagatggcagaatggtttcaggcgggctattttactatgtctttattggtgaagagagcgtgtgatgaaagcttccaacctcttggcgatatcatgaaaatgtggggaagggttcccttttctccaggtccagctccccctcctcatatgggagagctggaccaggaacgactgaccaggcagcaagaactcacagccttataccagatgcagcacctgcagtaccagcagtttttaatacaacaacaatatgcacaggttttggcccaacagcagaaagcagcactgtcttcccagcagcagcagcagttggcacttcttcttcaacagtttcagaccttgaagatgagaatatctgatcagaacatcattccctcagtaactaggtctgtgtccgtgccagatactggctctatctgggagcttcagccaacagcttcacagcctacagtttgggaaggtggtagtgtatgggatcttcctctggacaccacgacaccaggccctgccctggaacagcttcagcagctagagaaggccaaagctgcaaagctagagcaagagagaagagaggcagaaatgagggcaaaacgggaagaggaagagcgaaagaggcaggaagaactccgaagacgacagaagggaattcttcggcgacagcaggaagaagaaaggaaaaggcgagaggaagaagaacttgcccgaaggaaacaggaagaggctctgcgtcgccagcgggagcaagaaattgcattaaggcgacagcgagaagaggaagaaagacagcagcaagaagaagctcttagaagactggaagagaggagaagagaagaggaagaaaggcggaagcaggaagaattgttacgcaaacaggaagaggaggctgcaaaatgggcccgggaagaagaagaagcccagcgtcgattagaggagaaccggctgcggatggaagaggaggcagccagactccggcatgaggaagaagaacggaagagaaaggagctggaggtccagcggcagaaggagttaatgcgccagaggcagcagcagcaagaggctctccggaggttgcagcagcagcagcagcaacaacagctggcgcagatgaagcttccttcttcttcaacgtggggccagcagtccaatacaacagcatgtcagtcccaggccacgctgtcgttggctgaaatccaaaaactagaggaagaacgagaacggcagcttcgagaagagcaaaggcgccagcagagggagttgatgaaagctcttcagcagcagcagcaacagcaacagcagaaactctcaggttgggggaatgtcagcaaaccttcaggtaccacgaaatctcttctggagatccagcaggaagaggccaggcaaatgcaaaagcagcagcagcagcagcagcaacaccagcaaccaaacagagctcgtaacaatacgcattccaacctgcacaccagcattgggaattctgtttggggctctataaatactggtcctcctaaccagtgggcatctgacctagtcagtagtatttggagtaatgctgacactaaaaactccaacatgggattctgggatgatgcagtgaaagaggtgggacctaggaattcaacaaataaaaataaaaacaacgccagtctcagtaaatctgtaggtgtgtctaaccggcagaataagaaagtagaagaagaagaaaagttgctgaagctctttcagggagtaaataaagcccaagatggatttacgcagtggtgtgaacagatgcttcatgcccttaatacggcaaataacttggatgttcccacatttgtttctttcctgaaagaagtagaatctccttatgaggtccatgattatatcagggcctatttaggagatacttctgaggccaaggagtttgccaagcagttccttgagcgccgtgccaaacagaaagccaaccagcagcgtcagcagcagcagctgccgcagcagcagcagcagccgccacagcagccgccacagcagccacaacagcaggactctgtgtgggggatgaaccacagtacactccattcagtatttcagaccaatcaaagcaacaaccaacaatccaattttgaggctgtgcagagtggcaagaagaagaaaaagcagaagatggtccgagcagatcccagtttattaggattttcagtcaatgcatcatcggagcgactcaacatgggtgaaatcgagacgttggatgactactgagcacctgccagtggactggccatccctctcctgtctgccgactatggagtctccacctttggacacaacacttactcaccatttactctttatcactctgcaacaaatcacagaaccgatcatctcaggctttttcttctggccctttgtgtccaagattctttaatccatttttgttggtgaacatctcagactatagataagtggactggaccctgtgtcttgggggtggcagttgggattactccccaacaaggctgattttaggcagcatgtgttcactgtgctgtgatttcatctactgtctcccagaaagtgtgttgggatcggccattagcagcttgctttctcttgtcactttttttcttctattttggtttttcttcttctttttccccccatcagggcaaatggtctaactggtgcaatcatgaagagagttaatggttaacagacattggccaataacaaaacaccccatggactgtgactcgagtatccaacaggcagtcagagctctcccggtctgaaagttgcattgccactgctaactttgggattgcatcagagaggccctgagtggggttgagatgaggttggtttggtttgatgttacacactcctcacctgttctttctgagtgtcctttctctgaaaggatttatgtttttcttcgttagatagtgacttctgagcaagctgatctcccctggcatgctccaacctgattggacaaaggaagctctatggcctgggagagagactattcttaatttttctttcttacaaaaactgatttttcccataaatatttttacttcagaggactaggaccattttgttttgggcccttctgctgaaaatttgtctcgtttaagaggcagctagaatctttaccatatgtatgaatttgtataatttcatttttggatagggataaacttttgcttctgataaaagcctggaatttcatctggtcctcagagcattgcgtgtgtgtcttgctgtagcccggaaaaggttttgtgtaaagattctgggatggcaagttgtttgccttttctgaaaagagaacatacagaacctgtccatctttaagaccttcatccatggaatctactatacaggaggatgcagtgggctggaggggatgggcgaaaatgggagcaggaagcctggcctggcttctggtcatggcctcctaaaaccttaaacttcaagtagaaatgtactcaagccctatttataaacaaatacttttcctgcctccaccaaacccctacagaacatcacctggaattgccactcacactgggttggagtcattgggcagctgtgcctgtgcgagaggtgctgtggtctgggcagcccctggaaaagcacctttgctgcctgtcattgttgcctgaagaaggctggagttgctctgagagcagtttgggtttggagtattatatttggcttctatttttattattttggatcaccattctccctatcccttcttgcctccctcccttctaaacatgtgtaataactatacagagactgctacaaaattgtatatagtttttggatcaaatagcatgaggggagaggaaaccattaaaaattggggctcctactctcctttgctttgtaaattcaaaagttgggggtgggtaagagggatagttaaaatgtttacaaaactttaggctccctcgggaacttttgccagtgtggaggaaaataaaaaagaaattaaataaaaaaaaaa

SEQ ID NO: 2101 - DNA, 5810 bp, Homo sapiens; identical to SEQ ID NO: 2100

SEQ ID NO: 2102 - DNA, 1464 bp, Homo sapiens
caagcaagctgcctgctcagatggcagggaatgggggaaaacagggagacagtttcctgtttgagatgttgggagatgcttcgagtagtatatttactggaaatagacattcaacttggatgtccctttttggaaatgtgcctgcgtccagggctgggttggggccccattgaactttggctctgacacagctgttgccacactcaacggaactgaatctatgtttgtcttccccggcatccttcaccccaactctccccgccacaacatacatcccatgccagcctggggaccctcaaaggtggcttcatcattaggtttgtggctgggtcctactgaagtaagtcttggcactcagagggataggaattgaatgaagacatgagattcctctgcgggaggcctctctaggaaatctgtggactcacacgtttactaatgttgctgcagccccgcacccaccttggccttgggcagccatactctagggcttttgtaacctctccatgtgaggaactcaaattagacctgggtttggaggcggtgctccgagctggcctttgggggaggttttgtgcgaggcatttcccaagtgctggcaggattgtgtcacagacacagagtaaacttttgctgggctccaagtgaccgcccatagtttattataaaggtgactgcaccctgcagccaccagcactgcctggctccacgtgcctcctggtctcagtatggcgctgtcctgggttcttacagtcctgagcctcctacctctgctggaagcccagatcccattgtgtgccaacctagtaccggtgcccatcaccaacgccaccctggaccggatcactggcaagtggttttatatcgcatcggcctttcgaaacgaggagtacaataagtcggttcaggagatccaagcaaccttcttttacttcacccccaacaagacagaggacacgatctttctcagagagtaccagacccgacaggaccagtgcatctataacaccacctacctgaatgtccagcgggaaaatgggaccatctccagatacgtgggaggccaagagcatttcgctcacttgctgatcctcagggacaccaagacctacatgcttgcttttgacgtgaacgatgagaagaactgggggctgtctgtctatgctgacaagccagagacgaccaaggagcaactgggagagttctacgaagctctcgactgcttgcgcattcccaagtcagatgtcgtgtacaccgattggaaaaaggataagtgtgagccactggagaagcagcacgagaaggagaggaaacaggaggagggggaatcctagcaggacacagccttggatcaggacagagacttgggggccatcctgcccctccaacccgacatgtgtacctcagctttttccctcacttgcatcaataaagcttctgtgtttggaacagctaaaaaaaaaa

SEQ ID NO: 2103 - DNA, 3015 bp, Homo sapiens
tgcacgccggtcgcgcgcagcatggccaccaccgccacctgcacccgtttcaccgacgactaccagctcttcgaggagcttggcaagggtgctttctctgtggtccgcaggtgtgtgaagaaaacctccacgcaggagtacgcagcaaaaatcatcaataccaagaagttgtctgcccgggatcaccagaaactagaacgtgaggctcggatatgtcgacttctgaaacatccaaacatcgtgcgcctccatgacagtatttctgaagaagggtttcactacctcgtgtttgaccttgttaccggcggggagctgtttgaagacattgtggccagagagtactacagtgaagcagatgccagccactgtatacatcagattctggagagtgttaaccacatccaccagcatgacatcgtccacagggacctgaagcctgagaacctgctgctggcgagtaaatgcaagggtgccgccgtcaagctggctgattttggcctagccatcgaagtacagggagagcagcaggcttggtttggttttgctggcaccccaggttacttgtcccctgaggtcttgaggaaagatccctatggaaaacctgtggatatctgggcctgcggggtcatcctgtatatcctcctggtgggctatcctcccttctgggatgaggatcagcacaagctgtatcagcagatcaaggctggagcctatgatttcccatcaccagaatgggacacggtaactcctgaagccaagaacttgatcaaccagatgctgaccataaacccagcaaagcgcatcacggctgaccaggctctcaagcacccgtgggtctgtcaacgatccacggtggcatccatgatgcatcgtcaggagactgtggagtgtttgcgcaagttcaatgcccggagaaaactgaagggtgccatcctcacgaccatgcttgtctccaggaacttctcagctgccaaaagcctattgaacaagaagtcggatggcggtgtcaagccacagagcaacaacaaaaacagtctcgtaagcccagcccaagagcccgcgcccttgcagacggccatggagccacaaaccactgtggtacacaacgctacagatgggatcaagggctccacagagagctgcaacaccaccacagaagatgaggacctcaaagtgcgaaaacaggagatcattaagattacagaacagctgattgaagccatcaacaatggggactttgaggcctacacgaagatttgtgatccaggcctcacttcctttgagcctgaggcccttggtaacctcgtggaggggatggatttccataagttttactttgagaatctcctgtccaagaacagcaagcctatccataccaccatcctaaacccacacgtccacgtgattggggaggacgcagcgtgcatcgcctacatccgcctcacccagtacatcgacgggcagggtcggcctcgcaccagccagtcagaagagacccgggtctggcaccgtcgggatggcaagtggctcaatgtccactatcactgctcaggggcccctgccgcaccgctgcagtgagctcagccacaggggctttaggagattccagccggaggtccaaccttcgcagccagtggctctggagggcctgagtgacagcggcagtcctgtttgtttgaggtttaaaacaattcaattacaaaagcggcagcagccaatgcacgcccctgcatgcagccctcccgcccgcccttcgtgtctgtctctgctgtaccgaggtgttttttacatttaagaaaaaaaaaaaagaaaaaaagattgtttaaaaaaaaaaggaatccataccatgatgcgttttaaaaccaccgacagcccttgggttggcaagaaggcaggagtatgtatgaggtccatcctggcatgagcagtggctcacccaccggccttgaagaggtgagcttggcctctctggtccccatggacttagggggaccaggcaagaactctgacagagctttgggggccgtgatgtgattgcagctcctgaggtggcctgcttaccccaggtctaggaatgaacttctttggaacttgcataggcgcctagaatggggctgatgagaacatcgtgaccatcagacctacttgggagagaacgcagagctcccagcctgctgtggaggcagctgagaagtggtggcctcaggactgagagcccggacgttgctgtactgtcttgtttagtgtagaagggaagagaattggtgctgcagaagtgtacccgccatgaagccgatgagaaacctcgtgttagtctgacatgcactcactcatccatttctataggatgcacaatgcatgtgggccctaatattgaggccttatccctgcagctaggagggggaggggttgttgctgctttgcttcgtgttttcttctaacctggcaaggagagagccaggccctggtcagggctcccgtgccgcctttggcggttctgtttctgtgctgatctggaccatctttgtcttgccttttcacggtagtggtccccatgctgaccctcatctgggcctgggccctctgccaagtgcccctgtgggatgggaggagtgaggcagtgggagaagaggtggtggtcgtttctatgcattcaggctgcctttggggctgcctcccttcttattcttccttgctgcacgtccatctcttttcctgtctttgagattgacctgactgctctggcaagaagaagaggtgtccttacagaggcctctttactgaccaactgaagtatagacttactgctggacaatctgcatgggcatcacccctccccgcatgtaacccaaaagaggtgtccagagccaaggcttctaccttcattgtccctctctgtgctcaaggagttccattccaggaggaagagatctataccctaaggcagataggcaaagaagataatggaggagcaattggtcatggccttggtttccctcaaaacaacgctgcaga

SEQ ID NO: 2104 - DNA, 1565 bp, Homo sapiens
  misc_feature (1)...(1565): n = a,t,c or g
tggacccctagtccagtgtggcggaattcccagaacgtgtgcagctcagccagccacagaactggaatttttcaggagcagggggagcatggagtttggactttgctgagcaactgaagtggagcgcagagcttgctcgcttaggagagagcatcatggatggcaaacaagggggcatggatgggagcaagcccgcggggccaagggactttcctggcatcaggcttctttcaaacccattgatgggcgatgctgtgtctgattggtctcctatgcatgaagctgcaatccacggacatcagctgtctctgaggaacctcatcagccaggggtgggctgtgaacatcatcacggcagatcatgtttccccactccatgaagcctgtcttggaggtcatctctcttgtgtgaagattttattaaagcatggagctcaggtgaatggtgtgacagcagactggcacactccactgtttaatgcttgtgtcagcggcagctgggattgtgtgaatttgcttctgcagcacggagccagcgttcaacctgagagtgatctggcatcccccatccatgaagctgctaggagaggccacgtggagtgtgtcaactctcttatagcttatgggggcaacattgaccataagatcagccacctgggcactccactctatttggcttgtgaaaaccaacagagagcctgtgtcaagaagcttctggagtcaggagcggacgtgaaccaagggaaaggtcaggattccccacttcatgcagtggccaggacagccagtgaagagctggcctgcctgctcatggattttggagcggacacccaggccaagaatgctgaaggcaaacgtcctgtggagctggtgcctccagagagccccttggcccagctcttcttggagagagaagggcccccttctttgatgcagttatgccgccttagaattcggaagtgttttggaatccagcagcatcataagataaccaaactcgtcctcccagaggatctgaaacagtttctcctacatctttaaatgcatctagggaatggattcacaaacgatgtgaaaacattattgagtgttgtagccactagaattttaaaatcaagttggatttatagagtttgactagttttttcgattagatttgtatttgttataaacttgtttatggagtttgactaattttttctattcaatttgtatttgttaaactcaagccagggtggaaagacactgcatacgtttgtattattagttagaaggcatgaagacttttttccctgcttggagagtgtcataagttattgttttgcatatctactgcatgccaagcactttttgcatcatctaatttagccctcacagccactgggtcaagatgtccaattttccagagtaaggatagaggagtcaaattcaaatacaggttttctgacattaacttatgtgatgacttgatcgaggcaggcttttccagcatcactgtcctggttccatctctgctatatggaagaaaaaaagaaacataggcatggtcaatcaaannnnacgccg

SEQ ID NO: 2105 - DNA, 435 bp, Homo sapiens
agctatttatccctaggtcctttcctcctgcacgtcagctttgagccccgagctggtgcttctgctctctgagacatggcaggcctgatgaccatagtaaccagccttctgttccttggtgtctgtgcccaccacatcatccctacgggctctgtggtcctcccctctccctgctgcatgttctttgtttccaagagaattcctgagaaccgagtggtcagctaccagctgtccagcaggagcacatgcctcaaggcaggagtgatcttcaccaccaagaagggccagcagttctgtggcgaccccaagcaggagtgggtccagaggtacatgaagaacctggacgccaagcagaagaaggcttcccctagggccagggcagtggctgtcaagggccctgtccagagatatcctggcaaccaaaccacctgctaa

SEQ ID NO: 2106 - DNA, 4746 bp, Homo sapiens
  misc_feature (1)...(4746): n = a,t,c or g
ttttttttttttattatatgaatattttaatgcaaaatgcttaacacttaaaattagcaaagcgtcatttaaattaaaattccatttaactaaagatggttaaccccaagaaattgtacagtagttgatttctgctatataatgccagtcctatgccatacaataagaactgcaacattagctgtcacttcctccattgctcttctggaccctaagggatgagggaggggactcagacacaaaacacaacccaaataaactgtgcagtgattcctaatagttataaacccaatctaagttgtccaaacagctgaagaataactgcaggtattgttccagagctgatacgaggttttgcttttacagcctggtaaaagttctgcactaggtgagaagtcacagtttaaggatgcatgttctgtaaatagttactacatatacacatttactgtctgtaaacactagaaatatacattagacagagtaccctcacaagttgggtacagtttaaaaaagaagatgaggtaacatgaatctcaaagtccacaggaatcctgcctgaagagtttgaacagctgcctgtaattcatttccaatgtgcagggagattaaggtttgccaaaactggattcactggctttcagcatagcaactgcatctttcactgcatggtagataacattcttcacctgtaatttatcttcgtgattggtatgagtctgtgacagatatcggaattcctgagtaagccagaagcagtgtttaacatgctctggagaaacaaaatcttcagccactttgatgcagctatataagttatgaacctgatgtggagctcctgccgggataaacaccacatccccaagaaactgtacaatagcccagccttgaactccatactcttgatgaagacgttttcttaatgatcggtctaaataccagctttgatcatgaataggatcgtggtctgctgggttttcttgaccttgctcttctgatacctttttaagaaattcccttatcttctccgtgtcctttgcagcatatatgtgccacagtgctcctggcttctcttttccttcaataaatcgctttattgtgagttcgtcagaatctccatcttggatggtcttaaggacttcttcttcttgctcacactgtcctttgggaattcccacatagaccatgacattagctgcatcagatacatctaagtgaagatttgttgttccatatttccgatcttcaggagtgattaatccataagcattatacatcttggggcccagatctggccgaacaaagtagtttggcagcctagaggccaaattcagtttgccatctcgccttgtgtactcgggcagtggaatgttggccatcagatcatcaaacctggaaggcatcatatctctaaaatcttctcctggtggccagtccttaagtttcaacaccattggttctttttcatttttcaaacgatttggaacatcttcaaatccatcccagaagtctcctactgtggctcctgtgatgatttcattggtcctacaattaactaggtctacttcctgctcaccaaactctttcctgaaggattcaggtttccaaagttcagagttcaatttatgatgcactccagacaccatcactggctgcccttgtttccagcactccctaaacacattccagttgctcttattgttggggtcttgcaagcacagcaagcgattatcacaaagccaatagtgaggagtgtcaaagcccagaatgctgggcttgatggttagtccttgaggcctcttagataaatcagaagtcgtcttattttgcaccaaagaggcaaagatgtcatcaaggatttttggtgtattcttgagtccattttctgtctttcctgtagaagaattcaagagattccggaggaaaccagaattgttgttgcttacgggtgtcaaaattgtgctgttaaacgtatggaggactgtgctggatttgcttaaaggtgggaggggtggaaggcatttgatttcattctttaaaattggcattgttggttgtttttccttgttttccttgttgacattcccgctggttaggtcggccagccagtttagaggagatgtgctggctggacaggcaggcttcatgctgccggctggcttggaggctgcttccccacccacagctgctggctccaacactgagggattctgctggagcactgcaccaagagtcggtttttctccagctaaagaagtctgttttaggtcttcctttgaggctggctttgaaaagagtttgaattgcctgtttgaacaagggcagtttgcctttattccccatttcgctcttacagaatgaacaatgtctccaacatcatagagtgcttttccaggaatgatctgtgtgggcattaagttctctggttcatgtatctgactcttcacacattttagccaagagaaagtcttgtaagcagcaccctgttggcaattctttctcttcatccggtagcagtccacacatactccaaacccacaccgaggacacacccagtgcaggttgaagatggtggtgtcgcacacatcacacatttctcgaacacctttgacagctcgcttccaagcaacctgtctgtgtggctcaatagttgacatagcttccttttcagaaatcaccatttgacagaagtggtctccaatgttggccaagatgtactttgctgtgtccaaatcaatccccacaacgtttttggttaaaggtaaccacaagccaattgcttcattgtcatacttgtttggtgttaagaagccttctacccgcaacacaccatgtttgttgaattgtaacctcctgaagtgaaagaagcggcaaaacacaggtgagtccttctgttgctccttatccttgcggagactgtccaagcgacactctcggcatttaggcaactgtgccacgatgttcacacaagaatcatcctgtacgaaggcctcgccactctgttgcagctttttgagtttagctgggtctgtcaaaaccgacttcctggatggggcattctggattttattgttgcttcttgaacaacagctttcattatctacttttactgaagattcctttaaattctgtgatcggcaagctaaagctgaaggttctaccttttttcctgaacagttattagggctatcactattgacacctgctttcacttctggtgcatttgaaacatccgatggggaaggtgcatgttctaggtgcttctgcagttcaggaggattggcaatttccaattctgccttagaagaagcctttgtaggtaagcactccttaggaaggccagtcaatgcttgtggaacagactccaatctgttttcctgatcagtgtttgtcttaggctgagtacagctgccttttggctcagtcagaattttcaagtctccagttccaatctgagaggactttgagagcaaccctgctttgcagacatctggttttgttctcagagcttcagactttgtatttagacaggaagaaatttcctctggtaaactttgtttatgacatccttgaggaatttttgctccaaggttaggtggagagttggcagcctggggagtactttgctgtcttgggtccttactaggtggagttgctgcagtacagccaagcagtatctccttaaaaactgttgtaggtacagactgcacaggacacatactgggagaggcctcagagcaagattttgcttgtttggaaaccagggttccattattctcagaagacttgcgttttacagctccaattcttgcagaattaccacatgtcacaaggttatcgtgtacaacttcaacatgaatcagtgacggatcaacaattttcagtgctggaatctcctcacagttgacttgaagagtttttgatgctgggtttccatttacaacggttgctgaaaaccactgagtagatgggtccaagctataaatttttacttctgaaccaactaagtttttgtcaccttttaaaagatggctttcatctaaatgcttcacaatcaaagcttgaaattctttactgacaatctgattatccgtaagagaaagtcgaagactgtttacatcctgtataggcttcaaaaggtctttagaaagaaatactctttgttgatctcccagaaagcgaacagaagttatggatcccaaaccagctttgtccaacagaggtttgtacgttattgcaggccactgtacaattcgttcagaaatttcaggtgactttcgttcagctaaaaccaaattatgttctactaaaaatgctctccttagaaggctgtagacttctatccatcttcttttcctccaagattccccatcaaattccacacacaccttcagatccttcttggtaacgtcggtgtgggaaacagctcgaatggtcccggagagccagggccactcggcgacgcgctccacgtcccagctgtcgtggctgccatcgctgccgtcggctgcggacagactgagaaacctcctccccaccaataccggccaactttctccgagcgtgagcaccatggtttccacgcctgcaggaagagctcctcccccgcctcccgcctccatgagtcaccggcggcagccgccgtttccagccgcctagccgactccagcgctgacacgaaatcgtcgacccggcaattccggnccggtaccgcgtgcgacaggctatcaaaggggnctcacacgc

SEQ ID NO: 2107 - DNA, 2093 bp, Homo sapiens
agtccgtcgcgtgctgagggagactcaggaggtggagccggccgggtgctcgagggaaggagactggaagctggttccggcgtgaggagagtctgaaaaaggggagcgcggagaggaggctggaagaggaagatgcctagcacagaccttctgatgttgaaggcctttgagccctacttagagattttggaagtatactccacaaaagccaagaattatgtaaatggacattgcaccaagtatgagccctggcagctaattgcatggagtgtcgtgtggaccctgctgatagtctggggatatgagtttgtcttccagccagagagtttatggtcaaggtttaaaaagaaatgttttaagctcaccaggaagatgcccattattggtcgtaagattcaagacaagttgaacaagaccaaggatgatattagcaagaacatgtcattcctgaaagtggacaaagagtatgtgaaagctttaccctcccagggtctgagctcatctgctgttttggagaaacttaaggagtacagctctatggacgccttctggcaagaggggagagcctctggaacagtgtacagtggggaggagaagctcactgagctccttgtgaaggcttatggagattttgcatggagtaaccccctgcatccagatatcttcccaggactacgcaagatagaggcagaaattgtgaggatagcttgttccctgttcaatgggggaccagattcgtgtggatgtgtgacttctgggggaacagaaagcatactgatggcctgcaaagcatatcgggatctggcctttgagaaggggatcaaaactccagaaattgtggctccccaaagtgcccatgctgcatttaacaaagcagccagttactttgggatgaagattgtgcgggtcccattgacgaagatgatggaggtggatgtgcgggcaatgagaagagctatctccaggaacactgccatgctcgtctgttctaccccacagtttcctcatggtgtaatagatcctgtccctgaagtggccaagctggctgtcaaatacaaaataccccttcatgtcgacgcttgtctgggaggcttcctcatcgtctttatggagaaagcaggatacccactggagcacccatttgatttccgggtgaaaggtgtaaccagcatttcagctgacacccataagtatggctatgccccaaaaggctcatcattggtgttgtatagtgacaagaagtacaggaactatcagttcttcgtcgatacagattggcagggtggcatctatgcttccccaaccatcgcaggctcacggcctggtggcattagcgcagcctgttgggctgccttgatgcacttcggtgagaacggctatgttgaagctaccaaacagatcatcaaaactgctcgcttcctcaagtcagaactggaaaatatcaaaggcatctttgtttttgggaatccccaattgtcagtcattgctctgggatcccgtgattttgacatctaccgactatcaaacctgatgactgctaaggggtggaacttgaaccagttgcagttcccacccagtattcatttctgcatcacattactacacgcccggaaacgagtagctatacaattcctaaaggacattcgagaatctgtcactcaaatcatgaagaatcctaaagcgaagaccacaggaatgggtgccatctatggcatggcccagacaactgttgacaggaatatgggtgcagaattgtcctcagtcttcttggacagcttgtacagcaccgacactgtcacccagggcagccagatgaatggttctccaaaaccccactgaacttggaccctttctagtctcaaggggattccagccttcagaaggttcttgggatatggaacaggccgtgcacaactttgacatctggtcttgctccatagagcacaactcaagatagaccatgagacagcttgagcctcaggattcttgttcttcctcttatcttccttttgtggtttttaatttgaagaccccagagaattccattacataatgattttgcccttgttataaatgttaccctaggaaaaaaa

SEQ ID NO: 2108 - DNA, 2652 bp, Homo sapiens
gacgatttcgtgaggcctccataaccgccagattgaaaactgactgttcaagactgtctaaatcctacttctggatgactgtgcagtcagaattctcctgaagattgggttaatttcagctcagaaaagcagaaacgatacccttggtactggactggaagaaaactacgaagtgagagagccatgaagattcaaaaaaagctgactggctgcagcaggctgatgcttctgtgtctttctctggagctgctgttggaagctggggctgggaatattcactactcagtgccggaagagacagacaaaggttccttcgtaggcaacatcgccaaggacctagggctgcaaccccaggagctggcagatggcggagtccgcatcgtctccagaggtaggatgccgcttttcgctctgaatcctagaagtggcagcttgatcaccgcgcgcaggatagaccgggaggagctctgcgctcagagcatgccgtgtctcgtgagttttaatatccttgttgaggataaaatgaagctttttcctgttgaagtagaaataattgatattaatgacaacactccccaattccagttagaggaactggagtttaaaatgaatgaaataacgactccaggtaccagagtctcattgccttttgggcaagaccttgatgtgggtatgaactcactccagagctaccaactcagctctaaccctcatttctccctggatgtgcaacagggagccgatgggcctcaacatccagagatggtgctgcagagtcccttagacagagaagaagaagctgtccaccacctcatcctcacagcttctgatgggggtgaaccagtccgttcagggaccctcagaatttacattcaggtggtggatgcaaatgacaatcctccagcatttactcaggcacaataccatataaatgtccccgaaaacgtgccgctgggtactcagctgctcatggtaaatgccactgaccctgatgagggagccaatggggaagtaacgtactcctttcacaatgtagaccacagagtggcccaaatatttcgtttagattcttacacaggagaaatatcaaataaagaaccactagatttcgaagaatacaaaatgtattcaatggaagttcaagcccaggatggtgcggggctcatggctaaagttaaggtactgatcaaagttttggatgtaaatgataatgccccagaagtgaccatcacctctgtcaccactgcagttccagaaaactttcctcctgggaccataattgctcttatcagtgtgcatgaccaggactcaggagacaatggctacaccacatgtttcattcctggaaatttaccctttaaattggaaaagttagttgataattattaccgtttagtgactgaaagaacactggacagagaacttatctctgggtacaacatcacaataacagcaatagaccaaggaactccagctctatctactgaaactcacatttcactactagtgacagatatcaatgacaactccccagtcttccatcaggactcctactctgcctacattcccgaaaacaaccccagaggagcctccatcttctctgtgagggcccacgacttggacagcaatgagaatgcacaaatcacttactccctaatagaggacactatccagggggcacccctatctgcctacctctccatcaactccgacactggggtcctgtatgcgctgcgatccttcgactatgagcagttccgggacatgcaactgaaagtgatggcgcgggacagtggggatccgcccctcagcagcaacgtgtctctcagcctattcctgctggaccagaacgacaacgcgcccgagatcctgtaccccgccctccccacagacggttccactggcgtggagctggcgcctcgctccgcagagcccggctacctggtgaccaaggtggtggcggtggacagagactcgggccagaacgcctggctgtcctaccgcctgctcaaggccagcgagccgggactcttctcggtgggtctgcacacgggcgaggtgcgcacggcgcgagccctgctggacagagacgcgctcaagcagagcctcgtggtggccgtccaggaccacggccagccccctctctccgccactgtcacgctcaccgtggccgtggccgacaggatccccgacatcctggccgacctgggcagcctcgagccctccgccaaacccaacgattcggacctcactctgtacctggtggtggcggaggccgcggtctcctgcgtcttcctggccttcgtcatcgtgctgctggcgcacaggctgcggcgctggcacaagtcacgcctgctgcaggcttcgggaggtggcttagcgagtacgcccggctcgcactttgtgggcgtggacggggttcgggctttcctgcagacctattcccacgaggtctccctcactgcggactcgcggaagagccacctgattttcccccagcccaactatgcggacacactcatcagccaggagagctgtgagaaaaagggttttctatcagcaccccagtctttacttgaagacaaaaaggaaccattttctcaggtaaacttttgtgatgaatgtatcagctatctagagaaaaataattct

SEQ ID NO: 2109 - DNA, 4675 bp, Homo sapiens
ccacctgataaccaaaaacttggcttgttggaagccttattaaagattggtgattggcaacatgcacagaacattatggatcagatgcctccatactatgcagcttcacacaagctaatagcccttgctatttgcaagctcattcatataactattgagcctctctaccgaagtgtcacttcatgggccgtggaccatgcaggcttcttagagagtgacccctgtgactccacagtggggcacctgctgagcagagttggagttcctaaaggtgctaaaggctcacctgttaatgctttgcaaaacaagagagcaccaaaacaagctgagagctttgaagatttgaggagagacgtgttcaatatgttctgttaccttggtcctcacctttctcacgatcccattttatttgcaaaagtggtgcgcataggcaagtcatttatgaaggagtttcagtctgatggaagcaaacaagaagataaagaaaaaacggaagttatccttagctgtttgcttagcattactgaccaggtactacttccatctctttctttgatggactgcaatgcttgtatgtctgaggaactatggggaatgtttaaaacatttccatatcagcatagatatcgtctgtatggccagtggaagaatgaaacttataacagtcacccacttttagtaaaagttaaagctcaaacaatagacagagccaaatatatcatgaagcgcctaaccaaggaaaatgtgaagccttctggaagacaaattgggaagttgagccacagcaatccaaccattttgtttgattatgtatgttttgagatcttgtcacaaatacagaagtatgataacttaataacacctgtagtagattcattgaaatacctcacttcactgaattatgatgtcttggcctgtatcctttcaaattgtatcattgaagctttagctaatccagaaaaggaaagaatgaaacatgatgacacaaccatctcaagctggcttcagagtctggctagtttctgtggtgcagtttttcgtaaatatccaattgatcttgctggtcttcttcagtatgttgccaatcagctaaaggcgggcaaaagttttgacctgcttatattgaaagaagtggtacaaaaaatggcaggaatagaaattacagaggaaatgacaatggagcaactagaggctatgactggtggagagcagctaaaagctgagggtggttattttggtcagatcagaaacactaaaaaatcctctcagagattaaaggatgctctattggaccatgatcttgcccttcctctctgtctgcttatggctcagcagagaaatggggtaatctttcaggaaggtggagagaaacatttgaaacttgtgggaaagctctatgaccagtgtcatgataccctggtgcagtttggtgggtttttagcatctaatctgagcacagaagattatataaagcgagtgccttcaattgatgtactctgtaatgaatttcatacaccccatgatgcagcatttttcctgtctaggccaatgtatgcccatcatatttcgtcaaagtatgatgaacttaaaaaatcagaaaagggaagtaaacagcaacataaagttcataagtacattacatcatgtgagatggtgatggcgcctgtccatgaagcagtggtctccttacatgtttccaaagtctgggatgacatcagccctcaattctatgctacattctggtcattgacaatgtatgaccttgcagttccacacaccagctatgaacgagaagtcaataaacttaaagtccagatgaaagcaattgatgacaatcaggaaatgcccccaaataaaaagaaaaaagagaaggagcgctgtactgcccttcaggacaagcttcttgaagaagaaaagaaacagatggaacatgtacagagagttctacagagattgaaactggaaaaggacaactggcttttagcaaaatctaccaaaaatgagaccatcacaaaatttctacagctgtgtatatttcctcgatgtattttttcagcaattgatgctgtttactgtgctcgttttgttgaattggtacatcaacagaaaactccaaatttttccacacttctttgctatgatcgagttttctctgacataatttacacagttgcaagctgtactgaaaatgaagccagtcgatacggaaggtttctttgctgcatgttagagactgtgaccaggtggcatagtgatagagccacatatgaaaaggaatgtggaaactatccaggattccttaccatattacgggcaactggatttgatggtggaaataaggctgatcaattagactatgaaaattttcgacatgttgtacataaatggcattacaaactaaccaaggcatcggtacattgccttgaaacaggcgaatatactcacatcaggaatatcttgattgtgctaacaaaaatacttccttggtacccaaaagttttgaatctgggtcaagctttggaaagaagagtacacaaaatctgccaagaagaaaaagagaagaggccagatctatatgcattggctatgggctactctgggcagttgaaaagtagaaagtcatacatgatacctgaaaatgagtttcatcacaaagacccccctccgaggaatgcagttgccagtgtgcaaaatgggcctggtggtgggccttcttcatcatcaataggaagtgcatctaaatcggatgaaagcagtactgaggagactgataaatcaagggagagatctcagtgtggtgtgaaagctgttaataaagcttctagtaccacacctaaagggaattcaagcaatggaaatagtggctctaacagcaacaaagctgttaaagaaaatgacaaagaaaaagggaaagagaaagaaaaagagaaaaaagaaaagactccagctactactccagaggccagggtacttggtaaagatggtaaagaaaaaccaaaggaagagcggccaaataaagatgaaaaagcaagagagaccaaggaaagaacgccgaagtctgacaaagagaaagaaaaattcaagaaggaagaaaaagctaaagatgagaaatttaagaccactgtccccaacgcagaatcaaaatcaactcaagaaagggaaagagagaaggagccatccagagaaagagatatagcaaaggaaatgaaatcaaaggaaaatgttaaaggaggagaaaaaacaccagtttctgggtccttgaaatcacctgttcccagatcagatattccagagcctgaaagggaacaaaaacgccgcaaaattgatactcacccttctccatcacattcctccacagtaaaggacagtctcatcgaactcaaggaatcttcagcaaagctctacattaatcatactcctccaccactgtccaagagtaaggagagagaaatggacaagaaagatttggacaagtcaagggaaagatccagagaaagagagaaaaaagatgaaaaggacaggaaagagcggaaaagggatcactcaaacaacgaccgtgaagtgccaccggacttaaccaagagacgtaaagaggagaatggaacaatgggggtttcaaaacataaaagtgaaagtccttgtgaatctccttatccaaatgagaaagacaaggaaaaaaataagtcaaaatcttcaggcaaagaaaaaggcagtgattcatttaaatctgagaagatggataaaatctcctccggtggcaaaaaggagtccaggcatgataaagaaaagatagaaaagaaagagaaacgggacagttcaggaggaaaggaagagaagaaacatcataagtcctcggacaagcacagataatgaagactttccatcaaggtgagatcggactggaactgttcggctgcgaccagaaatttattttcctgagtaaattgccgagaattaagaatgaagagggccatttgcatctccttaaattattcagttacctgctttattgctccatgtggaaaacttaaaattgttaagttgtgcattactgtattttaacttgttgcttagtttctacatgtttattttcagtaatggctgaaagtgttaactgttccatacttttagcacaatgtgctgcataaggttacctgtgtacagagttttactttagattaactaaatattgcctgggttcagtttttatttccattctgaaatgcttcctttttattgtttgaaactgaaaataaacaattgttgaacccttttgattttacctcattttaaaactgttttaatttattatttggcttgttcttaatattagtcactaaaagcagtgggagcattgtcttatgaaatgcttaggaatcattttatatagtacatgtacaacattaaacgtgtttaaaaaagaaaaaggtaccagcgatcacttgtcccttgccattttttcttgtaattatgttagacaaatcttggcggcggggggatcaaaacataattgttttaattctacagctgtaggagctttgtattgctgaactttcatctggaaaagtttcacagtgacatttttaaaagagaatttttttatctgccgaattctaccagtgtaaccttttttctaaataaacaatagttttctcaaatggttgtaaaaaaaaaa

SEQ ID NO: 2110 - DNA, 1463 bp, Homo sapiens
cgccatgcttggcacgagggagcccagccggcgcggagcgggagcggtgcaggctgaggtctccgagcggctcgccatggctggcccgcagcagcagcccccttacctgcacctggccgagctgacggcgtcccagttcctggaaatatggaagcactttgacgcagacggaaatgggtatattgaaggtaaagagctagaaaactttttccaagagctggagaaggcaaggaaaggctctggcatgatgtcaaagagtgacaactttggagaaaagatgaaggagttcatgcagaagtatgataaaaactcagatgggaaaatcgagatggcagagctggcgcagatcctgccaaccgaagagaacttccttctgtgcttcaggcagcacgtgggctccagcgccgagtttatggaggcttggcggaagtacgacacagacaggagtggctacatcgaagccaatgagctcaagggattcctgtcagacctgctgaagaaggcgaaccggccgtacgatgagcccaagctccaggaatacacccaaaccatactacggatgtttgacttgaacggggatggcaaattgggcctctcagagatgtcccgactcctgcctgtccaggaaaacttcctgcttaaatttcagggcatgaagctgacctcagaggagtttaacgcgatcttcacattttacgacaaggatagaagcggctacattgacgagcatgagctggatgcccttttgaaggatctgtacgagaaaaacaaaaaggaaatgaatattcaacagctcaccaactacagaaagagcgtcatgtccttggcagaggcagggaagctctaccgcaaggacctggagattgtgctctgcagcgagccccccatgtaaagtggggacgggggctgcttctccacctcccccaaaccctgcttctgctgccctgatgcgtctacccagactcagagaccgtgagcgccccgcccccacccctacagcctgcacacacctgcctgcagagcaggaaatgagagatagaggatgggcagctggggggctgtcctgagccccctgcacccacccctgcccaggcagtctttgctcagtggatcacacacatggaaggtgatgggggcatgggtggagggtccctaattctcttcgctgtgatgcatgagctccctcgctgtatgatttaggcttctatgtccaacagagtggactcttccctctcgctcccctctgccggtcccccatgccaccacccaccccaaacttccaggttccatccaccaccttgccaatggtgtagctgtcctctcagaactcctgtgtgtggaaggcacccgccctttccttgccttctttactcggcgtgctccttttctctttgggtttcttgtttaccaaagaagagtttacagacaataaaatggaaaggtcctgctgtggaaacttaaaa

SEQ ID NO: 2111 - DNA, 1916 bp, Homo sapiens
ttttttttttttacaacaagtccaacacatatgctttatggttctgtttcaaaaacatgaaaacccaggcccctaggattcaagtgatgttgagaggcagaaaggatggagaagttgttggcgccagcatgtggggcaagcagccagacctcaggccctcactctaggcttcaaggtggctgggcttgacttctggccaagggctgctttttcccgcctgcggcccacctgaggccagaccttgcctgaggaaagggcctgtggtgggggggggaaagctcaggcagaaggaagacgtggccaacggcatgcccatgaggaggtaattgagcagctcctggttccggcaagggcggtgggtaaggagccaggcccgaggaagtcttaagggtcccctctccacaagctctggtggggccccctgctcccctagccaactgggttgctcaactgccttctatgctccctcctgaagccagcccctgggagagaacatctgaaggcaagaaggaaagagagccctgcctaagcttcttcctccctgcttggccaagtgggagaagcagctgaggtcctttgtgtaactgaggaagcacggaggagctggaatgcctaccagctcggagagggcacttgagagggtctatgaacaaatctgtctaaaagccacgtttgagctaaaagcatcagtccatccctcagccccagctctgtgcgggccaagaatccagaaggcagcaagcaaggcctatctcccaagcctggaggtggttgtggagctgctctgcctgagtcttcagatgctggaattcctcttgaatgaagtccgtcagggctttccgcatctccacagccgacttgttctccgcccggagccgctcgagtacaggcagggcactgaagggcttcccgatcagcacagtgattttctgtccaaagcgggggaagtagggcggactgttaggaaggacgtcattcattccgacatgccacaggggcaggatgatggggttgagatgacactcagcaatcaggcgcccgattccccacttgaaacgcaggaattcggaactcatgttcactttcccttctgggaagatatgcacccagtccccatggttgagcttctccaaaatgaagtccatccccttctggtagacgccatctcctttctctcttctttttccagcacctggcatgtgcctgcctgtgtctagaacacctttcccctcattctctgcttggaaaaattctgctcctcggcacacaggcacacacttgcccaagctgaagaagtgggagtgtagctccttggtgaagcagatgtctgcagctgcaggggtccaacgcatcaacttcaggttccagatgtggcggagtttcaggatcccccagagatgagggtcgtccatgcaggactggtgattggacacggtgatgaggggcgtggccgggcctcgcttctcgatgagctcgtacagcacctccctgttgtgcacggtcaggtggttcatgtacttggtccagaagcagctgtaggtgcccaccaagcccatgacgacgctgctggccagggtccaggtgagcggcggcaccgcggggaacggccacttcacgtgcagaggcatccccacccggcccgcggccggcgctcccagcgccccgggccggcctgtggggcgcctctaggtctgcgacctcgaccgctcgagacactggcccctgactggcccgcgcacggacggacgggggcgcggcgcaacaggggactggaccgaggtcccttcgcaggtcaggccggagcagcgcccggccccgctctctcgtcactggggagcggtcgccggggtcacaggccgtgggcgcgctgcggaacgggaggaaacgggaaggcgggcgctggcaccccggcccgg

SEQ ID NO: 2112 - DNA, 6641 bp, Homo sapiens
cacacgtatatatagagaaacactcaaaaataaatatttatccagacaaaaggaaatagcgggccgccccccgtttttcccagggaaattggataaaaaacagcccagggggggggcccgagaaacaaaaaaaagaatttgtgtatcgggccgcgggggggaagtaaatttgatatccttaaacccgccactcttttttttttttttctttttattattctttattggtcctaccaatgtgactctttacccaggcccactgttcctatgcgcactggctttgtaggcattcacatcatatgtctgtgtcctgaaaatctcaattaatttctccttcctattccttttccatgctctgcctcattttctcagaaattgaaggcatttgattattatttttttgtttggggtctgtgtaaagggttccttgggcaggaggaacatggcatatggactttaaaataaagaccaaacatttctggacacttaaggttaatgccaccagaaaaaaataccagttactccagaccatccattggcaaattaaatacccccatacagatgaagttatctcaaatgtaacaatatttcttatgaatcaacactgtaacggaaggtaaaaataggagtccctacaactaggaataagaaatgcttattccaggaaacagaattcttttatttttgtcatttatattattataatttttccttttttggagaaggaaggacagtttttcttcctccaagagtaccaatttgaccactcccactaacctcactcagcaaacaaaacaggatgtagacctggtttgctaaggagttttaatgagttctgtttcctgaaattaacagtgattagttacaccaagcaagagaagatataatgtctcgctttcacatttgcaaagaatactatggctaaccctcatcccctactgcgcatgccaacacagcgtcggccctcctgataccctcagctcttcacaaacgtggcgttcatacagcttgctcagcttgtcccagaaggtccatttggttcccaaagcacactcaaggttttgtgtttgctttcattttctaagcccctgaatttgcaagtaaagaatcactgactaacagaattttgcacaatgactgttttctttccctcaatgaagatgcccaggtctgggtgtgaggagcacctgcctcacctgctgtccacgctggccttcagcatgcccactagctcttccctgctcgcttttgagaatgatctgtgctgggacacctcccttaactgatgaaggcactactggcaatgattactaacaaaaaggtgttgaaagagaacaccctaaaaatcgacgactgtagaattttctaagtgtaccacaatttggcacaacaaccagagtaacaaaacaattccaatttggaattttattggtacagttgtataaaattctgttaatcagtcatgcttcacaacgtcctaaaacccagaaaattctggaatttgtaggtaatactactcattcaataatttatctttttttttcaagtgcctattactgttttaaccagagcaaaggtcaagttttcttcttgttacattgaactattcctaagaataataataatacaatatgaaaaaccccagaatctgaataccctggatttcttaatgaacatggcatttaaaatctgtaatttcaaacatgaaccacaatgccgtatgatctaaaggctgctgaaccacagcgtggatacacttagctgagctcctcgctgggtcaaagcactcatctccgagtctaaagctacacgctatggagcacacagctctgcctcgtgctgacaccagacaaacacggtgggagctgaggcggacagctacaggaccacgagcatagaccacggcacctgagaccgtctctacgcgaggaattaaggaagcaaatataatatcaaaatatcaaaagtgcacaggttgatcggataaaaaaagaacatgtgtaacaaggagcccccgtggtgggcgtttccagtgggctcctggcgagcctggcagccagggaagaagggtcttcggcccatacagaggcctttccacgcagcagctcgcagcatgctcaacattaaagctttttttcctcccattaaaaacctggggaatgctattttgaaaagaattgcagtggcatatccaaaaagtttctaagtgggcttttaggttgcccttccttcctccttgtgggccacgagagggaaggggaaggggctgcagtgtgacagggccgggtggccaagtcctcctggcagctactctacagctgaaaacgggagaaaagagagcgttagaaagcggtcatctgtcgcttcctgtttatctgacaattgaagctctccacgtgctgggagggcgcgagcacgttagttggcagaagagaagacctgcatgtgttagcaggggtcccagtggcttgggtgtctgcaaagtcccttaggagtatggagagaagctatatgccaggcttgcaaggagagggcaaagcgcatgcagggtgggcatgccagcagccatcccactgcgagtcttgctggggcagggggatctgggcccaggatgaacacgcaggggacatacatgggcgtgtcctggagtctggaggggaccgaaacatactcggcaccaaagggaagaacgcgcagggcagagagctgtgggagggggcaacacggtctctcaccaggtaactcgaatgcctcttccgcatgagagacaaggcaagcagcctgcaggagagaagactgcagcctcaggtccagctggtcccacagggtgatcgggaaaaaagtactgagaaaagttctgctcagaatgtgggaaggcaggtgtggatggagcctctggaaatgggagaaccctacagctacctttcctctttctctgttgccatcccccagattgcactaaataaagagacctaaacatctcctacctgtgaatcctgacaagtggccctggccctatgcaaagctttcccagcaccgggctgggctctggatacacctgtgggtgtccaacccaagccaagccctttggtggcttcagactttcaggctagggtttttcaaaagcccccatgtcttttgggactgaaccccctatggaaggccggataattggctgctggggtcaccccaagtacaaaaggacgggctctgcactaaggaccaaggtctggccaggcacttggaaagcttttctcatgaaaaatgaaaacctggggccttgggccctgccaatctgtcacctcacaggccactatacaagcatcctgatctcagaaatgagaaaccgagctctggattcctgggttatggtcagctgtgtctgtgccatgtgtgtctggccagcagaatacaggggctcagggctgctcttctctgggcttggggaagaaattctgcacttctttcctgaatatgatttgcagtcagatactgcataaactacaacgtactcctttccatgaaactatgccaagtgcaaagccatcctctgaggtcgtacctatgctgcaggctggaacctcctaaaactgctttctagtgctgacattagacacatgcgaggaacatgcaagtctcaactcaggttctgccccttttgggtgctgagggagcaggaccaggactcctcccttgggtttccccacgggtgcgcagggcttagaagatgctttcatcacacatctgctgcaagaatgtgcagctctatccccccctctgacccccacctaagagagcagctgaggactgggtgctcctgagggggctttgaggagtgagaagcgacacaaagctctcacaagtgtcctgctgatgcaacgccccatggcgcctcggctagactcctaccctctgtgcattagtcacgttaagattgacctagcaccgccgtcccgctgctgctgggttagttgaggtgaagcagatgttagctgcagcgtgcggcgccccacagcccctaatcacagtaaatgctgtgcttctcgctgcagaacacctggttggccagcccggtgccctcggccctgtcgctggcacaggcacaggtgtgacttacgctcggtgtggctggcttggtcttcggggcggctttggcacggccacgccgggtctgctcatggtccagctcgagcagctccagccgctgggtcagcgccagcttctgctggatggccatgcgcagcagcgagttcagcgtcttcttctcgtcctcagcagccgccagctgccgctgcatctcatccagctgtgtaatgtactcgtcacacctggtggcaaacatagcacgcagcgaggagaaggtggctgcgtcctccttgagggccttgagctcattgcgcagcttcatcatggtctcggtaaccatggccttctcattctcatacttgctcttcaggttggcaagggccacctcggccgtctgcttgttggccttgagcacagtgcgcagcgtggtgatctgctcccgcttggtgctgagcagcgacttcagcttgaggatctcctccataagcgcttccttgtccttgtccacggcggggcccagctcctgagaggcaatgcgctggcgtgacagctccgtggtgcggtccacggctgcctgcaggtgcttgatctggtcacggatgatagcgatcaggttgtagatgttcatgggctcccggcgtgggtcactcaggggtgatggcagtgaggagccaggcgaggggctgctgtcccccgtcccaccatctgctcggcccgcctcaggagccagcagccccttgggtaggaggatgggtgagcgccggccacgcgcctcggggctggtgcggcccccgggactggtgcggccggccccgccctggccctcgcggtagtagtccagcatgacacggttgggtgtctcattgttgcacatgcacacgtggtggtagagattggccagctcctcactgaaggtcaccagctcatcctgggccacactcaggctgccctgtgtctcgccggcgacgtcgctcaccttctttagctccttctccagccgggccagcagctcgcggtcctggcggctggccttctctagcagggagaccttctccgtgagtgcctggccctcagcctcatagcggcccttctcctcggcgtgctgggcctcacgagcctcgtgcgtgctgcgcagtgccttgagctgctcgcggagctcgccagcctcagccacagccacatggtacttgcaggccaagatctcaggcccgttgatgtccacctcgtagtagtccccatcctcatggctgtcacggtccttctcgttgtccagggctgtctgccgctccttgctggcctgcaggcgccgcagggcactcagattctctgtgaggcgggtcaccttctcctgctgttctgacagggagccccgcgtgtgctccagctgcttctgtgtgtcctgcagcgttgccagcaggcccgccttttcccgctccatctgcatcagctgctgcttcagcttctggatctcagagatgttgagctcactgagtaggtcggagacgaggctgggggagggcggtgcgaggccctccttcttgggcgtggaggtcttgttgtccagtggcagcttggccaggccgccgtgctcaaagccattgaccagggcctcggcatcgttgttgggctcggcagcatcgtcactgaacttgaggccatccagcgagacatgcaggtggctggtgtagaaggagtcattgatgctcatgtagtgtgacagctccttgcgcaggctgttcttctgttcgcgctccgtcttcagggtctccagcgcctcctccagctgccgctctgagatctccttgaggcggatggcatcctccagctggctgttgaggtactcggtctcctcctccagacgcttgatctcatgcttgaggccctcaaactccacctggttctgtctgagcacagacacttgcttctgcaggctgatgttctcctcctccagttccgagtagtcctgcagcagacgagcttcccggaatttgtactccttgatgtcatcccgcaggcggccacgctggatctccacattctggttgatctccttcagctcctgggccacagaggccaggcgctcattctccgactgcgtgttggtgaggacattgcgcaactgcttcagctccgtctgcagctctagcaccttccgcacgtagtactgctccttggaggccgactcctggatcaggctctcctcccggctctctccgtcagcagccaccttcttgtggtttgtgtgtgcttgtccaaaggcctccttgagctgctccatctcgctgcggatagcctcatagtccacctcgagctcctcgaactgcagcttgagctggtgcttctcctcgagcaccgccagcccgtactcggccgcctggatcttctcacgcgtggtctcggccagctcgtgggacagccgcttcacctcggcgcgcagccactccggctgcgcctccatcaccagccgcgcgtactcctcctcctccgacggcgccgacatggtggccgagggctgagccggctcccactgaggctctcgcaggccgggcacgaaa

SEQ ID NO: 2113 - DNA, 1131 bp, Homo sapiens
  misc_feature (1)...(1131): n = a,t,c or g
atggtgaaggtcgtgccggccacgcgaggaaatctgcctcgctcacaactcacaggcacacatcaacactgccaaccgagggagcccaaaatcaccgcaagcgaaaggctccggcggcggccacgggccacagcccgcctccgcgcacacgcagcccctcccgagcctccactcgccgtcttcgccccgccttcggaccggaaggagttgttggcgcttccggtggcctgcgaccccgtaattgcctcggtgatgtcgtgggttcaagcagcctccttgatccagggccctggagacaaaggggacgtgtttgacgaagaagcagacgagtcgctcctggcgcagcgggaatggcagagtaacatgcaaagacgagtcaaagaaggttatagagatggaatagatgctggcaaagcagttactcttcaacagggcttcaatcaaggttataagaaaggtgcagaagtcattttaaactatggacgactccgaggaacattgagtgctttgctctcctggtgtcaccttcataataataattcaactttgatcaataaaataaacaatcttctggatgcagttggccagtgtgaagagtatgtgctcaaacatctgaaatcaatcactccaccgtcccatgttgtagatttattggactccattgaggatatggacctttgtcatgtagttccagctgagaaaaagattgatgaagctaaagatgaaagactctgtgaaaataatgctgagtttaacaaaaactgtagcaagagccatagtgggatagattgttcatatgtagaatgttgtagaacacaggagcatgcacattcaggaaaacccaagccccacatggattttggaacagacagccagttttagttaaacagctgggcctatcagtagatgtattacaacacctcaaacaactataaaattaccttcccttttctaatgaaaataatgttcagaacatttggtttccctaccaatcgaaatttgtactggttttctgcatcaaaccacctcaactgtagggttaccccntttatggaagtttgaaattancacactattgttcttcaaaattacacaccctattaaatgtaatataagcctttaaaaaaaaaa

SEQ ID NO: 2114 - DNA, 1389 bp, Homo sapiens
aggtgcggcgacgttactgcgtagcgccagctcggccgcacgtaaggccgcggaagcggagcaggtttggttgcacttacaccggtacttaagcgcggaccggcgtgtccttggacttagagagtggggacgtccggcttcggagcgggagtgttcgttgtgccagcgactaaaaagagaattaaatatgggtgatgttgagaaaggcaagaagatttttattatgaagtgttcccagtgccacaccgttgaaaagggaggcaagcacaagactgggccaaatctccatggtctctttgggcggaagacaggtcaggcccctggatactcttacacagccgccaataagaacaaaggcatcatctggggagaggatacactgatggagtatttggagaatcccaagaagtacatccctggaacaaaaatgatctttgtcggcattaagaagaaggaagaaagggcagacttaatagcttatctcaaaaaagctactaatgagtaataattggccactgccttatttattacaaaacagaaatgtctcatgacttttttatgtgtaccatcctttaatagatctcatacaccagaattcagatcatgaatgactgacagaatattttgttgggcagtcctgatttaaaactaagactggcttgtggttaaatgaatatgttcagtttttgaattttaatagtaactccaattcagtaaatggtatcactgtttaccccttttaaagatatgattagacttcgttagtaatgttcaacttttcacaaagatggtgagtgccatcttaaaacttactggagattggttttatatttagatttatataactggttatgtgaatatatttaaatactggggaaattgcttcactgtcttagaaccaagcaagattcacctgtgttttgtgttcatgttcatttgcctcttaaaggcaagggttgaagataaataaggtagcaatgtctatagttttggccttaactatgccaatctaattataattccctgtatttaaaatggtttcttttacttattgaaaggcattttagtgtggtttatgtgtaatattaaagattattcaacacctctcacatcttacagatctataaggtcacatgcttttaaaatagtagcaagttaaacttcactcttgaattctttacaatctaagtcaaactaagttataatttaggattgtctttaaacagccattcagaaacaaaactgtagaactgtgtatttgattgggaatggtgcttttgccaacttaaaaggattaaagtaacggagatatacacaaattttaaaattatgtgtgatcacaagactaaagataattaaaaagaaaaccacagatcatgaaaaaaaaaa

SEQ ID NO: 2115 - DNA, 1386 bp, Homo sapiens
gcggccgctgccattgcccggagatggccggcagagccgccgagacgccgaagagcccgccgcccgcgcgaggtgtagacggggcactgccttcagagcaggtcctgccagcctcgctggagaggatgccctcgtgtccgtgatgggctgtgggacaagcaaggtccttcccgagccacccaaggatgtccagctggatctggtcaagaaggtggagcccttcagtggcactaagagtgacgtgtacaagcacttcatcacagaggtggacagtgttggccctgtcaaagccgggttcccagcagcaagtcagtatgcacacccctgcccccggtcccccgactgctggccacacggagcctccctcagaaccaccacgcagggccagggtagctaagtacagggccaagtttgacccacgtgttacagctaagtatgacatcaaggccctaattggccgaggcagcttcagccgagtggtacgtgtagagcaccgggcaacccggcagccgtatgccatcaagatgattgagaccaagtaccgggaggggcgggaggtgtgtgagtcggagctgcgtgtgctgcgtcgggtgcgtcatgccaacatcatccagctggtggaggtgttcgagacacaggagcgggtgtacatggtgatggagctggccactggtggagagctctttgaccgcatcattgccaagggctccttcaccgagcgtgacgccacgcgggtgctgcagatggtgctggatggcgtccggtatctgcatgcactgggcatcacacaccgagacctcaaacctgagaatctgctctactaccatccgggcactgactccaagatcatcatcaccgacttcggcctggccagtgctcgcaagaagggtgatgactgcttgatgaagaccacctgtggcacgcctgagtacattgccccagaagtcctggtccgcaagccatacaccaactcagtggacatgtgggcgctgggcgtcattgcctacatcctactcagtggcaccatgccgtttgaggatgacaaccgtacccggctgtaccggcagatcctcaggggcaagtacagttactctggggagccctggcctagtgtgtccaacctggccaaggacttcattgaccgcctgctgacagtggaccctggagcccgtatgactgcactgcaggccctgaggcacccgtgggtggtgagcatggctgcctcttcatccatgaagaacctgcaccgctccatatcccaaaacctccttaaacgtgcctcctcgcgctgccagagcaccaaatctgcccagtccacgcgttccagccgctccacacgctccaataagtcacgccgtgtgcgggaacgggagctgcgggagctct

SEQ ID NO: 2116 - DNA, 2068 bp, Homo sapiens
ccgccaggtggaacggcaggtgggttcaggtaccagcctggccgggacccggctgtgggaccaacgcttccggtgagcgacagaggcagctccccagggcctggagacccgtggggcggactctgggatctgagcctatcgccctggcctggagcccccctttgtacctattccccattcccctaccgagctgggcagttagccagcccactccaactctcggaaccatgtttgcagacttggattatgacatcgaagaggataaactcggaatcccgactgtgcctgggaaggtgaccctgcagaaggatgctcagaacctgatcgggatcagcattggaggaggggcccagtactgtccctgcctctatatcgtccaggtatttgacaacaccccagcagccttggacggcacagtggcagctggcgatgagatcaccggtgtcaatggcaggtcaatcaaagggaaaactaaggtggaggtggcgaagatgattcaggaggtgaagggggaggtgaccatccactacaacaagctgcaggcggaccccaagcagggcatgtccctggacattgtgttgaagaaagtcaagcaccggctggtggagaacatgagttcagggaccgcagatgctctgggcctgagccgggccatcctgtgcaatgatgggcttgtcaagaggctagaggagctggagcggaccgctgagctatacaaagggatgacggaacacaccaagaacctcctacgggccttttatgagctgtcgcagactcaccggggtaatggcatcccccaaagctgtgcctttggggacgtgttctccgtgatcggggtgcgggagccccagccagctgcgagcgaggcttttgtgaagttcgccgatgcccaccgcagcatcgagaagttcggcattcggcttctgaaaaccatcaagccgatgctgacggatctgaacacgtacctcaacaaagccatcccggacactcgcctcaccatcaagaagtacctggacgtgaagtttgagtacctgtcgtactgcctgaaggtgaaggagatggatgacgaggaatacagctgcattgccctaggcgagcccctttaccgggtgagcaccggcaactatgagtaccgcctgatcctgcgctgccgccaggaggcgcgcgcccgcttctcccagatgcgcaaggatgtgctggagaagatggagctgctggaccagaagcacgtccaggacatcgtgttccagctgcagcgcctcgtgtccaccatgtccaagtactacaacgactgctacgcagtgctgcgggatgccgacgtcttccccatcgaggtagacctggcgcacaccacattggcctatggcctcaaccaggaggagttcacagatggggaggaggaggaggaggaggaagacacggcagctggggagccgtccagggatacacgaggggctgctgggcccttggacaagggtggaagctggtgtgactcctgagtgccccgcggctgtggtgccgggggcagggtgcgtgggaggacggagcctgggagcggggcggggccgccgcgcaagggggcgacgcataaaggcctgctggcttggggcgcctgcctccctgctcctctgtcctcgcacagcgaacctgggctcctgcccaggacaggcaccagggtcatggcctgggacctggacactggcccctccaccctccctcccctcccggctccccggccagagggagagcttggtctctggacctgccttaggaaggagagggagggcaggaaggaaaagaaaggacttggaggtggcaggagtccgagccctgctccttgtgggcgctcacactgcccccggagcctgctgggagtggggccagccgtggacagctgaggttggggtcaatgcctcctgggcacccttgcctcgccccagaccggcccgtccagtccccatcacacctcggcggcctttatttattctgttcccccagctcggccacttctctgaaggagggctgggttctgggcctgtatcgaataaacacaaacctggatggcgca

SEQ ID NO: 2117 - DNA, 1220 bp, Homo sapiens
ttttttttttttatttcaaaatgataaaaatttattgtctttctggcctatggactcagctgtagttgactgaagtcgctaaacaggacggatttaagtagaggtgatatgtccagtcaccggcatagagacgtcctctgcgtcaccatccacacacagggcttctggtagacatcaggcaaagccctccatgttaatattcatctgaatatggataattagggtggctagcaaaactatcactgttaaaatagtggagatttctgtctaggccatctatggctttcatgtcctctgcagtcaactggaactcaaaaacctgcacgttctgtctgatgcgctgctcattgtagctcttggccaggaccacaaccccacgctgcagctggtagcgcagggcaatcagggctggggttcgcttgtgcttttttgccaaggcacaaaggactgggtcctccaagagcaccggggagttcgggtccacccatcgtttgtctcgttgagatcccagagcactataggcaaccagaacaatatctttcgacttgcagaaatctagcaatttactccggttgaaatacggatgacattctacctggttgcagacaggcttgtacttgagtcctggcttgttgaggatcatctccagctgcctgcggttgaagtttgacaccccaatggacttggccaatcctgcatccttacacttctccatggcctcccaggtggtacagagatccactatgtcaaatattacttttccattttcatctgttggtgaaagttcctcacctggctttagagacattggagaatgaataagatagaggtcaacatagtccaattgagcttttttcagtgagttttccaaggctggtcggaccaactctggtcgatgaaaagtggaccaaagctttgaagtgtagaatatgtcttctctcttcacactgccatctgcaatcttgcttcggatggccagtccaacctgctcctcattattgtataaatgagcagaatctatatggcggaacccagcttctattgctaattttgtgacctccaaagctttacttctcggaacctctggaggtgcataggtgccaaatcccaatacaggcatgaagtggccatcatttagctttacacactgctgtttggaatccattccctgtcacttgtctgactagcaaatgtttgctgctgcttctccgacagcaacg

SEQ ID NO: 2118 - DNA, 1345 bp, Homo sapiens
cagcaaggccttaaaggctactgagtgcgccggccgttccgtgtccagaacctcccctactcctccgccttctcttccttggccgcccaccgccaagttccgactccggttttcgcctttgcaaagcctaaggaggaggttaggaacagccgcgcccccctccctgcggccgccgccccctgcctctcggctctgctccctgccgcgtgcgcctgggccgtgcgccccggcaggcgccagccatgtcgatgctgccgtcgtttggctttacgcaggagcaagtggcgtgcgtgtgcgaggttctgcagcaaggcggaaacctggagcgcctgggcaggttcctgtggtcactgcccgcctgcgaccacctgcacaagaacgagagcgtactcaaggccaaggcggtggtcgccttccaccgcggcaacttccgtgagctctacaagatcctggagagccaccagttctcgcctcacaaccaccccaaactgcagcaactgtggctgaaggcgcattacgtggaggccgagaagctgcgcggccgacccctgggcgccgtgggcaaatatcgggtgcgccaaaaatttccactgccgcgcaccatctgggacggcgaggagaccagctactgcttcaaggagaagtcgaggggtgtcctgcgggagtggtacgcgcacaatccctacccatcgccgcgtgagaagcgggagctggccgaggccaccggcctcaccaccacccaggtcagcaactggtttaagaaccggaggcaaagagaccgggccgcggaggccaaggaaagggagaacaccgaaaacaataactcctcctccaacaagcagaaccaactctctcctctggaagggggcaagccgctcatgtccagctcagaagaggaattctcacctccccaaagtccagaccagaactcggtccttctgctgcagggcaatatgggccacgccaggagctcaaactattctctcccgggcttaacagcctcgcagcccagtcacggcctgcagacccaccagcatcagctccaagactctctgctcggccccctcacctccagtctggtggacttggggtcctaagtggggagggactggggcctcgaagggattcctggagcagcaaccactgcagcgactagggacacttgtaaatagaaatcaggaacatttttgcagcttgtttctggagttgtttgcgcataaaggaatggtggactttcacaaatatctttttaaaaatcaaaaccaacagcgatctcaagcttaatgtcctgttctctccaactctttacaaataagaattttccttcccaatgcagagatcaggg

SEQ ID NO: 2119 - DNA, 1649 bp, Homo sapiens
ggcacctcccatgagggctcgggcgcctgccgagaagacgcacagtgacagcttcctttctcggaaacgcggcgcggccggctgccggaaaacagggcagacctgtatgattggtttattcctggggttgtcatatcatggctgataatgacacagacagaaaccagactgagaagctcctaaaaagagtacgagaactggagcaagaggtgcaaagacttaaaaaggaacaggccaaaaataaggaggactcaaacattagagaaaattcatcaggagctggaaaaactaagcgtgcatttgatttcagtgctcatggccgaagacacgtagccctaagaatagcctatatgggctggggataccagggctttgctagtcaggaaaacacaaataataccattgaagagaaactgtttgaagctctaaccaagactcgactagtagaaagcagacagacatccaactatcaccgatgtgggagaacagataaaggagttagtgcctttggacaggtgatctcacttgaccttcgctctcagtttccaaggggcagggattccgaggactttaatgtaaaagaggaggctaatgctgctgctgaagagatccgttatacccacattctcaatcgggtactccctccagacatccgtatattggcctgggcccctgtagaaccaagcttcagtgctaggttcagctgccttgagcggacttaccgctattttttccctcgtgctgatttagatattgtaaccatggattatgcagctcagaagtatgttggcacccatgatttcaggaacttgtgtaaaatggatgtagccaacggtgtgattaattttcagaggactattctatctgctcaagtacagctagtgggccagagcccaggtgaggggagatggcaagaacctttccagttatgtcagtttgaagtgactggccaggcattcctttatcatcaagtccgatgtatgatggctatcctctttctgattggccaaggaatggagaagccagagattattgatgagctgctgaatatagagaaaaatccccaaaagcctcaatatagtatggctgtagaatttcctctagtcttatatgactgtaagtttgaaaatgtcaagtggatctatgaccaggaggctcaggagttcaatattacccacctacaacaactgtgggctaatcatgctgtcaaaactcacatgttgtatagtatgctacaaggactggacactgttccagtaccctgtggaataggaccaaagatggatggaatgacagaatggggaaatgttaagccctctgtcataaagcagaccagtgcctttgtagaaggagtgaagatgcgcacatataagcccctcatggaccgtcctaaatgccaaggactggaatcccggatccagcattttgtacgtaggggacgaattgagcacccacatttattccatgaggaagaaacaaaagccaaaagggactgtaatgacacactagaggaagacaatactaatttggagacaccaacgaagagggtctgtgttgacacagaaattaaaagcatcatttaaccatagacaatttgccaggatctaggaaccacctaatggtaggtggacagaaaaggaaaaaaaaaa

SEQ ID NO: 2120 - DNA, 2565 bp, Homo sapiens
ccgggcgacgatttcgtggcgggagctgcactggccaggggttccggctgtatatccatgagcgccgctggcagccggggagctgcaggaaccagactgggggcgagctgagcacctgtagtcaatcacacgcagcttttaggtttgtttgaataagagatctgacctgaccggcccaactgtacaactcttcaaggaaaattcgtatttgcagtgggaagaataagtaacattgatcaagatgaatgccatgctggagactcccgaactcccagccgtgtttgatggagtgaagctggctgcagtggctgctgtgctgtacgtgatcgtccggtgtttgaacctgaagagccccacagccccacctgacctctacttccaggactcggggctctcacgctttctgctcaagtcctgtcctcttctgaccaaagaatacattccaccgttgatctgggggaaaagtggacacatccagacagccttgtatgggaagatgggaagggtgaggtcgccacatccttatgggcaccggaagttcatcactatgtctgatggagccacttctacattcgacctcttcgagcccttggctgagcactgtgttggagatgatatcaccatggtcatctgccctggaattgccaatcacagcgagaagcaatacatccgcactttcgttgactacgcccagaaaaatggctatcggtgcgccgtgctgaaccacctgggtgccctgcccaacattgaattgacctcgccacgcatgttcacctatggctgcacgtgggaatttggagccatggtgaactacatcaagaagacatatcccctgacccagctggtcgtcgtgggcttcagcctgggtggtaacattgtgtgcaaatacttgggggagactcaggcaaaccaggagaaggtcctgtgctgcgtcagcgtgtgccaggggtacagtgcactgagggcccaggaaaccttcatgcaatgggatcagtgccggcggttctacaacttcctcatggctgacaacatgaagaagatcatcctctcgcacaggcaagctctttttggagaccatgttaagaaaccccagagcctggaagacacggacttgagccggctctacacagcaacatccctgatgcagattgatgacaatgtgatgaggaagtttcacggctataactccctgaaggaatactatgaggaagaaagttgcatgcggtacctgcacaggatttatgttcctctcatgctggttaatgcagctgacgatccgttggtgcatgaaagtcttctaaccattccaaaatctctttcagagaaacgagagaacgtcatgtttgtgctgcctctgcatgggggccacttgggcttctttgagggctctgtgctgttccccgagcccctgacatggatggataagctggtggtggagtacgccaacgccatttgccaatgggagcgtaacaagttgcagtgctctgacacggagcaggtggaggccgacctggagtgaggcctccggactctggcacgctccagcagccctcctctggaagctgcgtgcccctcaccccctgtttaaggtctcccatctccctcagtgacctggatctgacctcacaccatcagcagggggcacccaccatgcacacctgtctcggagtaggcagctcttcctgggagctccaggctatttttgtgcttagttactggttttctccattgcattgttaggcatggtgacaagtgacagagttcttgccctctgtccagtttcagcatctggttgcttttaagccaagtacatctagtttccctattaaaaatgtgtctgaatagcgattttgctttgccaccaaaaggcttttccctgagaacagtgaaggatgtatgtcattttgtggtggttgtatgtgtccttacatagaccttaaaaagagctcacccttccaggccaatgctgaagacacagctccgcttgggagcctgagaacccaggcttcccaggccagagtgtggcttcttaaacggcaaaggaaattcctttgagtcacaagccaagttttcgccctgtctcctgagaccatttccctacgctttgctgctgctgagagttacctgaggcacttgttaaaaattcagcctcccaggtccctcccctcggagaggctgattcactgggtctgggaaggagcctggggattttaatttttcacaagtgccccagatgattctcatcaccaagcaaattttggaaatgctgttcaacagcgcccttaaattggaaacatctttgcagctcgttttattgaaattcataatcaggggtgtcctctagctcccacggtctccagagcagcaaggccggctatggagctgccgtcgtgtgaccacagtgtgatgtctcagaagggctctgggtgggctgagcatctgggctgtgccctggctctgcttttcaccctggacaaagtcgctgtggacttcaatttcttcacctctaaaatgggggacttggaccaggtagattgctgagctcactaccaggttcaaagttcg

SEQ ID NO: 2121 - DNA, 4470 bp, Homo sapiens
atggggctgctgctcatgatcctggcgtcggccgtgctgggttccttcctcacgctcctcgcccagttcttcctgctgtaccgcagacagcccgagccgccggcggacgaggccgcccgcgcgggcgagggcttccgctacatcaagccagtgccgggcctgctcctaagggagtacctttatggcggcggccgggatgaggagccctccggagcggcccctgagggcggcgcgacccccaccgcggcccccgagacccccgccccgccgacgcgggagacttgctacttcctcaacgccaccatcctattcctgttccgggagttgcgggacaccgcgctgacccgccgctgggtcaccaagaagatcaaggtggagttcgaggagctgctgcagaccaagacggccgggcgcctgctggaggggctgagcctgcgggacgtgttcctgggcgagacggtgcccttcatcaagaccatccggctcgtgcggccagtcgtgccctcggccaccggggagcccgatggccctgaaggggaggcgctgcccgccgcctgccccgaggagctggccttcgaggcggaggtggagtacaacgggggcttccacctggccatcgacgtggacctggtcttcggcaagtccgcctacttgtttgtcaagctgtcccgcgtggtgggaaggctgcgcttggtctttacgcgcgtgcccttcacccactggttcttctccttcgtggaagacccgctgatcgacttcgaggtgcgctcccagtttgaagggcggcccatgccccagctcacctccatcatcgtcaaccagctcaagaagatcatcaagcgcaagcacaccctaccgaattacaagatcaggtttaagccgttttttccataccagaccttgcaaggatttgaagaagatgaagagcatatccatatacaacaatgggcacttactgaaggccgtcttaaagttacgttgttagaatgtagcaggttactcatttttggatcctatgacagagaggcaaatgttcattgcacacttgagttaagcagtagtgtttgggaagaaaaacagaggagttctattaagacgggtacaatctccctcacagctgttttcatgggctggcatcgagtgtctgaggcttttccaggcttatggtacaagctgttggtggatcttccattctggggtctggaggatggtggccctcttctcacagttccacttaggcagtgccctggttgaattaataaaaggaaatttacaaagtgttggacttacacttcgtcttgtccagtcaactgatgggtatgctgggcacgtcatcattgaaactgtggctccaaactcgcctgctgcaattgcagatcttcagcggggagatcgacttatcgccattggaggtgtgaaaatcacatcaacactgcaagtgttgaagcttatcaagcaggctggtgaccgagtcctggtgtactatgaaaggcctgttggccagagtaatcaaggtgcagtgctgcaagataactttggccagttggaagaaaactttttgtcaagctcatgccaatcgggttatgaagaggaagctgccgggttgacagtagatactgaaagtagagagctggattctgaatttgaagacttggcaagtgatgtcagagcacaaaatgagttcaaagatgaggcacaatcattaagtcatagtcccaaacgtgttccaacaacactttctattaaaccccttggagctatatcaccagttttaaaccggtaaattaggctggtaggaagttcacccactaccaccggaaaatttcagtccaaagatgggaaataaacctccacccctaaaaacttctgagataacagacccagcacaagtgtcaaaaccaacccaaggatctgctttcaaaccacctgtgccaccacgaccacaagcgaaagttcctttgccttccgccgatgctccaaatcaggcagaaccagatgttctcgttgaaaagccagagaaggtggtgccacctcctcttgtagataaatctgctgaaaagcaagcaaaaaatgtggatgccatagacgatgcagctgcacctaagcaatttttagcaaagcaagaagtggccaaagatgtcacttcagaaacttcctgccctactaaggacagttcggacgaccgtcaaacatgggaatcatcagaaattctttatcgtaataagctaggaaaatggacaagaaccagagcatcctgtttgtttgacatagaagcctgtcacaggtacttaaacattgcattgtggtgcagggatcctttcaagttgggaggtctcatctgtttggggcatgttagtttaaaacttgaagatgtggctttaggatgcctagctacatcaaacacggaatacctttccaaattgagactggaagccccctcacctaaggctatagtcactagaaccgcactacgcaatctgagtatgcaaaagggattcaatgacaaattttgctatggtgacattactattcacttcaaatatttgaaagaaggagaatcagaccaccatgtagttactaacgtagaaaaagaaaaagaaccccatttggttgaagaagtttctgttctccctaaagaggagcaatttgttggacagatgggtttaacagaaaacaaacacagttttcaggatactcagttccagaacccaacatgggtgtgactactgtaagaaaaaagtttggactaaagcagcttccccagtgttatgtttttgtggcttatgtttgccataaaaaatgtcaagaaaagtgtctagctgagacttctgtttgtggagcaactgataggcgaatagacaggacactgaaaaaccttaggctggaaggacaggaaaccctcttaggcctgcctcctcgtgttgatgctgaagctagcaagtcagtcaataaaacaacaggtttgacaaggcatattatcaatactagttctcgtttattaaatttgcgtcaagtctctaaaactcgcctttctgaaccaggaaccgatctcgtagaaccttcaccaaaacacacacccaacacgtcagacaacgaaggcagtgacacggaggtctgtggtccaaacagtccttctaaacggggaaacagcacaggaataaagttagtgagaaaagagggtggtctggatgacagtgttttcattgcagttaaagaaattggtcgtgatctgtacaggggcttgcctacagaggaaaggatccagaaactagagttcatgttggataagctacagaatgaaattgatcaggagttggaacacaataattcccttgttagagaagaaaaagagacaactgatacaaggaaaaaatcacttctttctgctgccttagctaaatcaggtgaaaggctacaagctctaacacttcttatgattcactacagagcaggcattgaagatatagaaactttagaaagtctgtctttagaccagcactccaaaaaaataagcaagtacacagatgatacagaagaagaccttgataatgaaataagccaactaatagactctcagccattcagcagcatatcagatgacttatttggcccatccgagtctgtgtagcagacaggtctatttaaactttcaaatgaacagggtaaagttgcatctaaagtaccacagatacaaccatgtttaaatcctcgtatgcactctggcctgcttctccagttacttgcttgtgtaagaacaaaaatgagaaaggttgttttccagtaaaaacatgaccagcttactaattggttgttttggattgcatttatagctatgcttttttgggtttatactgggaatttatttttactaaattatttaacttttctaattatgtaattatgtaagctagcttttcatgtttatgtatgtatggtgtccccttgtgttattttttcttccttcttggtttttgaattagtggttaaatagaaatactgtcctggattccttaaaatattttcatttcccatcatggttataacaaatttgcctgcatgcccaaactgacaacagcaatcactgagggaacaggttttgaatctttcttttgtgttatgaagtttatcgtctctacttgcttgagatttttgttattttgggggtttgggggtgctttttgttttgtttttgccaaatgtaacatgaaagcagatgctgcacctttagtctgttatgctgatttagtaaaaaaaaattttttacatatattgcttgctttcgatgcttctgtgaaacttttttctaaagcttttgtgcagctgtatggtaaaaatatggtgattaatttgaagagcttacattgaaagacaatgtaataggaaataaatgcagattgcgagtggtcaagaatcttgtagagaggataacaagacttaattactgaacaacagcaacatagcattttgaag

SEQ ID NO: 2122 - DNA, 970 bp, Homo sapiens
ttttttttttttcatcttccattattttattattttttatacatatatatatatgcgcagatctgttttatgtacaacaattggttctatcaaatattcagaccaaggcattctactggtaatttccccccaaatcaattcaggtaaaattagatacttatgcacttcacgggctatcaaaacttgcaacttcattatcaatttcagttctgaggtcatacacacaattcaaaatatacattaactaggttaaggcgataaaagtgggctgaaagaaaccacaggattcagaacaatgaaactgtgtattttgcttgcatgagagtcataacgtgaacagcaagtattgtgcgtatctcatagctcttcagtggagaggaagcggcttctgaacatctaaggtgactgcacagcaggtgggaaacagctggtgtggcctgctggaggcttcgccgagggagggctcatttcttctctgcctctccttttttgggttcttgtttcaatttgtaatcagccagggcggccttgattgcatcttcagccagcatggagcagtgcagtttcacgggaggaaggcagagctccttggcgatatctgtgtttttgatagtcaaggcttcctccaccgtctttcctttcacccattcagtggctaatgagctggaggcaattgcggaaccacagccaaatgttttaaacctagcatccacaatcttccccttttcatccacttgaatctgtaatttcattacgtcaccacatgctggagcccccaccagtccagttccaacatttttagatgtcttgtcaagggaccccacgtttctaggattttcataatgatcaacaaccttcttgtgatagagtcgggccggggccgacagctcccgggcgggcaggcgggggctccgcagcagcagagccgatgccacccgcctcagacggccagccccagccgccgccatct

SEQ ID NO: 2123 - DNA, 1221 bp, Homo sapiens
cccacgcgtccgcaaatactggttaactgcgtttgcagctagaagttaggctctgattcactgttttgtattttctaaaagggttatatgtaatttgaaagatagacctgccaagacgtgagatctgtgttctccttggttagagctaacatttttggtgaggaaagcactgcaggagcaggctggcacagagaagaggacatgcggaaggagctccagctctccctgtcagtcaccttgctgcttgtctgtggcttcctctaccagttcaccctgaagtccagctgcctcttctgcttgccttctttcaagtcccaccaggggctggaagccctcctgagccacagacgtggcattgtgtttctagagacctcagagagaatggagccaccccatttggtctcctgttccgtagagtctgctgccaagatttatcctgagtggcctgtggtgttctttatgaagggtcttactgattccacaccgatgccctcaaactccacatacccagctttttccttcctgtcagcaatagacaacgttttcctcttccctttggatatgaaaaggctgcttgaagacacaccattgttttcatggtacaatcaaatcaacgccagcgcagagagaaactggctccacatcagctcggatgcatcccgcctggccatcatctggaaatacggtggcatctacatggacaccgatgtcatctccatcaggcccatccctgaggagaactttttggctgcgcaggcttctcggtactctagtaatggaatatttgggttcctcccccaccacccctttttgtgggaatgcatggaaaactttgttgaacactataattcagccatttggggcaaccaaggccctgagttgatgacaaggatgttgagggtatggtgtaaacttgaagacttccaggaggtgagcgacctcaggtgtctgaacatatccttcttacacccccaaagattttaccccatctcctatcgagagtggaggcgctactatgaagtgtgggatacagagccaagcttcaatgtctcttatgccctgcatttgtggaaccacatgaaccaggaggggcgggctgtgattagaggaagcaacacactggtggaaaatctctatcgcaagcactgtcccaggacttacagggacctgattaaaggcccagaggggtcagtgactggggagctgggtccaggtaacaaa

SEQ ID NO: 2124 - DNA, 1611 bp, Homo sapiens
atgcatgatttacaaagttttggagaccccctggtctgaggcccaccctccagcacctctgtctttcccaagttgagaacttacaagttctcggacagaggcaccactctggtttcatgtcgtgtcctaattctggcatgccatcctctcacatcgcatccaacccagaggacgcaaaatgaatgctcagcatgtttactaaaacagtgtctctacaataaacacagcaggccaacatgtatagcttttatttacctacccaagttccttttacatgtgagttatctgcattccaccttgccccctctcccaggatgaatcctcttggcacagaggaaggggtgccccttcaactagggccagagcctagatgacctggtggatcccccaccatgaaaaaagcaggaagggaatggagaagaaaagtgttgatcacacctagccctcaccacaggagggggaatgaagaggtctgggggactgcccccatgctatgccccagtccttaaatacaaagcaaggagaatgaaaaggaccctccctctgaaatacagcaccgacctcagcatggaggcaaaaggacagtgggcaagaccacgtccctccgaagggagagggctgaaggagagcacataccgttagtggctgcggcacccctccctaccagggtctgatgcagcctcagcaccgggagtggggagaggggaggagaagggatgacagcactgtgccatccactcctccctgaacccctggccccagcacaggcattcctctgcccactagcccaagtcaggggatgtggaagaaactgtgttggaatccaaggcccttatctatttcttcttccgttcttgggagcagcgtgggcaaaaccatttcccccgaggcttggttgtcagccccacacaggcaaaatggaaccactcaatggaacaatcagggttgtcacagccaatcatctctccataggagacctggtgacaaaggcaataggtgggttcgttgggatccacaggcatatccaacacatcagaggggtggacactgccaaaggtcactgagggcatcccatactcaggacttgtgcgcacgagctttaacttcttctgggcagtcttgggggcttcttcatccgagtttttccctttggaacgagcacgagcagctttcttctccttttgagtccggcctttctttttgcctttgctggaagagctgtcatagtcacttgactcaatctgtttctccttgagatcagcctcaaaacgggccaggtctgtgtccagccgccgaatgtgtttgtccaccatctcataggtctgcatggcaagctgcaccttgtcgtcaccaaattccttgcacttgccataggcttcctggatctgtttgagaagggccaatttttcctcggagctcaggctgcgggcactactcatatactcagtggccaacttgtcaatttcagccttcaggtcctctgttctttggtctaggtccctcatgagctgaaagtttctctgtaattcaaagggaaggttttcaatactgtccagataatgttccaaatacatccccgcagccatctcgaagcaaaacaaagcaacttcc

SEQ ID NO: 2125 - DNA, 2613 bp, Homo sapiens
atggttgctgtacgggctgctggcccacgagaaggggccagccaggatgaagcgggcacagtttgggcccccatgactggctgcccttgccagtgccgcccaggacccagctggctgctggtggacaccctggagcctgagacagcgtacccagttcagcgtcctggcccagaacaagctgggaaccagcgccttcagatgaagcgggcacagtttgggccccatgactggctgtccttgccagtgccgccaggacccagctggctgctggtggacaccctggagcctgagacagcgtaccagttcagcgtcctggcccagaacaagctgggaaccagcgccttcagtgaggtggtcactgtgaacactttagcattccctattacaactccagaacccctggtgctggtcaccccaccgaggtgcctcatagccaatcggactcagcagggtgtgctcctgtcctggcttccgcctgccaaccacagctttcccatcgaccgctacatcatggagttccgtgtcgcagagcgctgggagttgctcgacgatggcatccccggcaccgaaggagagttctttgccaaggatctgtcacaggacacgtggtatgagttccgggttctggccgtcatgcaggatctcatcagcgagcccagcaacatcgccggcgtctccagcacagacatcttcccgcagccggacctgaccgaggatgggctggcgcggcctgtgctggcgggaatcgtagctaccatctgcttcttggcagctgccatcctgttcagcaccctggctgcctgctttgtcaacaagcagcgcaagcgtaagctcaagcgcaaaaaagaccctccactctccatcacccactgcaggaagagcctggagtctcccttgtcctctggcaaggtgagccccgagagcatccgcacgctccgagcgccgtcagaatcctccgacgaccagggccagcccgcggccaagaggatgctgagccccacccgtgagaaggagctgtcgctgtacaagaagaccaagcgggccatcagcagcaagaagtacagcgtggccaaggcagaggccgaggcagaggccaccacgcccatcgagctcatcagcagaggccctgacggccgcttcgtgatggaccctgccgagatggagccctcgctgaagagcaggcgcatcgagggcttccccttcgccgaggagacggacatgtaccccgagttccgccagtcggacgaggagaacgaggacccactggtgcccacatctgtggccgccctgaagtcccagctcacccctctgtcatccagccaggagtcctacctgccaccaccagcatacagccctcggttccagccccgcgggctggagggccccggtggcctggaaggtcggcttcaggccacaggccaggcccggccccctgccccccggcccttccaccatggccagtattatgggtacctcagcagcagcagccctggggaggtggagccgcccccgttctacgtgccagaagtgggcagccccctgagctccgtcatgtcgtccccgcccctgcccaccgaggggccctttggccaccccaccatccccgaggagaatggagagaatgcatccaacagcacgctgcccttgactcagacacctacaggagggcgctcccctgagccctggggccggccagaattccccttcggggggctggagaccccagcgatgatgttcccccaccagctgccaccctgtgatgtgcccgagagtctgcagcccaaggccggcctcccccgaggactgccccccacctccctgcaggtgcccgcggcctacccgggcatcctgtctctggaggcaccgaagggttgggcaggcaagtcgcccggcaggggccctgtcccagcgccccccgccgccaagtggcaggacagacctatgcaacctctggtaagccaagggcagctgcgacatacaagccaaggcatgggcatacctgtgctgccttaccccgagccggctgagccgggggcgcacggcggccccagcacatttggcctggacacccggtggtatgagccccagccccggccccggcctagccctcggcaggccaggcgcgccgagcccagtttacatcaagtggtgctacagccctcccggctctcacctctgacccaaagccccctcagctcccgcaccggctcccctgagctcgccgcccgtgcccggcctcgcccgggcctcctgcagcaggcagagatgtcagagatcaccctgcagccgccggctgcagtcagcttttctcgaaagtctacgccgtccacaggctccccctcccagagcagccgcagtgggagtcccagctaccggcccgccatgggcttcaccactctggccaccggctacccttcccctccacccggccccgcccctgctgggcctggggacagcttggacgtgtttggacagacgccttcccctcgaaggacgggggaggaattgctccgaccggagaccccaccacccacgttacctactttagggaagctgcggagagacagaccagctcccgcgaccagcccgcctgagagagcactctctaaactg

SEQ ID NO: 2126 - DNA, 1779 bp, Homo sapiens
tccctccccccactcccccctcccccgcccgccggggcaggggagcgccacgaattgaccaagtgaagctacaactttgcgacataaattttggggtctcgaaccatgtcgctgaccaacacaaagacggggttttcggtcaaggacatcttagacctgccggacaccaacgatgaggagggctctgtggccgaaggtccggaggaagagaacgaggggcccgagccagccaagagggccgggccgctggggcagggcgccctggacgcggtgcagagcctgcccctgaagaaccccttctacgacagcagcgacaacccgtacacgcgctggctggccagcaccgagggccttcagtactccctgcacggtctggctgccggggcgccccctcaggactcaagctccaagtccccggagccctcggccgacgagtcaccggacaatgacaaggagaccccgggcggcgggggggacgccggcaagaagcgaaagcggcgagtgcttttctccaaggcgcagacctacgagctggagcggcgctttcggcagcagcggtacctgtcggcgcccgagcgcgaacacctggccagcctcatccgcctcacgcccacgcaggtcaagatctggttccagaaccaccgctacaagatgaagcgcgcccgggccgagaaaggtatggaggtgacgcccctgccctcgccgcgccgggtggccgtgcccgtcttggtcagggacggcaaaccatgtcacgcgctcaaagcccaggacctggcagccgccaccttccaggcgggcattcccttttctgcctacagcgcgcagtcgctgcagcacatgcagtacaacgcccagtacagctcggccagcaccccccagtacccgacagcacaccccctggtccaggcccagcagtggacttggtgagcgccgccccaacgagactcgcggccccaggcccaggccccaccccggcggcggtggcggcgaggaggcctcggtccttatggtggttattattattattataattattattatggagtcgagttgactctcggctccactagggaggcgccgggaggttgcctgcgtctccttggagtggcagattccacccacccagctctgcccatgcctctccttctgaaccttgggagagggctgaactctacgccgtgtttacagaatgtttgcgcagcttcgcttctttgcctctccccggggggaccaaaccgtcccagcgttaatgtcgtcacttgaaaacgagaaaaagaccgaccccccacccctgctttcgtgcattttgtaaaatatgtttgtgtgagtagcgatattgtcagccgtcttctaaagcaagtggagaacactttaaaaatacagagaatctcttcctttttttaaaaaaaaaataagaaaatgctaaatatttatggccatgtaaacgttctgacaactggtggcagatttcgcttttcgttgtaaatatcggtggtgattgttgccaaaatgaccttcaggaccggcctgtttcccgtctgggtccaactcctttctttgtggcttgtttgggtttgttttttgttttgtttttgtttttgcgttttcccctgctttcttcctttctctttttattttattgtgcaaacatttctcaaatatggaaaagaaaaccctgtaggcagggagccctctgccctgtcctccgggccttcagccccgaacttggagctcagctattcggcgcggttccccaacagcgccgggcgcagaaagctt

SEQ ID NO: 2127 - DNA, 695 bp, Homo sapiens
ttttttttttttgaattacaaagctacttttaatactttggggtgagccccacaggaataaaaaacactgggaaggggtaaccccctcacccccgggagtggcccagggggagagaggctacctgaggggaaggaagcacaaaagggacccgctgcagactcagggcaaagggaatgccatcggtgctgggacctgtgagcactacaggaggaaacgcgagcgtggtgggactggctccaggcacacaggcgaagggcaagagggttggacacgaagccacaaagctacttgggttcctccttcttctcgtttgcctttttctgcttctgctgcatgatctccgagtccctgggggtagagtccctctgcttgcgggcggcagcagaaagcccgtcatctcggcgctttcccttaaccgagtcgctctgctttttcatattcttctggcgggcgagctcacgctggttaccgcccgggagggtggtcccgtgaagtagccgtgggcaaagggctcgatttccgggcaccgagtgtgagggtggccacagagcgcgcccagagaaacgccttgctagggaagctacggaaggtcaaagccggcgcctcgccggtggtgtttagggtgaacggaaagaaaagggcaaggagaagggctcgtgccgagttcctgcaggcgggtcaattgtgggggcgc

SEQ ID NO: 2128 - DNA, 4646 bp, Homo sapiens
  misc_feature (1)...(4646): n = a,t,c or g
gaattcccttgcggccgcaggaatttttttttttttttttttttcaaatatatacatttttaatatttgaaatatttacataatggaaccacatcagggttcgagggtaagaacagtgttttcaaatgtcctctccaggtgtgtttaaaaaaaaaaaaaatccagtaatccaaagctcacattatgctttttctaacaggccaatctttacctttcttttaaataagtacctcagacatgggaacagttgcatctaatttgtgtgaaaagctgtttaaaacttcttacgttttcaggtaattttactccctggtgaaattctgatctacaacgaagaaagccccaggaatttctctaagcacatcatcagtacatttttaaacactaatgagccaaggtaaaacaagatataaaccttctacaagacaaaaatgaaaacaaatagttagtggttggtaactgccttgaatgatttacctttatccttaaataacatgtaaacttacaaattgccgagcagaatacctatcatgtttgtaaaactctcactgtctgtcaatttgcctaattttatttcatttttttgttttgttttaaagggggttttcacttacactttttggtatgatgaattttttgttaaataaacagatacaatagaattaaactaaggaccaattagtgcaaaaatgcattaaatacagctctccaggatttttagggatatgcctcatttctgagcaataaaattaaaaggaaaaatcactatgatccacattcctttaaaagagaagctgaagcagccatcttattaataagaaaaccccatccagttagcaaaccacattgctcacgacacgagaacaccatgctctgggaaactaataacctaattataacagacatttcaggttggaacagtaccacttttcctttacaattctattctttagttgggaaatgttttaaggaccccaccaaagcaaattagggaaaagaaagacttttacacatacattcacaaacacattcatacagaaatacagtaggaatggattgtctgctaatttttgcattccaattttaaactccatgccttcacaagggcttgccatttctgatgaaaagagagtgggggtggtaatagtttatgactggtgttttcaattaaaattgttcatgttggttcctatacagtacatttcaatattaagtgcaattctgcaaaataattggggagtcgttttaatatttacaagaaacaaatcagcagaacaagattatatcagataggctgtgtacagtagctgcggcttataaaacataccagtaatttgtacctggtgagtataaagagaaccaaggattcagatgactttacaaccaagggagtacacagggcaacaacaaattagaggaccaaaaaattcacattttctacaaaaaaaaaaaattacagatctcacaatgtcttcmaagacaaagaaaaattcmaagtccttaaaagggtggcaaagaagaaatctgaaatggaactctaaatataaaaagttttacttcacaagaccaattttcttggcttctgtttcatatatcaataatctccacattttgactataaaaacttctgcttcttcatcaagtaccatggcaacatcatctaaaatgctctggggtgnactatgagccataaccttagaacaaacnaaatcaactaatgtagcttcttcttcacctatatattctatgattttcttattaatccatggtctaattcgacgttccatcagtatagaatccacaatagaccaatccaggggataagcgaagagctcaggtttggctgtagggattttctcaatgagactcttaatgtgtttacgcttttcttcagtgtttacagtgcctttggttgcatttttatcatcttcaccataatccaagggaaccagtttcctttttcggggtacgtcatcactgtcttcatcctcaaatttgttaaagacactatctacaggtagtttctttctcttcacagaattaggctgaccaggactattggaagcacccagtttaagacttagtcctatttttggcctatgctcctcaggttgctgttgatctggtgagttttcatgaggaataataataccacagggagactcatccccaggagtgttaggtgttgcattgccactggcagaggaaacagatggagcagagctgatgggcctcagagtaggtttcagacaaggcttttgctctggctcctcttcctcttccatgggttcttctcgtttttcttctttttcttgcttttcttcttcctcctcttctgattctggctcttgctttatttgtggctgcctgcgcctctcagcctcttgttccatcctctggagctctgcatctggatctggatgcccttctgccagaaggcgctgcctgatttcctcaagctcctccttctctctcttcctatctcgttcatctgcttccatttccttttctctatcacgcaaccttttctgaagagcacttcctctgtaatatttggggtcatctctatcatcatcatagtcttctaagaattcttttagtcgtttagcttctttggccatttctcttcttctttcttcttctctttcagcttctttctcatattcccgggttttctttcgttctctgatttcccaattcttaaggcgctcttgataagcagcttctttctctcggagttttctttcaagttttcttcgttcgtatgcatcttcttcatcttcttctcggtcccgttttttgtctttttctctttctcgctcccgttccctctctcgctctctctctcgctcccgttctcgttctcgctctcgttctctctctctctctctttcccgctctcgttccctttcacgatctctgcttttttctcttgatcgactgcgatccttattacgatctgagctcctttctctatcccggtcacgatctctctctcgatcccgatctcggtctctctcttttgtccggtcacggtccctatcccgttctcgttcccgctcccgttctttctccttttctcgttcacgttctctttccctttctcgttcccgttctcgcctttctcgttccctttcacgctccctctctctttctctccgttctttctcaatttcctgtctttctttttcctttttgcctttctcttcttccagtttcttatgtgtgtctctgaatttgctgatctctcgagatatcaggtctcttttgtcttcttccatttctatagcatttatatcctccttagtgatgagtggataagggatcagtggggccactggaaatctgcggaaaatgacgcacgcagctgactttgtcttctccgcacgactgttacagaggtctccagagccttctctctcctgtgcaaaatggcaactcttaaggaaaaactcattgcaccagttgcggaagaagaggcaacagttccaaacaataagatcactgtagtgggtgttggacaagttggtatggcgtgtgctatcagcattctgggaaagtctctggctgatgaacttgctcttgtggatgttttggaagataagcttaaaggagaaatgatggatctgcagcatgggagcttatttcttcagacacctaaaattgtggcagataaagattattctgtgaccgccaattctaagattgtagtggtaactgcaggagtccgtcagcaagaaggggagagtcggctcaatctggtgcagagaaatgttaatgtcttcaaattcattattcctcagatcgtcaagtacagtcctgattgcatcataattgtggtttccaacccagtggacattcttacgtatgttacctggaaactaagtggattacccaaacaccgcgtgattggaagtggatgtaatctggattctgctagatttcgctaccttatggctgaaaaacttggcattcatcccagcagctgccatggatggattttgggggaacatggcgactcaagtgtggctgtgtggagtggtgtgaatgtggcaggtgtttctctccaggaattgaatccagaaatgggaactgacaatgatagtgaaaattggaaggaagtgcataagatggtggttgaaagtgcctatgaagtcatcaagctaaaaggatataccaactgggctattggattaagtgtggctgatcttattgaatccatgttgaaaaatctatccaggattcatcccgtgtcaacaatggtaaaggggatgtatggcattgagaatgaagtcttcctgagccttccatgtatcctcaatgcccggggattaaccagcgttatcaaccagaagctaaaggatgatgaggttgctcagctcaagaaaagtgcagataccctgtgggacatccagaaggacctaaaagacctgtgactagtgagctctaggctgtagaaatttaaaaactacaatgtgattaactcgagcctttagttttcatccatgtacatggatcacagtttgctttgatcttcttcaatatgtgaatttgggctcacagaatcaaagcctatgcttggtttaatgcttgcaatctgagctcttgaacaaataaaattaactattgtagtgtgaaaaaaaaaa

SEQ ID NO: 2129 - DNA, 885 bp, Homo sapiens
gtttgtgctggaattcgcgacccttgttcaacgccgttggcgaagccagctgctggaggtgccgagaatctgagtttcggtaagcagccaggtctggaaactaatattttaaaaatgactacaccaaacaagacacctcctggtgctgaccccaagcagttggaaaggactggaacagtacgggaaattgggtcacaagctgtttggtcactctcatcttgcaaaccaggatttggagtggatcagttacgagatgacaatctagaaacttattggcaatcagatggttcccagcctcatttagtgaacatccaattcagaagaaaaacaacagtgaagacattatgtatttatgcagactacaaatctgatgaaagctatactccaagcaagatctcagtcagagtaggaaataattttcacaaccttcaagaaattcggcaacttgagttggtggaaccaagtggctggattcatgttcccttaactgacaatcataagaagccaactcgtacattcatgatacagattgctgttctagccaatcaccagaatggaagagacacccatatgagacaaattaaaatatacacaccagtagaagagagctccattggtaaatttcctagatgtacaactatagatttcatgatgtatcgttcaataaggtgactttaaaatgagacgaaaatcattaaacgtatctttgttttatcctgtatttaaataatatatcatgtacctttattgaacaaggcatccgttatatctaattttgtatatgtttaaaaatattttattgtaactttgacaaataaatttggggtcatattatctttattttctttaacatgtaataaagctcacatattttacattactaaa

SEQ ID NO: 2130 - DNA, 1901 bp, Homo sapiens
atgacttcgaaagaggaaagcaggaggcagcagcccacagctggtcctgcagggcagggaaagttaccctcgccctccgagccacaactccccacgccgccaactcggtctttacatcattttcgacgccccctaagtccctcccgagaggcgcaggcgcacatcgccccttctagcgaactacatctcccacaatcccaatcggccggaccacctccgctcggggcggggacggaggtggagctggtggtccccggtcgggacgaaggctcccgaggtgccctgcctgggtcctccggggtaaagttcgtttggcggaagattgtccgttttcctgtatcagaccaggtacgtaccttgtccataagtcgtcttatgagaagacttcttgagatgatgcagactctcgtgcagtttataatcggctggaggtcattgctaggaagaactctgggtacaataatgaatacaatgtatgtgatgatggctcagatcttaagatctcacctgataaaggctacagtgattcctaatcgagtgaaaatgcttccatattttggtatcattagaaatagaatgatgtcaacccataaatccaaaaagaagatcagagaatattatagactgctgaacgtggaggaaggatgctctgcagatgaagtcagggaatcttttcataagcttgccaagcaatatcatcctgacagtggctctaatactgctgattctgcaacatttataaggattgaaaaagcttatagaaaggtgctctcccatgtgatagaacaaacaaatgccagtcagagtaaaggtgaagaagaagaagatgtagaaaaattcaaatataaaacaccccaacaccgacattatttaagttttgaaggtattggttttgggactccaactcaacgagagaagcattataggcaatttagggcagaccgtgctgctgaacaagtgatggaatatcaaaagcagaaactacaaagccagtattttcctgatagtgtaattgttaaaaatataagacagagcaaacagcaaaagataacgcaagctatagaacgtttagtggaggacctcattcaagaatccatggcaaaaggagactttgacaatctcagtgggaaaggaaaacctctgaaaaagttttctgactgttcttacattgatcccatgactcacaacctgaaccgaatactgatcgataatggataccaaccagaatggatccttaagcaaaaggaaataagcgatactattgagcaactcagagaggcaattttagtgtctaggaaaaaacttgggaatccaatgacaccaactgaaaagaaacagtggaaccatgtttgtgagcagtttcaagaaaacatcagaaaattaaacaagcgaattaatgattttaatttaattgttcccatcctgaccaggcaaaaagtccattttgatgctcagaaagaaattgtcagagcccagaaaatatacgagacccttataaaaacaaaagaagtcacagatagaaacccaaataaccttgatcaaggagaaggagagaaaacacctgaaatcaagaaaggttttttaaacctgatggatctggtggaaatttattaaaatacgatcattttgatgtttactatcataaatcattcttagttccactgacactttacatggaaaatgagatttattgctataatacaagaatttaagaattgtgccattgtacttatcacaaaactaatcacatagccaatgatgtgtgagtgagaaacctatcaggtttgtcctgaggatatagcaagaaaagaaaataactgaaactcctttttttttgagacggcgtctcgctcgtgtcacccaggctgggagtggcaatgggcgcgatctgggctcactgc

SEQ ID NO: 2131 - DNA, 3086 bp, Homo sapiens
  misc_feature (1)...(3086): n = a,t,c or g
tttcgtcaccgctgcggctgcctcagctactgccgcagtcgccgcggaattcggcgagtagaaccgctgaggcgggcgcgggcccgggtggggccaaggttccggccactctgcagaatggagataatcaggagcaattttaagagtaatcttcacaaagtgtaccaggccatagaggaggccgacttcttcgccatcgatggggagttttcaggaatcagtgatggaccttcagtctctgcattaacaaatggttttgacactccagaagagaggtatcagaagcttaaaaagcattccatggactttttgctatttcagtttggcctttgcacttttaagtatgactacacagattcaaagtatataacgaagtcatttaacttctatgttttcccgaaacccttcaatagatcctcaccagatgtcaaatttgtttgtcagagctccagcattgactttctagcaagccagggatttgattttaataaaggttttcgaaagggaattccatatttaaatcaggaagaagaaagacagttaagagagcagtatgatgaaaaacgttcacaggcgaatggtgcaggagctctgtcctatgtatctcctaacacttcaaaatgtcctgtcacgattcctgaggatcaaaagaagtttattgaccaagtggtagagaaaatagaggatttattacaaagtgaagaaaacaagaacttggatttagagccatgtaccgggttccaaagaaaactaatttatcagactttgagctggaagtatccgaaaggcattcatgttgagactttagaaactgaaaagaaggagcgatatatagttatcagcaaagtagatgaagaagaacgcaaaagaagagagcagcagaaacatgccaaagaacaggaggagctgaatgatgctgtgggattttctagagtcattcacgccattgctaattcgggaaaacttgttattggacacaatatgctcttggacgtcatgcacacagttcatcagttctactgccctctgcctgcggacttaagtgagtttaaagagatgacaacatgtgttttccccagactcttggatactaaattgatggccagcacacaaccttttaaggatatcattaacaacacatcccttgcggaattggaaaagcggttaaaagagacacctttcaaccctcctaaagttgaaagtgccgaaggttttccaagttatgacacagcctctgaacaactccacgaggcaggctacgatgcctacatcacagggctgtgcttcatctccatggccaattacctaggttcttttctcagccctccaaaaattcatgtgtctgccagatcaaaactcattgaacctttttttaacaagttatttcttatgagggtcatggatatcccctatctaaacttggaaggaccagacttgcagcctaaacgtgatcatgttctccatgtgacattccccaaagaatggaaaaccagcgacctttaccagcttttcagtgcctttggtaacattcagatatcctggattgatgacacatcagcatttgtttcccttagccagcccgagcaagtaaagattgctgtcaataccagcaaatatgcagaaagctatcggatccaaacctatgctgaatatatggggagaaaacaggaagagaagcagatcaaaagaaagtggactgaagatagctggaaggaggctgacagcaaacggttaaacccccagtgcataccctacaccctgcagaatcactattaccgcaacaatagttttacagctcccagcacagtaggaaagagaaatttgagtcctagtcaagaggaagctggcctggaggacggagtgtcaggggagatttccgacactgagcttgagcagaccgattcctgtgcagagcccctctcagagggaaggaaaaaggccaagaaattaaaaagaatgaagaaggagctttctccagcaggaagcatctcgaagaacagccctgccacactctttgaagttcctgacacatggtaaccaagacctgagggcagcaaaccgctggtgctgtcgctgtgagcaagagccggctggcacatttggaagccgcactgtatttaacttaatcaaatgtggtatgggaggggttggaaaccaagttgtctcctgggggggagaaaacaggttttatttttgtggctgtggttttttcccctttttaatctaactgcctgttgacattgacactcatcacggttgtaggctgtcatgaatgtgtacgtgcttaaccagtgaattccgtgttgctcttgtgaggcctttcctgtcatgacccagtgtgcttaagaacctgcctgatggggagtgtcggctgtgaaatctgcaaaaagagctgacattccagctgctgtgatcatgaatttgggggtgtactgtcctgcctgtgcatcttctcgcactgagattttgaggcagttgcagccctcggttagtctcccagtggaaaaatcggttgtgcctccctgcttcccaccatagctgcctgaaaacatgacgctctcaagcttgtccttccttcaggaagatgtccactcatgccccaccccatgagagggcttnccccgtattccccctggccctttggggcatatttaatgtagagttccctttctccctaagaccgtgagttttctccatggggggatgtaccgagtaaaaaaggttaacttctagttcttatgccgtggcgctgtgttcactttcccagagtctctgttcgtttgtttggatggcggtctcggggtacggcagcagtgtgtgcgtacggtgtctgtgtgtgtgtgtgtgtgtgtgtgtgtgtgtgtgtgtgtgtgtgtgtgtgaaatcgtgcaaatctacaacatgtcccagcccattctccgttgaaacagatcacagcaacgacaaacgctcatggcgctgctttgctccacccgcttcagatagatcattgttagatatttcacatttttgtatggtggaaataaaaatgaaaaatgtatttccaaaagatgaaaattaaaaacattttcataggaaaaaaaaaa

SEQ ID NO: 2132 - DNA, 1543 bp, Homo sapiens
gcacacgcgaggctcccatggctctggcggtggccccgtgggggcgacagtgggaagaggcccgcgccctgggccgggcagtcaggatgctgcagcgcctagaagagcaatgcgtcgacccccggctgtccgtgagtcccccttcgctgcgggacctgctgccccgcacagcgcagctgcttcgagaggtggcccattctcggcgggcggccggcggaggcggccccgggggtcccggcggctctggggactttctactcatctacctggccaatctggaggccaagagcaggcaggtggccgcgctgctgcctccccggggccgaaggagtgccaacgacgagctcttccgggcgggctccagactcaggcgacagctggccaagctggccatcatcttcagccacatgcacgcagagctgcacgcactcttccccgggggaaagtactgtggacacatgtaccagctcaccaaggcccccgcccacaccttctggagggaaagttgcggagcccggtgtgtgctgccctgggctgagtttgagtccctcctgggcacctgccaccctgtggaaccaggctgcacagccctggccttgcgcaccaccattgacctcacctgcagcgggcacgtgtccatcttcgagttcgacgtcttcaccaggctctttcagccatggccaacactcctcaagaactggcagctcctggcagtcaaccacccaggctacatggccttcctcacctatgatgaggtccaagagcgtctgcaggcctgcagggacaagccaggcagttacatcttccggcccagctgtactcgcctggggcagtgggccatcggctatgtgagctcagatggcagcatcctgcagaccatccctgccaacaaacccctgtcccaggtgctcctggagggacagaaggacggcttctacctctacccagatggaaagacccacaacccagacctgactgagctcggccaggcagaaccccagcagcgcatccacgtgtcagaggagcagctgcagctctactgggccatggactccacatttgagctctgcaagatctgtgctgagagcaacaaggatgtgaagattgagccgtgcgggcacctgctctgcagctgctgcctggctgcctggcagcactcggacagccagacctgccccttctgccgctgcgagatcaagggctgggaggccgtgagtatctaccagttccacggtcaggctactgctgaggactcagggaacagcagtgaccaggaaggcagggagttggagctggggcaggtgcccctttcggctcctccattgcccccacggccagatctgccccccaggaagcccagaaatgcccagccgaaagtgagactcctaaaggggaactcccctccagctgcgctgggaccccaggaccctgccccggcctgaaggccagggcacccagatgtgctgctcaagggagccccaagggctggaagggggttgtgaaaccgaaataaactgccaagcctggtctgccaaaaaaaaaa

SEQ ID NO: 2133 - DNA, 3547 bp, Homo sapiens
gtagatcttgccaatttgtacatccgaactggagccaagaacatgcccactgtgttcctgctgacagatgcccaggttctagatgagagcttcctcgtgctgattaatgacttgctggcatcaggagaaatcccagatctgttcagcgatgaagatgtggacaagataatttctggaattcataatgaagttcatgctctgggcatggtagactccagggaaaactgttggaaattctttatggccagggtgcgactacagctcaaaatagccatctcgacggcttcatccatgagagaggcactcttcacccctcctgcagcacattctgacacatgcactaatgagaaacaagaaacactctaacaactggcttgcccagcactggttccagagctctatcattttgtgtttctctccagttggtcgcacgctgagagttagagctcggaagttcccagccatagttaactgcacggctattgactggtttcatgcgtggccgcaggaggctctggtctccgtcagcaggaggttcattgaggaaaccaagggaattgagccagtgcacaaagactctattagccttttcatggcacatgttcacaccactgtaaatgaaatgagtaccagatattaccagaatgagagaagacacaactataccaccccaaagagttttctagaacaaatatcactgtttaagaacctgttgaagaagaagcaaaatgaggtatccgagaaaaaagaacgcctggtgaacggcatccaaaagctaaaaaccacagcctctcaggtgggagatctaaaagccagacttgcctctcaagaagccgagctgcaactgagaaatcatgatgccgaagctctgatcacaaagatcggccttcagacggagaaagtgagccgggaaaagaccatcgctgatgctgaggagcgaaaggtgacagccattcagactgaagtgttccagaaacagagagaatgtgaagctgacttactcaaggctgagcctgcactggtggctgctacagctgcactcaatacactcaacagggtcaacctcagtgagctgaaagcctttcccaaccctcccatcgcagttaccaatgttactgcagccgtgatggtccttctggctcctcggggaagagtgcccaaagaccgaagttggaaagcagctaaagtcttcatgggaaaggttgatgattttttgcaagcattaattaactatgacaaagagcacattccagagaactgtctaaaagtggtgaatgaacactatttgaaagacccagagtttaatccaaacctgattcgaaccaaatcttttgcagcagctggcctgtgtgcctgggtcatcaacatcattaaattctatgaggtatactgtgatgtggagccaaaacgccaagcattagcccaagcaaacttagaactggctgcagctactgaaaaactagaggctatcaggaaaaagcttgtggtgagtgcaaactatgacattgaaaagtcagagaagattcgctggggtcaatccattaagtcctttgaagctcaagagaagacactctgtggagatgttcttctcacggcggcatttgtgtcttacgtcggacccttcacaaggcagtatcgccaggagctggtgcactgcaagtgggttccctttcttcaacagaaggtttccattccactaaccgaaggcctggacttgatatccatgttgacggatgatgctacaattgccgcctggaataacgaaggactgcccagtgacagaatgtccaccgaaaatgccgctatcctaacacactgtgagcgctggcctctggtgatagatccccagcaacagggaattaagtggatcaagaataagtatggaatggacctgaaagtcacacatttgggccagaaagggtttttgaatgccattgaaactgctttggcctttggtgatgtcatcttaattgaaaatctcgaggaaacgatagatccagtcctggatccactacttggcaggaacacaattaaaaaaggaaagtatatcaggattggagataaagaatgtgaatttaacaagaactttcgccttatccttcacacaaaattggcaaatcctcactataagccggaattacaagctcagacaactctcctcaatttcacagtcacagaagatggtctagaagcccagctgctggcagaggttgtcagtattgaaaggccagatttggagaaacttaagttggtattgacaaagcaccaaaatgattttaaaattgagctcaagtatctggaagacgatctccttttgcgcctttctgcggcagagggaagctttctggatgacaccaaactggtagagagattggaggcaacaaagaccaccgtggcagagatagagcacaaggtaattgaagccaaagaaaatgaaagaaaaatcaacgaggcccgagaatgttacagaccagtggcagcaagagcatctcttctttattttgttattaatgacctccaaaaaatcaaccccctctaccaattctctttgaaggcttttaacgtgctgttccacagagcgatcgagcaggctgacaaggtggaagacatgcagggacgcatctctatcctgatggagagcatcacccatgctgtcttcctctacaccagccaggcgctgtttgagaaggacaagctcaccttcctgtcccagatggcttttcagattttgttgagaaagaaagagatagaccctcttgaattggatttcctgcttcgattcacagttgaacacactcatctgagtcccgttgacttcctaacttctcagtcatggagtgctatcaaggcaattgccgtcatggaagaatttcgaggcatagaccgagatgtggaaggatctgccaagcagtggaggaagtgggtagaatccgagtgtccagaaaaagaaaaattacctcaagaatggaagaagaaaagtttaatacagaagctgattcttctgagagcaatgcgccctgacagaatgacgtatgctctcaggaattttgtagaggaaaaactgggtgcgaagtatgtggagaggaccagattggacttagttaaagcattcgaagaaagcagcccagccacccccatattcttcatcctgtctccgggggtagatgcccttaaagacctggagattcttggtaaaagacttggctttacaattgactctggaaaattccacaatgtgtctttaggacaaggtcaggagacggtggcagaagtggccctggagaaagcttccaaaggaggacactgggtcatcctccagaatgttcatttggtagccaagtggctaggaaccttggagaagctccttgaaagattcagccaaggaagccacagagattacagggttttcatgagtgctgagtctgcacctacaccagatgagcatatcatccctcaaggactcctggaaaattccattaagatcactaatgaacccccaacagggatgctggccaatttgcatgccgccctgtacaactttgatcag

SEQ ID NO: 2134 - DNA, 403 bp, Homo sapiens
ccttatagcctctcaacttcttgcttgggatctccaacctcaccgcggctcgaaatggaccccaactgctcctgcgccactggtggctcctgcacctgcactggctcctgcaaatgcaaagagtgcaaatgcaactcctgcaagaagagtgagtgcggggccatctccaggaatctggggctgagccaagtcagaggcaggaaaccagagctgggcatggaggagtaggccaatgatccatttcccacatccccttccccagcaactgattcaggatcagagccagatctttagacgtgatggattcccaagtttcgttcttaaaatagacaaactgaggccaagagagtgcaccagcctgccaagcacagacatgacacctaaggactttcctcccctaagt

SEQ ID NO: 2135 - DNA, 5250 bp, Homo sapiens
gtgagcaacagggctgtttatttcacctgggtgcaggcgggctgagtccaaaaagagagtcagcaaagggtgattatcattagttcttataggtttgggataggtgtacaaagtacattctcaagggcgggggaagaatatatggtatcagttagcgtggggcaggaacaaatcacaatggtggaatgtcatcagttaaggctactttcacttcttttgtggatcttcagttgcttcaggtcatctggatgtacacgtgcaggtcacaggggatttgatggcttagcttggactcagaggcctgacactcctatccgatttgaaattggcaagatgttccttgggctggttggtctgaggacctgagatcataggtggatctcctcacagagtgagggtgaggacaggggactggtctcctgaaggagtcctcctgtcccgggtcttcggcaccaaatgtcacacgtgtccgtgtgaagagaccaccaaaaggctttgcgtgagcaataaagctgtttatttcacccgggcgaatggcagcaccgtgggaccctgccttgaccgcccccgcccttcggcggcctctcccagcagccggcaggctcttgggcgcgccaacagaggggcgcggctgcggctgtagtcgcagccagttcccgttccgggcccgcgaggcagccgccccggtcctgcccctccctcgcgctactgcgggagcagcgtcctcccgggccacggcgcttcccggccccggcgtccccggaccatggcgctctccgggctcttctctagctctcagcggctgcgaagtctgtaaacctggtggccaacatctcagttataagaaatgcacatctccgctcaaggtcccctgggacagtgcaaggaaagaaagaagcctgcggtgaaagtgacactgagtgattgtaagtcaggagactttccttcggtttctgcctttgatggcaagaggtggagattgtggcggcgattacagaaaacgtctgggaagacaagttgctgtttttatgggaatcgcaggcttggaagagacagaagcaattccagaaataaattggaaattgaagatttaaacaatgttgttttaaaatattctaacttcaaagaatgatgccagaaacttaaaaaggggctgcgcagagtagcaggggccctggagggcgcggcctgaatcctgattgcccttctgctgagaggacacacgcagctgaagatgaatttgggaaaagtagccgcttgctactttaactatggaagagcagggccacagtgagatggaaataatcccatcagagtctcacccccacattcaattactgaaaagcaatcgggaacttctggtcactcacatccgcaatactcagtgtctggtggacaacttgctgaagaatgactacttctcggccgaagatgcggagattgtgtgtgcctgccccacccagcctgacaaggtccgcaaaattctggacctggtacagagcaagggcgaggaggtgtccgagttcttcctctacttgctccagcaactcgcagatgcctacgtggacctcaggccttggctgctggagatcggcttctccccttccctgctcactcagagcaaagtcgtggtcaacactgacccagtgagcaggtatacccagcagctgcgacaccatctgggccgtgactccaagttcgtgctgtgctatgcccagaaggaggagctgctgctggaggagatctacatggacaccatcatggagctggttggcttcagcaatgagagcctgggcagcctgaacagcctggcctgcctcctggaccacaccaccggcatcctcaatgagcagggtgagaccatcttcatcctgggtgatgctggggtgggcaagtccatgctgctacagcggctgcagagcctctgggccacgggccggctagacgcaggggtcaaattcttcttccactttcgctgccgcatgttcagctgcttcaaggaaagtgacaggctgtgtctgcaggacctgctcttcaagcactactgctacccagagcgggaccccgaggaggtgtttgccttcctgctgcgcttcccccacgtggccctcttcaccttcgatggcctggacgagctgcactcggacttggacctgagccgcgtgcctgacagctcctgcccctgggagcctgcccaccccctggtcttgctggccaacctgctcagtgggaagctgctcaagggggctagcaagctgctcacagcccgcacaggcatcgaggtcccgcgccagttcctgcggaagaaggtgcttctccggggcttctcccccagccacctgcgcgcctatgccaggaggatgttccccgagcgggccctgcaggaccgcctgctgagccagctggaggccaaccccaacctctgcagcctgtgctctgtgcccctcttctgctggatcatcttccggtgcttccagcacttccgtgctgcctttgaaggctcaccacagctgcccgactgcacgatgaccctgacagatgtcttcctcctggtcactgaggtccatctgaacaggatgcagcccagcagcctggtgcagcggaacacacgcagcccagtggagaccctccacgccggccgggacactctgtgctcgctggggcaggtggcccaccggggcatggagaagagcctctttgtcttcacccaggaggaggtgcaggcctccgggctgcaggagagagacatgcagctgggcttcctgcgggctttgccggagctgggccccgggggtgaccagcagtcctatgagtttttccacctcaccctccaggccttctttacagccttcttcctcgtgctggacgacagggtgggcactcaggagctgctcaggttcttccaggagtggatgccccctgcgggggcagcgaccacgtcctgctatcctcccttcctcccgttccagtgcctgcagggcagtggtccggcgcgggaagacctcttcaagaacaaggatcacttccagttcaccaacctcttcctgtgcgggctgttgtccaaagccaaacagaaactcctgcggcatctggtgcccgcggcagccctgaggagaaagcgcaaggccctgtgggcacacctgttttccagcctgcggggctacctgaatagcctgccccgcgttcaggtcgaaagcttcaaccaggtgcaggccatgcccacgttcatctggatgctgcgctgcatctacgagacacagagccagaaggtggggcagctggcggccaggggcatctgcgccaactacctcaagctgacctactgcaacgcctgctcggccgactgcagcgccctctccttcgtcctgcatcacttccccaagcggctggccctagacctagacaacaacaatctcaacgactacggcgtgcgggagctgcagccctgcttcagccgcctcactgttctcagactcagcgtaaaccagatcactgacggtggggtaaaggtgctaagcgaagagctgaccaaatacaaaattgtgacctatttgggtttatacaacaaccagatcaccgatgtcggagccaggtacgtcaccaaaatcctggatgaatgcaaaggcctcacgcatcttaaactgggaaaaaacaaaataacaagtgaaggagggaagtatctcgccctggctgtgaagaacagcaaatcaatctctgaggttgggatgtggggcaatcaagttggggatgaaggagcaaaagccttcgcagaggctctgcggaaccaccccagcttgaccaccctgagtcttgcgtccaacggcatctccacagaaggaggaaagagccttgcgagggccctgcagcagaacacgtctctagaaatactgtggctgacccaaaatgaactcaacgatgaagtggcagagagtttggcagaaatgttgaaagtcaaccagacgttaaagcatttatggcttatccagaatcagatcacagctaaggggactgcccagctggcagatgcgttacagagcaacactggcataacagagatttgcctaaatggaaacctgataaaaccagaggaggccaaagtctatgaagatgagaagcggattatctgtttctgagaggatgctttcctgttcatggggtttttgccctggagcctcagcagcaaatgccactctgggcagtcttttgtgtcagtgtcttaaaggggcctgcgcaggcgggactatcaggagtccactgcctccatgatgcaagccagcttcctgtgcagaaggtctggtcggcaaactccctaagtacccgctacaattctgcagaaaaagaatgtgtcttgcgagctgttgtagttacagtaaatacactgtgaagagactttattgcctattataattatttttatctgaagctagaggaataaagctgtgagcaaacagaggaggccagcctcacctcattccaacacctgccatagggaccaacgggagcgagttggtcaccgctcttttcattgaagagttgaggatgtggcacaaagttggtgccaagcttcttgaataaaacgtgtttgatggattagtattatacctgaaatattttcttccttctcagcactttcccatgtattgatactggtcccacttcacagctggagacaccggagtatgtgcagtgtgggatttgactcctccaaggttttgtggaaagttaatgtcaaggaaaggatgcaccacgggcttttaattttaatcctggagtctcactgtctgctggcaaagatagagaatgccctcagctcttagctggtctaagaatgacgatgccttcaaaatgctgcttccactcagggcttctcctctgctaggctaccctcctctagaaggctgagtaccatgggctacagtgtctggccttgggaagaagtgattctgtccctccaaagaaatagggcatggcttgcccctgtggccctggcatccaaatggctgcttttgtctcccttacctcgtgaagaggggaagtctcttcctgcctcccaagcagctgaagggtgactaaacgggcgccaagactcaggggatcggctgggaactgggccagcagagcatgttggacaccccccaccatggtgggcttgtggtggctgctccatgagggtgggggtgatactactagatcacttgtcctcttgccagctcatttgttaataaaatactgaaaacactaaaaaaaaaa

SEQ ID NO: 2136 - DNA, 1634 bp, Homo sapiens
cggacgcgtgggtttttttttcgccggaaatcccggaagtgacagctttgggggtttgctgctggctctgactcccgtcctgcgatgggttgcgacgggggaacaatccccaagaggcatgaactggtgaaggggccgaagaaggttgagaaggtcgacaaagatgctgaattagtggcccaatggaactattgtactctaagtcaggaaatattaagacgaccaatagttgcctgtgaacttggcagactttataacaaagatgccgtcattgaatttctcttggacaaatctgcagaaaaggctcttgggaaggcagcatctcacattaaaagcattaagaatgtgacagagctgaagctttctgataatcctgcctgggaaggggataaaggaaacactaaaggtgacaagcacgatgacctccagcgggcgcgtttcatctgccccgttgtgggcctggagatgaacggccgacacaggttctgcttccttcggtgctgcggctgtgtgttttctgagcgagccttgaaagagataaaagcggaagtttgccacacgtgtggggctgccttccaggaggatgatgtcatcgtgctcaatggcaccaaggaggatgtggacgtgctgaagacaaggatggaggagagaaggctgagagcgaagctggaaaagaaaacaaagaaacccaaggcagcagagtctgtttcaaaaccagatgtcagtgaagaagccccagggccatcaaaagttaagacagggaagcctgaagaagccagccttgattctagagagaagaaaaccaacttggctcccaaaagcacagcaatgaatgagagctcttctggaaaagctgggaagcctccgtgtggagccacaaagaggtccatcgctgacagtgaagaatcggaggcctacaagtccctctttaccactcacagctccgccaagcgctccaaggaggagtctgcccactgggtcacccacacgtcctactgcttctgaagcccgcactgccaccgctcctgccccagaaggttgtttagtttccacgtaggcaggtcgctttgtgcctctgagtgcgctgctgtgtgttctctctatagttctgtgtcataaagctgtcctggccagccttcaagctggtgtggccactcttgatgtgaggcgtgtcggttccaggggggacatgggaggggctgcacagtggcccgaggtcatgcttgcttccacctgcaggtgcatttggtcctttccatggccaggaagccctgtgggctgcactttttatgcttgcagtaacaagagactccagagtcctcaccggtgcagagttggcacatattaattaactaaaattctaatgatcttgctaccagcaataaatcaagtaggccaagtgaaactgggctttaaaaaggatggatttcaaatacactgtgcccactagaagcttcgaagggcctcgtccctctgctacagccctgggaggagccaggatccttgttggtctagctaaatactgttaggggagtgtgccccatctcatcatttcgaagatagcagagtcatagttgggcacccagtgattgggttcaaaaataaagctggtctgcctcttctcaaaaaaaaaa

SEQ ID NO: 2137 - DNA, 2553 bp, Homo sapiens
cccacgcgtccggacccacgcgtccggtttcttggagcttccacaaacttaaaaccatgaaacatctattattgctactattgtgtgtttttctagttaagtcccaaggtgtcaacgacaatgaggagggtttcttcagtgcccgtggtcatcgaccccttgacaagaagagagaagaggctcccagcctgaggcctgccccaccgcccatcagtggaggtggctatcgggctcgtccagccaaagcagctgccactcaaaagaaagtagaaagaaaagcccctgatgctggaggctgtcttcacgctgacccagacctgggggtgttgtgtcctacaggatgtcagttgcaagaggctttgctacaacaggaaaggccaatcagaaatagtgttgatgagttaaataacaatgtggaagctgtttcccagacctcctcttcttcctttcagtacatgtatttgctgaaagacctgtggcaaaagaggcagaagcaagtaaaagataatgaaaatgtagtcaatgagtactcctcagaactggaaaagcaccaattatatatagatgagactgtgaatagtaatatcccaactaaccttcgtgtgcttcgttcaatcctggaaaacctgagaagcaaaatacaaaagttagaatctgatgtctcagctcaaatggaatattgtcgcaccccatgcactgtcagttgcaatattcctgtggtgtctggcaaagaatgtgaggaaattatcaggaaaggaggtgaaacatctgaaatgtatctcattcaacctgacagttctgtcaaaccgtatagagtatactgtgacatgaatacagaaaatggaggatggacagtgattcagaaccgtcaagacggtagtgttgactttggcaggaaatgggatccatataaacagggatttggaaatgttgcaaccaacacagatgggaagaattactgtggcctaccaggtgaatattggcttggaaatgataaaattagccagcttaccaggatgggacccacagaacttttgatagaaatggaggactggaaaggagacaaagtaaaggctcactatggaggattcactgtacagaatgaagccaacaaataccagatctcagtgaacaaatacagaggaacagccggtaatgccctcatggatggagcatctcagctgatgggagaaaacaggaccatgaccattcacaacggcatgttcttcagcacgtatgacagagacaatgacggctggttaacatcagatcccagaaaacagtgttctaaagaagacggtggtggatggtggtataatagatgtcatgcagccaatccaaacggcagatactactggggtggacagtacacctgggacatggcaaagcatggcacagatgatggtgtagtatggatgaattggaaggggtcatggtactcaatgaagaagatgagtatgaagatcaggcccttcttcccacagcaatagtccccaatacgtagatttttgctcttctgtatgtgacaacatttttgtacattatgttattggaattttctttcatacattatattcctctaaaactctcaagcagacgtgagtgtgactttttgaaaaaagtataggataaattacattaaaatagcacatgattttcttttgttttcttcatttctcttgctcaccaagaagtaacaaaagtatagttttgacagagttggtgttcataatttcagttctagttgattgcgagaattttcaaataaggaagaggggtcttttatccttgtcgtaggaaaaccatgacggaaaggaaaaactgatgtttaaaagtccacttttaaaactatatttatttatgtaggatctgtcaaagaaaacttccaaaaagatttattaattaaaccagactctgttgcaataaaaaaatatagttttaaaagtggacttttaaacatcagtttttcctttccgtcatggttttcctacgacaaggataaaagacccctcttccttatttgaaaattctcgcaatcaactagaactgaaattatgaacaccaactctgtcaaaactatacttttgttacttcttggtgagcaagagaaatgaagaaaacaaaagaaaatcatgtgctattttaatgtaatttatcctatacttttttcaaaaagtcacactcacgtctgcttgagagttttagaggaatataatgtatgaaagaaaattccaataacataatgtacaaaaatgttgtcacatacagaagagcaaaaatctacgtattggggactattgctgtgggaagaagggcctgatcttcatactcatcttcctcattgagtaccatgaccccttccaattcatccatactacaccatcatctgtgccatgctttgccatgtcccaggtgtactgtccaccccagtagtatctgccgtttggattggctgcatgacatctattataccaccatccaccaccgtcttctttagaacactgttttctgggatctgatgttaaccagcccacgcgtccgcggacgcgtggg

SEQ ID NO: 2138 - DNA, 2553 bp, Homo sapiens; identical to SEQ ID NO: 2137

SEQ ID NO: 2139 - DNA, 2553 bp, Homo sapiens; identical to SEQ ID NO: 2137

SEQ ID NO: 2140 - DNA, 836 bp, Homo sapiens
cccgggtcgacgatttcgttctcctcagaagtcgcttagctcttcggtggttgtcacacgtccggaggcctagccgtcgcgtacctaggatgccgcgtggaagccgaagccgcacctcccgcatggcccctccggccagccgggcccctcagatgagagctgcacccaggccagcaccagtcgctcagccaccagcagcggcacccccatctgcagttggctcttctgctgctgcgccccggcagccaggtctgatggcccagatggcaaccactgcagctggcgtggctgtgggctctgctgtggggcacacattgggtcacgccattactgggggcttcagtggaggaagtaatgctgagcctgcgaggcctgacatcacttaccaggagcctcagggaacccagccagcacagcagcagcagccttgcctctatgagatcaaacagtttctggagtgtgcccagaaccagggtgacatcaagctctgtgagggtttcaatgaggtgctgaaacagtgccgacttgcaaacggattggcctaatgaagaagttcaacctggagagatggaaaatcagctctcataactaagttaatttagtataaaaatagaattgatagtgagggtataaagtgtaaccatcagttaaacctctcctgtcattcctagcttccttgcttcagaattgaaatggaagtgggggtgtccctactctgtagaatctgggactgggcaaatgtttgtgtggcctccttaaactagctgttatgttatgattttattctttgtgagttaattagaataaagtcattttcttccaaggtaaaaaaaaaa

SEQ ID NO: 2141 - DNA, 701 bp, Homo sapiens
  misc_feature (1)...(701): n = a,t,c or g
gagggaactcctacaaccaccgctcgctcgccgcctacccctacatgagccactcgcagcacagcccttacctccagtcctaccacaacagcagcgcagccgcccagacgcgaggggacgacacagatcaacaaaaaactacagtgattgaaaacggggaaatcaggttcaatggaaaagggaaaaagattcggaagcctcggaccatttattccagcctgcagctccaggctttaaaccatcgctttcagcagacacagtatctggcccttccagagagagccgaactggcagcttccttaggactgacacaaacacaggtgaagatatggtttcagaacaaacgctctaagtttaagaaactgctgaagcagggcagtaatcctcatgagagcgaccccctccagggctcggcggccctgtcgccacgctcgccagcgctgcctccagtctgggacgtttctgcctcggccaagggtgtcagtatgccccccaacagctacatgcctggctattctcactggtactcctctccacaccaggacacgatgcagagaccacagatgatgtgagttgcccaagggaacaccctagggaaacgtctgaacaaggaaaagaggatccgggaacctgcttgtatctgcgaaaaaggagccaaaggagcaaggtttaggaagagttcttaaggtttggncaagagg

SEQ ID NO: 2142 - DNA, 7315 bp, Homo sapiens
gccaacttcacacttcctactctatgaggagctgagaattgactttctgtcttcttcccaatacctgtagatggccgagacagaggttcaaacccatccctggaaagtacaagtagtgagctgagcacaagtacgtcagagggaagtctgagtgccatgtctggccggaatgagctgcacagtagattgcacccccatcctcaaagttcactcatccccatgatgttctccccacctgagtcactgctggcatcctgcatccttcgcgggaacttcgcagaagcccatcaggtgctgttcacgttcaacctgaagtcctcacccagttcaggggaactgatgttcatggagcgctaccaggaagtgatccaagaactggcccaagtagagcacaagattgaaaaccagaactcagatgcgggtagcagcaccattcggagaactggcagtggccgctcaactctacaggccattggcagcgctgcagcagcaggaatggtgttttactctatctctgacgtgactgacaagctgctcaacacctctggagaccccatccccatgctccaggaggacttttggataagcacggctctagtggagcccactgctcccctgagagaggttctggaagacctcagtccccctgccatggctgcatttgacctagcttgctctcagtgccagctctggaaaacctgcaagcagcttttggagacagccgaacggcgtttgaatagtagccttgaaaggcggggtcgacggatagaccacgtactcctaaatgctgatggcattcgaggttttccagttgttcttcagcaaatcagtaagagtctcaattatctgcttatgtcagccagtcaaaccaaatcagagagtgtggaagaaaagggaggaggccctccacggtgcagcatcactgaactgcttcagatgtgctggcccagcctaagcgaggactgtgttgccagccacaccaccctctcccagcagctagatcaggtccttcagtcactgagagaggcactagagctgccagagcccaggactcctccactgtcttccctggtggagcaggcagcccagaaagctccagaggcagaggcccaccctgtgcagatccagactcagctcctccagaagaacctgggcaaacagaccccatcaggcagcaggcagatggactacttgggcaccttcttcagttactgcagcacccttgctgcagttctccttcaaagtttgagctctgagcctgatcatgtggaggtcaaggtaggaaatccctttgttctgctgcaacagagctcttcccaactggtgtcacatctcctgtttgagagacaagttcccccagagagactggcagcccttctggcccaagagaatctcagcctaagtgtgccacaggtcatcgtcagctgctgctgtgagccccttgctctttgctcatcccggcaaagccagcagacctcctccctcctgactcgtctgggtactctggcccagctacacgcctctcactgcctggatgacctcccactttctacaccgagctccccgaggacaactgagaaccctacattggaaagaaagccctactcctccccaagggactcatcactcccagccctcacctcctctgccttggcctttcttaagtcacgctcaaagctcctagctacggtggcctgcctgggggcttccccgaggttaaaggtcagcaaacccagcttgtcatggaaggaacttcgtggccgcagggaggtgcctctggctgcagagcaggtagcccgggagtgtgagcgccttctggaacaattccctctgtttgaggccttcctcctggctgcctgggagcccctgcgagggtctttgcagcaggggcagagtctggcagtgaatctctgtggttgggccagtctttctaccgttctcctgggcctacattctcccattgccctagatgtactgagtgaggcttttgaggaatccttggtggccagagattggtcccgggcccttcagctcactgaagtgtacgggcgagatgtggacgatttgagcagcataaaggatgcagtcctgagctgtgctgtggcatgtgacaaagaaggttggcaatacctgtttcccgtgaaggatgcatctctgagaagtcggctggccctacagtttgtggacaggtggcccctggagtcatgcctggagattctggcctactgcatttcagacacggctgtccaagaaggactaaagtgtgagctacagaggaagctggcggagctgcaggtgtatcagaagattctgggtttgcagtctcccccagtgtggtgtgactggcagaccttgaggagctgttgtgttgaggacccatcaactgtcatgaacatgattctagaagcacaggagtatgaactgtgtgaagagtggggctgcctgtaccccattccaagagaacatttaatcagccttcatcaaaagcatcttctccaccttctagaaagaagagatcatgacaaggctctgcaactcctgcgaagaatccctgaccccaccatgtgccttgaagtgacagagcaatccctcgaccagcacactagcttggccacttctcacttcttggccaactacctcaccacccacttctatggacaactgactgctgtccgacaccgtgaaatccaggcgctgtatgtgggatccaagattctgctgaccctgcctgagcagcaccgggccagctattcccacttgtcctctaaccccctgttcatgctggagcagctgcttatgaacatgaaggtggattgggccactgtggctgtgcagactctccagcagctgctggttggacaggagattggcttcactatggacgaggtggactcactgctttccagatacgcagagaaagccctggactttccataccctcagagggagaaacgatcagattctgtgattcacctccaagaaattgtccaccaggctgcagatcccgagaccctccctagatcaccatcagcagagttctctcctgctgctcctcctggtatctccagtatacattcccctagtctaagggaaaggagtttcccaccaacccagccctcacaggaatttgtgcccccagcgacaccccctgccaggcaccagtgggtaccggatgagactgagagtatctgcatggtctgctgcagggagcacttcaccatgtttaacaggcgtcatcattgtcgccgctgtggccggctagtgtgcagctcctgctccactaagaaaatggtggttgaaggctgcagagagaaccctgctcgtgtgtgtgatcagtgctatagttactgcaacaaagatgtaccagaggagccttcagaaaaaccagaagctctagacagctccaagagtgaaagccctccatactcgtttgtggtgagagtccccaaagcagatgaggtggaatggattttggatctcaaagaggaggaaaatgagctggtgcggagtgaattttactatgagcaggcccccagcgcctccttgtgcattgccatcctgaatctgcaccgggacagcattgcctgtggtcaccagctgattgagcactgctgcaggctctccaagggcctcaccaacccagaggtggatgccgggctgctcacggacatcatgaagcagctgctgttcagcgccaagatgatgttcgtcaaagccggccagagccaagacttggctctttgtgacagctacatcagcaaggtagatgtgctgaatattttagttgctgctgcctatcgccacgtgccatctttggatcagatcttgcagccagctgcagtaaccaggctaaggaaccagcttttggaagccgagtactaccaactgggcgttgaggtctccacaaagactgggcttgataccaccggggcgtggcatgcttggggcatggcctgcctcaaagccgggaacctcactgctgcacgggagaagttcagtcgctgtctgaagcccccatttgacctcaatcagctgaatcatggctcaaggctggtgcaggatgtggttgagtacctagagtccacagtgaggccctttgtatccttgcaagatgacgattactttgccaccctgagggaactggaagctacccttcggacgcagagcctttctctggcagtgattcctgaagggaaaatcatgaacaacacctactaccaggaatgcctcttctacctgcacaactatagcaccaacctggccatcatcagcttctacgtgaggcacagctgcctgcgggaagctcttctgcaccttctcaacaaggagagtcctccagaagtttttatagaaggcattttccaaccaagctataaaagtgggaagctacacactttggagaacttgctagaatccattgatccaaccttggagagctggggaaagtacttgattgctgcctgccaacatttacagaagaagaactactaccacattctgtatgagctgcagcagtttatgaaggaccaagttcgggccgccatgacctgtattcggttcttcagtcacaaagcaaagtcatatacagaactgggagagaagctctcatggctacttaaggccaaggaccacctgaagatctacctccaagaaacatcccgcagctctggaaggaagaaaaccacattcttcagaaagaagatgactgcagctgatgtgtcaaggcacatgaacacacttcagctgcagatggaagtgaccaggttcttgcatcggtgcgaaagtgctgggacctctcaaatcaccactttgcctctgccaaccctgtttggaaataaccacatgaaaatggatgttgcctgcaaggtcatgctgggagggaaaaatgtagaagatggttttggaattgctttccgtgttctgcaggacttccagctggatgctgccatgacctactgcagagctgcccgccagttggtggagaaagagaagtacagtgagatccagcaactgctcaaatgtgtcagtgagtcaggcatggcagccaaaagtgacggggacaccatcctcctcaactgcctggaagcgttcaagagaattccgccccagtgctgtttctgttctgcacaggagctggagggcctgatccaggcaatacacaatgatgacaacaaggttcgggcctacctgatatgttgcaaactgcgttctgcctacttgattgctgtgaagcaagaacactcacgggccacagcccttgtccagcaggtgcagcaggccgccaagagcagcggggatgcagtagtgcaagacatctgtgcccagtggcttctgacaagccacccccggggtgcccatggcccaggctccaggaagtgaccttgggcagtggggccaggaacacgtggcctgagagctgggcaacagcagtgatggcgatgccctccacctctttcctccagtggagtgggacttctctggctctgccctaggttggaaagagttggattggaccctacttgccttcccgggcaaggataggacctttcacgcaagtgccatgtttctctaaaattgtggaatctatgtgtgtttgtctggagatggccagttctttctacctcagagtgagtgagtgagtatgtgtgcacacacgtgtgcattgtttcctgtgcgctgatgtttacgcccaagcatttctgaacaaatgaaactcttctccatttaaaagaggcactttactttggacttgccactctgaaaaccttccctgcgttttggttcttgacccgggttgtcctgtttgtatagtcccccctctgtgggacgtgctttagtagctcctcttacctaggaggggcttttacagaggaattaggaggcaacaccaaaagggattgcctcttttccttccttcccattccaaaaatttcaggaggatgggctttggggggcaagtggctacctggtgggaattaaacctgttttccaggtgtctcttctcccaagcacaagaagtcctggagtctttggaaggtagtctgaatagaagggttttcaggtgcaggcatctgaaagctgtgggtatgtgtataaatgatcaggtctgtgaggctaacacgggcaagagggaaagaaaggctaaccatccaaacagggatacaggggaggcggtggggggtggtggggggagcgggtgctcacaagcacagagctgcctgttgtgaatgtccctgctgcaaagttggtgggtgagagaatgggacttcctctttgagagtctggggagagaaaaggtggccaggatcctaggactgaatgactcgattttacctatttgagctgcagtcctgtttgcgctccttgaattggttaggaagctgcttccttttccctcctgcttcccttcagtctcttcaggaccacaggatggatatgcagacatgtggggtcattgggaagggagtgcgcttcttttctctgtcttagaaaagggagtcaagggttggctttggaattgggcctctggacagagtcagaatgagggaataatgaataggtcacatctggttggtggaaaactaggtgaagtgcttctttaatatgcactgtcttgtcttcccacgcaagatgtgacaatgtttgagaaaaggtgtgtcatactcagtgacttcaatttgcaaatgtggggcctaaagaaagctctgcagctctgaacctctcactggccagagctcagcctattggtcccatccatgatgctgagacaaacagaaactggaagctgaagtcagtgtctctggtgctcagaaaccctgtggatttccctctgaaccaagatttttagtagtaaaataaacaactcatggacatctgtcagatgagaagttttggtcctgttagagaggagaaagactgtaatgaaactactagacccatttgggctaaagtttggcttttcctttcttgagtcatagaacatatccatctcccaggaaatgtccttctctgggcgtctgcttgcccttctgagtctgccttttttgcactgaacataagcactttatactaatggggtcacaaatcttgcagcccttaatttgggataagaccagattttcctgacattttcctctaactcattgaactatcaaattataggcaaccactgactagactgatatgagatgaggctaaaagcctttgaacaccacgctgtagtctccaacagaaaaacaccaccaaaacagatacccatgttgaggggttgaatgttttactacaaacaagccacaataaagtgtctatcaacatg

SEQ ID NO: 2143 - DNA, 1336 bp, Homo sapiens
  misc_feature (1)...(1336): n = a,t,c or g
gcggccgctttcgccagtccgtccggccgttccgcattaggtccgggataactaggtggagtaggtgtgcggcccgccgccggacagcccgctcgctgtttctttaagcccccgcctgcgtcttcacggccctctcccgttctgctggaaagctgacgtggggcaatccgttcagaccctccatggagaagtttgggatgaatttcgggggcggcccgagcaagaaggacttgcttggagactatagagacccagaagaagcagcttctccagtaccaggcacggctcaaggatgtggtccgtgcctataaaagcctgctgaaggagaaagaggcattagaggccagcatcaaggtgctgtcggtatcccacgaggcagatgtgggcctcgcaggtgtccagctttccaggcctcaccttttcctgactctgtggatgaccggtgctccactcacagcgaggatagcacttgggaccgccactagcttggatacctgcggccagtctcaccagcaccaagggtgagtttggggtagaagatgacagaccggcccgtggaccaccacctccaaagtccgaagaggccagttggtccgagagtggcgttagcagtagcagtggggatgggccatttgcaggtggggaggtggacaaaagactgcaccagctgaagactcagttggctactttgaccagttctttggctacagtcactcaggagaagtcccgcatggaggcttcttacttggctgacaagaaaaagatgaaacaggacttagaggatgccagtaacaaggcggaggaggagagggcccgcctggagggagaattgaaggggctgcaggagcaaatagcagaaaccaaagcccggcttatcacgcagcagcatgatcgggcccaagagcagagtgaccatgccttgatgctgcgtgagctccagaagctgctgcaggaggagaggacccagcgccaggacttggagcttaggttagaagagacccgagaagccttggcaggacgagcatatgcagctgaacagatggaaggatttgaactgcagaccaagcagctgacccgtgaggtggaggagctgaaaagtgaactgcaggccattcgagatgagaagaatcagccagatccccggctgcaagaacttcaggaagaggctgcccgccttaagagccatttccaggctcagttacagcaggaaatgagaaaggtaattatccacatctctttcaaacatcagccattgacctgaagtgagaaatatnnnnntttttcctcgtgccaagatgagcgtaatcatattcaagacgggtntcaattccggccc

SEQ ID NO: 2144 - DNA, 1999 bp, Homo sapiens
ttttttttttttggtttttattgattctttttaagattgaaacagactattacaacaatatttgagatttcacagagaactgcatgcttttgttattaaaagacttttgttgaaaaatttgacctttacctcttatgaacgaaagaaatatagaggtttcaagcatttttgccagcacagagtcattcacaacaaccttctagatgcttattttccaccttttcctacagaaggtaatattcagttaccagaaggccatctccaccactgaatgattcaaagcttcagagctcaaaagtgatcagaactcacaaattagcataattagtccaaagcttgatttaaatgtttgaagaacagcaaacatcaaataatataataccaaatagaatattatagtctctatgaggtaataactcatcagctacaaccacctaaaactgaaattttctgtacttagtttctattagtacaacaccttcattcttaatgcttcttagggcatcacaggttttagaaattaatgtatttttagcattccacagtaatgatcactttcaaaaactgcaatatacatctgcatgttacactgacatacaacacataagtattttgtcacacatcaacttttagcctcaaataatagaatacaaaaagctacactggacataacaccacagaacttttgaatatccccttttcccaattgttaacaggtagtactttttttctaaagagaaagtgatgaaaaatccaaaatttctgcatccagtgtttgactccaactttctactttatcgtctcctggtaccaccatatcctgatgcagttctggttttcgtgtctgagtttgaacataccgaatagctgcccgagcctccatgaaggggtgagtaagccctattccacgtgccagggtaggagggaggataggacgggtagtaccacgagtctgagaagggtgttgccgctctattgctgccaaacaaatatcctagtattccaccagttcccaagcctgtccagaaccctggtcctgaattttcatatccttgttgtcctgtaaaagcactgccaaaaccagaagttgcaccatggccagtattctgtggtcctgtgaactcagacttaaagcctgggggaggaggtcctgctgagttggtgaatctctggtaacggtgggaaaatggaggatactcagagtacggtggaggagaatactgcccgtcactcaggaacagcttatagactacaaaggcgatcccaaggagtaccacgatggtaatcaatccactcatgttacaggaatccgccgaggaccacttataataataatcagagaaagaggcaaagccgtgctgctttccagactccttcagtttctgcaggccaagttctgtataatctaaattatactccaagccacaagaacctcttagtacatactggtcttcagaggactcatagccttcacagctcaccacagtttttccaaatttgtatgcaatatctaagtccgtcttacattcccactgtacatcatacccatcccagcctttgttctgacactgtatgacttttggggtataagaatcacaaccagctgtgcctccaacacatttcaactgtgggatgggatccagcctgcgggaggtggtatagcggtcatagtggagggtaagagcttttacatcccgcagcaacattctgtcagggtcgttccagcccagggcagggcccgcggtcagcagaaacaaatgcaagccgaggagcaagcagtacccggccgctcccggcccgcaggctgcggccatggcgctcgatgaagatggcgccgggctgccagacgcctacgggccgaacctgggtgcggtagcgcgcgcgacgctgcgcagctacaccgctacccctggcggcggcgaaggaacggcccgactgcagagctgcagccgcaacggatccgtgcgccaaccctacgtcactgccgctgcggcccgtg

SEQ ID NO: 2145 - DNA, 2631 bp, Homo sapiens
ttttttttttttgaaaggaagcgagtaggttttaattcaagatacaggcccctcgcgttgatctcgtagaaggaaactcagtggactgacaagctcaagtcatgtatgagggcacgtcctgggacccccccccccctcctgccataggaaggacgacagcttcaggcagagggaaggaggtttgagatcagggttgggccccatacagattgtgtgaggtggtctcaagtacaaatacttatctgaggctcctgaacaggccagaaattggtgagtctcaagtaggtgtctggggaaagagagggaaggggcctgccctcgctccaggggagctggtcgccgtttggcaggcctaacagacctctaaggcacagactggtagcaggagagagctatgtcctgtactccagatgctgggtaaggagcagctggatgtgctcagatggggctcatctgagaaggtggaggtaggagagagggcagaagagagtaagccacttccaaacgtccctccaaaaaatctgaaaggagttactatgctaatgcgctgggcatgaatccaattcagaaccaatctggtgggcccctcatggctcagaaatactctgggtagggctggctgttactgcagtcacggacgctgagttatgtacagagagtacgtcaggaaagtggccttcagagaaagagccccatggcctaaccccaaagtcctagcccgtccaccagcacctctgagttcactggccacggcaccgggctgcttgatctctgggaatgcagcggtggcagcaaagtgcccttggctcacccggctgcaaggtcagcccttcaagctgcttgcagaaacgctggtagtttggggcaaggccttcggctgcaagcttgctgcccagtcctgcctgagacggctgccagagcctgtgcgcgctgcctgaagccttaaagaaaagagatggcggtgtcaaggcgacggtgccacgtgcctggccggggaggcccaggaggggcccggacgaaggcaggctattgaatggcctctggccccaggagcagagtggtctcctctgtccgcacactgagccagccctgtgtgccagggcccaaccgcttctccggccttcgctgggtgaggccttccccagcagggcacgaggccagaggctgggtacactgggtccctgggtgctagttcagctggtcataccccggtctctttctgtacaaacagaagtgctggatgaagaagacgacgtcgaagacgatggagaagaccccgagtccaaacttggttgggtctccgaagatcagcgtccactggtcgttgttgtaggactggaggaacatctgcaggaggctgaagctgcccccggtgaagtccaggagcacgttgccaatgctccagccctcagtgcttttgtagtaaaagttcatgtaggcctgtggaaaatacttgaccagcgtgactgcgagcttgatgtaggagaagcagaagagaaactgcagccacgtgatcactcccactgcagccacgatcatggtgacaaatgcgaagagccacgcgagcaccaggaagccgatggcaggccaggacacgcgctggccaccgcgctcatacaggcagcactgcacgatgatgatcagcgtgaggacaaccgcgtgcaggctgaagaagacgtcgttgctgttcacggggttcactccgttggggtatttgaggagaaactgctccttgatgtagggcacccagaggaggccgatgttgaatacactgtaggccacgaagcccgtcaggttcagagccacgaagtcgaagctcagaccaatgacacttttccgcctccaattcatgatcacctgagggtagaaggagatggaccaggccacaaagtagatccagccaatcacctggtttatgatgctaatggcgctgctgcggatcacaagaaagcgtatcctcgggccggtctgattggagtgatttccatgtagataaacagtaagttgtccaacattttgagatgtcacttgaaaagaggagtttgtcactccaggaggcaccacaacttcatcggggagctcaaggatagtaatatttttggaacgaaatgtgatttcaaaagtgatcaccagggttgcatttaatggtggccgcagggtgaggctgacgttggtcgagctgccgttctccagctttacgacaggaggaacagtgaggctgacgcttgactcacatttctctacgagcttcaggggaaaaaggataaaaatagtcagccaattccttatcatgtttctcgatttctcagaactctgttgcttagggcgcctagcgagctctcacaaaacacagtaatcctcaatgttactggaagaggcagagctcaggagtcctcccttcgcccagtgtgaaaacccggaggggaggatggggtctcgtgctgctcagtcccccggagccccgcactccgcacgtcaaccggcgctctcgcaaaggttctctcagcgtctccaaagcaatctgagcgcccccaggctcgaggaaccgccctcacgggacgcatgagcctcgccaggtgccggtcaggaatgcaccgcgttcccctgcccggctagactttgggagaggcg

SEQ ID NO: 2146 - DNA, 2629 bp, Homo sapiens
tttcgtgatgggcggagccccagccgctagtgctggtggccgccgctgctgccccagctggagcccgagccgccgcctctgcgtccgcgcgtcgctgcttcccagggcggcggtatgctggggaaaggagtagtcggcggtggcggcggcaccaaggcccccaagccctccttcgtgtcgtacgtacgccctgaggaaattcacacaaacgaaaaggaagtaacagagaaggaagtaactcttcacttgttgccaggtgaacagctgctttgtgaagccagcacagtactgaagtatgtccaggaagattcctgtcagcatggggtctatgggaggcttgtctgcacagacttcaagattgccttcttgggtgatgatgaatctgcattggataatgatgaaactcaatttaagaataaggttataggagaaaatgacattacactccactgtgttgatcagatttatggagtgtttgatgagaaaaagaaaactctctttggacaactgaagaaataccctgagaagctcatcatccactgcaaagaccttcgagtgttccagttttgtctgaggtacacaaaggaagaggaagtcaaaaggattgtcagtggcataattcatcatacccaggctcctaaactgcttaaacgattatttctgttttcctatgcgactgctgcacaaaacaatacagtcactgatcccaagaaccataccgtaatgtttgacacacttaaggactggtgttgggaactggaacggaccaaaggcaacatgaagtacaaagcagtgagtgtcaacgaaggctataaagtctgtgagagattgccagcatactttgttgtccccacccctcttcctgaagagaatgtgcagcgctttcagggtcatggcataccaatatggtgttggtcctgccacaatggaagtgcccttttgaaaatgtcagcactgcccaaagaacaggatgacggcattttacaaatccaaaagagcttcttagatggaatttacaagaccatccacaggccaccctatgaaattgttaaaacggaagacctgtcaagcaacttcctgtccctgcaggaaatccagactgcatactctaaatttaaacagctatttctgatagataacagtactgaattttgggacacagatataaaatggttttctctgttggaaagtagcagctggcttgacataatcagacgttgcctgaaaaaagcaatagagattacagaatgtatggaagcacaaaacatgaatgttcttcttttagaggagaatgcatccgacctctgctgtctcatttcctctctggtgcaactgatgatggacccccactgcagaaccagaattggtttccagagcctcatccaaaaggagtgggtcatgggtggccactgtttcttggatcgctgcaaccatctccgccagaacgacaaagaggagcatcaacgacaactttctttgccacttacacaatctaagtcatctcccaaaagaggatttttcagggaagaaacagatcatttaattaaaaaccttctgggcaagagaattagcaaacttattaattcttctgatgagctccaagacaactttcgagagttctatgacagctggcatagcaagtccactgactaccatggtttgttgttaccgcatatcgaggggcccgaaatcaaagtctgggcccagcgctacctacgttggattccagaagcccaaatcctaggtggtggccaagtggccactctgagcaaactcttggaaatgatggaggaagtccagagtttacaagagaagatcgacgagagacaccacagccagcaggccccccaggctgaggccccctgcctgctgaggaactctgcccgcctctcgtctttgtttcctttcgctctgctccagcgacattcctctaagcccgtcttacccaccagtggctggaaagctttgggagatgaagacgatttggccaaacgagaagatgagttcgtggacctaggggatgtgtgacctgtttgttgagtgattgtgaaagaggaatgtgggagattgggacagctgatccctggatttgtgtcacgctacagctcatgctggctgggtccttagcccggcactccgttagaataaacctgggccttcgggaaaagaggtggctctcattatttttcatgattctaaaagactatgcaattaaaaccgcatctgtagtattattaattggaaggaattattacttgacccgtaatagggttgtggccgttttctgatgcctaagtattatacagagcccacaatggccagtttactaccagaaagggcttcagtaagatattcttggacttgatactttcttcagatcctctttgtgccaagataatttatccagtcattgggaatagtaagtttctgtgtaacccatctcaattatagaagcaagttcagctttatgtatttgtatggggagttgaagattcagatagaggtattaagatgtgtggcatttacttaaaccatcacatttttttctttctacgcccccttgcctgtaaaacacctgggaagttccactggtgtcatccatcctgatgcttcagaccacccgagccct

SEQ ID NO: 2147 - DNA, 3252 bp, Homo sapiens
tttcgtgccggaaggggaagtttcgcctcagaaggctgcctcgctggtccgaattcggtggcgccacgtccgcccgtctccgccttctgcatcgcggcttcggcggcttccacctagacacctaacagtcgcggagccggccgcgtcgtgagggggtcggcacggggagtcgggcggtcttgtgcatcttggctacctgtgggtcgaagatgtcggacatcggagactggttcaggagcatcccggcgatcacgcgctattggttcgccgccaccgtcgccgtgcccttggtcggcaaactcggcctcatcagcccggcctacctcttcctctggcccgaagccttcctttatcgctttcagatttggaggccaatcactgccaccttttatttccctgtgggtccaggaactggatttctttatttggtcaatttatatttcttatatcagtattctacgcgacttgaaacaggagcttttgatgggaggccagcagactatttattcatgctcctctttaactggatttgcatcgtgattactggcttagcaatggatatgcagttgctgatgattcctctgatcatgtcagtactttatgtctgggcccagctgaacagagacatgattgtatcattttggtttggaacacgatttaaggcctgctatttaccctgggttatccttggattcaactatatcatcggaggctcggtaatcaatgagcttattggaaatctggttggacatctttattttttcctaatgttcagatacccaatggacttgggaggaagaaattttctatccacacctcagtttttgtaccgctggctgcccagtaggagaggaggagtatcaggatttggtgtgccccctgctagcatgaggcgagctgctgatcagaatggcggaggcgggagacacaactggggccagggctttcgacttggagaccagtgaaggggcggcctcgggcagccgctcctctcaagccacatttactcccagtgctgggtgcacttaacaactgcgttctggctaacactgttggacctgacccacactgaatgtagtctttcagtacgagacaaagtttcttaaatcccgaagaaaaatataagtgttccacaagtttcacgattctcattcaagtccttactgctgtgaagaacaaataccaactgtgcaaattgcaaaactgactacattttttggtgtcttctcttctcccctttccgtctgaataatgggttttagcgggtcctagtctgctggcattgagctggggctgggtcaccaaacccttcccaaaaggacccttatctctttcttgcacacatgcctctctcccacttttcccaacccccacatttgcaactagaagaggttgcccataaaattgctctgcccttgacaggttctgttatttattgacttttgccaaggcttggtcacaacaatcatattcacgtaattttccccctttggtggcagaactgtagcaatagggggagaagacaagcagcggatgaagcgttttctcagcttttggaattgcttcgacctgacatccgttgtaaccgtttgccacttcttcagatatttttataaaaaagtaccactgagtcagtgagggccacagattggtattaatgagatacgagggttgttgctgggtgtttgtttcctgagctaagtgatcaagactgtagtggagttgcagctaacatgggttaggtttaaaccgtgggggatgcaacccctttgcgtttcatatgtaggcctactggctttgtgtagctggagtagttgggttgctttgtgttaggaggatccagatcatgttggctacagggagatgctctctttgagaggctcctgggcattgattccatttcaatctcattctggatatgtgttcattgagtaaaggaggagagaccctcatacgctatttaaatgtcacttttttgcctatcccccgttttttggtcatgtttcaattaattgtgaggaaggcgcagctcctctctgcacgtagatcattttttaaagctaatgtaagcacatctaagggaataacatgatttaaggttgaaatggctttagaatcatttgggtttgagggtgtgttattttgagtcatgaatgtacaagctctgtgaatcataccagcttaaatacccacacctttttttcgtaggtgggcttttcctatcagagcttggctcataaccaaataaagttttttgaaggccatggcttttcacacagttattttattttatgacgttatctgaaagcagactgttaggagcagtattgagtggctgtcacactttgaggcaactaaaaaggcttcaaacgttttgatcagtttcttttcaggaaacattgtgctctaacagtatgactattctttcccccactcttaaacagtgtgatgtgtgttatcctaggaaatgagagttggcaaacaacttctcattttgaatagagtttgtgtgtacctctccatatttaatttatatgataaaataggtggggagagtctgaaccttaactgtcatgttttgttgttcatctgtggccacaataaagtttacttgtaaaattttagaggccattactccaattatgttgcacgtacactcattgtacaggcgtggagactcattgtatgtataagaatattctgacagtgagtgacccggagtctctggtgtaccctcttaccagtcagctgcctgcgagcagtcattttttcctaaaggtttacaagtatttagaactcttcagttcagggcaaaatgttcatgaagttattcctcttaaacatggttaggaagctgatgacgttattgattttgtctggattatgtttctggaataattttaccaaaacaagctatttgagttttgacttgacaaggcaaaacatgacagtggattctctttacaaatggaaaaaaaaaatccttattttgtataaaggacttccctttttgtaaactaatcctttttattggtaaaaattgtaaattaaaatgtgcaacttgaaggttgtctgtgttaagtttccatgtccctgctctgctgtctcttagatatcacataatttgtgtaaccaattatctcttgaagagcatttaggaagtacccagtattttttgctggattaattcctggatgcagaattcctgggttttcattttaatgaaggaggatgcttgctaactttgaaaaa

SEQ ID NO: 2148 - DNA, 670 bp, Homo sapiens
tttcgtggccggctggcgtgctctcaccgccccctccaccagtgctcggctccgggcatttggatggcaggctgctgcccgcctactggtatttggggcccggggagtgggtctgggttcaggggctccaggctccctgccctgctacctgcgcatggacgcactggcgctgcttgggggactggtaaatgtagcccgtctgcccgagcgctggggacctggccgctttgactactggggcaactcccaccagatcatgcacctgctgagcgtgggctccatcctgcagctgcacgccggcgtcgtgcccgacctgctctgggctgcccaccacgcctgtccccgggactgagctgccatgccagcctgcccacagcagcctcctagagttagcaacaccaggtgttcctcccaactcgtctgcaaggggctggctccttggatgcttccagctcatgagatgtctcagcaggagccctgttcacccgttcttccctgtggactgacctcttccacccacgccgtggcgctccaacttccttccctgccttttccctccaagctcctattttactgtgtcagctggaaggaaacctttccctcttgggacctctttaccctctgtgacctgtggggttagaccagagagggactctggggtcatgtcttg

SEQ ID NO: 2149 - DNA, 3497 bp, Homo sapiens
atgacatgcttcaaagggcaaaaaggagaacaaagatcacatgcttttgaggccaataaagatcacaaggcaaaggttccatctcccaacctctatagccagctgaatgcactacagtttactgtggatgaaagaagcattctatggttaaatcaatttctgttggatttaaaacagagtcttaatcagttcatggctgtgtacaagttgaatgacaattcaaaatctgacgagcatgttgatgttcgagttgatggcttaatgctaaagtttgtcattccttctgaagtgaaatctgaatgtcatcaagatcagccacgtgcaatttctattcagagttctgaaatgattgccacaaatacaaggcactgtccaaactgtcgacattctgacctagaagctttgtttcaagactttaaagattgtgatttttttagtaaaacatataccagcttccccaaatcttgtgacaattttaatcttctacatccaattttccagagacatgctcatgaacaagataccaaaatgcatgaaatttataaaggaaatattactccccaattgaataaaaacactcttaaaacttctgctgccacggatgtttgggctgtgtacttttctcaattttggatagattatgaagggatgaaaagtggaaaaggacggccaataagttttgtagactcattccctctttccatttggatttgtcaaccaacaagatatgcagagtcacaaaaagagccgcagacttgtaatcaggtatctctaaatacatcacaaagtgaatctagtgatctggctggccgattgaagcggaagaagctcttgaaggagtattatagtacagagtctgagcctttgacaaatggtggtcagaagccttcttcatcagatacatttttcagattttccccttcctcgtcagaggcagatattcatctcctagttcatgttcataaacatgtcagtatgcagattaatcactaccagtatctgcttctacttttcctgcatgagtcacttatcctgctttcagagaacttaaggaaagatgtagaagctgtaactggcagtcctgctagtcagacatccatttgtattggaattttacttagaagtgcagaactggctcttttgctccatccagtggatcaagcaaatactcttaagtctcctgtttctgaaagtgtgagcccagtggtacctgattatttgcctacagaaaatggggattttttgtcttcaaaaagaaaacaaattagtagggatataaatagaattagaagtgtaactgttaatcatatgtcagacaacagatctatgagtgttgaccttagccatatccctttaaaggatcctttgctttttaaatcagctagtgatacaaatctgcaaaaaggcatttcttttatggactatttatcagataaacatttagggaaaataagtgaagatgaaagtagtggacttgtttacaaaagtggctcaggagaaattggatcagaaacaagtgacaaaaaggattcattttatacagattcaagtagtgtcttaaactacagagaagattcgaatatactttcatttgatagtgatggtaatcaaaacatactttcaagtactttaactagtaaaggaaatgaaaccatagagtccatctttaaagctgaagatttgcttccagaagcagcttcactctctgaaaacctggatatcagtaaagaagagacccccccagttagaacacttaaatcacagtcatctttaagtggaaagcctaaggaacgttgcccacccaacctggctcctctctgtgtttcttataagaatatgaaaagaagctcttcacaaatgtcattggataccatttcacttgacagcatgatattggaagaacagttattagaaagtgatggaagtgatagccatatgtttttggaaaaaggaaataaaaagaactcaactacaaattacaggggcacagcagaaagtgtgaatgctggtgcaaacctacagaattatggtgaaacttctccagatgccatcagtacaaattcagagggtgctcaggaaaatcatgatgacctgatgtccgttgtggtatttaaaattactggtgttaatggggaaattgacatccgaggggaagatacagaaatctgtcttcaagtgaaccaggtgacaccagaccaattaggcaatatcagccttcggcattacctttgtaatcgtccagttggttccgatcagaaagctgtaattcattccaaatcctctcctgagatttctctgagatttgaaagtgggcctggtgctgtaatacactctttacttgcagaaaaaaatggatttctgcagtgccacatagaaaacttcagcactgagtttcttacatcttctcttatgaatattcaacattttttggaagatgaaactgttgcaacagtaatgccaatgaagatacaagtttctaacacgaaaataaatttaaaagatgatagtccccggagtagtacagtatcccttgaaccagctcctgtaactgtacatattgatcatcttgtggtagagagaagtgacgatggctcttttcatatcagagattctcacatgcttaacactggaaatgatttgaaagaaaatgtcaaaagcgattcagtgctgctgaccagtggaaagtatgatctgaagaaacaacgcagtgtcacgcaagccactcagacaagcccaggggttccttggccttctcagtcagctaactttcctgagttctcctttgacttcactagggaacagctcatggaagagaatgaatctcttaaacaggaactggctaaagctaaaatggctcttgcagaggctcacttggaaaaagatgctcttcttcatcatataaagaagatgacagttgaatagcaggagtggcagtcaaaactgaaattatagctctgggagtaggaaggttatatttataatgtggatgttaccagttaggggaagacttttattttcatgaaaagacaataaaacaaaatggaatgtgatgaagtggtgactatttcaaagccagtttagaaagtattagtacgggcattacaatcttttggttgttttgtgttttggggcttaaccctcttttaagctgttgtgatctagggaagtcaacacatagtgtaaaataattacatgcctaatgaaaagaagatgtcatttcctaattttgatatctcattttcggcattttttaaaatgtaaaaggaaaacctcttgtgttcacacagattgctgaattgatttctccatatttgttaataatttactattatttacaaagattcaaatgcttttatgactaatgtaaaatgaaaagaggcttacattttaaatgttattaaaattatgtacttaaatctataattatttaattattgtaaaaagtccaagcagatcaataaactatataattaatgggtttggaaaaaaaaaaaaaa

SEQ ID NO: 2150 - DNA, 1943 bp, Homo sapiens
tttcgtaggaggaggagggactgagcggcggcggcccccgcgttccgtgctctctatgggggaagcagacaatggattatgatttcaaggcgaagctggcggcggagcgggagcgggtggaggatttgtttgagtacgaagggtgcaaagtgggacgcggcacctacggtcacgtctacaaggcgaggcggaaagatggaaaagatgaaaaggaatatgcattgaagcaaattgaaggcacaggaatatccatgtcggcttgtagagagattgcacttttgcgagaattgaagcaccctaatgtgattgcattgcagaaggtgttcctttctcacagtgacaggaaggtatggctgctgtttgattatgcagagcatgacttgtggcatattattaagtttcaccgtgcatcaaaagcaaataaaaagcccatgcagttgccaagatctatggttaaatccttactttaccagattcttgatggtatccattacctccatgcaaattgggtgcttcacagagacttgaaaccagcaaatatcctagtaatgggagaaggtcctgagagggggagagtcaaaatagctgacatgggttttgccagattattcaattctcctctaaagccactagcagatttggatccagtagttgtgacattttggtatcgggctccagaacttttgcttggtgcaaggcattatacaaaggccattgatatatgggcaataggttgtatatttgctgaattgttgacttcggaacctatttttcactgtcgtcaggaagatataaaaacaagcaatccctttcatcatgatcaactggatcggatatttagtgtcatggggtttcctgcagataaagactgggaagatattagaaagatgccagaatatcccacacttcaaaaagactttagaagaacaacgtatgccaacagtagcctcataaagtacatggagaaacacaaggtcaagcctgacagcaaagtgttcctcttgcttcagaaactcctgaccatggatccaaccaagagaattacctcggagcaagctctgcaggatccctattttcaggaggaccctttgccaacattagatgtatttgccggctgccagattccataccccaaacgagaattccttaatgaagatgatcctgaagaaaaaggtgacaagaatcagcaacagcagcagaaccagcatcagcagcccacagcccctccacagcaggcagcagcccctccacaggcgcccccaccacagcagaacagcacccagaccaacgggaccgcaggtggggctggggccggggtcgggggcaccggagcagggttgcagcacagccaggactccagcctgaaccaggtgcctccaaacaagaagccacggctagggccttcaggcgcaaactcaggtggacctgtgatgccctcggattatcagcactccagttctcgcctgaattaccaaagcagcgttcagggatcctctcagtcccagagcacacttggctactcttcctcgtctcagcagagctcacagtaccacccatctcaccaggcccaccggtactgaccagctcccgttgggccaggccagcccagcccagagcacaggctccagcaatatgtctgcattgaaaagaaccaaaaaaatgcaaactatgatgccatttaaaactcatacacatgggaggaaaaccttatatactgagcattgtgcaggactgatagctcttctttattgacttaaagaagattcttgtgaagtttccccagcaccccttccctgcatgtgttccattgtgacttctctgataaagcgtctgatctaatcccagcacttctgtaaccttcagcatttctttgaaggatttcctggtgcacctttctcatgctgtagcaatcactatggtttatcttttcaaagctcttttaa

SEQ ID NO: 2151 - DNA, 1523 bp, Homo sapiens
aggagcgcaaaatggcggaaccgccgagccccgtgcactgtgtcgctgccgcggcccccaccgccaccgtctcggagaaagaaccgtttggcaagctgcaactctcctcccgggaccctccgggttctctgtccgccaagaaggtccggactgaggagaagaaggcaccgcggagagtgaacggagaagggggcagcggcgggaacagcaggcagctgcagccgccggcagcaccttcgcctcagagctatggcagccccgcgtcttggagctttgcccctctgtctgctgctccctccccgtcctcttctcggagcagtttctctttctccgctggcacggccgttccctcctcagcctccgcttccttgtctcagccggggccgcgcaaactgctggtccctcctacgctgctgcacgctcagcctcaccatctcctcctgcccgccgccgccgccgctgcctcggctaacgccaagtcgcgcagacctaaggagaagcgggagaaggagaggaggaggcacggtctcggtggggcccgagaggccggcggggcctcccgggaggagaacggggaggtgaagccgctgccccgagataaaatcaaagacaaaattaaagagagagacaaagaaaaagaaagagaaaaaaagaaacataaagtaatgaatgagatcaagaaagagaatggagaagtaaagattttgctgaaaagtgggaaggagaaaccaaaaacaaatatagaagacttacaaattaaaaaggtaaagaagaaaaagaaaaagaaacacaaagagaatgaaaaacggaagcgtccgaaaatgtatagcaaatctattcagaccatctgctcaggattgctaactgatgttgaagatcaagcagccaaaggcatcctaaatgataacataaaagattacgttgggaagaatttggataccaagaactatgattccaaaattccagagaacagtgagtttccatttgtctcattaaaggagccacgagttcagaataacctcaaaaggttggacactttggaatttaaacaactcattcatatagagcaccagcctaatggaggtgcatcggttatccattgcctacagtaacgaactctcccacctgtctcctatgggggatgggagaggtttgccagaaagagtttggtggggtcctagtgttccagtgaaaatgaaaactctggcagctttcctacgtgatggggtattgttccatggggcagctacttatttaccctgactttttagactatttttcatttaattttccccaattcacccagtgaaaatggagatattgggaaagaaagatatagagacaacgactatgtccaattttcatgctcagagtctcactgtactccagcctggacgacagagtgagactccatctcaaaaaaaaagaaagaaattcatgataatgctatcctctaggtgggaaggagaaaccaaaaacaaatatagaagacttacaaattaaaaaggtaaacaaaaaaataa

SEQ ID NO: 2152 - DNA, 1649 bp, Homo sapiens
ttttttttttttaataaacataagagtggttttattgattacatacaattttagctatattaatatatattataaactttaagaattagaaataagtgacttttattttttaaccaagaataatctaagttatggcagcatgttcaatgaaaggtaagtccggcacaatttttctatatctgtttctcagataatcaggaacatcatccaagctttacattacgataccataatgaccctcagaacacaagttccattaagtagaaatgaagcatcatatgttttcttttttaggaaagacccccccttttgttgtatagacatacccctaataatcttactctactgtacaaataacttttcacccacaagagctgcctcaagtaactttcattttggaaagctatcaaggcatgagacagagtagcaaaatgccactctggactttgcatcttggagtttcaattttgctttaggatttagaccccagtttataattaaaaccaaatcattcccacattattatacttatgtaggaaagccttgctgtgtccactgttaacacaaagatagaaaatgtcaaatagtttaagcaagtatttggcagaccacagacatgaaacagtgccgtcggaaacggaaacactttagtgttttagaggtgaagagattgatgggtgtcattcaaatttctcatctccttcttctacatctttcagattgagtacttccaaagaacctttgcctttagtttccttttttattagctcatcaatttctcggaagcagcccgggtcaatcagacatacgatttctaactgttggccataatcttcactttctatgaccttgatcagtggcttgagcttttctttcagcttcttgccttcattgactggaaggatgaaccgaagcctcatgtgagcacgttctatcttcattttctcttttaactgctttatcacttccaaagcctgctgttttgtactcttgttggttttcaccgaatagtggatgtccttcatggctctctcaataaggatcacggtgtatggtctctttgtttcaggattcacacatttgtctgccacaatagttgcaatgtccctaaacatctgctccagttgtgtgtgtctttctttatctgatacttgaacttctcctttagtcaaaatctgcttacagatttcagtttggtcatctgttccaaacgcactgatgagatcttcctttttggcaacctgacctttagaaacatttacaaacactgagtgggtctgcagaacttcatcgaggtctttttccacgccgctccgccagccgacgaccttgtttttgtagcaggcgatttcgaagcgcttcccggcacgcttcatccgtaccacggccacattggttaggcggatctggttggtgggggtgaagatcgacatcgcggctgttcaaagacccagaagccggcgaaccagggctgacccgcgccgtccagcctgaaggccaccagcgcctcgcggtaacgaccgatcggcgcgcggcactgacccaaccaccagtgcgcggcgccgcgactcactagcttcaggcagccgtcacagtgtgtctggcaggcttacttactgcgcaggcgtcaggtggagcaaaagacgaaa

SEQ ID NO: 2153 - DNA, 5240 bp, Homo sapiens
atggtagaaggcaaaaggcacgtcttacatggcggcagacaagagagaatgagagccaagcagaaggggaaacctcttataaaatcttcagatctcgtgagacttattcactaccaccacaacagctccccactgcacaaacagtcatctggaccctcctcctccccggccgcagctgctgcccccgagaagccgggccccaaggcggcggaagtgggggatgacttcctgggggactttgtggtgggcgagcgggtgtgggtgaacggcgtgaagccaggcgtggtgcagtatctgggagagacgcagttcgcaccgggccagtgggctggcgtggtgctggacgacccggtgggcaagaatgatggcgcggtgggcggcgtgcgctacttcgagtgcccggccctccagggtatcttcacgcggccctccaagctgacccggcagcccacggccgagggctcggggagtgatgcccactccgtggagtcgctgactgcccagaacctgtcattgcattcgggcacggccacgcccccgctgaccagccgcgtcatccccctgcgggagagcgtcctcaacagctccgtgaagactggcaacgagtcgggatccaacctctcagacagcggctctgtgaagcggggcgaaaaggacctgcgcctgggggaccgcgtgctggttggcgggacgaagactggcgtggtgcggtacgtgggggagacagactttgccaagggcgagtggtgtggcgtggagctggacgagccccttgggaagaatgatggggcggtggcgggcaccaggtacttccagtgcccacccaagtttggtctcttcgcgcccatccacaaagtgatccgtatcggcttcccatctaccagcccagccaaggccaagaagaccaagcgtatggccatgggtgtgtcagcactgacccacagtcccagcagttcctccatcagctccgtcagctctgtggcctcctccgtggggggtcggcccagccgcagtggcctgctcacggagacctcttcacgctacgcccgcaagatctcgggcaccacggccttgcaggaggcactgaaggagaagcagcagcacattgagcagctgctggctgaacgagacctggaacgggctgaggtggccaaggccacaagccacatctgcgaggtggagaaggagattgccctgctcaaggcacagcatgagcagtatgttgcagaagccgaggagaagctgcagcgagcccggctgctcgtggagagcgtgcggaaagagaaggtggacctgtccaaccagctggaggaggagaggaggaaggtggaggatctgcagttccgcgtggaggaggagtccatcaccaagggagacctggagacccagacgcagctggagcacgcgcgcattggggagctggaacagagcctgctactggagaaggcgcaggccgagcggctgctccgagaattagcggacaacaggctgaccacagtggccgagaagtcgcgcgtgctgcagctggaggaggagctcaccctgcgccgaggtgaaatcgaggagctccagcagtgcctgttgcactcgggtcccccacctccggaccacccagacgccgccgagatcctgcggctacgggagcggctgctctcggccagcaaggaacaccagagggagagtggggtgctgcgggataaatacgagaaggccctgaaggcctaccaggcggaggtggacaagctccgcgcggccaacgagaagtacgcacaggaggtggcgggcctgaaggacaaggttcagcaggccaccagcgagaacatggggctaatggacaactggaaatccaagctggactcgctggcctcggaccaccagaagtccctggaggacctcaaagccaccctgaactcgggcccaggcgcccagcagaaggagatcggcgagctgaaggcagtgatggagggcatcaagatggagcaccagctggagctgggtaacttgcaggccaagcatgacctggagaccgccatgcacgtgaaggagaaggaggccctgcgagagaagctgcaggaggcccaggaggagctggctgggctgcagcggcactggcgggcccagctggaggtgcaagccagccagcaccggctggagctgcaggaggcccaggaccagcgccgggatgccgagctgcgtgtgcacgagctggaaaaactggacgtggagtaccggggccaggcgcaggctatcgagttcctcaaggagcagatctcgctggccgagaagaagatgttggactacgagcggctgcagcgggcagaagcccagggcaaacaggaggtcgagagtttgcgggagaagctcctggtggctgagaacagactccaggcggtcgaggccctgtgctcctcccagcacacccacatgattgagtcgaatgacatttcagaggagacgatcaggacgaaggaaactgtggagggcctgcaggacaagctgaacaagagggacaaagaggtgacagccttgacctcccagaccgagatgctcagggcccaagtaagtgcgctggagagcaagtgtaagtcaggcgagaagaaggtggacgccctcctgaaggagaagcggcgcctggaggcagagctggagaccgtgtcccggaagacccatgacgcctcgggccagctagtcctcatcagccaggagctgctgcggaaggagcggagcctgaacgaactgcgggtgttgctgctggaggccaatcgtcactccccagggccggagagggacctgagccgtgaggtacacaaggctgagtggcggatcaaggagcagaaactcaaggatgacatccggggcctgcgtgaaaagctgaccgggctggacaaagagaaatccctgtcggatcagaggcgctactccctcatcgacccgtcctcggcgcccgagcttctgcggctgcagcaccagctgatgagcacggaggacgccctgcgggatgcgctggaccaggctcagcaggtggagaagctgatggaggccatgaggagctgccctgacaaggcccagaccatcggcaattccggttctgcaaacggcatccaccagcaggacaaagctcagaaacaagaggacaagcactgatcctgaggggatactgtggagcagcccagtccacaccagagccccacgcggctgcccggcagtacctcctccaggcaggagccgggactgtcactttggagacaaaacagtgtttgtaacaataacgtactcaccgccgcggacaatcccccaccccgatccctcgccagaccaggacgcttcctcaagcccagccttctacagagagtgtgaacggtacagccctggcctgacccggggaccttcagcctggacacccggcagcttctggagtttgtcagtggaggcagaggggatccggccaggcccctctgtccagaaggagctgccctgaggaccatcttagcggccctgtcctctttttccgcccattctccctcgggtctccccagaggggccggcgggggctggggagggggtaagtttatccatgcagacaccaagggggagcatccagtctttaagagccaagtgggggccccttttccgaagccacttccaggccaaggcagtcgccagggcttcttgtccccaccttctgaaccttcttcaaacagtagtacaagctcccctcagccagcctgcctgcccagcgaggcccccaggttcaaggtgttggcgggggcggagggcaggggaacgggatccttctcccgctgcccaccaacaccaacacacacacacctctaagctgctggccgaagatgtcaccaaggccaaagacacagtattatgaaggtttggaaacccctctcctcacctcccaccgtgaccttgggcaaaccctggctcggagcccagggcagaggcagctcagagtggaggctctaggcaggtttgacaaaggtcagtaatacggtttcccctggggttgaccagatgttccaaaatatctgcatccacctggagatgcagctaagtgggtccttatgtacacaccacgttcacacacacacagagggaccacgtgtgcacgcatgaccgtgtgggtggcggcgtttgctgtgaaccatgctcaggccacacagagacacatacttggtttctgggactgagacccaggcctggcaggaccgtgcctacagatactgcaaacgttcctacagcctagaggtgcgtatacacacccaagtacacgcagccaggcattcaggggtgtgtttgccacatggagcatcccttcctggtcttgccaggcacctgcacagagcgtctccagccccatctcctaacgggggctgggggtaagagaaatctaactgcgctcccccaacccctcgccctgccatcttcccctcaagcctgctaagttatcccaggcctgtgcgtggtggaaaaagccagccttggccctgcagcctccacctcgccgctgggggaccaacaggttgcttacagctttgcaccccggcatcagcacaggggtccctgccccaccctccggcagctcagggagtgttttcctgtgaggcctcccccatcagtggaccagagggagaagcccgatgccccatcccggctttcccgtaacgcacaggacacgtgtgcaattcataggaacggcccagatcgccctcatgagtgccacctggtacaggtaggtggcgctcacgttcctgcccaaatgcagcccatcggggagtcacagtcagtccccccggcccccctcccagtccctgttggctttcggtagctctcgcatgcagttctattaacagccgtctagaagcgatgctttagtggcctaacccagggtcaaatacagctctttctagcaaaatcaggcagctctgccccatcggtaggggcaccgattagtctactaacagccagaggtccatctagcagggtgccgggaggagctgagcccccggaggtgggctcctggtgacgggtgtccaagaagcggtttccttgggagcttctgcctccgtgggcctctcagcccgccccgtgtggccgcccgggtgtggctcagccatgtcccctccccaggtccttcattcacccctcccctccccacagtggaattgttgaagtgtggcgagtctgtgctcgggacaataaagcttgtgacaggtccaggaaaaaaaaaa

SEQ ID NO: 2154 - DNA, 3029 bp, Homo sapiens
agtggggaagctgctaacccgacccggattggcgctgaggtggcccgtggggcagggcagatgattctggaccagatgaagcctgaggagccttccagctctaagatagcaggataggagacttctaagattggagctgcagaagacttgccagcccaccagcacaatgtcaggaagccatacacctgcctgtggccctttctcagccctgactccgagcatatggccccaggagatcttggccaagtacacgcagaaggaagagtcagcagagcaaccagagttctactacgatgagtttggtttccgtgtgtacaaggaagaaggtgatgagcctggctccagtctgctggcgaactcccctctgatggaggatgctccacagaggctgcggtggcaggcccacctggagttcacccataaccacgatgtgggggatctcacctgggacaagattgccgtctccctaccccgctctgagaagctccgctccctggtgctggccggcatcccacatggcatgaggccacagctgtggatgcggctctctggggccctgcagaagaagaggaactctgagctgtcctaccgcgagattgtgaagaacagctccaacgatgagaccatcgctgccaagcagatcgagaaggacctgctccgcaccatgcccagcaacgcctgcttcgccagcatgggtagcatcggggtgccccgcctgcgcagggtgctccgggccctggcctggctctacccagagatcggctactgccagggcaccggcatggtggccgcctgcctcctgctgttcctggaggaggaggacgccttctggatgatgtctgccatcatcgaggacctgctccccgcctcctacttcagcaccaccctgctgggtgtccagactgaccagcgggtcctgcgccacctcattgtccagtacctgcctcgcctggacaagctgctccaggagcatgacattgagctgtccctgatcacactgcactggttcctcacggccttcgccagcgtggtggacatcaagctgctcctgcgcatctgggacctgtttttctacgagggctcccgggtgctgttccagctcacgctgggcatgctgcacctcaaggaggaagagctgatccagtcagagaactcggcctccatcttcaacacgctatcggatatcccgtcgcagatggaggacgcggagctgcttctgggggtggccatgcggctggccggctccctcaccgatgtggccgtggagactcagcgccgcaagcacctggcctatctcattgcagaccagggccagctcctgggggccggcaccctcaccaacctctctcaggttgttcgccgcaggacccagcggaggaagtccaccatcactgctctgctcttcggggaggatgacctggaggcactcaaggccaagaacatcaagcagacggaactggtggctgacctccgggaagccatcctgcgcgtggcacgccacttccagtgcacagaccccaaaaactgcagcgtggtgagtcgccagctccctgggctgctaccaaacacggccctaactcctccaacccccttggtgggcctgtgttcactgtggcaggagctgactccagactatagcatggagagccaccagcgggaccacgagaactacgtggcgtgctcacgcagccaccggcgccgagccaaggccctgctggactttgagcggcacgacgacgacgagctgggcttccgcaagaacgacatcatcacaatcgtgtctcagaaggacgagcactgctgggtgggggagctcaacggcctgcgaggctggtttccagccaagttcgtggaagtcctggatgagcgcagcaaagagtactccatcgcgggggatgactcggtgacggagggggtcacagacctcgtgcgagggaccctctgcccggcccttaaggccctgttcgaacatggactgaagaagccatccctgcttgggggcgcctgccacccctggctgtttatcgaggaggctgcaggccgggaggtcgagagagactttgcctccgtgtattcccgtctggtgctctgtaagaccttcaggttggatgaagatggcaaagtcctgaccccggaggagctgctctaccgggctgtgcagtctgtgaacgtgacccacgatgcagtgcatgcacaaatggatgtgaagctccgctcactgatctgcgtggggctcaatgagcaggtgctgcacctgtggctggaggtgctctgctccagcctgcccaccgtggagaagtggtaccagccctggtccttcctgcgcagcccgggctgggtccagatcaagtgtgagctccgagtcctctgctgctttgccttcagcctctcccaggactgggagctccctgcgaagagagaggcgcagcagcccctgaaggagggcgtccgggacatgctggtgaagcaccacctcttcagctgggatgtggacgggtgaccccctcctccccagcccaacctcgggcctgcgtctgaggtggcccaggaccccaagctgcagagcccagggaagagcagctccagagccctggccggggccgcgggatatcaatatcaggctgccccactccacgttccccagcacatcccaggtggtgggagcagagggtaccctgccccaccagggtccttagggatgctctaggccaaaccacagtttgtaccaaaaaccttgtgaggaggtgggggagccatgtctgtgctcaggaagagggaaggggatgggggtggctagtaggctcctggcctctttggtttataaataaactgtgtctgtctgtctttgagaaagcacctacctgtcttctgtgcagctagggctgcagagctgtattcaggtccaaggttctgcccttccttgagtggtctagaaggcactgcgtggcccctcagatgctgggacacaacagacccgggacccagctgtgctacccaccccttccatggactgaataagatggactaac

SEQ ID NO: 2155 - DNA, 3029 bp, Homo sapiens; identical to SEQ ID NO: 2154

SEQ ID NO: 2156 - DNA, 7471 bp, Homo sapiens
tctgcggcgctcggagcctcccttgcgatcccacggccgggactgcccggagtgcatgggcgcgggccagggacgctgagcggtcgcgccatggagggcgccgagccccgcgcgcggcccgagcgcctggccgaggccgagacgcgggcggcggacggcgggcgcctggtggaggtgcagctgagcggcggcgccccgtggggcttcaccctgaagggcggccgcgagcacggcgagccgctggtcatcaccaagattgaagagggcagtaaagccgcggcggtcgacaagttactggctggagatgagatcgtcggcatcaatgacattggtctctcagggtttagacaggaagcgatttgcctggtgaaggggtcccataagaccctgaagctggtcgtcaaaaggaggagcgagctgggctggaggcctcactcctggcatgccaccaagttctctgacagccaccccgagctagcggcctccccgttcacctccaccagcggctgtccttcctggtccggccgacaccacgcgagttcttcctcccacgacctgtccagttcctgggagcagacgaacctacagcgcaccttagatcacttcagctccttggggagcgttgacagcctggaccacccctccagtcgcctctcggtggccaagtccaacagcagcatcgaccacctgggcagccacagcaagcgcgactcggcctacggctccttctccaccagctctagcactcctgaccacaccttgtccaaagccgacacgtcctccgcagagaacatcctctacactgtgggcctctgggaggctcccaggcagggtggccggcaggcccaggccgcaggcgaccctcagggctcggaggagaagctcagttgtttcccgcccagggtccccggtgacagcggcaaaggccccaggccagagtacaatgccgagcccaagctggctgcccctgggaggtccaattttgggccagtctggtatgttcccgataagaagaaagcaccatcatccccacctcctccccctccccctctccgcagtgacagctttgctgccaccaagagccacgagaaggcccagggccctgtgttctcagaggcggctgcggcacagcactttacggccctggcccaggctcagcctcgtggtgaccggagaccagagctcaccgatcggccttggaggtcagcacacccggggagcctcgggaagggatcgggaggcccgggctgcccacaggaggcccacgcagacggcagctggccgccctccaaggatggagcttccagtaggctgcaggcctctctgtccagctcagatgtgcgcttccctcagtctcctcatagcggccgacaccctcccctatacagcgaccacagccccctctgtgctgacagccttgggcaggagccaggggctgccagcttccagaacgacagccctcctcaggtgagggggctcagcagctgtgaccagaagctggggagcggctggcagggtccccggccctgtgtgcagggagacctgcaagcagcacagctctgggcgggatgctggccttctgacacagcccttggagccctcgagagtcttcccccacccacggtgggccagagcccacgccatcacctacctcagcctgagggtcctccggatgcccgcgagacaggacggtgttacccgctggacaaaggggccgagggctgctccgcgggagcccaggagcctcccagggccagccgtgcagaaaaagccagccagaggctggcagccagcatcacgtgggcagatggggagagcagcaggatctgcccgcaggagacgcccctgttgcactccctgacccaggaggggaagcgccggcctgagagcagtccagaggacagcgccaccagaccgccaccgttcgacgcccacgtgggcaagcccacccgaagaagcgaccgctttgccaccaccctgcggaatgagatccagatgcatagagccaagctgcagaagagccggagcacagtggctctgactgcagcaggggaggcggaggatggcaccggccgctggagggccgggttgggaggtggcacccaggaaggacccctcgctggcacctataaagaccacctgaaagaggcccaagcccgggtcctgagggccacgtccttcaagcgccgcgacttggaccccaacccaggagacctatacccggagtcactggaacaccggatgggggatccagacactgtcccccacttctgggaggcaggcctggcccagccaccctcatctacaagtggcgggccccacccgccccgcatcggaggccggagacggttcacagctgagcagaaattgaagtcctactcggaacctgagaagatgaacgaggtgggcctcacgaggggctacagtcctcaccagcaccccaggacatctgaggatactgtgggcacgtttgctgacaggtggaagttttttgaggaaacgagcaaacctgttccccagaggcctgcccagaagcaagctcttcacggaatcccgagagacaagccagagaggccgcggacagcgggccgcacatgtgagggcacggagccctggtcgcgcaccacctcccttggggacagcctcaacgctcacagcgcagcggagaaggcagggacttcagacctgccgcggaggctcggcacctttgcagagtatcaggcctcttggaaggaacagaggaaacctctggaggccaggagctctgggcgctgccactcagcggatgacatcctggatgtgagcctggacccacaggagaggccgcagcacgttcatgggaggtcccggtcttcaccgtccacagaccactacaagcaggaagcttctgtcgaactgcgaaggcaggcaggggaccccggcgagcccagagaagagcttccctccgcagtccgggccgaggagggacagtccacgccgagacaagcagatgcccagtgtcgggaaggcagcccaggatcacagcagcacccaccgagtcagaaggcaccgaacccacccacattctctgaactatctcactgccggggagccccagagctgccccgggagggccggggccgagcgggaaccctacctcgagattatagatactcggaggagagcaccccagcagacttgggaccccgagcccagagccctggctcacccctgcatgctcgaggacaagactcgtggccagtgagctcagccctgctctccaagaggccagccccacagaggccaccgccacccaagcgcgagcccaggagatacagggccacagacggcgcacctgctgacgcccccgtgggcgtcctcggcaggcccttcccaacgccatcccctgcgtccctggatgtgtatgtggcccgcctgtccctctcccacagcccctctgtgttcagcagtgcccagccccaggacaccccgaaggccactgtctgtgagcgtggaagccagcatgtgagcggggacgcatcacgtcctctgccagaagcactgctccctcccaagcagcagcacctgcgcctgcagacggccaccatggagacctcgcgctccccctcgccccagttcgccccccagaaactgacggacaaacctcccctgctcatccaggatgaggattcaaccagaattgagcgggtgatggacaacaacaccacggtgaagatggtgcccatcaagatcgtgcactcggagagccagccagagaaggagagccgccagagcctggcatgccccgccgagccacctgccctgccccacgggctggagaaagaccagatcaagacgctgagcacatctgagcagttctactcgcgcttctgtctgtacacgcggcagggtgctgagcccgaggccccacatagggcccagccggctgagccccagcccctgggcacccaggtgccccccgagaaagaccgctgcacctcccctccagggctcagctacatgaaggccaaagagaagactgtggaagacctgaagtcggaggagctggccagggagatcgtggggaaggataagtccctggccgacatcctggatcccagtgtgaagatcaaaaccactatggacttgatggaaggcatcttccccaaagacgagcacctcctggaagaagcccagcaacggaggaagctgctccccaaaatcccctctcctagaagcacagaggagaggaaagaggagcccagcgtgcctgcggccgtgtccctggccaccaattctacctactacagcacgtcggcccccaaggcggagctgctgatcaagatgaaggacctgcaggagcagcaggagcacgaagaggattcgggaagcgacttggaccacgacctgtcggtgaagaagcaggagctcatcgagagcatcagccgcaagctgcaggtgctccgggaggcccgcgagagcctgctggaggacgtgcaggccaacaccgtgctgggggccgaggtggaggccatcgtgaaaggcgtctgcaagcccagcgagtttgacaagttccggatgttcattggagacctggacaaagtggtgaacctcctgctgtcgctgtcaggccgcctggcccgggtggagaatgccctcaataatttggacgacggcgcttctcccggtgatcggcaatcactgcttgagaagcagagagtcctgatccagcagcacgaggacgccaaggagctcaaggagaacctggaccgccgcgagcgcatcgtctttgacattttggccaactatctgagcgaggagagcctcgcggactatgagcacttcgtgaagatgaagtcggccctcatcatcgagcagcgggagctggaagataaaatccaccttggtgaagagcagctgaagtgcttattggacagccttcagcccgaaaggggcaaataagagaccagtccccggtggaggaggggcacggggcctccgagctccagctccgttcccaaggatactcgtgaagaccccatctgtgttcatggcctggaaagagacttctcccatagcaaagaggctgttataaaagcaataacttttgtgtttgtgtgggatgatttatttaattttttagtttcccctttgattgctgagagccattttcctttacacataactacacctgacaccaggctctgctggatgtgagtttccactgcatgggctgtgggctgggcctgtggtgcctgccgagtggtcactgtcagtgggaaacccgttgttcctcccgtcttcagatgctgagccaactgcttggacagcagccagcgcgtcatgacgtgcatgagagggggaccctggtgctcatcttctcttgtcattcatccaggcatgggctgccaggttttgtccctgctcgttcaacagtgtgagcatttgtctctgttatctaatgatgttctctgacccagcagaaatcatcatcatgatgatgataatttattaactttttggaagggtgaatagtttcctaatggttaaaaaccaactgtgaaaggaaccacctgtgtggttgggttcactcattctcagattaaattgccacttaaagaaataacgtgcatgctttaaaaaacacagtcacgcaccaagcaggcaaatagctttagtccttctcacctcacatcacagttgttctgcaaagtaaaattttttggttaagagcgtgtccagtagtaatgtgcttgttagctgtttctcaagaccaacagaagattttttcagttactttccccccatgtattttgtatgcatatgattgtccgtgataattgggctacttttccattgtttcctccttaaatcgtttagcatggcatgagggccacattccatggacgggaagacccccttcctcttcagaggtcccgtgggacctacacagcctccctgagcttggatcctttttcctgccccatgaagttttaaagattcctatgccccatttcccttgattgaaatggcaggattcctaaagagagccctggtttgttaaaagaaaacactgtcatgcctgtcagttccccaattgacaagtcacagactgggagaaaatatttgcaaatcgtgtatctgacaaaaggtttgtgtccaggatgtacaaagaactctcaaaccggatagtaagaaaacaaacagcccaagtgaaaagcaggcaaaagacttgaatagacacttcaccaaagagcatacacgcgtggcaaacaagcacacgaaaagacgttcagccgccgatggcttggttataatttataacttacttatttttatctaataattggagattcagtgtatttcttcaaaaaatgtttaattaaatgcatgttaatggtgagtgaatcccttgggtgacttcgtgtttaggtcgtattagggcatttgttggatcaacggatcattttaaccctgacttccccttattcccataaaagaagttttccagtggaatggagatttcattttgtcagcagcagtgaccacagccttaccaaagcagacgcgtgcgcgtgcacagatgcacacacacagatgtcttaaaagactagaatccacacttcctgagccagaggggccgtgttgacggtaatgcattctctatagagccaagtccaaactggcaagctcaatgatgcaggcaataaaccgcctttttggcagcctaccaatgccaaaaggataaatgtctttccaaaagtgtgtattcctgttaaattaagctcttgctaacttgaaaaatccctgttctgccagcgaagcttcctcctcctctccagctggtaggtacttgcgtgaatgctggtcagtctgaaaaggtgaagctggctgtgcacttacccccatctttctccctcggggagacgacccaaggaatttcaaaatattttgtttggcagagcttttacctgttattctttgccctcaaatacagtattggggtcattttgatgatatgtgtgtaaaatgtgaataatccaattggtgtctgtactcagccttttgatgtctttttaggactttctcttctacacagcaatacgtcgtgctcgagtatccttgtagcaaagcacatagagccagctgtcctgtcagttcccctgtttgcctctgaaacgtctggttagtggggacccaaagattctagtgagtcaacatccataactctgtatctagttgtattattcatagaaaatcaatctggtgctaatggttggccctggtgttgttgggtggcagctgctccttcgccctcttgtagtgtggctgtggagggctctgcctatggggggtggcctgtggcttgtatccttcagtccaccacagcaaatgtgtgtagatttcatgctcgacacttaccactcacctatcaacagatcatcctgcttgactggtaacaaaataaatagtgtatcattcaaaaaaaaaa

SEQ ID NO: 2157 - DNA, 2983 bp, Homo sapiens
accgcctcgcgatttcgtcgcggctcggcgggcgggcagtgccggcgtccgcggctggaatggtgctggctgtgttggtcggtgcctgcgttctgaagcccgagaggagccacaatggagacgccgccgctgcctcccgcatgcacaaagcagggtcatcagaagcctctcgattcaaaagatgataataccgaaaaacactgcccagtgacagtgaatccttggcatatgaagaaagctttcaaagtcatgaacgaattaagaagtcaaaatttgctgtgcgatgtcacaattgtggcagaagacatggaaatttctgctcatagagtggtgctggccgcctgtagtccttattttcatgccatgtttacaggtgagatgagtgagagccgagcaaagagagttagaataaaagaggtagatggctggaccctgaggatgctaattgattatgtttacactgcagaaattcaggttacagaagaaaatgtacaggtacttctcccagcagctggtctcttacagttacaggatgtgaagaagacttgttgtgaatttttggaatcccagcttcaccctgtcaactgcttaggaatccgggcttttgctgatatgcatgcatgtaccgaccttctgaacaaggccaacacctatgcagagcaacattttgcagatgttgtacttagtgaagaatttctcaatcttggcatcgaacaagtgtgcagcttaatctcaagtgacaaacttaccatttcttcagaagagaaggtatttgaagcagtaatagcatgggtgaaccatgacaaggatgtgaggcaagagtttatggcccgactgatggaacatgtacggttacctttgcttcctcgggaatatttagttcagagggttgaagaggaagcattggtcaagaatagcagtgcttgcaaaaattacctgattgaagcaatgaagtaccatttgctgccaacagagcagcgtatattaatgaagagtgtccggacccggctgaggacacccatgaaccttcccaaattgatggtggtggttgggggccaagcaccaaaggctatccggagtgcggaatgctatgactttaaagaacaaaggtggcaccaagtagcagagttgccttccaggaggtgcagagcaggcatggtctacttggctggacttgtttttgctgttggtggctttaatggctcattaagagttcgcactgtagattcctacgaccctgtgaaggaccagtggaccagcgttgctaacatgagagaccggagaagcactttgggagctgctgtgttaaatggattattatacgctgtgggaggctttgatgggagtacaggtttgtcatctgtggaagcatacaacataaagtctaatgagtggtttcatgtagctcccatgaatacaaggaggagcagtgttggtgtgggtgttgttggaggtttgctctatgctgtaggaggttatgatggagcatcacgtcagtatcttagcacagtagaatgctataatgctacaacaaatgagtggacctatatagcagaaatgagcaccaggcggagtggagcaggtgttggtgtgttaaacaatttattgtatgctgtaggaggtcatgatggccctttagtacgaaaaagtgttgaagtatatgatcccaccactaacgcatggagacaggttgcagatatgaacatgtgcagaagaaatgcaggagtttgtgcagttaatggtctgttatatgttgttggaggggatgatggttcctgtaacttggcgtcagtagaatattataacccaacaaccgataaatggacagttgtgtcatcgtgtatgagcacagggagaagttatgcaggggtcacagttattgataaaccattatgagcctgaaggacattttcagcatatttatacatgagaaacagccttcaacaagtatttgtgaagtgactgagaatctagcacttctccacttgtagctgcactttaagtctcagcagaagatacgatcgtctgcctttataggcctcagatactgaagattatttttggtagaagcaccgtgtaggctttttctgcaatgagcagcagctgactgaattttcataagaaacttggactgcaggacttaatctgtagtctttagacaacagttgctttcataaagactagttcttatcaaccttgaatgactacagattattttgtgaaggaggatgaagtaatgtgtgttcttgtaaaattaaattttatctttatttcttctaaaaatctgtataccaggaactgaaaatctttgaacagatattaaaatctacgtaagtatacaaactagttgagggatacactgtttgcttttataaaataactttgattacatgaatataataaattatgtgcatataaatgtgtgtctatatgctttcctttaaatatgtttgaaaagatgtttgaaacttgattatactatttataattggcacagtactttgaattatgccagtactacattgtaaaacagagttgtattttttgatatttaacaatgcttaacactttaaatgccacttctgaggaatggacctggtgtaacacacttgaatatgtgtgatgccaaactttttaaaatacaatataaattatgcttatttattattttctttagtttaatcttggtcatgttttggtgtgtatttttaatttttttcttaaattaacactttggcatgaacattactgcaggtttttgatgaatataatgaatgtatggaattcaattgaatttgcatggtcttcggaattttttctgtgtgtataaatttagctgctattaacagaagagagaactttctgtgagtagccatgtgtgttgatcagatacagtttttctgagatcttcaattaatctcactttaaaaatgaccaaaacatgtctttcttgaattaactttgaataaaagtttgtatatta

SEQ ID NO: 2158 - DNA, 1418 bp, Homo sapiens
ctaccagcaacttgagcaaaatcgccgcctcactaatgaactaaagctggccctgaatgaggattaaacttaagagtgaaaaaacttgggctgaattctaggcgtggagcccatgtgcagaaaatctaagactgtcctaccttcaactaatagagttgaaaacagttgctttctgcagaaatgcaaatgcaaggaattggctgaaaggctggccttgcctgcttgtttctctatatggctggaataattacgttctctttaatcacaaaacagcttttatggtagaatacttatatcaattcagcactgctccttgaaatagcaggtcctcttgtttgaactgataaataatgaggagcccccccaaaaaatgttttctatttcctgacagccatgagtcctactttaagtatgtatatatatatatatatatatatatatggtgtgtgtgtgtgtgtgtgtgtatatatattccctatcagatactcatattcctaacttctaaatatctggtatagcgtttgaaatatgattaaatgtacctatgcttgggcaaaatagcttttgaaaacaggaactcatgccagaagcccctggttgtctgaaaggtatgctttactcagtctaatggtgctgttggagtctggggagaatgtcatgctaataaatagaacactataaaaatattaagagaatgtcctaatgaagtgtgcatgaaacatgttgacaattttttatgagcaacagaaataaatcattttaaaagttctcagaaaacctatttatgtcatctttgcttttgtgagtttgtgttaccgcacaactcccagacttttaactgcctgtaccttggaaatgtctgctgttcgtaacttcttcagtttgtataacagtgctgcagctgtatttggtttttacctctccctgttcccacggcacaccgtcagtgaaccttcaccaaaccccacgtgcattttatcctcagtgaattgttggtggaggtgcacctgactgctctgtgagaatccgtgccatggctcctttgggtcaaagatgccctcccctccgtcttaggttcttgtctagaaatgagtaatgtcttacaagcatgcctagttctaatcatctcatcctgtgtttgtgattgatgtttgcctgcctaaatgtacaaaccaccattgtgtccaaagcacagctattcatgacttaattttctaatctcaccacagagaaagtggctcatgccaaagaagaaaaccttagtatgcatcagatgctggatcagactttactggagttaaacaacatgtgaaaacctccttagctgcgaccacattctttcgttttgtttttgttttgtttttaaacacctgcttaccccttaaaatggcatttatttacttttaccactggtccac

SEQ ID NO: 2159 - DNA, 1807 bp, Homo sapiens
ttttttttttttaaaaaaaaaaaaactttttaattctgattgccaaattatttaaggcaggtttaaaaaaggaaagcattcaatatacattttacataaaataaactaaattacagcataaaacaagtaaccaggcaatggcgttaaagtcttttttttctaaaactggataattgtaaacattaaaaaaaaaaaaaagactgtagaactattcaagtaatagaacaatcacagatgtctctggtacgcaggctattgggttatttgccattcaagattatcaaaaaatgacacctcattattcacagatgctcattatttccccattttaatctttacattatatacaacacagtttttgtggtactggcaaccccatgccttccaaaagtactttttccacaatacacaagtacaaacagtgactacaggaacattttacactggtgcgtctttaacaggagccaccaaatagacatctaaattgtaccaaagtgtcatcatcacagttagcctttctgaggggcttatgggaaatatgtgaaggatatgcaaggttcaggcacactgatacataacattatttatttataattttaaaggaaaaggaaaagaaagtaagtagccttttgtggctaacactttttaacatgacaaatacatttttaatttcctttactgagtggtttgcgacgtggcagcagaccctgtgtgtgcgagcctggttactgatacaaaaagtaaagaatatatttatatttatatatatatatatgtatatatacagatatgtatacgtatatatatataaaacagaagtttaattacagcaacatttgttactctgtgataaaatctgtaatttacaaaaatgaaatgactggtttttgcctgccattaaggcatttcaaattaacaccatggaactgatgtctgtataaagcgcttccccatgtgatccagtcacatgacaatgtacatgtccaatcttgttattctctttagcattatgaaaataaatgtctccatttgcgactttatcttctttgtccaggaaacattccagatgcagatgcctgggcagccacctgctgagaggcaacaagggcagcagaggtcaagccttgaaaagggtcatattgacccgggattagcgggtaacccatgccaacgtgggtgtggtggtgcgtgtgcaggtgccgctggccgaagggggagtggcgatccctttccctttctgcctcccgttcccgctcagctgtagccttttccacaggagcaggagacttgctgcggtattggttagcatgctgctggagcaaatccagtgctttagattcagtggttgttttcgtgttgacgctagggctggtattgactttctctgtctcttctctccctgacatcttcccataaacaggataatgaaatcctggagagagatatgccccaggataactgtgcattaggacgggagaaacagcccggtatgcaggatggctggggtcgtacatctgtgggtaaggataagcatgcaagtactgtatgtatgactgatgctgactcatgggtgaggagacagccactcttgttcccctagagtccttccagttcacaggagtctttcgatcatcatttttcagcttgctctcctccattgattgagaatcaggatgcttggcctctttgggctcctctttaatgcttgttaacgatacaggaaggctgggcacaccactctctttattaggagttttcctcggactatcctcttttaatttcttctctctatcaagttcttctgact

SEQ ID NO: 2160 - DNA, 632 bp, Homo sapiens
tgattagcaatagattggacactctactgatcttgcctctctacaacctctctttccacctgacctctaaatgttgaagtgtttcaggaattgtcttagaccttcttccttatctacacttcctctccaacatgaatcttgatggctctgcacaagatcctgaaaagagggaatattcttctgtgtgtgtgggcagagaagatgacattaaaaaatctgaaagaatgacagctgttgtccatgatagagaagtggtcattttctaccacaagggagaatatcatgctatggatattcgctgttaccactcaggaggacctttacatttgggagatatagaggattttgatggacgaccgtgtatagtttgcccctggcataaatacaaaattactttggcaacaggagaaggtctgtaccagtctataaaccctaaagatccatcagcaaaacccaagtggtgctccaaaggaataaagcaaaggattcacacagtgacagtagacaacggaaatatttatgtgactctttctaatgaaccttttaagtgtgactctgatttttatgccactggagacttcaaagtaattaagagttcttcctgataaaaaatatatagaaatgaaaaaaaa

SEQ ID NO: 2161 - DNA, 617 bp, Homo sapiens
caggaacagccttctcctgcctcctctgcacctggacaactcaactcctgccaagatgtcctgccagcagaaccagcagcagtgccaacccccacccaagtgtccctcacccaagtgtcccccaaagagcccagtacagtgtctgcctccagcttcctctggctgtgccccaagctctgggggctgtggccctagctccgagggcggctgcttcctgaaccaccacaggcgccaccaccgatgccggcgccagaggcccaactcctgtgacaggggcagtggtcagcaaggcgggggctctggctgcggccatggctctggaggctgctgctgacctggatcctgatgctgagacaagcgattttggaggaaacaagaatgccaagggcccaggaaaaccccatcttgatgcatgagttcccagataccctcttctggctttcacaggctgagctaggggttttcctgtggaaggtctgagctctccccagaaggcacttcctgtctgatgtccaggatgtcacatgttcccttacccctgtacctgtgaaggattggcagtgcttgtgcctgacctcatcaaaaaataaagctccttgtcctcattaaaaaaaaaa

SEQ ID NO: 2162 - DNA, 1461 bp, Homo sapiens
cggtctgcaccgcgctgcaggaattcggcacgaggtcgacgctgcttcgttgcctggactctggtttccgccctggagcaagccggggcctggtcggcagctgggccgccatggagtccacgctgggcgcgggcatcgtgatagccgaggcgctacagaaccagctagcctggctggagaacgtgtggctctggatcacctttctgggcgatcccaagatcctctttctgttctacttccccgcggcctactacgcctcccgccgtgtgggcatcgcggtgctctggatcagcctcatcaccgagtggctcaacctcatcttcaagtggtttctttttggagacaggcccttttggtgggtccatgagtctggttactacagccaggctccagcccaggttcaccagttcccctcttcttgtgagactggtccaggcagcccttctggacactgcatgatcacaggagcagccctctggcccataatgacagccctgtcttcgcaggtggccactcgggcccgcagccgctgggtaagggtgatgcctagcctggcttattgcaccttccttttggcggttggcttgtcgcgaatcttcatcttagcacatttccctcaccaggtgctggctggcctaataactggcgctgtcctgggctggctgatgactccccgagtgcctatggagcgggagctaagcttctatgggttgactgcactggccctcatgctaggcaccagcctcatctattggaccctctttacactgggcctggatctttcttggtccatcagcctagccttcaagtggtgtgagcggcctgagtggatacacgtggatagccggccctttgcctccctgagccgtgactcaggggctgccctgggcctgggcattgccttgcactctccctgctatgcccaggtgcgtcgggcacagctgggaaatggccagaagatagcctgccttgtgctggccatggggctgctgggccccctggactggctgggccacccccctcagatcagcctcttctacattttcaatttcctcaagtacaccctctggccatgcctagtcctggccctcgtgccctgggcagtgcacatgttcagtgcccaggaagcaccgcccatccactcttcctgacttcttgtgtgcctccctttcctttccctcccacaaagccaacactctgtgaccaccacactccaggaggcagccccatccccttccagcccctaagtaggccctcccctccctaaatctgcttccgcaccacctggtcttagccccaaagatgggccttctctctcccagataagttggtcctccctctgcctttcctctcaagcccccaaagagcaaaggcaacagcaagaccagcgggttcttgcaacactgtgaggggcagccagggcggccccaataaagcccttgaatactttgaaaaaaaaaa

SEQ ID NO: 2163 - DNA, 1534 bp, Homo sapiens
ttttttttttttgatattaaatgttaaattttatttcaaaaaactatcacagcctaaagggaaatataatttaagcattaagatagtacatttcagaaaataagctagtattttcatgttacattttaggtacctatcatttgtcattccaagagatccttgcgttctagactctagaattaaatggggtaaagggttatgcttttaagaactataagctgaaatgatttacttcagttcaatatagaatatttgtcagtcaagataacaatcaatgtgtacaaaaatttacataacaagaggaaaaataggcagtgcagcacctttagaaaaataattaaaagtttcattgcatttacaggtaagtgccacactgagaatttacaatacagtaatttactgcaatcacaggggagttccataaagaaacaaagctcttacactccaggtttttggaaggtgttattggaatgcttaactgaaaccccacagaacttgtatatcccttaggattgagttgatggaaggtcataaaaggttttcatagcatctattatataaaaggagttcactgcatttggatagctggtttagtgtctctgacaagtgtgaagcctagaagaattactggcttgatggtgatctttctgtatccggcaagacagaccttctccacagtaacaacgctggaatatttctagtccatgagagccttttctcctatgcttggtacacacttgaccttctttcaggacaggtttacagatcttggaccagaagtgtctagcacaacacaatcctgaggcacagtctgatgaccggagacaaacagaaccttcttgtcctttggtgtgatacatttttgaagacaaggtggttcttctggaatacccatccaaggtgctatgatcattaccaaagctttcagtgatggtttcctcaatttctcctcggaaatgattttgatcagaagacacacatattccatttttgcagtaattcccggggcagcacatagcgtgacgcatgcagcgttttcggcgcttcctgcaggcgagacagatttgcacgcccgcgtcccctccgcgggtgggactagcgcagtactcatcagtgccgcactcctcgtcctctgcgcacgggtacggctggtagttgtcaatggtctggtacttattcccgcccgggtacaggattcccggcgcggcgctgactgcagagcctgggtgccccgcagcgccgcccagcggtgggggcaggttcttgatagcgttggaattgagaaccgagttcaaggtggcgctcactcccagcagagggtggccgccgagagccgccgctaccatcgcgacaaagacccgggtagctcccgctgcgcccagagccatcatctcagaaggactcaagagggagaaagaaagagaaaatgaccgtcactttgcaagcctgggtccccacgaaaccgtgccggttcggctgcagagtcagggtccgggagccccctgcggtcccagagtcctgactgcagggagca

SEQ ID NO: 2164 - DNA, 4394 bp, Homo sapiens
atgtccaccctctacgacatcagggcccacaaggcgcagctgctccggttcttcgccagctccgactccaacaaggcgctggagcagcggcgcacgctgcacacgcccaagctggagcacctggaccgcgtcctgtacgagtggttcctggggaagcgctccgagggcgtccccgtgtcaggccccatgctcatcgagaaggccaaggacttctacgagcagatgcagctcactgagccctgcgtgttctccggagggtggctttggcgctttaaggccagacacggcattaaaaagctagatgcatccagtgaaaagcagtcagccgaccaccaggccgcggagcagttctgtgcgtttttcaggagcttggctgctgagcacgggctgtccgccgagcaggtttacaacgctgatgagaccggccttttctggcggtgcctgccaaatcccactccggaaggcggggctgtgcctggccccaagcagggcaaggaccggctgaccgtgctgatgtgtgccaacgccacgggctcccacaggctcaagcccttggccatcgggaagtgcagcggtcccagggctttcaaaggcatccagcacctgcccgtcgcctataaggcccaggggaacgcctgggtggacaaggagattttttccgattggttccatcatatctttgtgccctcggtgagagagcacttcagaaccataggtttgccggaagacagcaaagccgttctcttgctggacagctcccgggctcacccgcaggaggccgagctggtgtccagtaacgttttcaccatcttcctgcctgccagcgtggcctcattggtgcagcccatggagcagggcattcggagagatttcatgaggaacttcattaaccctccggtccccctgcagggcccccacgcccgctacaacatgaacgatgccatattcagcgtggcctgtgcctggaacgcagtccctagccacgtcttcaggcgggcctggaggaagctgtggccgtcggttgcgtttgccgaaggctcctcctctgaggaggagttggaggcagagtgcttcccagtgaagccccacaacaagtcctttgcacacatcctggagcttgtgaaggaaggctcctcctgcccgggccagcttcgccagcgccaggccgccagctggggggtagcgggaagggaggcagaagggggacggccccctgctgccacgtcgccagcagaggttgtgtggagttcagaaaagactccgaaagctgaccaggacggcagaggagatcctggtgagggcgaggaggtggcctgggagcaggcggccgtggcctttgacgcagtcctgcgctttgcggagcggcagccatgcttcagtgcgcaggaagtggggcagctgcgggcgctgcgtgccgtgttccggagccagcagcaggtgaggaggcggcgtggtgccctcggggctgtggtcaaggttgaagccctccaggagggccctggtggctgtggggccacagctcagtctcccttgccctgctcatccacagcaggtgacaactgatggcttctctgccctgccctggccactggccctgtttctcccacaccctggagtggcatggtcctgtgccccgaccccacctgaggcaggagggcatgtgcagacactcaagagcccttccaggagtgggtcgcccacgggtgtggctcgggtgcccaggacggtctgtgcccgaggttcctgtcaatacaggttttattttatcacttgccgtgtcatccgaaagtgaggaaatgttttggaagggtccaccctagcctagaacaagccagagccgcaccctggctggaatgggggccaggctgagccgatctggtctcgtgttcgctggctgatcattgcagtatcagagggtggagatgtcagtctgtccacgtggagagaagttgccctccaggccgacaggaggccatgcccaccgcccctggacaggcttcgtctcagaaggctctatctgctgggctggcggccatccccgtgttgggtggaccccgagcacggttgcctgaggtccgatggcccgagagctgggactcagttcttggcctgctagcggctgaacaggccgcacatctcacttcagttgtggcctcattcagcagaatgactctggaaccatcctctgttacccgcagatcctgtcccatgggctctggccccaagatgttggggggccccacggagagttgacttggtagagttcctttctgggaagaaagtaggagtggctgaccaggccctgctcatcacccggatagaggacacggaccctgtgtggtattttggcattttggctcagagtccaatgtaccatgttgcccagaatttcatacttacggcctttacatgaatacgtcttgatcagacattcagagattagtcttaggtttccacgtaagtcactgaaaacagtaaaacaggctgcttagatttctagcagtatgtgtgctcttatccccagctgttagcacgttagtaatacttttggggaggagttgtctgtcctggtcagttttcacagaggcggttgtaagaggatgtggttattttctccatgtctgtagttgctttgcggcatctccatttcacgggcaacactcactgcctgcagctgagattccagaacgccctgtgtccacagtgattagcctcgtctttcagcgagcataaaataggtgcattgtccttttcttttcttgaggcagggtctcgctctgttgaccaggctggagtgaagtggtgtgatcccagctcactgcagcctcgacctccctggcttgagtgatcctcccgccccagcctcctgagtagctgggactagaggcacgcaccaccgcgcctttttattttttttgtagagacagggtctcactgtgttgcccgggctggtcttgaactcttggcctcaagcgatcctccttcctcatccttctaaagtgctgggattacaggtgtgagccacagcactcggcctaaataggtttttcttgctatgttattttcagtgctttgcccttgaattcttttcctctcttaaattcatatcatttggccgagtcagcacgtagtttgcattccagcgtctgctgttgattccactgaaacctctgttctcatgaaggagaggatttggctcgctgtgtgttctcgtactttcacatctctgtagatacaggggcaaaagtcattgctgacagagccctatctatgtcctggaagtgtgtgtttcttgctttgaatgcatgtgtgaagattataaaagccaaatagtttttaaagatctcggtgctgaacgacagtcccagttcccatttgtgtcccacacaggcgaggatcgttgggcctccttagtagccaaaggaactgaggtccagagcagggaatgtgttgcccagtgtcagcatggtctgctctggggtcaggcgtcttgccctggtcctaagccaccccaagccaaggcatgtccctgggcccatttcctctctcgaggtcttgggttccctatttctgatgtgtgtgaaaggaaggcctgtcctctggggtgaccatgaggctcagggggaggagctgccaggcttgagctgggacttggcacctggccagccttttttctatttcattgtaccttgatgggctgtcagttctgaagagaaaaaatacactaggaatccattcttcctccaccattctccctggcagagggaagtgactacacccctatggtgtggacatactgacgctcctccatgaagcagcaaagttctgttgtttcaggagactgtgggccttgaggatgtggtagtgacctcaccagaggagttggcaattcctaagtgctgcctggaggcctctacagagacataatgttggagaacttctgccacatggcagtgctgggtaagacccctctgtccccaccagtgcccttgaggttatgggtgttggtaggtctgtggcctccatttccatgacgatggtgttaaggactgcatgtttgtgtccccccccaaagtttatatgttgaaaccctgacccccaggagggtggtattaggaggtggggcctttgggaggtgactaggcttaggtgagatcgtgagggtggggctcgccgatgagatcgagtccttataagaaaaggaaggaactagagcgaggtcactttgtgctgtgtgagcatacaagaaaactgccatcttcaagctgggtgcagtggctcacgcctgtaatcccagcactggaaggccaaggcattaggattgcatgagtccaggagttcgagaccagcctaggcatgataagaccttattgctaaaaaaaaaaaaaaggggg

SEQ ID NO: 2165 - DNA, 4125 bp, Homo sapiens
tttcgtctgtctctcctccgctttgctgagccctcccttcttcctctcagttcctagagtccgaccgccgccgccgccgagagagaggagaaggagggggagtggccacagcaggtcctatctggtggtgagtggctgtcatgatctctacagcaccgctctacagcggcgtgcacaactggaccagttctgaccggattcgcatgtgtggcatcaacgaggagagaagagcacctctttctgatgaggagtcaacgacaggcgactgccagcactttggatctcaggagttttgtgtcagcagcagtttttccaaggtggagctcacggcagttggaagtggcagcaatgcccggggggcagacccagatggcagtgctacagaaaaacttgggcacaagtcagaagacaagcctgacgatccccagccaaaaatggactacgctgggaacgtggcagaggctgagggcctcttggtgcccctgagcagcccaggagacgggctcaagcttcccgcatctgacagcgccgaggccagcaacagcagggccgactgctcctggactccactcaacacccaaatgagcaaacaggttgactgctcacccgccggagtaaaggctttggactctcggcaaggtgttggagagaagaatactttcattttggcaactctgggaactggagtccctgtggaggggaccctgcccctggttaccactaacttcagtcctctgccagcccctatctgtccccctgctcccagttcggcctctgtgccccactctgttccagatgcattccaggctcctgtgcccccttcagctccgaccttggttctcgctcccgtccccactccggttctggctcccatgccagcatccacgcctccagcggcccctgcccctccgtctgtgcccatgcccactccaaccccatcttccggcccaccttctacccccaccctcatccccgcctttgctcctacaccggtgcctgcacccaccccagcccccatctttactccagcccctacacccatgcctgctgccacgccagctgccattcccacctctgcacccatcccggcctccttcagtttgagtagagtgtgctttcctgcagctcaggcaccagctatgcaaaaagtccccctgtcctttcagccagggacagtgctgaccccgagccagccgctggtatatatcccgcctccaagctgtgggcagccactcagtgtggccacactgccaaccactctaggggtttcctccactcttacgctccctgtcctgccgtcctacctgcaggacaggtgtctcccaggcgtgctagcctcccccgagctccgttcttacccgtatgcattttctgtggcccggcctctgacttcggattccaagctggtatctctggaggtgaacaggctcccctgcacttccccatccggtagcaccaccacccagcctgcacccgatggggtccctgggcctttggcagatacctcccttgttactgcttctgccaaggtgcttccaactccacagcctctgctgccagcccccagtgggagctcagccccaccgcaccccgccaagatgcccagtggcaccgagcagcaaacagaagggacttccgttaccttctctcctcttaagtcaccgccacagctggaacgagagatggcctctccacctgagtgcagcgagatgccccttgatctgtcctccaagtccaaccgccagaagcttccattgccgaaccagcgcaagacaccccccatgcctgtgttgacccccgtgcacaccagcagcaaggccctcctctccacagtcctgtctaggtctcagcgcacaacccaggctgccggtggcaatgtcacctcctgcctgggctccacttcctcgccctttgtcatctttcccgagatcgtgaggaatggggacccgagcacctgggtgaagaactcaactgcactgatcagcaccattcctggcacctacgtgggagtggccaacccagtgcctgcatccctgctgctgaacaaagaccccaacctgggcctcaaccgtgacccccgccatctccccaagcaggagcccatctccatcattgatcaaggagagcctaagggcactggtgccacgtgtggcaaaaagggcagccaggctggtgctgagggacagccaagcacagtgaaacgatatactccagcccgcattgcccctgggctgccagggtgccaaaccaaggaactctctttgtggaaacccacggggccggcaaatatttatccccggtgttcagtcaatgggaaacctaccagcacccaggtcctgcctgttggctggtccccgtaccaccaggcgtctctgctttccattggcatttccagtgccgggcagctgacccccagtcagggggcgcccatcaggcccaccagcgttgtttcggagttttctggtgtgccatctctcagctccagcgaagccgtgcacggacttcctgaggggcaaccacggcctgggggctccttcgttccagagcaggaccctgttacaaagaacaaaacttgccggattgctgccaagccttatgaagaacaagtcaatcctgtcctcttgaccctcagccctcagactgggaccctggcactgtctgttcagcctagcggtggggacattcgaatgaatcaggggcctgaggaatcagagagccacctctgctctgacagcactcctaagatggaaggcccccagggggcttgtggcctgaagctggcaggagacacgaagcctaagaaccaagtgctggccacctacatgtcccatgagctggtcctggccaccccccagaacctgcctaagatgcctgagctgcctttgctacctcacgacagccaccccaaggaacttatattggacgtggttccgagcagcaggaggggctccagcacagagcgcccacagcttggaagccaggtggatctggggcgagtgaaaatggagaaggtggatggtgatgtggtcttcaatttagccacctgcttccgggctgatggcctcccagtggctccccagaggggccaagctgaagttcgggctaaggccgggcaggctcgagtgaaacaggaaagcgtaggggtctttgcttgcaagaacaagtggcagccagatgatgtgacggaatctctgccgcccaagaagatgaagtgcggcaaagagaaggacagtgaagagcagcagctccagccacaagccaaggccgtggtccggagttcccacagacccaagtgccggaagctgcccagtgacccccaggaatccaccaagaaaagccccaggggggcttcagattcaggaaaagagcacaatggagtcaggggaaagcacaagcaccggaagccgacaaagccggagtcccagtctccaggaaaacgagccgacagccacgaggaaggttccttggaaaagaaagcaaagagcagtttccgtgactttattcctgtggttctgagcacccgcacgcgcagtcagtctgatttaaaggcccgtaagcagaagacttcctcctcccaaagtttggagcaccgcctcaggaacaggaaccttctcttgcccaacaaagtccaggggatctcggattcaccaaacggtttcctcccaaataacctggaagagccagcctgccttgaaaattcagaaaagccatcaggaaaacgaaagtgcaagaccaagcacatggcaaccgtctcagaagaggcaaagggcaaaggtcgttggagccagcagaagacacgatctcccaaatctcccaccccagtgaaacccacagaaccatgtacaccctctaagtcccgaagtgccagctcagaggaggcctcagagtcacctacagcccggcagatccccccagaggcacgtcggctcatagtgaacaaaaatgctggtgagaccctcctgcagagggcggcgcgtcttggctataaggatgttgttctctactgcctccagaaagacagtgaagatgtgaatcaccgtgacaatgctggctacacagccctgcatgaggcttgttcccggggctggaccgacatcctgaacatcctgctggagcacggggccg

SEQ ID NO: 2166 - DNA, 2795 bp, Homo sapiens
cctcacttagaatgcacaatctatccattttggtgagacagataaaattttattaccaggagactttgcagcaattgatcatgatgtcgttgccaaatgtcttaatcattggcaaaaatcccttttctgaacaaggcacagaagaagttaaaaaactgcttttacttttattgggttgtgcagttcagtgtcagaaaaaagaggaatttattgaaagaattcaaggtttagattttgatacaaaagcagcggttgccgcacatattcaagaggtaactcataatcaggaaaatgtgtttgacctgcaatggatggaagtgactgatatgtcgcaggaggacatagaaccactcttgaaaaatatggcattgcatctaaaaagacttatagatgagagagatgaacattcagagactatcatagaactctctgaagagcgggatggtctccattttctaccccatgcctcttcatctgcacagtcaccctgtggttctccaggcatgaagcgaacagaaagtcgacaacatctgtcggtggaactggcagatgctaaagccaagataagaaggcttaggcaggaattggaggaaaagactgagcagttgttggattgtaaacaagaacttgagcaaatggaaatagaactcaaaaggctgcaacaagagaacatgaatttgctttcggatgctcgctctgccagaatgtaccgagatgaattagatgcacttcgagagaaagcagtcagagtcgataagcttgaaagtgaagtcagcagatataaagagagactacatgatattgaattttataaggcaagagttgaggaattaaaagaagacaatcaagttttattagaaacaaaaaccatgttggaagaccaactagagggaactcgtgctcgttctgataaattacatgaattagaaaaagagaacttacaactgaaagctaaacttcatgatatggaaatggaacgagatatggatagaaaaaagattgaagaattaatggaagaaaatatgactttggaaatggcacagaaacaaagtatggatgaatcattacatcttggctgggaactggaacagatatccagaactagtgaactttccgaagcaccccagaaatccctgggccatgaggtgaatgagttgacatcaagtagattattgaagctagagatggaaaatcaaagtttgacaaaaaccgtagaagagcttcggactactgtggattctgtagaaggcaatgcttccaaaatcctgaaaatggaaaaagaaaatcaaaggctcagtaaaaaggttgagattcttgaaaatgagattgttcaagaaaagcaaagtcttcagaattgtcagaatttaagcaaggatctaatgaaggagaaagctcagcttgaaaaaacaatagaaacactgagagaaaattcagagagacagattaagatactggaacaggaaaatgaacatctgaatcaaacagtgtcttccttaaggcagcggtcccagataagtgcagaagcaagagtgaaagacattgaaaaagaaaacaaaattcttcatgaatctatcaaagaaacaagtagcaagctaagcaagattgaatttgaaaaaagacaaattaaaaaagaattggaacattataaagaaaaaggagaacgagctgaagaacttgaaaatgaattgcatcatcttgaaaaagaaaatgaattattacagaaaaaaataactaatttaaaaattacttgtgaaaaaattgaggccttagaacaagaaaattcagagctagaaagagaaaatagaaaattaaaaaaaacattggatagctttaaaaatctgacctttcagttagaatccctagaaaaagagaattcccaacttgatgaggaaaacttagaactgcgaaggaatgtagaatctttgaagtgtgcaagcatgaaaatggctcagctacagctagaaaacaaagaactggaaagtgaaaaagagcaacttaagaagggtttggagctcctgaaagcatctttcaagaaaacagaacgcttagaagttagctaccagggtttagatatagaaaatcaaagactgcaaaaaactttagagaacagcaataaaaaaatccagcaattagagagtgaactacaagacttagagatggaaaatcaaacattgcagaaaaacctagaagaactaaaaatatctagcaaaagactagaacagctggaaaaagaaaataaatcattagagcaagagacttctcaactggaaaaggataagaaacaattggagaaggaaaataagagactccgacaacaagcagaaattaaagataccacattagaagaaaataatgtgaagattggaaatttggaaaaagaaaacaaaaccctatccaaagaaattggtatatataaagaatcttgtgtccgtctggaagaactagaaaaagaaaataaggagcttgtgaaaagagcaactattgatataaaaacgttggttacactacgtgaggatttggtgagtgaaaagttgaagacccaacagatgaacaatgatctcgaaaaattaactcatgagcttgagaagatagggttaaataaggagcgactcttacatgatgaacaaagtactgatgacagtaggtataaacttttggaatcaaaattagaatccactcttaagaagtctcttgaaataaaagaagaaaaaattgctgctttagaagctcgattagaagaatccacgaattataaccagcaattgcgccaagaacttaaaacagtgaaaaaaaaa

SEQ ID NO: 2167 - DNA, 2515 bp, Homo sapiens
aggcttttggctgcatctcacactgctcggagcctccctgccggctgcgctgggatggatggacccaggaaccagcagaggcccggatgtgggtgtgggggagtcacaggcagaggagcccagaagctttgaagtcacaagaagagaagggctttccagccacaacgagctgctggcctcctgcgggaagaagttctgcagccgagggagccggtgcgtgctcagcaggaagacaggggagcccgaatgccagtgcctggaggcatgcaggcccagctacgtgcctgtgtgcggctctgatgggaggttttatgaaaaccactgtaagctccaccgtgctgcttgcctcctgggaaagaggatcaccgtcatccacagcaaggactgtttcctcaaaggtgacacgtgcaccatggccggctacgcccgcttgaagaatgtccttctggcactccagacccgtctgcagccactccaagaaggagacagcagacaagaccctgcctcccagaagcgcctcctggtggaatctctgttcagggacttagatgcagatggcaatggccacctcagcagctccgaactggctcagcatgtgctgaagaagcaggacctggatgaagacttacttggttgctcaccaggtgacctcctccgatttgacgattacaacagtgacagctccctgaccctccgcgagttctacatggccttccaagtggttcagctcagcctcgcccccgaggacagggtcagtgtgaccacagtgaccgtggggctgagcacagtgctgacctgcgccgtccatggagacctgaggccaccaatcatctggaagcgcaacgggctcaccctgaacttcctggacttggaagacatcaatgactttggagaggatgattccctgtacatcaccaaggtgaccaccatccacatgggcaattacacctgccatgcttccggccacgagcagctgttccagacccacgtcctgcaggtgaatgtgccgccagtcatccgtgtctatccagagagccaggcacaggagcctggagtggcagccagcctaagatgccatgctgagggcattcccatgcccagaatcacttggctgaaaaacggcgtggatgtctcaactcagatgtccaaacagctctcccttttagccaatgggagcgaactccacatcagcagtgttcggtatgaagacacaggggcatacacctgcattgccaaaaatgaagtgggtgtggatgaagatatctcctcgctcttcattgaagactcagctagaaagacccttgcaaacatcctgtggcgagaggaaggcctcagcgtgggaaacatgttctatgtcttctccgacgacggtatcatcgtcatccatcctgtggactgtgagatccagaggcacctcaaacccacggaaaagattttcatgagctatgaagaaatctgtcctcaaagagaaaaaaatgcaacccagccctgccagtgggtatctgcagtcaatgtccggaaccggtacatctatgtggcccagccagcactgagcagagtccttgtggtcgacatccaagcccataaagtcctacagtccataggtgtggaccctctgccggctaagctgtcctatgacaagtcacatgaccaagtgtgggtcctgagctggggggacgtgcacaagtcccgaccaagtctccaggtgatcacagaagccagcaccggccagagccagcacctcatccgcacaccctttgcaggagtggatgatttcttcattcccccaacaaacctcatcatcaaccacatcaggtttggcttcatcttcaacaagtctgatcctgcagtccacaaggtggacctggaaacaatgatgcccctcaagaccatcggcctgcaccaccatggctgcgtgccccaggccatggcacacacccacctgggcggctacttcttcatccagtgccgacaggacagccccgcctctgctgcccgacagctgctcgttgacagtgtcacagactctgtgcttggccccaatggtgatgtaacaggcaccccacacacatcccccgacgggcgcttcatagtcagtgctgcagctgacagcccctggctgcacgtgcaggagatcacagtgcggggcgagatccagaccctgtatgacctgcaaataaactcgggcatctcagacttggccttccagcgctccttcactgaaagcaatcaatacaacatctacgcggctctgcacacggagccggacctgctgttcctggagctgtccacggggaaggtgggcatgctgaagaacttaaaggagccacccgcagggccagctcagccctgggggggtacccacagaatcatgagggacagtgggctgtttggacagtacctcctcacaccagcccgagagtcactgttcctcatcaatgggagacaaaacacgctgcggtgtgaggtgtcaggtataaagggggggaccacagtggtgtgggtgggtgaggta

SEQ ID NO: 2168 - DNA, 2873 bp, Homo sapiens
ggcgctggctggcaggtgtcgctaaccggacggtggtcgccagggcgagaggcgggagccggagaggtgaggcaggacccgggctccactgccgcctctccgagctcttgtgacgcggacctcagtgccaggatggctcggggcgagcggcggcgccgcgcagtgccggcagagggagtgcggacagccgagagggcggctcggggaggccccgggcgacgggacggccggggcggcgggccgcgtagcacggctggaggagtggctctggccgtcgtggtcctgtctttggccctgggtatgtcggggcgctgggtgctggcgtggtaccgtgcgcggcgggcggtcacgctgcactccgcgcctgctgtgttgcctgccgactcctccagccccgccgtggccccggacctcttctggggaacctaccgccctcacgtctacttcggcatgaagacccgcagcccgaagcccctcctcaccggactgatgtgggcgcagcagggcaccaccccggggactcctaagctcaggcacacgtgtgagcagggggacggtgtgggtccctatggctgggagttccacgacggcctctccttcgggcgccaacacatccaggatggggccttaaggctcaccactgagttcgtcaagaggcctgggggtcagcacggaggggactggagctggagagtgactgtagagcctcaggactcaggtacttctgccctccctttggtctccctgttcttctatgtggtgacagatggcaaggaagtcctactaccagaggttggggccaaggggcagttgaagtttatcagtgggcacaccagtgaacttggtgacttccgctttacacttttgccaccaaccagtccaggggatacagcccccaagtatggcagctacaatgtcttctggacctccaacccaggactgcccctgctgacagagatggtaaagagtcgcctaaatagctggtttcagcatcggcccccaggggcctcccctgaacgctacctcggcttgccaggatccctgaagtgggaggacagaggtccaagtgggcaagggcaggggcagttcttgatacagcaggtgaccctgaaaattcccatttccatagagtttgtgtttgaatcaggcagtgcccaggcaggaggaaatcaagccctgccaagactggcaggcagtctactgacccaggccctggagagccatgctgaaggctttagagagcgctttgagaagaccttccagctgaaggagaagggcctgagctctggcgagcaggttttgggtcaggctgccctcagcggcctccttggtggaattggctacttctacggacaagggctggtattgccagacatcggggtggaagggtctgagcagaaggtggacccagccctctttccacccgtacctctttttacagcagtgccctcccggtcattcttcccacgaggcttcctttgggatgaaggctttcaccagctggtggttcagcggtgggatccctccctcacccgggaagcccttggccactggctggggctgctaaatgctgatggctggattgggagggagcagatactgggggatgaggcccgagcccgggtgcctccagaattcctagtacaacgagcagtccacgccaaccccccaaccctacttttgcctgtagcccatatgctagaggttggtgaccctgacgacttggctttcctccgaaaggccttgccccgcctgcatgcctggttttcctggctccatcagagccaggcaggcccactgccactatcttaccgctggcggggacgggaccctgccttaccaaccttactgaaccccaagaccctaccctctgggctggatgactacccccgggcttcacacccttcagtaaccgagcggcacctggacctgcgatgttgggtggcactgggtgcccgtgtgctgacgcggctggcagagcatctgggtgaggctgaggtagctgctgagctgggcccactggctgcctcactggaggcagcagagagcctggatgagctgcactgggccccagagctaggagtctttgcagactttgggaaccacacaaaagcagtacagctgaagcccaggccccctcaggggctcgttcgggtggtgggtcggccccaacctcaactgcagtatgtagatgctcttggctatgtcagtctttttcccttgctgctgcgactgctggaccccacctcatcccgccttgggcccctgctggacattctagccgacagccgccatctctggagcccctttggtttacgctcccttgcagcctccagctccttttatggccagcgcaattcagagcatgatcccccctactggcggggtgctgtgtggctcaatgtcaactacctggctttgggagcactccaccactatgggcatctggagggtcctcaccaggctcgggctgccaaactccacggtgagctccgtgccaacgtggtaggcaatgtatggcgccagtaccaggctacaggctttctttgggagcagtacagtgaccgcgatgggcgaggcatgggctgccgccctttccacggctggaccagccttgtcttactggccatggctgaagactactgaagggagggagaggaggggagccaagacactcatgccactctggctctgaagggacaaaggcttctggcttttgcccccagccccttggataccagtaattcaaaccttcctcatttcatctcaggtgtctccttgctgtcatcccacatagccctggggtgaatgtgaatccagagtctatttttctaaataaattggaaaaaacattttgaactctaaaaaaaaaa

SEQ ID NO: 2169 - DNA, 5530 bp, Homo sapiens
atggttatcaagacggacgagttgccggcggccgccccggccgacagcgcccgggaacacggctcgcaggccgggggcaaggggcggccgggcgcggccgccgtccttctggccgaccttgagcgggatgccaggcagggggagtgtgcccttcctggggctgccatggcaggcctggccccactgaaacccgaagccagccggagctccagccccgggccgactggctgcattagggcaagggtagcggcagaggctggaacaaggaacccgggcaatgctggggctgagctggagagctggctgccttgctgccacggccatcctgagactccagagccgaggggagggcagctgccaactgcaccagagctgccatcagtcatgctcttaaacggggactgcccagagagcctgaagaaggaggcggcggcggccgagccacccagggaaaatgggcttgacgaggccggcccgggagatgagaccaccggccaggaagtcattgtcattcaggacacgggcttttctgtgaagatcctcgcccctgggatcgagcccttctccctgcaggtgtccccccaggagatggtgcaggagattcaccaggtgctcatggaccgggaggacacgtgtcaccgcacctgcttctcactgcacctggatggcaacgtgctggaccacttctcggagctgcgcagcgtcgaggggctgcaggagggctctgtgctgcgtgtggtggaagagccgtacacggtgcgtgaggcccgcatccacgtgcgccatgtccgagacctgctcaagagcctggacccatccgatgccttcaacggggttgactgcaactccttgtccttcctgagtgtcttcaccgacggcgacctgggagacagcgggaagcggaagaagggcttggagatggaccccatcgactgcacaccacccgagtacatcctgccagggagccgggagcggccactgtgtcccctgcagccccaaaaccgtgactggaagcccttgcagtgcctgaaagtactcaccatgagcggatggaacccgcccccggggaaccggaagatgcacggggacctcatgtacctgtttgtgatcacagccgaggaccggcaagtcagcatcaccgcgtccacacggggcttttacctgaatcagtccacagcttatcacttcaaccccaagcccgccagcccccgcttcctaagccattccctagtggagctgctcaaccagatcagcccgaccttcaagaagaacttcgctgtgctgcagaagaaaagggtccagcgccacccgttcgagaggatcgccaccccattccaggtgtacagctggacagccccccaggcggagcatgccatggattgcgtgcgtgcagaggacgcctacacctcgaggctgggctatgaggagcacattcctggacagacccgagactggaatgaggagctgcagacgacgagggagctgcctcgcaagaacctgcctgagcggctgctccgagaaagggccatattcaaggtgcacagcgacttcaccgcggcagccaccaggggcgccatggccgtcattgacggcaacgtgatggccatcaaccccagcgaggagaccaagatgcagatgttcatctggaacaacatcttcttcagcctgggcttcgacgtccgagaccactacaaggacttcgggggggacgtggcggcctacgtggcgcccaccaacgacctgaatggcgtccgcacgtacaacgcggtggacgtggaggggctgtacacgctgggcacggtggtggtggattaccgcggctaccgggtcacggcccagtccatcatccccggcatcctggagcgggaccaggagcagagcgtcatctacggctccatcgacttcggcaagaccgtggtgtcacacccgcggtacctggagctgctggagcgcacgagtcggcccctcaagatcctgcggcaccaggtgctcaacgaccgtgacgaggaggtggagctctgctcctcggtcgagtgcaagggcatcattggcaacgacgggcgccactacatcctcgacctgctgcgcaccttccccccggacctcaacttcctgcccgtgcctggcgaggagctgcctgaggaatgcgcccgcgccggcttcccccgcgcccaccggcacaagctctgctgcctgcgccaggagctggtggacgccttcgtggagcacaggtacctcctctttatgaagctggccgccttgcagctgatgcagcagaacgccagccagctggagaccccctcctccctggaaaatggtggtccttcctccttggagtccaagtctgaggatcctccaggacaggaggcgggaagtgaggaggagggtagcagcgccagcggcctggccaaggtgaaggagctggcagagaccatcgccgcagacgacggcacagaccctcggagccgggaggtgatccgcaacgcgtgcaaggcggtcggctccatcagcagcaccgccttcgacattcgcttcaatcctgacatcttctcaccaggggttcgtttccctgagtcctgccaggatgaagttcgggaccagaagcagctgctgaaggacgcggctgccttcctgctctcctgccagatccctggcttggtgaaggactgcatggagcacgcggtcctgcccgtggacggggcaacgctggcagaggtgatgcgccagcggggcatcaacatgcgctacctgggcaaggtgctggagctggtgctgcggagcccggcccgccaccagctggaccacgtctttaaaatcggcattggagaactcatcacccgctcggccaagcacatcttcaagacgtacttacagggagtcgagctctccggcctctcagccgccatcagccacttcctgaactgcttcctgagctcctacccaaaccccgtggcccacctgcccgccgacgagctggtctccaagaagcggaataagaggaggaaaaaccggcccccgggggctgcagataacacagcctgggctgtcatgaccccccaggagctctggaagaacatctgccaggaggccaagaactactttgacttcgacctcgagtgtgagaccgtggaccaggctgtggagacctacggcctgcagaagataacgctcctgcgggagatctcgctgaaaacagggatccaggtcctgctgaaggagtacagcttcgacagtcgccacaagcccgcgttcaccgaggaggacgtgctcaacatcttccccgtggtcaagcacgtcaaccccaaggcctcggatgccttccatttcttccagagcgggcaggccaaagtgcagcagggcttcctgaaggagggctgtgagctcatcaatgaggccctgaacctgtttaacaacgtctacggagccatgcacgtggagacctgcgcctgcctgcgcctcctcgcccgcctccactacatcatgggcgactacgcagaggccctgagtaaccagcagaaggcggtgctgatgagcgagcgggtgatgggcaccgagcaccccaacaccatccaggaatacatgcacctggccctgtactgcttcgccagcagccagctgtccaccgccctgagcctgctgtaccgcgcccgctacctcatgctgctggtgttcggggaagaccaccccgagatggcgctgctggacaacaacatcgggctggtgctgcacggggtgatggagtacgacctgtcgctgcgcttcctggagaacgcgctggccgtcagcaccaagtaccacgggcccaaggccctcaaggtggccctcagccaccaccttgtcgcccgagtctacgagagcaaagctgagttccggtcggccctgcagcacgagaaggagggttacaccatctacaagacgcagctgggcgaggaccatgagaagaccaaggaaagctccgagtacctcaagtgcctgacccagcaggccgtggccctgcagcgcaccatgaacgagatctaccgcaacggctccagcgccaacatcccgcccctcaagttcacggcccccagcatggccagcgtcttggagcagctgaacgtcattaacggcatcctcttcattcctctcagccaaaaagacctggagaatctgaaagccgaggtggcgcggcggcaccagctccaggaggccagcagaaacagggatagagccgaggagcccatggctaccgagcccgcgccagcgggggccccaggagacctgggctcccagcccccggctgccaaggacccttctccgagcgtgcagggatagagagggagccagacggacagccagccagcggccccgtcaccagggagcccgactgcgggagaagggggcgagcctgcgggcggaagaggaagcaaggccctcttcctccacgtctcaccccaccccacccccgtgtcctcctgggagcctggcctgcctgccccgcagaaggtgtttttgcgctggttcaatgaatagatgatgcagaggccccattggagacacgtgaatggcgtgtgcggccatcagttcccggctggggggcaggtgttgcttcggcccccgccctccggccggcgtgtgcgagtgcgcccctggctgtgagtgttgaccgttcctctcccctgtacatagcccgagccagtcctgagtgggtgactcctgagtgggtgacgcgcagacgggatttctcaggtcatttgtatggtcgacatgatggctgctgctttggctgccaccacccccgggcccagcctgtctgaaagttcagggtttaggccgaaaaacccggtggggaggggtggggagccggagctctgtggcggggctggagggctggggtgcactttagtttggggcgggacgggagccgccgttgtgactggcgtggtctggctgctgctcccgaacggaggggtcggggttggcttgctgggccctcagagcccagtgggtggctctgactcggctccctactccctgcacccagctgggcgcagccttggggcctgcggtctgaatgtatccctcccctcagttttaacctgagctgccgaacgcacagtgggccgggggcgaggctgggggaagcggggcccaattacggatcccgggagttacaggtgccgacgtgatgtcgcttctctggtgcccagctcccttcctggtctgagactagctctgggggtggcgggggcccccacacgctgctcccgctccaccctgcccgtgctgctgctctgtgcctgctgtcagagccctggtgggggaggatgtggccaccctgagacccggaggagacgggcgtctgcctgggtttgcggagagccgcttatgggtgtggtccgtccagacaccttgtttcaagggggatgggcgtgagcgggcaagcagagcatccccaccgctgagcaagaactttttcttgtttttaaaccatcacgtcctcatttcacattggaataaagtgagtttttgaaacctgcgaaaaaaaaaa

SEQ ID NO: 2170 - DNA, 5032 bp, Homo sapiens
gggagaggaatcgtatctccatatttcttctttcagccccaatccaagggttgtagctggaactttccatcagttcttcctttctttttcctctctaagcctttgccttgctctgtcacagtgaagtcagccagagcagggctgttaaactctgtgaaatttgtcataagggtgtcaggtatttcttactggcttccaaagaaacatagataaagaaatctttcctgtggcttcccttggcaggctgcattcagaaggtctctcagttgaagaaagagcttggaggacaacagcacaacaggagagtaaaagatgccccagggctgaggcctccgctcaggcagccgcatctggggtcaatcatactcaccttgcccgggccatgctccagcaaaatcaagctgttttcttttgaaagttcaaactcatcaagattatgctgctcactcttatcattctgttgccagtagtttcaaaatttagttttgttagtctctcagcaccgcagcactggagctgtcctgaaggtactctcgcaggaaatgggaattctacttgtgtgggtcctgcacccttcttaattttctcccatggaaatagtatctttaggattgacacagaaggaaccaattatgagcaattggtggtggatgctggtgtctcagtgatcatggattttcattataatgagaaaagaatctattgggtggatttagaaagacaacttttgcaaagagtttttctgaatgggtcaaggcaagagagagtatgtaatatagagaaaaatgtttctggaatggcaataaattggataaatgaagaagttatttggtcaaatcaacaggaaggaatcattacagtaacagatatgaaaggaaataattcccacattcttttaagtgctttaaaatatcctgcaaatgtagcagttgatccagtagaaaggtttatattttggtcttcagaggtggctggaagcctttatagagcagatctcgatggtgtgggagtgaaggctctgttggagacatcagagaaaataacagctgtgtcattggatgtgcttgataagcggctgttttggattcagtacaacagagaaggaagcaattctcttatttgctcctgtgattatgatggaggttctgtccacattagtaaacatccaacacagcataatttgtttgcaatgtccctttttggtgaccgtatcttctattcaacatggaaaatgaagacaatttggatagccaacaaacacactggaaaggacatggttagaattaacctccattcatcatttgtaccacttggtgaactgaaagtagtgcatccacttgcacaacccaaggcagaagatgacacttgggagcctgagcagaaactttgcaaattgaggaaaggaaactgcagcagcactgtgtgtgggcaagacctccagtcacacttgtgcatgtgtgcagagggatacgccctaagtcgagaccggaagtactgtgaaggtaatgactggaagtactgtgaagatgttaatgaatgtgctttttggaatcatggctgtactcttgggtgtaaaaacacccctggatcctattactgcacgtgccctgtaggatttgttctgcttcctgatgggaaacgatgtcatcaacttgtttcctgtccacgcaatgtgtctgaatgcagccatgactgtgttctgacatcagaaggtcccttatgtttctgtcctgaaggctcagtgcttgagagagatgggaaaacatgtagcggttgttcctcacccgataatggtggatgtagccagctctgcgttcctcttagcccagtatcctgggaatgtgattgctttcctgggtatgacctacaactggatgaaaaaagctgtgcagcttcaggaccacaaccatttttgctgtttgccaattctcaagatattcgacacatgcattttgatggaacagactatggaactctgctcagccagcagatgggaatggtttatgccctagatcatgaccctgtggaaaataagatatactttgcccatacagccctgaagtggatagagagagctaatatggatggttcccagcgagaaaggcttattgaggaaggagtagatgtgccagaaggtcttgctgtggactggattggccgtagattctattggacagacagagggaaatctctgattggaaggagtgatttaaatgggaaacgttccaaaataatcactattgagaacatctctcaaccacgaggaattgctgttcatccaatggccaagagattattctggactgatacagggattaatccacgaattgaaagttcttccctccaaggccttggccgtctggttatagccagctctgatctaatctggcccagtggaataacgattgacttcttaactgacaagttgtactggtgcgatgccaagcagtctgtgattgaaatggccaatctggatggttcaaaacgccgaagacttacccagaatgatgtaggtcacccatttgctgtagcagtgtttgaggattatgtgtggttctcagattgggctatgccatcagtaataagagtaaacaagaggactggcaaagatagagtacgtctccaaggcagcatgctgaagccctcatcactggttgtggttcatccattggcaaaaccaggagcagatccctgcttatatcaaaacggaggctgtgaacatatttgcaaaaagaggcttggaactgcttggtgttcgtgtcgtgaaggttttatgaaagcctcagatgggaaaacgtgtctggctctggatggtcatcagctgttggcaggtggtgaagttgatctaaagaaccaagtaacaccattggacatcttgtccaagactagagtgtcagaagataacattacagaatctcaacacatgctagtggctgaaatcatggtgtcagatcaagatgactgtgctcctgtgggatgcagcatgtatgctcggtgtatttcagagggagaggatgccacatgtcagtgtttgaaaggatttgctggggatggaaaactatgttctgatatagatgaatgtgagatgggtgtcccagtgtgcccccctgcctcctccaagtgcatcaacaccgaaggtggttatgtctgccggtgctcagaaggctaccaaggagatgggattcactgtcttgatattgatgagtgccaactgggggtgcacagctgtggagagaatgccagctgcacaaatacagagggaggctatacctgcatgtgtgctggacgcctgtctgaaccaggactgatttgccctgactctactccaccccctcacctcagggaagatgaccaccactattccgtaagaaatagtgactctgaatgtcccctgtcccacgatgggtactgcctccatgatggtgtgtgcatgtatattgaagcattggacaagtatgcatgcaactgtgttgttggctacatcggggagcgatgtcagtaccgagacctgaagtggtgggaactgcgccacgctggccacgggcagcagcagaaggtcatcgtggtggctgtctgcgtggtggtgcttgtcatgctgctcctcctgagcctgtggggggcccactactacaggactcagaagctgctatcgaaaaacccaaagaatccttatgaggagtcgagcagagatgtgaggagtcgcaggcctgctgacactgaggatgggatgtcctcttgccctcaaccttggtttgtggttataaaagaacaccaagacctcaagaatgggggtcaaccagtggctggtgaggatggccaggcagcagatgggtcaatgcaaccaacttcatggaggcaggagccccagttatgtggaatgggcacagagcaaggctgctggattccagtatccagtgataagggctcctgtccccaggtaatggagcgaagctttcatatgccctcctatgggacacagacccttgaagggggtgtcgagaagccccattctctcctatcagctaacccattatggcaacaaagggccctggacccaccacaccaaatggagctgactcagtgaaaactggaattaaaaggaaagtcaagaagaatgaactatgtcgatgcacagtatcttttctttcaaaagtagagcaaaactataggttttggttccacaatctctacgactaatcacctactcaatgcctggagacagatacgtagttgtgcttttgtttgctcttttaagcagtctcactgcagtcttatttccaagtaagagtactgggagaatcactaggtaacttattagaaacccaaattgggacaacagtgctttgtaaattgtgttgtcttcagcagtcaatacaaatagatttttgtttttgttgttcctgcagccccagaagaaattaggggttaaagcagacagtcacactggtttggtcagttacaaagtaatttctttgatctggacagaacatttatatcagtttcatgaaatgattggaatattccaatcccattaagatacagtgtaggcatttaactcctcattggcgtggtccatgctgatgattttgccaaaatgagttgtgatgaatcaatgaaaaatgtaatttagaaactgatttcttcagaattagatggcttattttttaaaatatttgaatgaaaacattttatttttaaaatattacacaggaggccttcggagtttcttagtcattactgtccttttcccctacagaattttccctcttggtgtgattgcacagaatttgtatgtattttcagttacaagattgtaagtaaattgcctgatttgttttcattatagacaacgatgaatttcttctaattatttaaataaaatcaccaaaaacataaacattttattgtatgcctgattaagtagttaattatagtctaaggcagtactagagttgaaccataatgatttgtcaagcttgctgattgttcttgtattcgatattttttctttttcccgagagagataataacc

SEQ ID NO: 2171 - DNA, 580 bp, Homo sapiens
ttttttttttttgatatcgatctcttttaatttttaggccaattttgagtagtcaaagtcagagcagtcaatctgtgttgtgagccgaggcacagctgcagaagcgtgtctgaggtgtccggtggaggtggcagccgagctctgggactaatcaccgtgctggggacggcaccgcgtcaggatgcaggcagatccctgcagaagtgtctaaaattcacactcctcttctggagggacgtcgatggtattaggatagaagcaccaggggaccccacgaacggtgtcgtcgaaacagcagcccttatttgcacactgggagggcgtgacaccaggaaaaccacaattctgtctttcacggggggccactgtacacgtctctgtctgggcctcggccagggtgccgagggccagcatggacaccaggaccagggcgcagatcaccttgttctccatggtggccattgcctcctctctgctccaaaggcgaccccttctttccgccagcctttcccaataccaaccgctggttcctcacctgcattaaccagccccagttccgggctgtcttgggggaagtgaa

SEQ ID NO: 2172 - DNA, 1641 bp, Homo sapiens
cccacgcgtccgggcggctgacgtggccgctggagctcaggcggtggtttcggctgggatggcgaagagcaacggagagaatgggccgcgcgcgcccgcggccggggaaagcctgtcgggaacccgggagagcctggcccagggccccgacgccgcaaccaccgacgaactcagctctctcgggtctgactcggaggccaacggcttcgccgagcgccgcatcgacaagttcggcttcatcgtgggctcgcagggcgccgagggcgcgctggaggaagtacccctggaggtgctgaggcagagggagtccaagtggctggacatgctcaacaactgggacaaatggatggccaagaagcacaaaaagattcgtctgcggtgccaaaagggcatcccgccttctctgcggggccgtgcttggcagtacctgtcaggaggcaaggtgaagttacagcagaaccctggaaagtttgacgagctggacatgtcccctggggaccccaagtggctggacgtgattgagcgtgacctgcaccggcagttcccattccatgaaatgtttgtgtcccgggggggccacggccagcaggacctattccgtgtgctgaaggcctacacgctgtaccggcccgaggagggctactgccaggcccaggcgcccattgccgctgtcttgctcatgcatatgcctgctgagcaagccttctggtgcctggtacagatctgtgagaagtacctgcccggctactacagcgagaaactggaggcgatccagctggacggggagatccttttctcgctgttgcagaaggtgtcgccggtggcccacaagcacctcagccgtcagaagatcgacccgctcctttatatgacagaatggttcatgtgcgccttctcccgaaccttgccctggagctctgtgctgcgtgtctgggacatgttcttctgtgaaggggtcaagatcatcttccgggtggggctggtgctgctgaagcacgcgctgggctcccctgagaaggtcaaagcctgccagggccagtacgagaccatcgagcgactgcggagcctcagccccaagatcatgcaggaggcctttctggtccaggaggtggtggagttgcccgtgacagagcgccagattgagcgcgaacacctccttcagctgcggcgctggcaggagacccggggtgagctgcagtgccgctccccgcccaggctgcatggtgccaaggctatcttggatgcagaacctggtccccggcctgccctacaaccttcaccatccatccgcctgcccctagatgcccccctccctggctccaaagccaagcccaagccacccaagcaggcccagaaggagcagcggaaacagatgaaggggagagggcagctggagaagcccccagccccaaatcaagccatggtggtggccgctgcaggagatgcatgtcccccacagcatgtgcccccgaaggactcagcccccaaggactcagcccctcaggatttggctccccaggtctcagcccaccaccgctcccaggagagcttgacgtcccaagagagtgaggacacctacttgtaaccctggcagctaaggcctccagggcggggtctccatataactacacgggtcatgaa

SEQ ID NO: 2173 - DNA, 770 bp, Homo sapiens
ccagctcggccatggggtcgcgcagctcccacgccgcggtcattcccgacggggacagtattcggcgagagaccggcttctcccaagccagcctgctccgcctgcaccaccggttccgggcactggacaggaataagaagggctacctgagccgcatggatctccagcagataggggcgctcgccgtgaaccccctgggagaccgaattatagaaagcttcttccccgatgggagccagcgagtggatttcccaggctttgtcagggtcttggctcattttcgccctgtagaagatgaggacacagaaacccaagaccccaagaaacctgaacctctcaacagcagaaggaacaaacttcactatgcatttcagctctatgacctggatcgcgatgggaagatctccaggcatgagatgctgcaggttctccgtctgatggttggggtacaggtgacagaagagcagctggagaacatcgctgaccgcacggtgcaggaggctgatgaagatggggatggggctgtgtccttcgtggagttcaccaagtccttagagaagatggacgttgagcacaaaatgagcatccggatcctgaagtgactccgtttgtgccttgggcttgatcctgtcaccagtatcttcttggaactcattcagagcccccatgtacgcttggacccaggttcaccgatacgctgtatatttgtttcttactgtatttagtggcaacgccaagagatcttccttgttgccctctattgagcaacg

SEQ ID NO: 2174 - DNA, 600 bp, Homo sapiens
  misc_feature (1)...(600): n = a,t,c or g
aatttcatcctgcccacacactgcatatgagggaagcatgtctactttatccaatttcacacagacgctggaagacgtcttccgaaggatttttattacttatatggacaattggcgccagaacacaacagctgagcaagaggccctccaagccaaagttgatgctgagaacttctactatgtcatcctgtacctcatggtgatgattggaatgttctctttcatcatcgtggccatcctggtgagcactgtgaaatccaagagacgggaacactccaatgacccctaccaccagtacattgtagaggactggcaggaaaagtacaagagccaaatcttgaatctagaagaatcgaaggccaccatccatgagaacattggtgcggctgggttcaaaatgtccccctgataagggagaaaggcaccaagctaacatctgacgtccagacatgaagagatgccagtgccacgaggcaaatccaaattgtctttgcttagaagaaagtgagttccttgctctctgttgagaattttcatggagattatgtggttggccaataaagatagatgacatttcaatctcnnnnnanaaaaaaaaaa

SEQ ID NO: 2175 - DNA, 600 bp, Homo sapiens
caccctggggtgcagctgagctagacatgggacggcgagacgcccagctcctggcagcgctcctcgtcctggggctatgtgccctggcggggagtgagaaaccctccccctgccagtgctccaggctgagcccccataacaggacgaactgcggcttccctggaatcaccagtgaccagtgttttgacaatggatgctgtttcgactccagtgtcactggggtcccctggtgtttccaccccctcccaaagcaagagtcggatcagtgcgtcatggaggtctcagaccgaagaaactgtggctacccgggcatcagccccgaggaatgcgcctctcggaagtgctgcttctccaacttcatctttgaagtgccctggtgcttcttcccgaagtctgtggaagactgccattactaagagaggctggttccagaggatgcatctggctcaccgggtgttccgaaaccaaagaagaaacttcgccttatcagcttcatatttcatgaaatcctgggttttcttaaccatcttttcctcattttcaatggtttaacatataatttctttaaataaaacccttaaaatctgctaaaaaaaaaaa

SEQ ID NO: 2176 - DNA, 2037 bp, Homo sapiens
tttcctctttctctaagagtctctctctccctttccctctctctccccccaatctgtctttctagcatgttgccctttttcaaccacatttgtgtttcaggtgtagagaggagagagagtgaacagggagcggggcttttgtctgttggtctccctggactgaagagagggagaatagaagcccaagactaagattctcaaaatggtttattacccagaactctttgtctgggtcagtcaagaaccatttccaaacaaggacatggagggaaggcttcctaagggaagacttcctgtcccaaaggaagtgaaccgcaagaagaacgatgagacaaacgctgcctccctgactccactgggcagcagtgaactccgctccccaagaatcagttacctccactttttttaatcgtaacacctccatttgtattacatatggtgtatgggtattgatgaggtcatggtatcatatatgggatttttttctgtgtaaatcatcaagtataagaagaaactatgggactctgagccttgctttagagaatttacagtggacaaataggtgtcatcaaaccagtttttaatcattctgactcaagtgaaaacgctcagaatttcacactgtgaatccacgtttacaacccttacaggtgggccttcaggcctggttcgctacaacaatgtcttccacaactcaaactcccaccgcgctcacacaaccggtccactcctgccttttcactcacacagctcccgactgcttcttgcagaggctgagagtcccccccccccaccttttttttcatttagatgtaacaaacctagtagtttatgttcatcaattggctggatatctctatattttatccatgtactcttttgatgtatagaagtagtttgaaactcattgtttccttgtggtaagtgaccgagatgctgccacaggacctgagacactgatgaatggtgctattttggactttcaacatgctccttggcgaggtagctctgatggagttattttttatttccatgttctaagaaggtgttggtactctgtttccctgaatgttgttctctagactggattgacttgttttccttgtgtcttcagtgtggctttcttcctcagtgttgtaggttgagcgaatgctaccagagtgtgagagaccattgtctcgttggctggcgctcacggacatgcagtcacggtagcgggagcaatcacaaaactgtaatttacttaccaaatctcttcctttccgtagcctcgcctgcctgacttagagaaagaaaagcaataattttacaggcattttgaggtgtctctttgggttctttctgtttgaaaggatatttgtcgaaaaaaagagcaaaaccgttttaaataaactccccctggaaaaaaacccaaaacactggcatctgagtaggaatatgaaaatgacaccttttccaaatattaaattggaaaacaaggtctacaaaatcatgatacttttttaaaaggcagagcattcttttttcggcaattttgataagcaaggtgtagatttacatttttgtccttgctcccaacgaaatggataaacaaaaataacttaccatctactcatggaatgttgttgtgttagccagtctgaaagcccaccttaatttttatataactgtctttagctcttcttttgacagggcaggccttgttctgaactgtttcgcttctgactgttaaacaccgatgacgcatgcactgcacttcttcgttttcttcttgctcccccattggcctgagtttcttgtgcattactcctctccctccttcgttagaataggtatatcagctgtgtaaatagagcaagaaaacagtattctgcatctgtggcatttatgtagagttgcagttgtgtactgctgaaaatgcaggcttttgtaacagtgtgatctttactgatgcactcatgacaagtacccaatgtattttagctattttagtagtatttgttcaataaatacgcaagctgtaaggtaaaaaaaaaa

SEQ ID NO: 2177 - DNA, 1236 bp, Homo sapiens
acagattctagtgaagaaaaaactttaggaggctacatggtctattggagagtgtaggctctgcagtcagaagatccctacccaggcttctgtctttctcagtaagacttgggaccacagcaaggtccgcaatctcctgaggctctgttttctatggttgggataacatggtaagttattttcttctaagtagtcacacatggaaatcttatctaaaattttataccattaacttttatttcacttattaactcataccattaatactttactttagctatgtttggtatgcatgagttaatgagtgattagagtactatgagcagcacaggtttagaaatgcctatttgcctatagtgcagcctcttacataggcaaaataaaagtcaagtaagaattttattttatttttttaaaatgcaaagtaaaatgtgtctttaaaactctcccaggaggtgaagggaagctaccataacaccaggtgggaaggaagacatactgggcttggctcatgctttaattagctactgtgtaaaaatgttcagggattttcagttatccgctggcacccagaggcaatgggtaaggttaactggagctagagccaatatttttttcttcctagaaggagtaacagcagcaaacagtaggagagaagatgccaagttagaagtgcatatagctctcttccacaggaggcctacacgccgccgcttgtgctgcagccatgtctctagtgatccctgaaaagttccagcatattttgcgagtactcaacaccaacatcgatgggcggcggaaaatagcctttgccatcactgccattaagggtgtgggccgaagatatgctcatgtggtgttgaggaaagcagacattgacctcaccaagagggcgggagaactcactgaggatgaggtggaacgtgtgatcaccattatgcagaatccacgccagtacaagatcccagactggttcttgaacagacagaaggatgtaaaggatggaaaatacagccaggtcctagccaatggtctggacaacaagctccgtgaagacctggagcgactgaagaagattcgggcccatagagggctgcgtcacttctggggccttcgtgtccgaggccagcacaccaagaccactggccgccgtggccgcaccgtgggtgtgtccaagaagaaataagtctgtaggccttgtctgttaataaatagtttatatacctaaaaaaaaaa

SEQ ID NO: 2178 - DNA, 5256 bp, Homo sapiens
gggatgccgaggagccggggcggccgcgccgcgccggggccgccgccgccgccgccgccgccgggccaggccccgcgctggagccgctggcgggtccctgggcggctgctgctgctgctgctgcccgcgctctgctgcctcccgggcgccgcgcgggcggcggcggcggcggcgggggcagggaaccgggcagcggtggcggtggcggtggcgcgggcggacgaggcggaggcgcccttcgccgggcagaactggttaaagtcctatggctatctgcttccctatgactcacgggcatctgcgctgcactcagcgaaggccttgcagtcggcagtctccactatgcagcagttttacgggatcccggtcaccggtgtgttggatcagacaacgatcgagtggatgaagaaaccccgatgtggtgtccctgatcacccccacttaagccgtaggcggagaaacaagcgctatgccctgactggacagaagtggaggcaaaaacacatcacctacagcattcacaactataccccaaaagtgggtgagctagacacgcggaaagctattcgccaggctttcgatgtgtggcagaaggtgaccccactgacctttgaagaggtgccataccatgagatcaaaagtgaccggaaggaggcagacatcatgatcttttttgcttctggtttccatggcgacagctccccatttgatggagaagggggattcctggcccatgcctacttccctggcccagggattggaggagacacccactttgactccgatgagccatggacgctaggaaatgccaaccatgacgggaacgacctcttcctggtggctgtgcatgagctgggccacgcgctgggactggagcactccagcgaccccagcgccatcatggcgcccttctaccagtacatggagacgcacaacttcaagctgccccaggacgatctccagggcatccagaagatctatggacccccagccgagcctctggagcccacaaggccactccctacactccccgtccgcaggatccactcaccatcggagaggaaacacgagcgccagcccaggccccctcggccgcccctcggggaccggccatccacaccaggcaccaaacccaacatctgtgacggcaacttcaacacagtggccctcttccggggcgagatgtttgtctttaaggatcgctggttctggcgtctgcgcaataaccgagtgcaggagggctaccccatgcagatcgagcagttctggaagggcctgcctgcccgcatcgacgcagcctatgaaagggccgatgggagatttgtcttcttcaaaggtgacaagtattgggtgtttaaggaggtgacggtggagcctgggtacccccacagcctgggggagctgggcagctgtttgccccgtgaaggcattgacacagctctgcgctgggaacctgtgggcaagacctactttttcaaaggcgagcggtactggcgctacagcgaggagcggcgggccacggaccctggctaccctaagcccatcaccgtgtggaagggcatcccacaggctccccaaggagccttcatcagcaaggaaggatattacacctatttctacaagggccgggactactggaagtttgacaaccagaaactgagcgtggagccaggctacccgcgcaacatcctgcgtgactggatgggctgcaaccagaaggaggtggagcggcggaaggagcggcggctgccccaggacgacgtggacatcatggtgaccatcaacgatgtgccgggctccgtgaacgccgtggccgtggtcatcccctgcatcctgtccctctgcatcctggtgctggtctacaccatcttccagttcaagaacaagacaggccctcagcctgtcacctactataagcggccagtccaggaatgggtgtgagcagcccagagccctctctatccacttggtctggccagccaggcccttcctcaccagggtctgaggggcagctctggccagtgctcaccagggccagcagggccctaggctggggtcgtacagctgaagttgtgggtgcattggcctaggctgagcgtggggcagggaattatgggggctgtgccgagaggtgggtgtctggcacccagctgccagccttctgtcctgggcaaactactccctacttaagggaataggccaggctccatccggaggcagggaccatgccaggaggagcccctgtggtcacggcatcctgtggtgtccatgaggtaccacagctccactcctggctggaacccggcaccctctgtgggaagccagcactagctctcatcccccatccgggagataccaccagtcctggtccccttttgccaacacctgctggtcagatgtccccctacccccaccccactgtcctccaaggctacaggacccctgcttctgacacagtgagcaacaagcctgggtttccctgctggcagacggcagatccctcaggaaacctgctccacttgtcagggtctcttcggagacccaggatttagggtcacatgctgcaggcagggctgtggcccagctgggtctgacaaggacccagctgtcacatcgtgaatatttaaatgtcctgtcactactgtcccattttgcaaaggctgcttgaggctttaggtgaactagaggtgactgtcttggtgatgaggccagcatagcggccctcccccaggcgacaaggaccaaggtgctgctaaggccactctagcgcccagacaccccagtagctgagctctgctcctatggctacagagctggggcagaagctgaccccatttctggaggaagatccgagtttgtgaccgtcctccactcccctctattgtcactgtccccagctttgctgccagtctgtcacttgcagcctggagctcaacctcaccatttaggtgaggcagagatggctgcagggccaacactgggcagagcctgggagtccttcggaaggggaccagggcgtctgaagtgctcagtgcccccactactctgaggccgactccagctactctgaggccgactcaatctctcggctggaagcagtgttttcccagagcttggcccttgctgacctcgctcactgggcccatcttcccacactgctcttggaaggacacccctaccggtagcagccccaagctgagggggctccctttttgaccttcactggcccgcccttcactgtctccagcaggagttcctagggcttggcctgccttgctccacagtacggcggaggcagccctgcttgtcactgaggagccctagacaaggccaatgggttcatcaatgcccactggctctctgccaaagccaaaaaggtgtcaggcagtctccagcgtgctggccgggtctcggatgccacccctgctcactgagcctgcatgggccttgcccccgaccctgtggtctctgggattggggtcggcttaccctgtagcacagacagggactcctgctgccctgggagctgtctcaagcaaaatctcttgtcccagaggtgcccatgtgggtccgctgtgtcccctgtcatcatccttgttttttctcattttggccaagggcaggctccctgggacaggcagggaacaactgcggagatattagtgattcataggtttgtacagtgttttatactttgcaaagcactttattagctcacacctgtccactcacatgaaactcgtgttaggccctgggaggccgacggtaactctcaccgtgccctcagatgaagcacagagaggttgttacttgcccgggccatccagtgggctggctgggtcttgtgtccccatctgtggacccctctagggtctgagatgagatgagaagtgtctcctgtatccacctcttcctggcctcccttcccccacttcctggtccctgtccactcctcaggttggtgctctcacttcttgaaagctctaggcacccccgcctcccgccaggctccccgttggctcctggcaggccagctgagaatgaacaggagatggaggcaggcagcccaggctgcagaggtgagggatgtggggccaggcccagagggctcagcctagaggcttccaatctcagattctcctgcctgtggtcatctgtttgtccatcaccccaggacagggcagacagaggggcaaagcactgggggccccagagcctagcttcccctcagcctgggggacatcacagcatttcagtgtcagtcacattttaaactgatcagcctttgtataatgttttttaaatcatttctaaataaaacagaaatacagagtgtgtcatttccctgggatgagggaacaaagatcaggttccaagagtaaccttaggacgctctgggaagagaaccgggtcctttggggtgtctgggagctgcccacccatctcctctgccagaccggcggtcagatagcctccctctacaacaggctggccctgggggcccagggttattggggttccaggaacacagcctgatgatgcctccttacgatccaggatggagagcagcccccccaggagtatggggagggtcactgtggcacgggcttctccatgacctgggacatgacctgggacacatagtcaagagcacggttatcagcaatacagatattaataaaaggcagacgaagtcaggaggtcagcaactttgcgggcttaccaggaggcctgtcctgcctctggaagccagcgacagagagggatgcccccgacccagccagccggagaaagggatggggtggtcacgaaggtctgagctgggtctgggtgtaggctgggaagcaggctggggtgtagactgcgaaggcggccctgccgggacttctttccagtccccggcgacctcttcgaattctctgctatctctggggagcctcgggtgggagggggtgtaagagacgcagggacgtggggagaggagacaaggcaggcaagaaccacaggggacggcggacagacgggcgacatcctgcggaggacgccgtcagtaccaggaagtgcaggcgatgaggaagcgcacgtcgtccagcggcccccacgggctgggctcgggctcgggctggggctggggctggggctggggctggggctggggctggggcggatgccggggctgttccgggccctccggcgccgcaggctggggctggggctggggctgggtttgcgcaggctccggggcgccgcggccgc

SEQ ID NO: 2179 - DNA, 2681 bp, Homo sapiens
gtatacttgtaactatcaaaatgaatagttcatttttgatagatttgttgtgcagccattatgaattaaatggtttattaggagtttgactaaatttttatttttagtgtgtatagcatgaatactaccaaaggagacgacaaacttgcagcttaaaatgggcaccagttcccacactggcttaatttatataactgcttggctgtattgcgggtaataatattagaagcaagaagcacttcatttttaaaagagatgttactataatattgcttaaatgctttagcacttggacttcttgagatgcagatgtgtgatttggagtgctggcttatttaaaggtcaagccaaggagtttgtggttcagccacaactactgtttcctaagactattgatgtgaaggacttagtgaagtaatttttatattctgggcttcccagcaagatgtcctttttatgactgccatgcttcttttggactcagtaaatatttgtaatgttagaaaagtctcattatttttataaaatgcatgacattttaagtatgtgttgcataaaatggattatagcagttctcatggtttaggatttttaagaaatagtccatttaatttcagcttaaccttttaaatgatctgtaaaatttctttgatagtttaggaatgttgtggggagggttcattaataaaagttcagcaattttttaactgaaatagtttatctcttttacctagtcacaaaaaaggtatgtaaacaaggccattatatgtgtttattgctctttatttccctatctagattttctaagtatcttagctttcttaatataagtttaacttggtacttactgaaaatgcctttttacccctgttaacggtattttgagcttttgaaaagaacttggttgacactgcttttattgtggataaaggagagatggtcagtaattaatggcttgaagtattattggagtggtttatcatttctgaaactaatcgtgtcagaattgactttgaaaagcattgctttttacagaaatatattaactttttaggagtaatttctagtttggattgtaatatgaaataatttaaaagggcttcgctcatatataggaaaatcgcatatggtcctagtattaaattcttattgcttactgatttttttgagttaagagttgttatatgctagaatatgaggatgtgaatataaataagagaagaaaaaagaataaagtagattgagtctccaattttatgtaagcttcagaagaactggtttgtttacatgcaagcttatagttgaaatatttttcaggaattacatgaatgacagtcttcgaaccaatgtgtttgttcgatttcaaccagagactatagcatgtgcttgcatctaccttgcagctagagcacttcagattccgttgccaactcgtccccattggtttcttctttttggtactacagaagaggaaatccaggaaatctgcatagaaacacttaggctttataccagaaaaaagccaaactatgaattactggaaaaagaagtagaaaaaagaaaagtagccttacaagaagccaaattaaaagcaaagggattgaatccggatggaactccagccctttcaaccctgggtggattttctccagcctccaagccatcatcaccaagagaagtaaaagctgaagagaaatcaccaatctccattaatgtgaagacagtcaaaaaagaacctgaggatagacaacaggcttccaaaagcccttacaatggtgtaagaaaagacagcaagagaagtagaaatagcagaagtgcaagtcgatcgaggtcaagaacacgatcacgttctagatcacatactccaagaagacactataataataggcggagtcgatctggaacatacagctcgagatcaagaagcaggtcccgcagtcacagtgaaagccctcgaagacatcataatcatggttctcctcaccttaaggccaagcataccagagatgatttaaaaagttcaaacagacatggtcataaaaggaaaaaatctcgttctcgatctcagagcaagtctcgggatcactcagatgcagccaagaaacacaggcatgaaaggggacatcatagggacaggcgtgaacgatctcgctcctttgagaggtcccataaaagcaagcaccatggtggcagtcgctcaggacatggcaggcacaggcgctgactttctcttcctttgagcctgcatcagttcttggttttgcctatctacagtgtgatgtatggactcaatcaaaaacattaaacgcaaactgattaggatttgatttcttgaaaccctctaggtctctagaacactgaggacagtttcttttgaaaagaactatgttaatttttttgcacattaaaatgccctagcagtatctaattaaaaaccatggtcaggttcaattgtactttattatagttgtgtattgtttattgctataagaactggagcgtgaattctgtaaaaatgtatcttatttttatacagataaaattgcagacactgttctatttaagtggttatttgtttaaatgatggggaatactttcttaacactggtttgtctgcatgtgtaaagatttttacaaggaaataaaatacaaatcttgttttttctaaaaaaaaaaaaaag

SEQ ID NO: 2180 - DNA, 5261 bp, Homo sapiens
gggactgtcggctgcaggcggccatgcccaccaacttcaccgtggtgcccgtggaggctcacgccgacggcggcggggacgagactgccgagcggacggaggctccgggcacccccgagggccccgagcccgagcgccccagcccgggagatggaaatccaagagaaaacagcccattcctcaacaatgtcgaggtggaacaagagagcttctttgaagggaagaacatggcacttttcgaggaggagatggacagtaaccccatggtgtcctcgctgctcaacaagctggccaactacaccaacctgagccagggcgtggtggagcacgaggaggacgaggagagccggcggcgggaggccaaggctccgcgcatgggcaccttcatcggcgtctacctgccgtgcctgcagaacatcctgggcgtcatcctcttcctgcgcctgacgtggatcgtgggggtggctggtgtcctggagtccttcctcatcgtggccatgtgctgcacatgtacaatgctgaccgccatttccatgagtgcgatcgctaccaacggtgtggtcccagctggcgggtcctactacatgatatcgcgctcgctgggacccgagtttggaggcgctgtcggcctctgcttctacctgggcacgacgtttgcaggggccatgtatattttggggaccatcgagatttttctgacgtacatctccccgggtgcggccatcttccaggcggaggctgcaggtggcgaggcggccgccatgctgcacaacatgcgtgtgtacggcacgtgcacgctcgtgctcatggccctggtggtcttcgtgggcgtcaagtatgtcaacaagctggcgctggtcttcctggcctgcgtcgtgctgtccatcctggccatctatgccggcgtcatcaagtctgccttcgaccccccggacatcccggtctgcctcctggggaaccgcacgctgtcacggcgcagcttcgatgcctgcgtcaaggcctacggcatccacaacaactcagccacctccgcgctctggggcctcttctgcaacggctcccagcccagcgccgcctgtgacgagtacttcatccagaacaacgtcaccgaaatccagggcatcccgggcgcggccagtggtgtcttcctggagaacctgtggagtacgtacgcgcacgcgggggcgtttgtggagaagaaaggtgtgccctcggtgcccgtggcagaggagagccgtgccagcacactgccctacgtgctcaccgacatcgcggcctccttcaccctgctggttggcatctacttcccttccgtgaccggtatcatggcgggttcaaaccggtccggggacctcaaggatgcacagaagtccatccccacggggaccatcctggccatagtgacgacgtctttcatctatctctcctgcattgtgctgtttggggcctgcattgaaggcgtggtcttacgagataagttcggggaggccctgcaggggaacctggtcatcggcatgctggcctggccctccccctgggtcatcgtcatcggctccttcttctccacctgcggtgccggcctgcagaccctcacgggggcaccgcgcctactgcaggccattgcccgtgacggcatcgtccccttcctgcaggtgtttggccacgggaaggccaacggggagcccacgtgggcgctgctgctgacagtcctcatctgcgagactggcatcctcatcgcctctctggacagcgtggccccgatcctctccatgttcttcctcatgtgctacctgttcgtgaacctggcctgcgccgtgcagaccctgctacgtacccccaactggcgtccacgcttcaagttctaccactggaccctgtcctttctgggtatgagcctgtgcctggcgctgatgttcatctgctcctggtactacgcgctgtccgccatgctcatcgctggctgcatctacaagtacatcgagtaccgcggggccgagaaggagtggggcgatggcatccgtggcctatccctgaacgccgcccgctacgccctgctgcgcgtggagcacggtcccccccacaccaagaactggaggccccaggtgctggtgatgctgaacctggacgcggagcaggccatgaagcacccccgcctgctgtccttcacgtcgcagctgaaggccggcaagggcctgaccatcgtgggctcggtgctggaggggacgtacctggacaagcacatggaggctcagcgggccgaggagaacatacggtccctaatgagcacagagaagaccaagggcttctgccagctggtggtctcgtccagcctgcgggatggcatgtcccacctgatccagtcggccggcctgggcggcctgaagcacaacacggtgctcatggcctggcccgcatcctggaagcaggaggacaaccccttctcctggaagaactttgtagacaccgtccgcgacaccaccgccgcgcaccaggctctgctggtggccaagaacgtcgactcgtttccgcaaaaccaggagcgcttcggcgggggccacatcgacgtgtggtggatcgtgcacgacggcggcatgctcatgctgctgcccttcctgctgcgccagcacaaggtgtggaggaagtgccggatgcgtatcttcaccgtggcccaggtggacgacaacagcatccagatgaagaaggacctgcagatgttcttgtaccacttgcgcatcagcgccgaggtggaggtggtggagatggttgaaaacgacatatctgctttcacctacgagaggacactaatgatggagcagaggtcgcagatgctgaagcagatgcagctgtccaagaacgagcaggagcgagaggcccagctgatccacgacaggaacaccgcgtcccacaccgcggcggcagccaggacccaagcgccgcctacgccagacaaggtgcagatgacctggaccagggagaagctgatcgctgagaagtacaggagcagagacaccagcctatctggtttcaaagacctcttcagcatgaagccggaccagtccaacgtcaggcggatgcacacggctgtgaagctcaatggcgtcgtcctcaacaagtcccaggatgcgcagctggtcctgctcaacatgccaggtcctcccaaaaaccggcagggagacgagaactacatggagtttcttgaagtcctgaccgaggggctgaacagagtcctcctggtcaggggtggcggccgggaggtgatcaccatctactcctaatgcccaacagcatcacggcactctgggacaggcacggaggacggcgtgggcagcctgggcctgggcttggcccagggaaacagacggcagacacacctgtcccccagtgatgccacccaagctgcccatggggcttcctacggaagtttctaggcccgtcacctagggctctcctgttcagccttaacaggctcagcaaatcagggcgtggctggacgatttccttgcatctgagggcagacgctgctaccggagtgacctggacgtggccagatcttctcgcaggtcacaagaagccagtgagcccttgccttggtttctggaagttcttttccttggctggatttacccagtggttaggttgcatttctaccccatccagaacattcttggaagagcacccggagctgaagctgtccctgatgatgaaggtgaaacgtcagccctggccatggctccgctcagggccccggtcacctccgagtcactctgttccttgactgtctttgtgtttctgtacctcaaggcactgaagctggaggactctgtccatgcccgtgtcaccctcgtgtgggagcctctgggctcggcaggtccacatttcatgagctgaggcgtgggccagggccatctggaaagggaactcggcttttccagaacgtggtggatcatctgtcgggtgtgtggtgaacacgttcagttcatcagggcctacgctccgggaaggggcccccagctgtggctctgccatgccgggctgtgtttgcagctgtccgagtctccatccacctttagaaaaccagccacttcttttcataagcactgacagggcccagcccacagccacaggtgcgatcagtgcctcacgcaggcaaatgcactgaaacccaggggcacacgcgcgcagagtgaacagtgagttcccccgacagcccacgacagccaggactgccctccccaccccaccccaccccaggagcacggcacacagttcagcctctgagctggctcacacgtgccatccccaccccggtgctccagggaaggaggacacggacccgacgtgggaggtcctcaggcagcagtggcgcctggtgtcaggtctgtctggctgagtcccgggcgtcccctgccatggcctgtgccttgcatggaggcggcggtggcactgaagagatagctttcaagggcccaacactttgcacttcggctggctgtgagtttctgctttgtaggttgtggtcacatttgcaggctgcgggcagtggcaccgacttgggcctccctttctatgtggcatatttatttatttaaacaccccagggagttacgtggtaacaaggttgtccataaagaggttgcttctatatactagaggccccagatggccaggccttgggctacgtctggcttgcatggtctcccaagggaatcagccccatcaacaaagttcaaatcggggcagaggctgcacttgtgcccccagatgtttctgaggagccagactagggctggcattgctgtagagtgacggctgctgcccagagcgtgtcccagacatcacagcggggctcagcagttcccacagcctctgcctgccttggctaagcatgagttaagcagcaaaacgctcctccatgtctggatggggccggcaggtcctgtgtcccctgcacctggaggagagcaggctagaggcacagcggccacatggtgctggctctgaacgttggttggtggctggaaaacagccctgcttctgagggccgctcagttctgcacacgaaaccacctcctgagggctcagctctgcccccgccctgggctgcagcctctgcacgcaagcaccaggcatcctttgtgttgtcaactccgtgtaaccagtaactacagccatttacaattgactccgtttccttttgtaggtttccctgtctgtctgtgttagtagaaaaataaaatcctatgaaatctgaaaaaaaaaaa

SEQ ID NO: 2181 - DNA, 2681 bp, Homo sapiens
gcggccgcggagcccggggcgggtccggcgcgggagctcttcgcggctgtcgtggctatctgcagaagctgtcgggcaagggcccctcgcgtggctaccgcagccgctggttcgtgttcgacgcgcgccgctgctacctttactatttcaagagtccgcaggacgcgctgcccctcggccacttggacatcgcggacgcctgcttcagctaccagggccccgacgaggcggcggagccgggcacggagccgcccgcgcacttccaggtgcacagcgcgggagccgtcaccgtgctcaaggctcccaatcgtcaactcatgacttactggttacaggagcttcagcagaagagatgggaatattgtaacagtcttgacatggtcaagtgggacagcaggacctctccaactcccggggattttcctaagggtcttgtagccagagataacactgatttaatttacccacacccaaatgcttctgcagaaaaagccagaaatgtcctagctgtggagactgtgcctggagagctggtgggagaacaagctgcaaatcagcccgcgccggggcatccaaattccattaatttttactctttgaaacagtggggcaatgagctcaagaattcgatgtcttctttccgtcctgggagaggacataatgatagtcggaggactgtgttttataccaatgaagagtgggaacttttagacccaacccctaaggacctagaggagtccatagtacaggaagaaaagaagaagctgacccctgaaggaaacaaaggagtaactggctcaggattcccctttgattttggacgtaacccctacaaaggaaagcgccctttgaaagacataattgggtcgtacaaaaatcgtcacagcagtggtgacccttcaagtgaaggcacatcaggcagtggcagcgtcagcatcaggaagccggcctccgaaatgcaactgcaggtccagagccagcaggaagagctggaacagttaaagaaagacctgtccagtcagaaggagcttgttcgactgctccagcagacagtccggtcatcccagtatgacaagtatttcacaagcagccggctctgtgagggggtcccaaaggacacgctcgagcttctgcaccaaaaggatgatcagattctgggccttaccagccagctggagaggttcagcttggagaaggagagtcttcagcaggaagtaaggacgctgaagagcaaagtgggcgagctcaacgagcagctgggaatgctcatggagaccatccaagccaaggacgaggtcatcatcaagctcagcgagggcgagggcaacgggcctcctcccaccgtggcgcccagctccccttcggttgtgcctgttgccagggaccagctggaactggacaggctgaaagataatctacaggggtacaaaacccaaaacaaatttctaaataaggagattttggaactctcagctctacgaagaaacccagaaaggagagagagggatctgatggcaagaaattctagcctggaagccaagctctgccagatagaaagtaaatacctgatattgctccaagaaatgaagacaccagtgtgctcagaagaccaggggcccacccgggaggtcatagcccagttgctggaggatgctctgcaggttgagagccaagagcagccggagcaagcatttgttaaacctcatcttgtcagtgaatatgatatttatgggttcaggactgtacctgaggatgatgaggaagagaaattggttgccaaggtccgcgcgttggatctgaagactctctacctcacagaaaaccaggaagtctccactggggtcaagtgggaaaactattttgcaagtacagtgaacagggagatgatgtgctctccagagttaaaaaacctcatccgtgcgggcattccccacgagcaccgttccaaggtgtggaagtggtgtgtggaccgtcacaccaggaagttcaaggacaacactgagcctggccacttccagaccttgctgcagaaggcgctggagaaacagaacccagcctccaagcagattgagctggacttgctgcgaactctgcccaacaacaaacattactcctgccccacctcagaaggcatacagaagttacgcaatgtcctcctcgccttctcctggcggaatccagatatcggctactgtcaaggcctaaacaggttggtggcagtggccctcctgtacctggaacaagaagatgctttctggtgtctcgttaccatagtggaagttttcatgcctcgagactattatacaaagactcttttaggatcccaggtggaccagcgggtgttcagagaccttatgagtgagaagctgcctcggttgcatggccactttgaacagtacaaagtcgactacactctcatcactttcaactggtttctggtggtatttgtggatagtgtcgttagtgacatcctctttaaaatatgggactctttcctttatgaaggaccaaaggttattttccgttttgctctggcactttttaagtacaaggaagaggagattttgaaattgcaagattcgatgtctatatttaagtatctccgctacttcactcgcactatccttgatgctagatccggaaccgacgcgcctaccacttggagaaagtccggctggagc

SEQ ID NO: 2182 - DNA, 5039 bp, Homo sapiens
cgctcttgatttcccgggccgacgatttcgtccaacagccagctttatagggcatcagccttgtttgaaacaatccgacatgaggcacagctgagcacggactacaaactctccctctttgacctgcagacatcatcctaccaggccttgcagcgggtgctcgtcagcctaggccatcatgatgaagccctggctgtggcagaaaggggacggacaagggcatttgctgatcttctggtggaacgacaaacaggacaacaagactccgacccctactccccagtcactattgatcagatcttagagatggtaaatggccagaggggactagtgctttactattccctggctgcaggctatctgtatagctggctgctggctcctggggcaggaattgtgaagtttcatgaacactacctgggtgagaacacagtggaaaactcaagtgacttccaggccagcagcagtgtaacccttccaacagcaaccggctcagccctggagcagcacattgccagtgtccgggaggccctgggggtggagtctcactactcaagggcctgtgccagcagtgagacagagagtgaagcgggagacatcatggaccagcaatttgaagagatgaacaacaaactcaactcggtcactgaccccactggctttctgcggatggttcgccgcaataacctgtttaacaggagctgccagagcatgacgagcctgttcagtaacactgtgtcaccgacccaggacgggacctcctctcttcccaggaggcagagctcgtttgccaagcccccgctccgtgccctgtatgacctgctcatcgcgcccatggaagggggcctgatgcactccagcggccccgtgggccggcaccggcagctcatcctggttctggagggggagctctacctcattcctttcgccctcctgaagggaagctcctccaatgagtacctctacgagcgcttcggcctccttgctgtcccttccatccgctccctcagcgtgcagtccaagtctcacttacggaagaacccgcccacatactccagctccacatccatggcggctgtcatcggcaaccccaagctaccatcggccgtgatggacaggtggctgtgggggcccatgccatcggccgaggaagaggcctacatggtgtccgagctgctgggctgccagcccctagtgggcagtgtggccaccaaggagagggtcatgagtgccctgacccaggctgaatgcgtccactttgccacccacatctcctggaagctgtcggccttggtcctcacgcccagcatggacggcaaccctgccagcagcaagagctccttcggccacccctacacgatccctgagtccttgcgggtgcaggacgatgccagtgatggggagagcatctcggactgcccgcccctgcaggagctgctgcttactgccgccgacgtcctggacctgcagctgcctgtgaagctggtggtgcttggctcctcccaggagtccaacagcaaagtcgcagccgacggggtcatcgcgctgacaagggccttcctggctgccggcgctcagtgtgtcctcgtgtctctgtggcctgtgccagtggctgcttttaagatgttcatccatgccttctactcatccctgctgaacggcctgaaagccagcgccgccctgggggaggccatgaaggtggtgcagagcagcaaggccttctcgcacccctccaactgggcagggttcatgctcatcgggagtgacgttaagctgaacagcccctcatcactcatcggccaggccctcacagagatcctgcagcacccggagcgtgcgcgggacgccctgcgagtgctgctgcacctggtggagaaatccctgcagcgcatccagaatgggcagcgcaatgccatgtacacatcccagcagagtgtggagaacaaagtgggcggcatccctggctggcaggccctcctcaccgctgtgggcttccggctggaccccccaaccagtggcctgccagcggctgtcttcttcccaacctccgacccgggcgaccggctccagcagtgcagcagcacactccagtccctgctgggtctgcccaatcctgccctccaagccctttgcaaactcatcactgcctccgagacgggcgagcagctcatcagccgggctgttaaaaatatggttggaatgctccaccaggtgctggttcagctccaggctggcgagaaggagcaggacttggcatcagctcccattcaggtctccatcagcgtccagctgtggcggctcccgggatgccacgagttcctggcagctctaggttttgttctctgtgaagttggtcaggaggaagtaatcctgaaaaccgggaagcaagctaatcgacggactgtgcacttcgcgctccagtccctgctgtctctgtttgattctactgagctacccaagcgcctcagccttgacagctcctcctccctcgagtctcttgcttctgctcagtctgtttccaacgccctgcccttgggttaccagcaaccccccttctctcccaccggtgcggacagcatcgcctcagatgccatctctgtgtacagtctgagctccattgcctcctcaatgagctttgtctccaaacccgagggtggatcagagggtggaggccccggaggacggcaggaccatgaccggtccaagaacgcttacctgcagagatccaccctgcctaggagccagctgcctccccagacccgccctgcaggcaacaaagatgaagaagaatatgaagggttttctatcatcagtaacgagcccttggcgacctaccaagaaaaccgaaacacatgcttctcaccagaccacaaacaaccccaacctgggacagccggaggcatgagagtctcggtgagctccaaagggagcatcagcactccaaattctccagtgaaaatgactctgattcccagccccaactcacccttccaaaaggtgggaaaactagcaagctcagatacaggagaatcagaccagtctagcacagaaacggacagtaccgtgaaatcccaagaagaaagcaacccaaaactggatccacaagagttagcccagaaaattctggaggagacacagagtcatctcattgcggtggagcgtcttcagaggagcggcggccaggtgagcaagagtaataaccctgaagacggcgttcaggcgcccagcagcactgctgtcttcagagcgtcagaaaccagtgcgttcagcaggcctgttctctcccatcagaagagtcagccatcaccagtcactgttaaaccaaagcccccagccaggagctcctccctgcccaaggtgagttccggatatagcagccccaccacctcagagatgtccatcaaagacagcccgagccagcacagtggccggccatcgcccggctgcgactcacagacttcccagctggaccagcctctctttaaactgaagtaccccagctctccttacagcgctcacatttccaaatcaccaaggaacatgtccccaagctccggccaccagtctcctgctggcagtgcaccctccccagctctctcctactcctcagctggatctgctcgctcaagtccagcagacgctcccgacatagacaaactgaaaatggcagccattgatgaaaaggtgcaggctgtccataacctgaagatgttctggcagagcacaccccagcattccacagggccaatgaagatcttccggggggctcctggcacgatgacttccaaaagggatgtcctcagtctgctgaatttgtcaccacggcccaataagaaggaggagggagtggataagcttgaactgaaggagctgtccctgcagcagcatgacggagctccaccgaaagcccctcccaacggacactggcgcaccgagaccacctcgctgggctcactgccgctgcccgccggccctcccgccacagcccccgcgcgccctttgaggcttccttctggaaatggctacaagttcctgtctccaggaagatttttcccttcttccaaatgctaaagcatcttttatacccactgactctgagcagcctgcagatgggggcctggcgtttgcttcagcccttccctgagtgcagtccccccacagccaccagcaccctcatgatgctgtgctctgcaggcgaggggcaccaccacgtccaaaggctgccacacacactggtggcttttctgggccacattcaccaaaagccaggacttctgtggggctggtacaggaggctcatggaatttcctacacacttcaccaaatgtttgtttacctttgaactccctgcttctcatctttgatatgattcttcaccaggattttgtacaaaaatgatcatggttctggggtggggagaggaaagggagcacatattttgctaagaggtatatatgcagtaccttttataccacagaaatacaaatagagctttttcctaaggctttcggttgcctggttgggggtgggatatatgaaatttcagttgaattctacaggaaagtgttatattagcccaaaaacagaaaaatggtttttaaaatgccaatgatttgtaattaaattgtagcaattttggtctcatgatagtgtaatatctcagcaacaatgcaataattcacattgaaacagcgcttccattctgaactcctgctctgcaaatgtcttttgggtcccgctgtcaaccaaacttgaattttcttaaaaaaaaaattatgtaactcttatccaggcattttagaactatgcaattgtgatttaaaatgcaactttgtgcttttaaaacattattgaccttttttgtatatggataaacaacttggttttattatcaatagtactttgcatttatagctattatttttaaaagctcaaaaagttttttaaaatgtcaaattttgaatagtcatcaataagtaattatcaagtttggaaggaaaggttgaaatgactccgtttccttataagcaaaaaaaaaa

SEQ ID NO: 2183 - DNA, 1290 bp, Homo sapiens
gctgcgagaagacgacagaagggcaaggaggagaacatgatgatggacctttttgaaactggctcctatttcttctacttggatggggaaaatgttactctgcagccattagaagtggcagaaggctctcctttgtatccagggagtgatggtaccttgtccccctgccaggaccaaatgcccccggaagcggggagcgacagcagcggagaggaacatgtcctggcgcccccgggcctgcagcctccacactgccccggccagtgtctgatctgggcttgcaagacctgcaagagaaaatctgcccccactgaccggcgaaaagccgccaccctgcgcgaaaggaggaggctaaagaaaatcaacgaggccttcgaggcactgaagcggcgaactgtggccaaccccaaccagaggctgcccaaggtggagattctgcggagcgccatcagctatattgagcggctgcaggacctgctgcaccggctggatcagcaggagaagatgcaggagctgggggtggaccccttcagctacagacccaaacaagaaaatcttgagggtgcggatttcctgcgcacctgcagctcccagtggccaagtgtttccgatcattccagggggctcgtgataacggctaaggaaggaggagcaagtattgattcgtcagcctcgagtagccttcgatgcctttcttccatcgtggacagtatttcctcggaggaacgcaaactcccctgcgtggaggaagtggtggagaagtaactgagcctgcgcttgagaccttctccacgcagcaggaagatcccaccgacccttcctggcctaatcctttagattaggtcacattacattaacatttaggaacccagaccgaaaagttgctgaaagggaaggagacacattcacaaagaaaagttgcgaaaattgcgaaatctgttgtgcatgctcaaatgaaaacgcctttcggctttgggcttttatttttttggaactgcgagtggcttaggtctagcctcattttgtttttgtttggttggttttatactatattaacttttattacggtgatccttttgtgccatgttcaaaagaagttcattcctgtctaaagtgggaaagttgcatttaatgttaggggtatttaatgtatttttgtaaatagtttagcactttctttttttacgtaaacctgaaatatattttaaatgtggaatgatgtatataaaatgtgctgaggatcctggtattgtaatattaaaaagaagtttctatatgaaaaaaaaaaaa

SEQ ID NO: 2184 - DNA, 699 bp, Homo sapiens
ttttttttttttgatagtaagtggaatttatttataagacaatgcatatatctatgtggaattaggaagcatttcccattcttattcataaaattattacttaaaattgcaaaagtagatttacagaggcacaggtaacaaaacaggaaatgaaatgttccagacattccgaaaagttcgaaagaaacacaccctagcctcaaaatctccggttaaaccgtggttgcacaacaggttctatttattcctgcattttctcaataagttcttctttatatttgcctttctcttttccaacttgtcgagacttggctttgcgttcaagaatttttttccgatccttgtccagttttagcctggtgataaccaccttgcttgggtgaatgcccacgtggacagttgtgccgttggccttctcacgctgcacccgctcgatgtagatgacatatttctttctgtacacctggactaccttgccaatttgctgacctttgtagtgtcctcgaactacctggacctcgtcgtccttgcggatgggcatggagcggacattgtacttctgccgcagctccttggagagcggggatgacatgatcttcctgcgcacgtgtgagggggcattgaagtgacgtttgcggtttttactgcggtccgaggtaacgaagggattgaacttcatggtgaccctccggctcgtgc

SEQ ID NO: 2185 - DNA, 3679 bp, Homo sapiens
agtcgcagcgtctacagctgctcgggggctttttcttggcggaggcttggccggctcctctctcccggctccgcggcggctgcgaaggcggcggctcctgccctctcgctttccctctcgcgtctctggctgcagaaagaagcttccggttctgaggtcctggaggtgccatttccctctctgttgaagcaaaggccggggcagacctcctagtgaaaggaaagcaagccaggatggatatttacgacactcaaaccttgggggttgtggtctttggaggattcatggttgtttctgccattggcatcttcctggtgtcgactttctccatgaaggaaacgtcatatgaagaagccctagccaaccagcgcaaggagatggcgaaaactcaccaccagaaagtcgagaagaaaaagaaggagaaaacagtggagaagaaaggaaagaccaagaaaaaggaagagaaacctaatgggaagatacctgatcatgatccagcccccaatgtgactgtcctccttcgagaaccagtgcgggctcctgctgtggctgtggctccaaccccagtgcagccccccattatcgttgctcctgtcgccacagttccagccatgccccaggagaagctggcctcctcccccaaggacaaaaagaagaaggagaaaaaagtggcaaaagtggaaccagctgtcagctctgtagtgaattccatccaggttctcacttcgaaggctgccatcttggaaactgctcccaaggagggcagaaatacagatgtggcccagagcccagaggcaccaaagcaagaggctcctgccaagaagaagtctggttcaaagaaaaaagggcccccagatgccgacggccctctctacctcccctacaagacgctggtctccacggttgggagcatggtgttcaacgagggcgaggcccagcggctcatcgagatcctgtctgagaaggctggcatcattcaggacacctggcacaaggccactcagaagggtgaccctgtggcgattctgaaacgccagctggaagagaaggaaaaactgctggccacagaacaggaagatgcggctgtcgccaagagcaaactgagggagctcaacaaggagatggcagcagaaaaggccaaagcagcagccggggaggccaaagtgaaaaagcagctggtggcccgggagcaggagatcacggctgtgcaggcacgcatgcaggccagctaccgggagcacgtgaaggaggtgcagcagctgcagggcaagatccggactcttcaggagcagctggagaatggccccaacacgcagctggcccgcctgcagcaggagaactccatcctgcgggatgccttgaaccaggccacgagccaggtggagagcaagcagaacgcagagctggccaagcttcggcaggagctcagcaaggtcagcaaagagctggtggagaagtcagaggctgtgcggcaagatgagcagcagcggaaagctctggaagccaaggcagctgccttcgagaagcaggtcctgcagctgcaggcgtcccacagggagagtgaggaggccctgcagaagcgcctggacgaggtcagccgggagctgtgccacacgcagagcagccacgccagcctccgggcggatgccgagaaggcccaggagcaacagcagcagatggccgagctgcacagcaagttacagtcctccgaggcggaggtgcgcagcaaatgcgaggagctgagtggcctccacgggcagctccaggaggccagggcagagaactcccagctcacagagagaatccgttccattgaggccctgctggaggcgggccaggcgcgggatgcccaggacgtccaggccagccaggcggaggctgaccagcagcagactcgcctcaaggagctggagtcccaggtgtcgggtctggagaaggaggccatcgagctcagggaggccgtcgagcagcagaaagtgaagaacaatgacctccgggagaagaactggaaggccatggaggcactggccacggccgagcaggcctgcaaggagaagctgcactccctgacccaggccaaggaggaatcggagaagcagctctgtctgattgaggcgcagaccatggaggccctgctggctctgctcccagaactctctgtcttggcacaacagaattacaccgagtggctgcaggatctcaaagagaaaggccccacgctgctgaagcacccgccagctcccgcggagccctcctcggacctggcctccaagttgagggaggccgaggagacgcagagcacactgcaggccgagtgtgaccagtaccgcagcatcctggcggagacggagggcatgctcagagacctgcagaagagcgtggaggaggaggagcaggtgtggagggccaaggtgggcgccgcagaggaggagctccagaagtcccgggtcacagtgaagcatctcgaagagattgtagagaagctaaaaggagaacttgaaagttcggaccaggtgagggagcacacgtcgcatttggaggcagagctggaaaagcacatggcggccgccagcgccgagtgccagaactacgccaaggaggtggcagggctgaggcaacttctcctagaatctcaatctcagctcgatgccgccaagagcgaagcccagaaacagagcgatgagcttgccctggtcaggcagcagttgagtgaaatgaagagccacgtagaggatggtgacatagctggggccccagcttcctccccagaggcgcccccagccgagcaggaccccgttcagctgaagacgcagctggagtggacagaagccatcctggaggatgagcagacacagcggcagaagctcacggccgagtttgaggaggctcagacctcggcatgtcggttacaagaagaattggagaagctccgcacagccggccccctagagtcttcagaaacagaggaggcctcacagctgaaggagagactagaaaaagagaagaagttaacaagtgacctggggcgcgccgccacgagactgcaggagcttctgaagacgacccaggagcagctggcaagggagaaggacacggtgaagaagctgcaggaacagctggaaaaggcagaggacggcagcagctcaaaggagggcacctctgtctgagtttcctctttggaaaaagaagttactgttcaacttaccaaaatgccttacacattccttacaaataaaccaaccaacctacacagcgttatccaggtccaacttccggtagctccgagagaagccatgagagacaagtctcttagagccacagaagtagaccttccagagccccagtttgtaaatgaacctgtgtcacatttgataaacactatcctgggcgcagccccgggccaccgccgagtgacgccaaagccctggttgactctgacagccccgtgggtgtgtgggaggccgggcgctctggggtctgtctgtcagtgcaatcgtttagtgttttttcagtggggcggggcgggaagcgggtgggaccgggcagccagttctcaaaggctgtggggccgactggaggccacagcccctcacccctagacgttgccaaccagaactgacgtgtgacctcctgggtgttgatgccattaaaaccaacgttggtgcccggtaaaaaaaaa

SEQ ID NO: 2186 - DNA, 6769 bp, Homo sapiens
  misc_feature (1)...(6769): n = a,t,c or g
ttttttttttttaccttattatatagaatttgtacaatatatttcttttcgtttgcatattttaacccacagcttaacatcctttttacaggctgaactcactcaggctgatagaatcaaaattctttcaaccaaataagaaaaattcaaaatcgtaaacccgtaagaaaacaaattaaaaacggtgatgaaaatacgtcactcctctcgttaggaacagtgtctggtttgtaccacaaggtatgcctctggaacaaggatttctttacaagcgtaaggcacggtgtttccacctttgctctgcgggcttcgctccctccggagcctggggctccttggaaagcggcggggacgcggcgggctctgggcttcggcaggcgcaccccgggtggccgggaagacagaaggcgggccggggccgaagccggggaagaggcagcccgcgtggtgcgcagccggaactcagggcttggttttcccgtgaaacttgcagcgaagaatcccagaaccaagcaggggcaagtgggcggacaaggtgctcctggggagcccagcgttttattttacagctgaatcttccctaaccgggaagattgaattacaaccggcggcgattgccatagggggaggttaattccggccctaccgcccgctttactcggagtctggggtgtggaggggcgtgggtggcgctatctcgtctaccttccaggttggctgtgagtctgagcacgcagcggggcctccctcccaagcactaagacttgtttcctgtgagtcccctcttgggaaactccttactgggaggcctcctcgggtctgagggatgaagaaggtggggccttctctggggtggtgcaggcagctcccaaagcaaggtaggtttggcaaagagcaaaagatgggaaaagggtttctacggagccagcagcacctgcctattcaggtcccaagccacaggaaccaggccaggcctttccaccagggcaatggcctcagtcctcaggccaccaagttccaggacctgccccatgtgttcccgtctcccttaaatcccaccctccacccgccccgggatggttctaccagaactctggggcttagctgagaacccaattgtagggctgtgaagccccgctgcaccttggagtcctgacccagaaggcgaaagtgctccttaataggaagatgcttccagacctgcaagacttgggcccttgcaatccagatccctgcagaccctgcacagagggatcttcagaggccacggggcacactgggccatggcaatgctgacctggtcaagcttggccttggtggtggggccccttctctggctctggcactgtgtggtgggacgtgcttcggcccagacactgcccctaaaggcatgctccaaccccacgggtcccactaaggccggcacgcagcccacacgccagacttgcttcatgttcccaagcgtggctctggagggagaatcatcatcggcactccagggcaagactaaacccatcaaaagaaaaatgtaaaacagcactgactagaactaatgtcgttattgctacaagtgacagccaaacagccacgcagagtcccagaggtgggtatgacagactaccatgactatcaagcagaaataaaattatgtgggtttttactcttaaaataagatatcctctgatcatcttcacggtacataagctcacgcgtgctcctcacattctgctcctttcacagaatggtcagtccccggtcaatgccctcgagcccctccagggagacagtgtggttctgctctaaaaacgtgaggtggaaactgaaatatgtcaaaacaacaactgaggaactgcggctgtgctgcctggtgcatgagcagacgtacaggggcgcctgccggctgtccccaagggcacttgttctcctcaaggagttctctgggagggtgcggccgtgcagggagctagctcgatgcctggttctgtactggatgcttggggatcactggtggctaggaggggctctcgccagttttggtttggtgtgaaaagcaaagaggtgctcccaggctgggcagccactgggggtcttgctggaaaggtggatctgggtggactgtgcctccctctgaaggcaagtgcaggcagttccagctccacggagacagaaaccagttgagagaggccgcttccaagtcttcccaggcccacggctcctgcagtgacagcctctggagaaggctggtctctgaaccttcttaagggccccctgcccaccctttctgaggcattctgcactgcttggcttattttcaccatgctacagcctgtgcttgtgtccagcctacgcacgggagctcttggagacgtggctgcttggcatcctaactggagtggtcagctcaaggagagctgggcactggcgctacaggagttttcctgaatgaggttagatgtctgctctaaaatccctgtggcagatgaactagtcccatgcacgccccaccaagggctaacactccacattccagaggcgggtggccttgtttgggtagttgatggccaggctgatggcagcaatgttctgcagagcctgtgccgcacagcggagaaggtggtcgtccgtggttagggccagcaggtaatcctgcagcacgccaagctcctgggcacggttctcggtgacgaagaagagctcagtgagggcacgatgcaggggaaggaggatgccgggctgcgtcacgtcctcaaacaggccgtactccatgtgggtaaagagctgccacaggggcttcaacagcgcaaggtcacacaggtcactgtggccgcagcatcgcacaatcctcagaagtaagtggatggcttttaatcgttgatggccagtctggcgacaggccacgcccaccagccattcccaaatttttgccaatgggagatgaggcacgaccctttcttctgacaacatctgcttcaaaatctcgaatcctgtctggaaccgccccaggtgtccggccgtcacggtgaatctgtagccccactcggtgttgctcatgtcggaggtgaagcggtaatacagagtgtctcctggaagttcaaaatctttccacttctgctgagacccgctgaagctgtgtcggtcttgctggaagtcactgctgctggacatggctaactcgtcacagccctcctctgtgttgcactgagagtcgaatttgattgagaggtagatggcaccaggaatgtgaactttatcctcgaagttggtgttgttgttatacgggtgtttcgactccctcacttgcacctccattcctggctcctccatgaactggcatgcagccagggccatggtccccagcatgtcctctcggcagccctggagcactttctgcaggatctggtgggaagcagacagataaggtcagggcctgcaagtggcatcaggaagaagggacagtttacttcaacccaagctccacccaaaggtgctggcatcatcttagacctaggacgagcctctgtgactccaccacccaaaaccaactccaccagccacctctcacttgaccaggctcttggtgtcaatcaggacactgcagtcctttcagaatgatgctacttagaggtggtctgaaagaactaactgaaccaatcataaagggtcctggtccttgaaggagtccccagccaagcaggtggattggcctatggataaataatgaccacacaatgtaatcgatgcctggagtgaggtgcagggttgggagctctaggtggcaagaactgtgggaggacacgcctatgcaagggcctagtagaggcagggtggctccctctgtcccttccgaaagatagatatgctagagcaagcctgccagcacctgcagggctgcaaggccgggaaaagacctcgaggtctggtggtgttctcagatggacaaagcaaggctgagaggccaaatgaacttcctcatggactgcgtgtgtgtgtgtgaaggtgggtgagggacaggatcaaaaaggagctaccgaatgtgcctcaagatttctgcacttggaaactgggaagatggcgacaaagctttctggttcagctggaaatcgcgctcagggcccctgagttcctcactagcccaatccttgggagaggatacagtgaccctacctttgctgcattcacacctgtcagggagctgcacagccacacaggtagcctcgctccaggaagcactcactggaggaagcctgtggggcagaggaagaacctggtgggtgagcacaagctcagtctgcataactaccttctcccactcatgcttttcttccagctgcatgaacatatccaaaatgtaggtcatatgggcagggccactgagctccaggatgtcctcgctcactggcacgtggctaggccactcggcgagcagggatgcaagcacgtggcgggcgtacaggacagctgtggcctcgttcactcggaagaggtagtcccggacagccctcttactcttgcagttcagctccttgtgcaggagggcggcgctcttgctacggcgctgcttggcatagctctgctgcagttcgctctctgtgctggagatcagcttctgggtcacagggttcgattcagcagtggcttggtcacagcgtgcaggccgggacaagcatggcaggataatcatgtctgtatccacagctttggcgctctgttcttccagcctcagactcttactgggctgccaccgctgagccagggaccgtatcctttcatctgtggtgagctcatcaccatcaaacctcttctgaacctccaggaagaaataatcggtctttttcatctgcagttcgtatatggcccggagaatgtgcagaggggcattgagggcatcatgagccatcaagaaacatattctggtgggctcatccaggccctcaagggggtccagctttttctgctctgggtcgccagggctgctgactggccgttccacctcttcctctcggtcccctcgctcatccagctctaggtctccgtgctcagccaaagcgttgatctccttttttgaggagtacagcatgatggacaaaatttccaggtcccggaggagccacgttttactaaagccagtccctttgctgcactttttcaccagcaacttcagcaaatcggtctgaaggaaagtagcacggatctcctcaaaaccgtgagcctttagtgttttatacaatcctttcagggccagggacaggacccaagttgcttctactgcctcgggacaatggctgtccatgctgctttgcagaaggtgactggcgataaaggcaaagtgctgggagtactggctcagctgggcccgagagtcaccacactcttgtcctcctcccttctggaccagctggtagtccttcactgttttcctcttccgagttttgacatcaacaatcacagccctgttcttctcagtaaagtgcttcaagatgatcacattatggggttcattggcattatccatataaacgcagcgggttcccacacagaggacctgggggaagccaaccagcacgagcagggtgaagatgttggtgtgcttcagctggaatggcagctgcttgatgcagtggtctgtgaaggtggcaatgacatcacgccacagtggggcactgttgagtgaccgcaggatctctgccatggagcacgcccagtccaagcccacccggctgtccagacacacagctcccaggctaaagagcaggtgggtggttttccagccatctggcacaatggaactgtcccctgcagcaaacaggttgtgtttggctgagaggactttgatcactgcggcgtctacctctgctggcaaaagacggataattaactggccgagaagacccagggtgagatggtaggtttcattcaggtggcctgcgtttgagatgacaacctgaaacatgagtggaaggacgtgctccaggtctatcaggggaaccgtggggcccgactttaagggaggtaacatggctgctagtaatcccaaaatcctcttctgggaacactcagcaaacacttgctcagggcttggagtaactgctttttcctctatgggcttctgagatgacacttctgaatcttcagcatctggaagtcctgtaggtgggctagcatctgcaggtgaatctgaaatttgggtctggcatgaaggatccttcgataatgatacacctttatctgccttatttctctgcttgaaatctacaggtctgatttcctcatgaacagctctctttccattgcctgcttctgacagctcagcaccctggacagctttcttctctagctgctcctctgacgctccggtgggcacagtgactggtagggcatgatcttctaggctcgagtccccatctggcaatacacccagcaaagctagagctttaaggccttttccctgatgagccttcatcagacagtccccgacgagctgcatgcactggctccgcagggtggtggcactgctgcgcgtctgggggtccagcttctccccatccacatcctctgcactggccaggtgggcgctatagagagccagggcagcaaagagcagccaggagtagttatggatatatggctggatgagcctctgccggtcactgatccgaatggttaccattgggtgggccgtgatgctgtgggtaggcaaatggccgtaggagtatttctcggacgcgtgggtcgncccgggcgtacgggtctctaacgacgggcgtcaaaa

SEQ ID NO: 2187 - DNA, 556 bp, Homo sapiens
ggaattaagagttgaaatacccacagaacagaatcatggaatgtaaaacaagtaaaccattatttgggagatggggtgaatccatcactggttactggaaccctgagtctgcattttctcctcaggaaggcggtctgaaatggagtgggctgtgtttggcaagggttgtagtggtttggaatctgcttggctcccgagctgggcctcaggcctgtctccccagagtaaatgcccgggatcattgaggaagcgttggctgcgctggcatgttaggcaggtctgtacggtccagcgctgtcccctgcagcgtctctggcgctgggtgcaggtgaggcccgggacgaggagggaagagcagcctcgacagagagtcctcttcaccgagggatctcgccgcaagacgagccgcttcgcaatggtcctctcagtgtagcagtaaaacctcgccagcgcctggttctcggggtcctgggcaaggacacaatgggcggcctggtacaggaagttgagcctctggaaggcctcgcggtccttcaccggccccgccctcgtgccg

SEQ ID NO: 2188 - DNA, 657 bp, Homo sapiens
atttcgtcgggcgggtgctggcagaggacgcagaaggggtgaggtcacgtctcccttgagccccgagccgctggcttttcagagcctcgccacaagccggcggccagagccccagaccacacagaccgtgcgctcctccgccctcccggcgccgccggcctcgcccatgtctcagtacgcccctagcccggacttcaagagggctttggacagcagtcccgaggccaacactgaagatgacaagaccgaggaggacgtgcccatgcccaagaactacctgtggctcaccatcgtctcgtgtttttgccctgcgtaccccatcaacatcgtggctttggtcttttccatcatgtctctgaacagctacaacgacggagactacgaaggagccaggcggcttgggcggaatgctaagtgggtagccatcgcctccatcatcattggccttctcatcatcggcatttcttgtgcagttcacttcacaaggaatgcctgaggaaccagcggtcagtgggctgtgagcgtggaggatggacctcatccacacacaccccaaaggagtctctaaggaatggatccttgacttcagactgtgagatcttttcctccaggactctccagaggcaggtccctggcaaatgaacaagaaaaaaaaaa

SEQ ID NO: 2189 - DNA, 5631 bp, Homo sapiens
atttcgtagtggcggctgcaggaggcgggcgtggacgagccggtggccgcagcggcggcggtccccggagtcctgtgaagcgcccctgtccgcgcctctgtggggccctcagagagggctgccaggacgcgagccactgaggagccgctcagccagcgccatagcccttaggactatcggtcacatcctcgcgctcctgctccggctcctccatcttggcctcggcagtggcggctgccgggaggatgtgccgccttctggcagggggaagaaggaggagaagatgaagaagcaccggcgggccttggccctggtctcctgcctctttctgtgctctctggtctggcttcccagctggcgtgtatgttgtaaagagagttcttcagcttcagcgtcatcatattactctcaagatgacaactgcgcactagaaaatgaagatgtacaattccagaaaaaggatgaaagagagggacctatcaatgccgaatcattgggaaaatcaggttcaaatttacctatttctccaaaagaacataaattaaaagatgattctattgtggatgtacaaaatacagagtcaaaaaagttaagtccaccggtggtggagacactccctacagttgatttgcatgaagagtcttccaatgcagttgtggacagtgaaactgttgaaaatatttccagctcatctacctcagaaatcactccaatctcaaagcttgatgaaatagaaaaatctggtactattccgatagccaaaccaagtgaaactgagcagtctgaaactgattgtgatgttggtgaggcccttgatgctagtgctccaattgaacaaccttcctttgtcagtccacctgacagccttgttggccagcatatagaaaatgtatcatcttcacatggtaaaggaaagataacaaaatcagaatttgaatcaaaagtttcagcaagtgaacagggcggtggtgatccaaaatctgcattgaatgcttcagataatttaaaaaatgagagctctgattatacaaaaccaggagacattgaccctacatcagtagcaagtcccaaagatccagaagatataccaacatttgatgaatggaagaagaaagttatggaagtagaaaaagaaaaaagtcagtcgatgcatgcatcttctaatggaggttcacatgccaccaaaaaggtccagaaaaatcgaaataattatgcctcagtagaatgtggtgccaaaattctagcagctaatccagaagccaagagcacatctgctattcttatagaaaatatggatctttacatgttgaatccttgcagcactaaaatttggtttgttattgaactttgtgaaccaattcaagtaaaacagcttgatattgcaaattatgaattattttcttctactcctaaagattttctggtttctatcagtgacagatatccaacaaataagtggattaagctgggtacttttcatggtagagatgagcggaatgtacagagtttccctttagatgaacagatgtatgcaaaatatgtcaagatgttcatcaagtacataaaggttgagttgctatcacattttggatcagagcacttttgtccattaagccttataagggtatttggcactagcatggtggaagaatatgaagaaattgctgattcccagtatcactcagaacgccaggaactatttgatgaggactatgattatccactggattataatactggagaggataaatcctcaaaaaatcttcttggttctgctacaaatgccattctaaatatggtgaatattgctgctaatattctgggagcaaaaactgaagacctgacagaaggaaataaaagtatatctgagaatgccactgccacagctgcacctaaaatgcctgaatcaactcctgtttcaactcctgttccatctcctgagtatgtaaccactgaagtacacacacatgacatggagccgtcaacaccagatactccaaaagagagtcccattgtacagttagttcaagaggaggaagaggaggcaagtccatctacagtgacccttctgggcagcggtgaacaggaagatgaatcatcaccctggtttgagtcagagacacaaatattttgcagtgaactgaccacaatttgttgtatttctagtttttcagaatacatatataaatggtgttcagttagagttgctctttatcggcagcgcagccgaactgctttgagtaaaggaaaagattatcttgtgttagctcaaccacccttactacttcctgcggaatcagtagatgtttcagtattgcaacctctgagtggagaattggaaaatacgaatatagaaagggaagctgaaactgttgttctgggtgatttaagtagtagtatgcaccaggatgacttggtgaatcacactgtagatgcagttgaacttgaaccaagccattctcaaactctttctcagtctcttcttttagatattaccccagaaatcaatcccttgcctaaaatagaagtatctgagtctgttgaatatgaggcaggacatataccatcaccagtgattccccaagagagttctgttgagatcgataatgaaacagaacaaaagtctgagagctttagttctatagagaaaccatctattacctatgaaacaaataaagttaatgagttaatggataatattataaaagaagatgtgaactccatgcaaattttcacaaagctgtctgaaacaatagtgccaccaataaatacagccactgtacccgacaatgaagatggggaagccaaaatgaatatagctgacacagcaaagcaaactttgatttctgttgtggattcttcttcattacctgaagtaaaagaagaagaacagtctccagaagatgcccttttgagagggttacagaggacagctacagatttttatgctgaattgcaaaattctacagatctaggatatgctaatggaaatcttgtacatggatcaaaccaaaaggagtcagtatttatgagacttaataatcgtattaaagccttagaagttaacatgtctctcagtggtcgctatctggaggagcttagccaaaggtaccgaaaacaaatggaagaaatgcaaaaggctttcaataaaacaatcgtgaaacttcagaatacttcaagaatagcagaggagcaggatcagcggcaaactgaagccatccagttgctacaggcacagctgaccaacatgacacagcttgtttcaaatttatcagcaacagtagcagaattgaaacgggaggtttcagatcgacaaagctatcttgtcatatctttggttctttgtgttgtcttgggactgatgctttgtatgcagcgttgtcgaaatacttctcaatttgatggagattatatttcaaaacttcctaaaagtaatcagtatccaagccctaaaaggtgtttctcttcctatgatgatatgaatttgaaaagaagaacttcattcccactcatgagatccaagtctctacagttaactggcaaagaagtagacccaaatgatttgtacattgtagaacccctcaagttttctccagaaaagaagaagaagcgctgcaagtacaaaattgaaaaaattgagaccataaagcctgaagaaccattgcaccccatagccaatggcgacataaaaggaagaaagccctttacgaaccagagagatttttctaatatgggagaagtttatcactcttcttataaaggtcctccatctgaaggaagctcagaaacttcatcacagtcagaagagtcctatttttgtggcatttcagcttgcacaagtctgtgcaatggacagtctcaaaagacaaaaactgagaagagggctttaaaacgaagacgatctaaagtccaagaccaaggaaaattgataaaaactctaatacagactaagtcgggatcattgccgagcctgcatgacataatcaaaggaaacaaagagatcaccgtgggaacatttggtgttacagcagtctcgggacatatctaaaattaattgaacttttcatacagaagacttttttgttgttgttctttgaagaacagtctgtagtatttgaagggtttgggggagggagaaaatattaatgggaaaggcattcagaaattatggtttctacctttttaaaaagtagatgggattgtgtcaatcttggttaatgagctacagttttacaaagctgatcacttcctataaggacaatggtagacattttataaagatgttttttcacaagattaattactgggacaaaagtaatttggaagcccagttccttaggtgggataggaatgaaagcctaaacctcttcctttagctttgttcctatttcttgcaccttcccatatttatgtgccttttgtctatttataatgccactggaagaggagggataactttttctgttatttgatttcttttataactttgttaggtttttgaagctgcaaacactacaatgctttgagggggtctgtgcctgaagctcaggagtgtggatcagacagtctaaagatcctaaaaacttgccaactggatctttgtttagcaaactcactggaaatgaacacttaatggaatttttaagtctgttctgttaggtagatggtgatgctcttgttattttcacttattcagactggattacttcttacttagttactaactcaatgaggaaaaatccctacaggatctttttttgcaaacaactgatatatgcagacaaatttttgacaaattcaccttttaaacacacttaaccatttgtgaaggttttctttagcttacattttaaacatacacaataaacactaatcctccaaactttcactgtttttattagtatgaatataaaatttgaaggtttggccaattagtacaagtctcatgatataatcactgcctgcatacatatgcacagatccagttagtgagtttgtcaagcttaatctaattggttaagtctaaagagattattattccttgatgtttgctttgtattggctacaaatgtgcagaggtaatacatatgtgatgtcgatgtctctgtctttttttttgtctttaaaaaataattggcagcaactgtatttgaataaaatgatttcttagtatgattgtacagtaatgaatgaaagtggaacatgtttctttttgaaagggagagaattgaccatttattgttgtgatgtttaagttataacttattgagcacttttagtagtgataactgtttttaaacttgcctaatacctttcttgggtattgtttgtaatgtgacttatttaacgccttttttgtttgtttaagttgctgctttaggttaacagcgtgttttagaagatttaaatttctttcctgtctgcacaattagctattcagagcaagagggcctgattttatagaagccccttgaaaagaggtccagatgagagcagagatacagtgagaaattatgtgatctgtgtgttgtgggaagagaattttcaatatgtaactacggagctgtagtgccattagaaactgtgaatttccaaataaatctgaacacttgtttttattaaaaaaaaaaa

SEQ ID NO: 2190 - DNA, 5213 bp, Homo sapiens
tttcgtgagagagagagagagagacagcaaagcagtcccaggcttcctcctctctttcacgtcagaggcaggaaccgactgtgctaaggctgttggctcaacacccagaggagacgggcagacccagggagagtgagagaagggggtcctctctgacccaaggaattaccactagtggagtgaagccacctgactttttgatcttattttggttgcctcctcattctccttccacccgtagccctgacagcttgggtttcatttctttcgtggagccttgtctcttcctcccagaataggaggaagggaagagaagggaaagaggagggctctctaggtgagcgcatcagctggctccagcctgagcaagcaagaattttcttcccaggaagctcctctcgctccccggccgcccacccccagcctgggtggctgtatcgttttaactgcatagagggcaggtctcttttggaattaggattaaagaaagtgcagtaaagagaaagcatcgaagacaccatcacaaaagattcccacaactccatgctgtgtgctgcaggctggtcctgaacccagatctctggctgagaggatgggggcagatggggaaacagtggttctgaagaacatgctcattggcgtcaacctgatccttctgggctccatgatcaagccttcagagtgtcagctggaggtcaccacagaaagggtccagagacagtcagtggaggaggagggaggcattgccaactacaacacgtccagcaaagagcagcctgtggtcttcaaccacgtgtacaacattaacgtgcccttggacaacctctgctcctcagggctagaggcctctgctgagcaggaggtgagtgcagaagacgagactctggcagagtacatgggccagacctcagaccacgagagccaggtcacctttacacacaggatcaacttccccaaaaaggcctgtccatgtgccagttcagcccaggtgctgcaggagctgctgagccggatcgagatgctggagagggaggtgtcggtgctgcgagaccagtgcaacgccaactgctgccaagaaagtgctgccacaggacaactggactatatccctcactgcagtggccacggcaactttagctttgagtcctgtggctgcatctgcaacgaaggctggtttggcaagaattgctcggagccctactgcccgctgggttgctccagccggggggtgtgtgtggatggccagtgcatctgtgacagcgagtacagcggggatgactgttccgaactccggtgcccaacagactgcagctcccgggggctctgcgtggacggtgagtgtgtctgtgaagagccctacactggcgaggactgcagggaactgaggtgccctggggactgttcggggaaggggagatgtgccaacggtacctgtttatgcgaggagggctacgttggtgaggactgcggccagcggcagtgtctgaatgcctgcagtgggcgaggacaatgtgaggaggggctctgcgtctgtgaagagggctaccagggccctgactgctcagcagttgcccctccagaggacttgcgagtggctggtatcagcgacaggtccattgagctggaatgggacgggccgatggcagtgacggaatatgtgatctcttaccagccgacggccctggggggcctccagctccagcagcgggtgcctggagattggagtggtgtcaccatcacggagctggagccaggtctcacctacaacatcagcgtctacgctgtcattagcaacatcctcagccttcccatcactgccaaggtggccacccatctctccactcctcaagggctacaatttaagacgatcacagagaccaccgtggaggtgcagtgggagcccttctcattttccttcgatgggtgggaaatcagcttcattccaaagaacaatgaagggggagtgattgctcaggtccccagcgatgttacgtcctttaaccagacaggactaaagcctggggaggaatacattgtcaatgtggtggctctgaaagaacaggcccgcagcccccctacctcggccagcgtctccacagtcattgacggccccacgcagatcctggttcgcgatgtctcggacactgtggcttttgtggagtggattccccctcgagccaaagtcgatttcattcttttgaaatatggcctggtgggcggggaaggtgggaggaccaccttccggctgcagcctcccctgagccaatactcagtgcaggccctgcggcctggctcccgatacgaggtgtcagtcagtgccgtccgagggaccaacgagagcgattctgccaccactcagttcacaacagagatcgatgcccccaagaacttgcgagttggttctcgcacagcaaccagccttgacctcgagtgggataacagtgaagccgaagttcaggagtacaaggttgtgtacatcaccctggcgggtgagcaatatcatgaggtactggtccccaggggcattggtccaaccaccagggccaccctgacagatctggtacctggcactgagtatggagttggaatatctgccgtcatgaactcacagcaaagcgtgccagccaccatgaatgccaggactgaacttgacagtccccgagacctcatggtgacagcctcctcggagacctccatctccctcatctggaccaaggccagtggccccattgaccactaccgaattacctttaccccatcctctgggattgcctcagaagtcaccgtacccaaggacaggacctcatacacactaacagatctagagcctggggcagagtacatcatttccgtcactgctgagaggggtcggcagcagagcttggagtccactgtggatgctttcacaggcttccgtcccatctctcatctgcacttttctcatgtgacctcctccagtgtgaacatcacttggagtgatccatctcccccagcagacagactcattcttaactacagccccagggatgaggaggaagagatgatggaggtctccctggatgccaccaagaggcatgctgtcctgatgggcctgcaaccagccacagagtatattgtgaaccttgtggctgtccatggcacagtgacctctgagcccattgtgggctccatcaccacaggaattgatcccccaaaagacatcacaattagcaatgtgaccaaggactcagtgatggtctcctggagccctcctgttgcatctttcgattactaccgagtatcatatcgacccacccaagtgggacgactagacagctcagtggtgcccaacactgtgacagaattcaccatcaccagactgaacccagctaccgaatacgaaatcagcctcaacagcgtgcggggcagggaggaaagcgagcgcatctgtactcttgtgcacacagccatggacaaccctgtggatctgattgctaccaatatcactccaacagaagccctgctgcagtggaaggcaccagtgggtgaggtggagaactacgtcattgttcttacacactttgcagtcgctggagagaccatccttgttgacggagtcagtgaggaatttcggcttgttgacctgcttcctagcacccactatactgccaccatgtatgccaccaatggacctctcaccagtggcaccatcagcaccaacttttctactctcctggaccctccggcaaacctgacagccagtgaagtcaccagacaaagtgccctgatctcctggcagcctcccagggcagagattgaaaattatgtcttgacctacaaatccaccgacggaagccgcaaggagctgattgtggatgcagaagacacctggattcgactggagggcctgttggagaacacagactacacggtgctcctgcaggcagcacaggacaccacgtggagcagcatcacctccaccgctttcaccacaggaggccgggtgttccctcatccccaagactgtgcccagcatttgatgaatggagacactttgagtggggtttaccccatcttcctcaatggggagctgagccagaaattacaagtgtactgtgatatgaccaccgacgggggcggctggattgtattccagaggcggcagaatggccaaactgattttttccggaaatgggctgattaccgtgttggcttcgggaacgtggaggatgagttctggctggggctggacaatatacacaggatcacatcccagggccgctatgagctgcgcgtggacatgcgggatggccaggaggccgccttcgcctcctacgacaggttctctgtcgaggacagcagaaacctgtacaaactccgcataggaagctacaacggcactgcgggggactccctcagctatcatcaaggacgccctttctccacagaggatagagacaatgatgttgcagtgactaactgtgccatgtcgtacaagggagcatggtggtataagaactgccaccggaccaacctcaatgggaagtacggggagtccaggcacagtcagggcatcaactggtaccattggaaaggccatgagttctccatcccctttgtggaaatgaagatgcgcccctacaaccaccgtctcatggcagggagaaaacggcagtccttacagttctgagcagtgggcggctgcaagccaaccaatattttctgtcatttgtttgtattttataatatgaaacaaggggggagggtaatagcaatgtgttttgcaacatattaagagtatgtggaggaagcagggatgtcgcaggaatccgctggctaacatctgctcttggtttctgctgccctggagcctgaccctcagtctccattctccctcctacccaggcctcctcaaccttcacctcctttcccaccaaggaggagaagtaggaagttttcttaaagggccaattcaaagccaagtcgtggggtgcagattgttatggtgacaggcacacacatttttctacccttcttctgagatgtcctctgccttccaggtatttgtgattttgtcacagcctgacatggccaggttctcacactggcccagagaaaagagcctcagcaagagagttttgccaacaattccccttaaaaggaaacagatcaactacaccgcatcccaacaacccaggttcttttccttccttccttccttcctcccttccttc

SEQ ID NO: 2191 - DNA, 2428 bp, Homo sapiens
ccggctgcagctcccggcgtgccccgcactctccgctgcccaccctctcgcccttccctccttctcctcccagtgccacagagccgaagcccgagctgccgccgcagccacagccgagggcactatggcttctggagttacagtgaatgatgaagtcatcaaagtttttaatgatatgaaagtaaggaaatcttctacacaagaggagatcaaaaagagaaagaaagcagttctcttctgtttaagcgatgacaaaagacaaataattgtagaggaagcaaagcagatcttggtgggtgacattggtgatactgtagaggacccctacacatcttttgtgaagttgctacctctgaatgattgccgatatgctttgtacgatgccacatacgaaacaaaagagtctaagaaagaagacctagtatttatattctgggctcctgaaagtgcacctttaaaaagcaagatgatttatgctagctctaaagatgccattaaaaagaaatttacaggtattaaacatgagtggcaagtaaatggcttggatgatattaaggaccgttcgacacttggagagaaattgggaggcaatgtagtagtttcacttgaaggaaaaccattataaaatgacagtcaagtgccatctggatcttaaggagcttccatttctccagctcagtccattggaatagtattaggttttggttttttgttgtatttccccctttccactgggcccttccaacacaatgaatgaaggaaatatcatttatttaagcagcctatcagtgattgccattagactgttgaatactgttacttttatatagaacccaaggaatgccttcctgtcatattttagccaaaacaactggttatatgcctcccttgcagcaagcactacaatgtatgtgatcgtcaatgtgaatagcttagaatactgcaaaggataagctaattgaatgccttgaaagtattatccactggtcagatggtcaacttttttcagtattatttatagttggcacttgattgcagttctgtgaggcttgagcattcatacacctcacctgccttggcaagcctattttagtgatatggcagcacggatataacactatgcattaaaagcactttttgtaataagtttaatatcctaaaaggaatgccaattaagttttgttaactgtgtcatcaacttatcctagtacctcagtgttcattcctgttacctgcatatcttcttaaaagaaatagctgttattaatgcctttttgttttccattgagtgtacactactgaataagtgtaggagttttatgtttaccatgtgagtcctgcaacactaaagatattttgaatatcagtcatgatggcaatttctgtataaaagagccttaaatggaacattgttttgagatcaaactccccaccctcacaaaaatggccacgttgcaataaaaattgtggcatattacagaacgttgccttgttttccttggaaattttgcaaaatgttatgtgaaacaacttctagggtaaaaacagctattactaatctctgcactggtcatttgagaattttttttgtacagcattcatgtgtgatattttccagatttgttggatctatttggtttaaaaagtattttatattagttggccttaagatagaatactttttaaaccaactaatataaaataccattgttaaagaatggtacttttataaacattagtgtatttatttcctatgtgttaatatgaagatcagaaattattttttgcactttggcataaatacttttcaatatctgatttgttctctggataaattagcatagttatttttttattcacatttacatttctaagtagttgtatagtagaagcaggaagctcttattgcttatttggtcgtaatgaaaataatttgtaaaatgtcctttaaaagtttaatgatacttctgatgtttcggaacagtcatttcacctactatttctgaatatattttgcaaattgaattggaataggaattgatatagcagtcttaaacattagtagtgggatttggctatggtccagactgtgctccttatagagaatttgatctgctcagtgtgagcggtttgctgttagccagggctatttatggcaaacacatgcttttgtatcttgtcatagttatccacaaatggcaaaactggacttgattctactggtatgcaaaacaggcatgctagttaaggcagttcagtcgtgggctcaggaacttaaccccatagctcagaggaatgcttttagcagaaaacaggaaagaaaatatcccttaaaatttttttttgaatgtgtggaagtaattttagtataattagattttttccatatttttgaaagatttttcagatgtgaacattaaaataggga

SEQ ID NO: 2192 - DNA, 2423 bp, Homo sapiens
cccaattcccgggtcgacgatttcgtgagtgggcggagggggtggaggtttgtctccgctgtttcatctctatggctgtcagaggtgggcggctttgaccgagaggctgctggagctcgtgtttggacgcgatgtttcgtctgaactcactttctgctttggcagaactggctgtgggttctcgatggtaccatggaggatcacagcccatccagatccggcgaagactaatgatggtggctttcctgggagcatctgcagtaactgcaagtactggtcttttgtggaagagggcccatgcagaatctccaccatgtgtagacaacctaaaaagtgacatcggtgataaagggaagaataaagatgaaggggatgtttgtaaccatgagaaaaagactgcagatcttgcccctcacccagaagagaaaaagaagaaacgttctggattcagagacagaaaagtgatggaatatgagaataggattcgagcctactccacgccagacaaaatcttccgatattttgccaccttgaaagtcatcagtgagcctggtgaagcagaagtgtttatgacaccagaagattttgtgcgatccataacacccaatgaaaaacaaccagaacacttgggtctggatcaatatataataaaacgctttgatggaaagacagagaaaatttcccaggaacgagaaaaatttgctgatgaaggcagtatattttacacccttggagaatgtgggctcatatccttttcagattacattttcctcacaactgttctttccactcctcagagaaattttgaaattgccttcaagatgtttgatttgaatggagatggagaagtagatatggaagaatttgaacaggttcagagcatcattcgctcccaaaccagtatgggtatgcgccacagagatcgtccaactactggcaacaccctcaagtctggcttgtgttcagccctcacaacctacttttttggagctgatctgaagggaaagctgacaatcaaaaacttcctcgaatttcagcgtaaactgcagcatgatgttctgaagcttgagtttgaacgccatgaccctgtggatgggagaattactgagaggcagtttggtggcatgctacttgcctacagtggggtgcagtccaagaagctgaccgccatgcagaggcagctcaagaagcacttcaaagaaggaaagggtctgacatttcaggaggtggagaacttctttactttcctaaagaacattaatgatgtggacactgcattgagtttttaccatatggctggagcatctcttgataaagtgaccatgcagcaggtggccaggacagtggctaaagtggagctctcagaccacgtgtgtgatgtggtgtttgcactctttgactgtgatggcaatggcgaactgagcaataaggaatttgtttccatcatgaagcaacggctgatgagaggcctggaaaagcccaaagacatgggtttcactcgcctcatgcaggccatgtggaaatgtgcacaggaaactgcctgggacttcgctttacccaaacagtaaccccacactgcaagaggggacccctccacccccagtaccctggaccccctccgcagagtctcggcagagccctttgtgctgctgcttctggaagtagtctcccttcctcccgggatgacctcaggactctgtcggtttcccctctttacccttccccgtccccgtgttctgctgggctctgattctgcccaatgagtatccccataggttctcaaaaacatgaacaagtctgtaaagctcagacatttgtcagcctcaacagcaccacccattcaagcatcctgtggataaagaattcagggaaccatccacacacctgccaaccctgggaagcatccagttctcaaatcgtttttgctatggatttatactaacaagaacattccttgacttccctcctgctggtgttttaaagccacaagtagggaagatatctggcaggcagaaagaagtctgtgatgataaacaatgatgaggatgacctaggcaccctacgctagtgtgagaagcctgcgccccaggaaggatctgtgttagtccctgggatggctccaaggcctgctctaggaaggcagcatgctcagtgggaacacagcaagattcagaatttaaagtagttgcttcatggctctgtgcactcccttttcttcctcgcagcctccctaagatgactccagtgtgaccctgtgcttagtgagcaatagtgattgagctcatgttccctgcaagtgccatttcctctccaggatgggcctctaaagctgaggcctggctcagagcctgtttgccctctgtcttaaacaattgtaaatatcacttaaattataaccatttgcaataaacatccccaaagtt

SEQ ID NO: 2193 - DNA, 710 bp, Homo sapiens; identical to SEQ ID NO: 225

SEQ ID NO: 2194 - DNA, 1181 bp, Homo sapiens
  misc_feature (1)...(1181): n = a,t,c or g
cggctgagcgtgtggctgcaggagcttctgtgggagtacggtcatgagccttttgctgtactatgccctccctgccctgggcagctatgccatgctctccatcttcttcctgcgccggcctcatctgctgcacacgcccagggctcccaccttccgcatccgcctgggggcccaccgaggaggatctggagagctgctggagaacaccatggaggccatggagaactccatggcccagcgctcggacctcctggagctcgactgtcagctgacacgggacagagtggtggtggtgtcacatgatgagaacctgtgccgccagtcgggcctaaacagggatgtgggcagcctggacttcgaggacctgcccctctacaaggagaagctggaggtttacttctctccaggccactttgctcacgggtcagaccggcgcatggttcgtctggaggacctgttccagaggtttccaaggacacccatgagcgtagagatcaaagggaagaacgaagagctcatccgtgagatagcaggcttggtgagacgctatgaccgtaatgaaatcaccatctgggcctcggagaagagctcggtcatgaagaaatgcaaggnnnnnnnnnnnnnnnnnnnnnnnnnnnnnnnnnnnnnnnnnnnnnnnnnnnnnnnnnnnnnnnnnnnnnnnnnnnnnnnnnnnnnnnnnnnnnnnnnnnnnnnnnnnnnnnnnnnnnnnnnnnnnnnnagatgcccctgtccttcacaataagccgaggattctgggtgctgctttcctactacctggggctgctgcccttcatcccaatccctgagaagttcttcttctgcttcctgcccaacatcatcaacaggacctatttcccattttcctgctcttgcctgaaccagttattggctgtggtttcgaaatggctgatcatgaggaagagtctgatccgacacttggaggagcgaggggtgcaggtggtcttttggtgccttaatgaagagtcggattttgaagcagccttcagcgtgggagccactggcgtcataacggattatcccacagccctgcggcactacctggacaaccatggaccagctgcccggacctcctaagtccagaagcctcgaggtctcctgtttctcttcctgaaaaataaatatttgcctttcgatcaaaa

SEQ ID NO: 2195 - DNA, 1790 bp, Homo sapiens
cggttgacgtttgctgatttttgactttgcttgtagctgctccccgaactcgccgtcttcctgtcggcggccggcactgtagattaacaggaaacttccaagatggaaactttgtctttccccagatataatgtagctgagattgtgattcatattcgcaataagatcttaacaggagctgatggtaaaaacctcaccaagaatgatctttatccaaatccaaagcctgaagtcttgcacatgatctacatgagagccttacaaatagtatatggaattcgactggaacatttttacatgatgccagtgaactctgaagtcatgtatccacatttaatggaaggcttcttaccattcagcaatttagttactcatctggactcatttttgcctatctgccgggtgaatgactttgagactgctgatattctatgtccaaaagcaaaacggacaagtcggtttttaagtggcattatcaactttattcacttcagagaagcatgccgtgaaacgtatatggaatttctttggcaatataaatcctctgcggacaaaatgcaacagttaaacgccgcacaccaggaggcattaatgaaactggagagacttgattctgttccagttgaagagcaagaagagttcaagcagctttcagatggtattcaggagctacaacaatcactaaatcaggattttcatcaaaaaacgatagtgctgcaagagggaaattcccaaaagaagtcaaatatttcagagaaaaccaagcgtttgaatgaactaaaattgtcggtggtttctttgaaagaaatacaagagagtttgaaaacaaaaattgtggattctccagagaagttaaagaattataaagaaaaaatgaaagatacggtccagaagcttaaaaatgccagacaagaagtggtggagaaatatgaaatctatggagactcagttgactgcctgccttcatgtcagttggaagtgcagttatatcaaaagaaaatacaggacctttcagataatagggaaaaattagccagtatcttaaaggagagcctgaacttggaggaccaaattgagagtgatgagtcagaactgaagaaattgaagactgaagaaaattcgttcaaaagactgatgattgtgaagaaggaaaaacttgccacagcacaattcaaaataaataagaagcatgaagatgttaagcaatacaaacgcacagtaattgaggattgcaataaagttcaagaaaaaagaggtgctgtctatgaacgagtaaccacaattaatcacgagatccaaaagattagacttggaattcaacaactaaaagatgctgctgatagggagaaactgaagtcccaggaaatatttctaaacttgaaaactgctttggagaaataccacgacggtattgaaaaggcagcagaggactcctatgctaagatagatgagaagacagctgaactgaagaggaagatgttcaaaatgtcaacctgattaacaaaattacatgtctttttgtaaatggcttgccatcttttaattttctatttagaaagaaaagttgaagcgaatggaagtatcagaagtaccaaataatgttggcttcatcagtttttatacactctcataagtagttaataagatgaatttaatgtaggcttttattaatttataattaaaataacttgtgcagctattcatgtctctactctgccccttgttgtaaatagtttgagtaaaacaaaactagttacctttgaaatatatatatttttttctgttacaaa

SEQ ID NO: 2196 - DNA, 7086 bp, Homo sapiens
tttcgtgtgagtggggccgggacccgcagagccgagccgacccttctctcccgggctgcggcagggcagggcggggagctccgcgcaccaacagagccggttctcagggcgctttgctccttgttttttccccggttctgttttctccccttctccggaaggcttgtcaaggggtaggagaaagagacgcaaacacaaaagtggaaaacagttaatgaccagccacggcgtccctgctgtgagctctggccgctgccttccagggctcccgagccacacgctgggggtgctggctgagggaacatggcttgttggcctcagctgaggttgctgctgtggaagaacctcactttcagaagaagacaaacatgtcagctgctgctggaagtggcctggcctctatttatcttcctgatcctgatctctgttcggctgagctacccaccctatgaacaacatgaatgccattttccaaataaagccatgccctctgcaggaacacttccttgggttcaggggattatctgtaatgccaacaacccctgtttccgttacccgactcctggggaggctcccggagttgttggaaactttaacaaatccattgtggctcgcctgttctcagatgctcggaggcttcttttatacagccagaaagacaccagcatgaaggacatgcgcaaagttctgagaacattacagcagatcaagaaatccagctcaaacttgaagcttcaagatttcctggtggacaatgaaaccttctctgggttcctgtatcacaacctctctctcccaaagtctactgtggacaagatgctgagggctgatgtcattctccacaaggtatttttgcaaggctaccagttacatttgacaagtctgtgcaatggatcaaaatcagaagagatgattcaacttggtgaccaagaagtttctgagctttgtggcctaccaagggagaaactggctgcagcagagcgagtacttcgttccaacatggacatcctgaagccaatcctgagaacactaaactctacatctcccttcccgagcaaggagctggccgaagccacaaaaacattgctgcatagtcttgggactctggcccaggagctgttcagcatgagaagctggagtgacatgcgacaggaggtgatgtttctgaccaatgtgaacagctccagctcctccacccaaatctaccaggctgtgtctcgtattgtctgcgggcatcccgagggaggggggctgaagatcaagtctctcaactggtatgaggacaacaactacaaagccctctttggaggcaatggcactgaggaagatgctgaaaccttctatgacaactctacaactccttactgcaatgatttgatgaagaatttggagtctagtcctctttcccgcattatctggaaagctctgaagccgctgctcgttgggaagatcctgtatacacctgacactccagccacaaggcaggtcatggctgaggtgaacaagaccttccaggaactggctgtgttccatgatctggaaggcatgtgggaggaactcagccccaagatctggaccttcatggagaacagccaagaaatggaccttgtccggatgctgttggacagcagggacaatgaccacttttgggaacagcagttggatggcttagattggacagcccaagacatcgtggcgtttttggccaagcacccagaggatgtccagtccagtaatggttctgtgtacacctggagagaagctttcaacgagactaaccaggcaatccggaccatatctcgcttcatggagtgtgtcaacctgaacaagctagaacccatagcaacagaagtctggctcatcaacaagtccatggagctgctggatgagaggaagttctgggctggtattgtgttcactggaattactccaggcagcattgagctgccccatcatgtcaagtacaagatccgaatgggcattgacaatgtggagaggacaaataaaatcaaggatgggtactgggaccctggtcctcgagctgacccctttgaggacatgcggtacgtctgggggggcttcgcctacttgcaggatgtggtggagcaggcaatcatcagggtgctgacgggcaccgagaagaaaactggtgtctatatgcaacagatgccctatccctgttacgttgatgacatctttctgcgggtgatgagccggtcaatgcccctcttcatgacgctggcctggatttactcagtggctgtgatcatcaagggcatcgtgtatgagaaggaggcacggctgaaagagaccatgcggatcatgggcctggacaacagcatcctctggtttagctggttcattagtagcctcattcctcttcttgtgagcgctggcctgctagtggtcatcctgaagttaggaaacctgctgccctacagtgatcccagcgtggtgtttgtcttcctgtccgtgtttgctgtggtgacaatcctgcagtgcttcctgattagcacactcttctccagagccaacctggcagcagcctgtgggggcatcatctacttcacgctgtacctgccctacgtcctgtgtgtggcatggcaggactacgtgggcttcacactcaagatcttcgctagcctgctgtctcctgtggcttttgggtttggctgtgagtactttgccctttttgaggagcagggcattggagtgcagtgggacaacctgtttgagagtcctgtggaggaagatggcttcaatctcaccacttcggtctccatgatgctgtttgacaccttcctctatggggtgatgacctggtacattgaggctgtctttccaggccagtacggaattcccaggccctggtattttccttgcaccaagtcctactggtttggcgaggaaagtgatgagaagagccaccctggttccaaccagaagagaatatcagaaatctgcatggaggaggaacccacccacttgaagctgggcgtgtccattcagaacctggtaaaagtctaccgagatgggatgaaggtggctgtcgatggcctggcactgaatttttatgagggccagatcacctccttcctgggccacaatggagcggggaagacgaccaccatgtcaatcctgaccgggttgttccccccgacctcgggcaccgcctacatcctgggaaaagacattcgctctgagatgagcaccatccggcagaacctgggggtctgtccccagcataacgtgctgtttgacatgctgactgtcgaagaacacatctggttctatgcccgcttgaaagggctctctgagaagcacgtgaaggcggagatggagcagatggccctggatgttggtttgccatcaagcaagctgaaaagcaaaacaagccagctgtcaggtggaatgcagagaaagctatctgtggccttggcctttgtcgggggatctaaggttgtcattctggatgaacccacagctggtgtggacccttactcccgcaggggaatatgggagctgctgctgaaataccgacaaggccgcaccattattctctctacacaccacatggatgaagcggacgtcctgggggacaggattgccatcatctcccatgggaagctgtgctgtgtgggctcctccctgtttctgaagaaccagctgggaacaggctactacctgaccttggtcaagaaagatgtggaatcctccctcagttcctgcagaaacagtagtagcactgtgtcatacctgaaaaaggaggacagtgtttctcagagcagttctgatgctggcctgggcagcgaccatgagagtgacacgctgaccatcgatgtctctgctatctccaacctcatcaggaagcatgtgtctgaagcccggctggtggaagacatagggcatgagctgacctatgtgctgccatatgaagctgctaaggagggagcctttgtggaactctttcatgagattgatgaccggctctcagacctgggcatttctagttatggcatctcagagacgaccctggaagaaatattcctcaaggtggccgaagagagtggggtggatgctgagacctcagatggtaccttgccagcaagacgaaacaggcgggccttcggggacaagcagagctgtcttcgcccgttcactgaagatgatgctgctgatccaaatgattctgacatagacccagaatccagagagacagacttgctcagtgggatggatggcaaagggtcctaccaggtgaaaggctggaaacttacacagcaacagtttgtggcccttttgtggaagagactgctaattgccagacggagtcggaaaggattttttgctcagattgtcttgccagctgtgtttgtctgcattgcccttgtgttcagcctgatcgtgccaccctttggcaagtaccccagcctggaacttcagccctggatgtacaacgaacagtacacatttgtcagcaatgatgctcctgaggacacgggaaccctggaactcttaaacgccctcaccaaagaccctggcttcgggacccgctgtatggaaggaaacccaatcccagacacgccctgccaggcaggggaggaagagtggaccactgccccagttccccagaccatcatggacctcttccagaatgggaactggacaatgcagaacccttcacctgcatgccagtgtagcagcgacaaaatcaagaagatgctgcctgtgtgtcccccaggggcaggggggctgcctcctccacaaagaaaacaaaacactgcagatatccttcaggacctgacaggaagaaacatttcggattatctggtgaagacgtatgtgcagatcatagccaaaagcttaaagaacaagatctgggtgaatgagtttaggtatggcggcttttccctgggtgtcagtaatactcaagcacttcctccgagtcaagaagttaatgatgccaccaaacaaatgaagaaacacctaaagctggccaaggacagttctgcagatcgatttctcaacagcttgggaagatttatgacaggactggacaccagaaataatgtcaaggtgtggttcaataacaagggctggcatgcaatcagctctttcctgaatgtcatcaacaatgccattctccgggccaacctgcaaaagggagagaaccctagccattatggaattactgctttcaatcatcccctgaatctcaccaagcagcagctctcagaggtggctccgatgaccacatcagtggatgtccttgtgtccatctgtgtcatctttgcaatgtccttcgtcccagccagctttgtcgtattcctgatccaggagcgggtcagcaaagcaaaacacctgcagttcatcagtggagtgaagcctgtcatctactggctctctaattttgtctgggatatgtgcaattacgttgtccctgccacactggtcattatcatcttcatctgcttccagcagaagtcctatgtgtcctccaccaatctgcctgtgctagcccttctacttttgctgtatgggtggtcaatcacacctctcatgtacccagcctcctttgtgttcaagatccccagcacagcctatgtggtgctcaccagcgtgaacctcttcattggcattaatggcagcgtggccacctttgtgctggagctgttcaccgacaataagctgaataatatcaatgatatcctgaagtccgtgttcttgatcttcccacatttttgcctgggacgagggctcatcgacatggtgaaaaaccaggcaatggctgatgccctggaaaggtttggggagaatcgctttgtgtcaccattatcttgggacttggtgggacgaaacctcttcgccatggccgtggaaggggtggtgttcttcctcattactgttctgatccagtacagattcttcatcaggcccagacctgtaaatgcaaagctatctcctctgaatgatgaagatgaagatgtgaggcgggaaagacagagaattcttgatggtggaggccagaatgacatcttagaaatcaaggagttgacgaagatatatagaaggaagcggaagcctgctgttgacaggatttgcgtgggcattcctcctggtgagtgctttgggctcctgggagttaatggggctggaaaatcatcaactttcaagatgttaacaggagataccactgttaccagaggagatgctttccttaacagaaatagtatcttatcaaacatccatgaagtacatcagaacatgggctactgccctcagtttgatgccatcacagagctgttgactgggagagaacacgtggagttctttgcccttttgagaggagtcccagagaaagaagttggcaaggttggtgagtgggcgattcggaaactgggcctcgtgaagtatggagaaaaatatgctggtaactatagtggaggcaacaaacgcaagctctctacagccatggctttgatcggcgggcctcctgtggtgtttctggatgaacccaccacaggcatggatcccaaagcccggcggttcttgtggaattgtgccctaagtgttgtcaaggaggggagatcagtagtgcttacatctcatagtatggaagaatgtgaagctctttgcactaggatggcaatcatggtcaatggaaggttcaggtgccttggcagtgtccagcatctaaaaaataggtttggagatggttatacaatagttgtacgaatagcagggtccaacccggacctgaagcctgtccaggatttctttggacttgcatttcctggaagtgttccaaaagagaaacaccggaacatgctacaataccagcttccatcttcattatcttctctggccaggatattcagcatcctctcccagagcaaaaagcgactccacatagaagactactctgtttctcagacaacacttgaccaagtatttgtgaactttgccaaggaccaaagtgatgatgaccacttaaaagacctctcattacacaaaaaccagacagtagtggacgttgcagttctcacatcttttctacaggatgagaaagtgaaagaaagctatgta

SEQ ID NO: 2197 - DNA, 1582 bp, Homo sapiens
tcggaattcccggcccgacgatttcgttggccggctcctaccctgaaggtgcacctgcagtcctcgccgataagaggcagcagttcggaagccggttcctgagagatccggcgcgcgtcttccaccacaatgcctggtaatcactctgccccttcgcccggcctgtcgctgaccctctgtcccgccgcctcggagcactccgaaaagcccctgaccgccggccacgagtcaagctgccctacccgaggcactctccaaggggagagaaactcctaggccagcgactcaccctgcccgcagccaggacgtgaggcccctaagctgcccgtttgattttctcagggacaatgtggagtggtcggaagagcaagccgcggcggcggagagaaaagtccaggagaacagtatccagcgggtgtgccaggagaaacaagttgattatgagatcaatgcccacaaatactggaatgacttctacaaaatccacgaaaatgggtttttcaaggatagacattggctttttaccgaattccctgagctggcacctagccaaaatcaaaatcatttgaaggactggttcttggagaacaagagtgaagtacctgaatgtagaaacaatgaggatggacctggtttaataatggaagaacagcacaagtgttcttcgaagagccttgaacataaaacacagacacctcctgtggaggagaatgtaactcagaaaattagtgacctggaaatttgtgctgatgagtttcctggatcctcagccacctaccgaatactggaggttggctgtggtgtgggaaacacagtctttccaattttacaaacgaacaatgacccaggactctttgtttattgctgtgatttttcttccacagctatagaactggtccagacaaattcagaatatgatccttctcggtgttttgcctttgttcacgacctgtgtgatgaagagaagagttacccagtgcccaagggcagtcttgatattatcattctcatatttgttctttcagcaattgttccagacaagatgcagaaggctatcaacaggctgagcaggcttctgaaacctggggggatggtacttctgcgagattacggccgctatgacatggctcagcttcggtttaaaaaaggtcagtgtctatctggaaatttctatgtgagaggtgatggaaccagagtttacttcttcacacaagaggaactggacacgcttttcaccactgctggactggaaaaagttcagaacctggtggaccgccgactgcaggtgaaccgagggaagcaactgacaatgtaccgggtttggattcagtgcaaatactgcaagccccttctgtccagcaccagctaagaggcacctgctgccaacacgatgcaagcccgttgtgtttccgagcttttttaaaaaaaaatttgtagcaccgggcatggtgcatgcctgtaatcccagccactcaggaggctgagacagggaggatccattgagcccaggagtccagcctgggcaaaatagcgagagaccctgaatctgaaagtaatgataaaataaaaagaatataaatga

SEQ ID NO: 2198 - DNA, 2811 bp, Homo sapiens
ggggctcggagacccagcacctgccccgggacccccagcacctgccctgggacccccagcagcaccaggaccgccgccgccctgagcttttccacgcctttgcccgggactcagctcctccgcccagcatggtcctggcggcagagaccacgtcccagcaggagcggctgcaggccatcgcagagaagcggaagcggcaggcggagatcgagaacaagcgccggcagctggaggacgagcggaggcagctgcagcacctgaagtccaaggcactgcgggagcgctggctgctggaggggacgccgtcctcggcctcagagggggatgaggacctgaggaggcagatgcaggacgacgagcagaagacacggctgctggaggactcggtgtccaggttggagaagggaattgaggtgctggagcgtggagactccgccccagccgctgccaaggagaacgcggcggccccgagcccagtccgggccccagccccgagtccagccaaggaggagcgcaagacagaggtggtgatgaattcacagcagacgccggtgggcacgcccaaagacaagcgagtctccaacacgcccctgaggacggttgacggctcccccatgatgaaggcagccatgtactcggttgagatcactgtggagaaggacaaggtgacaggggagaccagggtgctgtccagcaccacgctgctccctcggcagccgctccctctgggcatcaaagtctacgaggacgagaccaaagtggtccatgctgtggacggcaccgccgagaacgggatccaccccctgagctcctccgaggtggacgaactcatccacaaagcggacgaggtcacgctgagcgaggcagggtccacggccggggcggcagagacccggggggctgtggagggggcagcccggaccacgccctcccggcgggagatcaccggtgtgcaggcacagccaggcgaggccacgtccggcccgccggggatccagcccggccaggagcccccggtcacaatgatcttcatgggttaccagaacgtggaggatgaggccgagaccaagaaggtgctgggccttcaagataccatcacggcggagctggtggtcatcgaagacgcggctgagcccaaggagcctgcaccacccaacggcagtgctgccgagcctcccacggaggccgcctccagggaagagaatcaggcggggcccgaggccaccaccagcgacccccaggacctcgacatgaagaagcaccgttgtaaatgctgctccatcatgtgagccggcccccgagaccccggcccccaccccacaccacagacacccaccagcccggcccctcccggcgcctgcccaccctccacccacaggctcacgggtccaggacttggcgtgttgttacatgttccttccgagttttctttcgctggaaagagggacaggggcccccacccgtcaccacgccccaacactccccccgaaccagagccgtgcacttgtgcctggtaggagagagacaggacagacccgcttttcccgagacaaggaccccccatgtcacggcagcttcacagacgcggctcgcgcccaccggggtcctggcgggtgggacccgcggcctccacgcggcccaggccagcctgccaccctctgggcctcctacctgtgcctttctctgaggggacaccccgccagagagggccccgggagccgggggtgggtactgaggcctgctcaggccctggaagtgaggctctatggggttccctggccaaggcgctggccccccaatctcaggcagttggggtgaggccgtgcctctttgggggctaaaggtcttgggtggaggacaggcccctctgctgtgcccctatgccctgtgtgggcccaaccagtggacaatggagtctgggggagggggaaccccggggacatgcccccacccgggaggggccggtaacccctgggctatcttctagacggggcgaaccaggggtcattgacctgccccctgcacagggcagggaccgagtgagccactccttgtcccgagctcccgcccccactgggccctccttcctcctggtgctaatttggggaccccaggggccgcccccggcctcttctccatcctgcttggaccagggtcctgggtcttcccaaccataccccgagatcaggccccacctgccagctctactgggcttggagcacgtccgggcagtggagggagggacacagcctgggacaggaagcctcttgggttggagcaggagaccctcatttgccacccagaccaatgtgagcctgcccccagccccctctcattggaagtggcaaggggcttccctcctgggggcagctacactcgtccccagaggcacattcgtgcacattctcacagacaccgtctcacacgttggctttggacaaccaggccccaacttggtccctgccctagggacctccagcctggtgcccagtgctcaggccacctcctggtccagtcaccacctgcagcctcggcagggcaggtacaggggccacctcggatgggagcctgggtccctgcctccgctctgcccctgggtggctgggaggagaggccctctcgggggtgacctgggcgtcagccgtggaaccccctcctcctccctggagtctgcctgagtccctcgagccgcgagccttcgctgaagtgcccttgctataaccccctctgcttctggtgtgtgacgaggcccccgatgttcttgattttcccagagaagcaaataaacagcgtgaacagccccaaaaaaaa

SEQ ID NO: 2199 - DNA, 1931 bp, Homo sapiens
gaagtttgcaggagacccgcgctgcctaggcaaagggacccggcgaccaagacacccccgcaagggcccagggcgcgtccctcccgccaggccccagactccggctctgcgccaccccctcctacgccccggcgcgggcgcagccagtccggcttcctccaggcccccaagtcccggaccgagtgtggggccgcctctccctctcggaaggagccatcgccgctttaagtggaagaggagaggaagggggcgggggagcggggggcggggagcggaggcggaggagggggagggggatccccctggctcccacgtggtccgggcgcctgtgaatcgcgcccaccggagggtctcacagcgaaatacaaaagcagctgggaagcggcggggactcgagttcccagcgccgggcggagcgccggacagagccccgcagcgccccgcggccgcgatggggccgaagcgcccgaagccccggagcccacaaactgccgggcccgcctcgccgccgggacccgggtgcctgggctcggcttgaagcggcggcggcgcaccggcacagccgcgggagcatgggcaggaggatgcggggcgccgccgccaccgcggggctctggctgctggcgctgggctcgctgctggcgctgtggggagggctcctgccgccgcggaccgagctgcccgcctcccggccgcccgaagaccgactcccacggcgcccggcccggagcggcggccccgcgcccgcgcctcgcttccctctgcccccgcccctggcgtgggacgcccgcggcggctccctgaaaactttccgggcgctgctcaccctggcggccggcgcggacggcccgccccggcagtcccggagcgagcccaggtggcacgtgtcagccaggcagccccggccggaggagagcgccgcggtgcacgggggcgtcttctggagccgcggcctggaggagcaggtgcccccgggcttttcggaggcccaggcggcggcgtggctggaggcggctcgcggcgcccggatggtggccctggagcgcgggggttgcgggcgcagctccaaccgactggcccgttttgccgacggcacccgcgcctgcgtgcgctacggcatcaacccggagcagattcagggcgaggccctgtcttactatctggcgcgcctgctgggcctccagcgccacgtgccgccgctggcactggctcgggtggaggctcggggcgcgcagtgggcgcaggtgcaggaggagctgcgcgctgcgcactggaccgagggcagcgtggtgagcctgacacgctggctgcccaacctcacggacgtggtggtgcccgcgccctggcgctcggaggacggccgtttgcgccccctccgggatgccgggggtgagctggccaacctcagccaggcggagctggtggacctagtacaatggaccgacttaatccttttcgactacctgacggccaacttcgaccggctcgtaagcaacctcttcagcctgcagtgggacccgcgcgtcatgcagcgtgccaccagcaacctgcaccgcggtccgggcggggcgctggtctttctggacaatgaggcgggcttggtgcacggctaccgggtagcaggcatgtgggacaagtataacgagccgctgttgcagtcagtgtgcgtgttccgcgagcggaccgcgcggcgcgtcctggagctgcaccgcggacaggacgccgcggcccggctgctgcgcctctaccggcgccacgagcctcgcttccccgagctggccgcccttgcagacccccacgctcagctgctacagcgccgcctcgacttcctcgccaagcacattttgcactgtaaggccaagtacggccgccggtctggggacttagtgtcaccgggaggaaaagagagagatctggggctggggtatgga

SEQ ID NO: 2200 - DNA, 1544 bp, Homo sapiens
gggtcgacccacgcgtccgcggacgcgtgggcgcaatggttctgcactgaggccctcgtcatgggggcgcctgtgtggtacttggtagcggcggctctgctagtcggctttatcctcttcctgactcgcagccggggccgggcggcatcagccggccaagagccactgcacaatgaggagctggcaggagcaggccgggtggcccagcctgggcccctggagcctgaggagccgagagctggaggcaggcctcggcgccggagggacctgggcagccgcctacaggcccagcgtcgagcccagcgggtggcctgggcagaagcagatgagaacgaggaggaagctgtcatcctagcccaggaggaggaaggtgtcgagaagccagcggaaactcacctgtcggggaaaattggagctaagaaactgcggaagctggaggagaaacaagcgcgaaaggcccagcgtgaggcagaggaggctgaacgtgaggagcggaaacgactcgagtcccagcgcgaagctgagtggaagaaggaggaggagcggcttcgcctggaggaggagcagaaggaggaggaggagaggaaggcccgcgaggagcaggcccagcgggagcatgaggagtacctgaaactgaaggaggcctttgtggtggaggaggaaggcgtaggagagaccatgactgaggaacagtcccagagcttcctgacagagttcatcaactacatcaagcagtccaaggttgtgctcttggaagacctggcttcccaggtgggcctacgcactcaggacaccataaatcgcatccaggacctgctggctgaggggactataacaggtgtgattgacgaccggggcaagttcatctacataaccccagaggaactggccgccgtggccaacttcatccgacagcggggccgggtgtccatcgccgagcttgcccaagccagcaactccctcatcgcctggggccgggagtcccctgcccaagccccagcctgaccccagtccttccctcttggactcagagttggtgtggcctacctggctatacatcttcatccctccccaccatcctggggaagtgatggtgtggccaggcagttatagattaaaggcctgtgagtactgctgagcttggtgtggcttggtgtggcagaaggcctggcctaggatcctagataagcaggtgaaatttaggcttcagaatatatccgagaggtggggagggtcccttggaagctggtgaagtcctgttcttattatgaatccattcattcaagaaaatagcctgttgcacatttactctgtttctttgtgccctgcaagccctgcccccaagacctagataagatctttctcttcttttgcccccactcaaattagaagtggggagcctcttgggccacatctctgttaactggggaggggaggtctcatgggtctttttttaactgatcaggagccctaagtagggctgagagccagcggggagaagaattaatgagaagcatcaaggatagagtcctagggagctgtat

SEQ ID NO: 2201 - DNA, 7973 bp, Homo sapiens
gaggaggagctggagggggcgcggcttcctctcggtcgctccctggcgccgggcctctttctctgcctggcccagggctggcggccggcgggggtcgcggcggcggcagtgggggcgctggcgggccgcgggtggcgggggccgggccgcggctccgggtgttaggagacaagatggcggcggctctcagaaggccggtctcctcctctccgccgtcctccgccccgccgctcgccgcctcctcctctcgggtctcctcctcctcgtttgctgcctcctcctcctcctgcagcagcaccagcgaccgccgaagcgccggctcgctcacccggagctccggaggtggatagacggggcagctgcaggctccggcgaccgaggccgagctggggccggggcggggacggcggcggcggcggcggcgacggcggcggcgccgggtggggatggggtcgcagacgctgcagatcctccgacagggggtgtgggccgcgctcagcgggggctggtactacgacccgcaccaggccaccttcgtgaacgcgctgcacctctacctgtggctctttctgctgggcctgcccttcaccctctacatggcccttccttctaccatgattatagtagcagtttattgtcctgtgatagctgctgttttcattgttctgaagatggtcaactatcgactacacagagcacttgatgctggagaagttgtagataggactgcaaatgagttcacggatcagcgaaccaaagctgaacaaggcaactgttcaaccaggagaaaagacagcaatggaccgagtgatcctggtggagggattgaaatgtctgagttcatccgagaggccacacccccagttggttgcagttccagaaattcttatgccggtctagatccaagcaaccagattggatctggttcctcgcgtcttggaacagcagcaactattaaaggagatacagacactgctaagacttctgatgatatcagtttaagtctgggccaaagttctagtctttgtaaggaaggaagtgaagaacaagatttggcagctgatcggaagctctttcgtcttgtctccaatgactccttcatctctattcagccttccttatcctcttgtggacaggacttgccaagggacttcagtgacaaagtgaacctgccaagtcataaccaccaccaccatgttgatcagtctctgtccagcgcctgtgacacagaagtagcttctcttgtacctttacactcacactcttatagaaaagaccaccggccgcgaggtgtaccacggacttctagctctgctgtggcttttccagacacttcactgaatgattttcccctttatcagcaaagacgtggattagatccagttagtgagttagaatcttccaagcctctttctggatccaaagaatccttggtggaaaattctggtttatctggggaatttcagcttgctggtgacttgaaaatcaatacttctcagccacccacaaaaagtgggaagagcaaacctttgaaagcagagaaaagcatggacagcttgaggagcctgagcacacggagtagtgggtcaacagaaagctactgcagtggaacggaccgggacactaacagtactgtcagcagctataaaagtgagcagaccagctcaactcacatagagagcatcctgtcagagcatgaggagtctcctaaagcaggaacaaaaagtgggaggaagaaagagtgctgtgcaggcccagaggagaagaatagctgtgccagtgacaaaaggactagcagtgaaaagattgctatggaagcgagtaccaacagtggggttcacgaggccaaggaccccaccccctctgatgagatgcacaaccagagaggtctcagcacctctgcatctgaagaagccaataaaaatccccatgcaaatgaatttacttcccaaggggacagaccacctgggaacactgcagaaaacaaagaagagaagagtgataagtcagctgtttctgtggattccaaagtgcgtaaagatgttggtggaaagcaaaaggaaggggatgttcgacctaaatcttctagcgtaatccatcggacagcttctgcccacaagtcaggcaggagacgcacaggaaaaaaacgggctagcagttttgattcaagccggcatagggactatgtttgctttcgaggtgtttctggtaccaagccacacagtgctatattttgtcatgacgaagactctagtgatcagagtgacttgagtagagcatcaagtgttcagtctgctcaccagttcagcagtgatagctcttctagcaccacttctcattcctgtcagtctcctgagggcagatacagtgctctaaagaccaaacacactcataaagaaaggggcacagactctgaacacacacacaaagctcatttggttcctgaaggaaccagcaaaaagcgtgcaacacgacggacttctagcacaaatagtgccaagactcgtgcccgagtgttgagcctggacagtggcacagtagcatgtttgaatgactcaaacaggttaatggcacctgaaagtataaagcccttaaccacttcaaaatcagatcttgaggccaaagagggagaggtgctagatgagctatctttattaggacgggcttcccagttagagacagtcactcgatctaggaatagcttgccaaaccaggttgcatttcctgaaggggaagagcaagatgcagtcagtggagcagcacaagccagcgaggaggcagtgtcatttcgccgtgaacgcagcacatttaggcgccaggcagtacggcgccggcacaatgcagggagtaaccctacccctcctacattgctcatcggatcacccctaagccttcaagatggtcagcaaggccagcagtccacagcccaggtcaaagtccagtcccgccccccttcccaggctgcagtgctcagtgctagtgcctccttgctggtaagttctcttctacgctgtatgagactggtggctgtgatatgtcacttgtgaattttgaaccagcagcaagaagagcatccaatatctgtgacacagattctcatgtatccagttctacctcagttcgattttatccacatgatgtgctctctctcccacagattcgattgaatagactattgaccattgatacagatttgttggagcaacaggacattgatctaagccctgacttggcagctacttacggcccaacagaagaagctgcccaaaaggttaaacactattatcgcttttggatcctaccccagctgtggattggcattaactttgacagactcacacttttggccctgtttgatagaaatcgtgagatcctggaaaatgtgttagctgtcatcctggctattctcgtggcctttttgggatctattcttctcatacaaggattcttcagagatatctgggtcttccagttctgcctcgtcatagccagctgtcaatactcactgcttaagagtgttcaaccagattcttcttctcccagacatggtcataatcgtatcattgcctacagtagaccagtttatttctgcatatgttgcggtcttatttggctcttggattatggtagcagaaacctgactgcaaccaagttcaaattatatggaataactttcaccaatccactggtgtttatatcagccagggatttagttatagtgtttacactctgtttcccaatagtgtttttcattggtctcctgcctcaggtgaatacatttgtaatgtacctttgtgaacaattggatattcatatttttggtggtaatgccactacaagcctgcttgcagcactttacagttttatctgtagcattgttgcagtagccttattgtatggattatgttatggggctttaaaggattcttgggatggccagcatattccagtacttttctccattttttgtggtttattagtggcagtgtcttaccatctcagccgacaaagcagtgatccatctgtacttttctctttagtgcaatccaagatttttccaaaaacggaagagaaaaatccagaagaccctctatctgaagtaaaagatccactgcctgaaaaacttagaaattctgttagtgagcgattacagtctgacctggtagtatgcattgtaattggtgtgctgtattttgctattcatgtaagcacagtcttcacagtattgcagcctgccctcaagtatgtgttgtatacattggttggctttgtgggttttgtaacccattatgtgctgcctcaagttagaaaacagctaccatggcactgtttctctcatcctctgctaaagacactagagtataatcagtatgaagttcgaaatgcagccactatgatgtggtttgagaaacttcatgtgtggcttctttttgtggagaagaatataatctatccattgattgttctcaatgaactgagcagcagtgcagagacaattgctagtccaaagaaactgaatacagaattaggtgctttaatgatcactgttgctggtttgaagttgctacgatcctcttttagcagccctacatatcagtatgttacagtcatctttactgtgctgtttttcaaatttgactatgaagctttttcagagaccatgctgttggatctcttctttatgtccatactcttcaacaagctttgggaactactttataaattgcagtttgtgtatacctatattgccccatggcagatcacatggggttctgctttccatgcttttgctcagccttttgcagtgcctcattcagccatgctgtttattcaggctgctgtctcggccttcttctctactccactgaacccctttctgggaagtgcaatattcatcacttcatatgtccgacctgtgaaattctgggagagagactataacacaaaacgagtggatcattcaaataccagattggcttcccagcttgatagaaatccaggtacctactgtcaacaacgggaagtggaggccattactgaaggtgtagaggaagatgaaggattttgctgttgtgaacctggccatattcctcacatgctttcatttaatgctgcatttagccagcgatggctagcttgggaagtgatagtcacaaagtacattctggagggttatagcatcactgataacagtgctgcttctatgcttcaagtctttgatcttcggaaagtactcaccacttactatgtcaagggtatcatttattatgttacgacctcgtctaagctagaggagtggctagctaatgagacaatgcaggaaggacttcgtctgtgtgctgatcgcaattatgtcgatgtggacccgacctttaatccaaacattgatgaagactatgaccaccgactggcaggcatatctagggagagtttctgtgtgatttacctcaactggatagagtactgctcttcccgaagagcaaagcctgtggatgtggacaaagattcatccctagtgactctctgttatggactctgtgttctgggacggagagctttggggactgcatcccatcatatgtccagtaatttagagtcattcctctatggattgcatgccctatttaaaggagatttccgtatttcttcaattcgagatgaatggatctttgctgacatggaattgctaagaaaagtagtagtccctgggatccgtatgtccattaaacttcatcaggatcattttacttctccagatgaatatgatgaccctactgtgctctatgaagccatagtatctcatgagaagaacctcgtaatagcccatgaaggggaccctgcatggcggagtgcagtacttgccaactctccctccttgcttgctctgcggcatgtcatggatgatggcaccaatgaatataaaattatcatgctcaacagacgctacctgagcttcagggtcattaaagtgaataaggaatgtgtccgaggtctttgggcagggcaacagcaggagcttgtttttctacgtaaccgtaacccagagagaggtagcatccaaaatgcaaagcaagccctgagaaacatgataaactcatcttgtgatcaacctattggctacccaatctttgtctcacccctgacaacttcttactctgacagccacgaacagcttaaagacattcttgggggtcctatcagcttgggaaatatcaggaacttcatagtgtcaacctggcacaggcttaggaaaggttgcggagctggatgtaacagtggtggcaatattgaagattctgatactggaggtgggacttcctgcactggtaacaatgcaacaactgccaacaatccccacagcaacgtgacccagggaagcattggaaatcctgggcagggatcaggaactggactccacccacctgtcacatcttatcctccaacactaggcactagccacagctctcactctgtgcagtcgggcctggtcagacagtctcctgcccgggcctcagtagccagccagtcttcctactgctatagcagccggcattcatccctccggatgtccaccactgggtttgtgccttgtcggcgctcttctactagtcagatatcgcttcgaaacttgccatcatccatccaatcccgactgtcgatggtgaaccaaatggaaccctcaggtcagagcggcctggcctgtgtgcagcacggcctgccttcctccagcagctccagccaaagcatcccagcctgcaaacatcacactctcgtgggctttcttgcgacagagggaggtcagagcagtgccactgatgcacagccaggcaacaccttaagtcctgccaacaattcacactccagaaaggcagaagtgatttacagagtccaaattgtggatcccagtcaaattctggaagggatcaacctgtctaaaaggaaagagctacagtggcctgatgaaggaatccggttaaaagctgggagaaatagctggaaagactggagtccgcaggagggcatggaaggccatgtgattcaccgatgggtgccttgcagcagagatccaggtaccagatcccacatcgacaaggcagtgcttctggtccagattgatgataaatatgtgactgtaattgaaactggggtactagaacttggggctgaagtgtgagccagtgtttattataaagacatttctttttccctctcaattccaaggcattggaaaaagagaggaacaagcagaagatgcctgcaggtatcactttgatcctatgtgggagcgactgaaaatagaatgagcttggttaagcacctctcctttgcccttcaccctgactcctgtcactgtctccatccccaaataaagctgaaatatttttttaagttagctgccgagaaaacattttgcatgaaggataaagttctgttaaaatacatccttaaaaaaagtttttcctatgcattgcctatgctttaaatcaacaaactcttcatttctaaactatgatctcatatttttctaatttctttgccaaaaataattgccatgttttgtcatagaacatgaaattcatttaccttgatttttaagaacagaccagtgtagaaatgttccttttgacttatagcagtataaaagtttaatgtacagtgaaagagactatgaacagacatagatttatcttattccttgagcgctaaaaactttaataaaaaaaactgcactaattttttacagcaatgcactaaagtctgagatttctcagaacatttatttatatataaaaataaaataccattatttaaattgcctttgggattagccccttccctttccttataaacacaggtagcaggaactgtgctgctcatttttctgttagtagtgtgtacttcatgccaggacattgggtattttctttaaagtgaatatagaatctcaagatatacgtagcttcatcattgac

SEQ ID NO: 2202 - DNA, 804 bp, Homo sapiens
cttcgttatccgcgatgcgtttcctggcagctacattcctgctcctggcgctcagcaccgctgcccaggccgaaccggtgcagttcaaggactgcggttctgtggatggagttataaaggaagtgaatgtgagcccatgccccacccaaccctgccagctgagcaaaggacagtcttacagcgtcaatgtcaccttcaccagcaatattcagtctaaaagcagcaaggccgtggtgcatggcatcctgatgggcgtcccagttccctttcccattcctgagcctgatggttgtaagagtggaattaactgccctatccaaaaagacaagacctatagctacctgaataaactaccagtgaaaagcgaatatccctctataaaactggtggtggagtggcaacttcaggatgacaaaaaccaaagtctcttctgctgggaaatcccagtacagatcgtttctcatctctaagtgcctcattgagttcggtgcatctggccaatgagtctgctgagactcttgacagcacctccagctctgctgcttcaacaacagtgacttgctctccaatggtatccagtgattcgttgaagaggaggtgctctgtagcagaaactgagctccgggtggctggttctcagtggttgtctcatgtctctttttctgtcttaggtggtttcattaaatgcagcacttgggttagcagatgtttaattttttttttaacaacattaacttgtggcctctttctacacctggaaatttactcttgaataaataaaaactcgtttgtcttgtcaaaaaa

SEQ ID NO: 2203 - DNA, 804 bp, Homo sapiens; identical to SEQ ID NO: 2202

SEQ ID NO: 2204 - DNA, 4874 bp, Homo sapiens
cccacgcgtccgcaccaagttaatactgctagttaatgacaagaaaagatatgagcgggttggtggcggccccaagcggctgggacgagatgtggaaatggaagaaatgattgagcagctgcaagagaaagttcatgagcttgaaaaacaaaatgacaccctcaaaaacagactgatttcagccaaacagcaacttcaaacccagggttacaggcaaactccatacaataatgtacaatctcgtattaacactgggcgtagaaaagcaaatgaaaatgctggtttacaggaatgccccaggaaaggtataaaattccaagatgcagatgtagcagaaactccacatcccatgtttacaaaatatggcaacagtttacttgaagaagccagaggagaaataagaaatttagaaaacgttattcagtcacaaagaggccagatagaggagttagagcacttggctgagatcctgaaaactcagttgaggagaaaagaaaatgaaattgagttatctcttcttcagcttcgagaacagcaagctacagatcaaaggtcaaatattcgggacaatgtagaaatgattaagcttcataaacagctagtagagaaaagcaatgctctttcagcaatggaaggaaaatttattcagcttcaagagaagcaaagaactctcaaaatcagccacgatgctttgatggcaaatggggatgaattaaacatgcaacttaaagagcagcgtttaaaatgctgcagtcttgagaaacaattacattctatgaagttttctgaaagaagaatagaagagctgcaggatagaattaatgatttagaaaaggaacgggaacttttaaaggaaaactatgataaactttatgacagtgccttcagtgctgcccatgaagagcaatggaagttaaaggagcaacagctgaaagtgcagattgctcagctcgagactgccttgaagtctgacttaacagacaaaactgaaatccttgacagattaaaaactgaaagagatcaaaatgaaaaactcgttcaagagaatagagaactacagttacagtatctggaacaaaagcaacaacttgatgaacttaaaaaacgcataaaattgtacaaccaggagaatgatattaatgctgatgaattgagtgaagctctcctacttataaaggctcaaaaagaacaaaaaaatggagacctttcctttttagtgaaagtagatagtgaaattaataaagatctagaacgctctatgagagagctgcaagcaactcatgcagaaacggtgcaagagctggaaaagacaagaaacatgctaattatgcaacacaaaattaataaagattatcagatggaggttgaggcagtgacccgtaagatggaaaatttgcagcaagattatgaactcaaagtggaacagtatgttcatcttcttgatatcagggctgcacgtatccataaactagaagcccaattaaaggatattgcctatggcaccaagcagtacaaatttaaaccagaaatcatgccagatgactctgttgatgaatttgatgaaaccatccacttagaacgaggcgaaaatctatttgaaatccatatcaacaaagtaaccttttcttctgaagttttacaggcatctggagataaagagcctgtcactttctgtacctatgctttctatgattttgaactacagacaactcccgtagtgcgaggccttcatcccgaatataacttcacttctcaatatcttgttcatgttaatgacttatttttgcaatatattcagaagaatactatcacccttgaggtccaccaggcttatagcacagaatatgaaacaattgcagcatgtcaattaaaatttcacgaaattcttgaaaaaagcggccgaatattttgtacagcaagtttgattggaacaaaaggagacatcccaaattttggcacagtggaatactggttccgattaagagttcccatggatcaagcaattcgactttatcgagaaagggcaaaggctttggggtatataacatcaaattttaaggggccagagcatatgcagtcgttaagtcagcaagcacccaaaactgctcaactcagttctacagattccacagatggcaacttaaatgaacttcacattacaataagatgttgcaaccacctgcagtcccgagcaagccacctgcagccacacccatatgttgtgtacaagttttttgattttgcagaccatgatacagctatcattcccagtagcaatgatccacagtttgatgatcatatgtatttcccagtgccaatgaatatggacttggatcgataccttaagtcagagtctctgagtttttatgtttttgatgatagtgatacccaggagaatatttacataggaaaagtcaatgtgcctctgatttcgttggcacatgacaggtgtatctcaggaatatttgagttaacagaccatcaaaagcatcctgctggcaccatccatgttatattgaaatggaaatttgcttaccttccaccaagtggatcaataacaactgaagacttaggaaatttcattcgcagcgaagagccagaagttgttcaaagacttcctccagcatcctctgttagcacactagttttagcaccaagacctaaaccaagacaacgtttaacacctgtagataagaaggtatctttcgtggatatcatgccacatcagagtgatgtttcacaagaaggcagtgtagatgaggtaaaagagaatactgagaaaatgcagcaaggaaaagatgatgtgtctttactatctgaaggtcagcttgcagaacaaagcttggcatcttctgaagatgaaacagaaataacagaggacttggaaccagaagttgaagaggacatgtcagcttctgacagtgatgactgtattattccaggtcctatctccaagaatatcaaacagccatcagaaaaaattcggattgagatcatagctctaagccttaatgattctcaagtaaccatggatgacactatccaacggctgtttgttgagtgtcgattctacagtcttcctgctgaagagacacccgtgtcacttccaaaacccaagagtgggcagtgggtctactataactatagcaatgtgatctacgtggataaagaaaacaacaaagcaaagagagacatcttaaaagctatactacaaaaacaagagatgcctaatagaagccttcgcttcaccgtggtcagtgaccctccagaggacgagcaggacctggagtgtgaggacattggcgtggctcacgtcgaccttgccgacatgtttcaggaagggagggacctcattgagcaaaatatcgatgtttttgatgcacgagcagatggtgaaggtattggcaagctcagggtaacagtcgaagctctccatgccctccagtctgtctacaagcaatacagagatgacttggaggcttgaaagcaaatgctccagaggcatctcctactcctcagtaaatgctcacatgaaagtacctacatgagattttggtaattactctggtgtatataatctataattcatgggaagctgggagcggggagacctgggtttgaagtgttgaagttttgtatactttttcatttgtttatttctctattccctccttctcataactgccacccctcaggacttaagttctccataatgggcagtaccttctcaataatttatacctacgtgatagcgtgagaaagtctatttgcattttcaacattttcttaggaagaaccgaaatgcaattcccatttttatttttaataagcaaaagcataaatcttagaaaacctatgaaaaagaaatacttttatgttatccctaatcgtcccactaaatggaatgcctatgcattagmcttcattaagagttttatactgtgaagattttattagaagcaatatatgaaaattacttggattaatgggttaatcttcctctttaaaatgctaatatccattttatgcacattaaagctcagtatgcattttctttgatgcatgcagtttctatcaattaaatataaagaatgaaacttagcaccaacttattcaatgactgcaagttttttgtctttctttcttaaaagttcattctatttgtattattttcatacatttgtaatggggacccagggatgtatatataaaaaggagatagttatatagatagatgtgaaatttacacgttgaaaacttagtatatgacacagaaagaaattatgaaaagtataactcaaattctgatatgcttagttagacgtgaaaggagtatctttttatcattttttaaatttacatcaagccagtacagtgccagggtgtatctgggtaaccagatcctcgaaaagcagctctgaaagttaattttctagcttttacccaatctcactgaaggatttaattgatatttttaatggagctgtgaatcaatgctgcaaaggaattgtctctagaggtctaggatataatgcatttcattttttaatttacttttttatttgtcattttcttcaaaggatttttataggctgtgggttttcactgtttgcaaacaggctatgttccttcttaagcatatgtaaagtattcagggagataagtaatttattaaaatctacctaatttgccgtgatatattaaatctctgcttcagtgatcacagaccatttcatttagagaattaggcattccctctttgtgtgattaaagctctggaaaatgagttctttgctcctatttgtgaacattcaaagcctgctaatggcaagaagatggaatagattatgagacaattcattacagttcaatag

SEQ ID NO: 2205 - DNA, 1381 bp, Homo sapiens
actcgagatcctctgtcagcgtggtggaattccagcaacatagtgtggggaattttctactctgggccatttgctgagagggctcctgggcctaagctgctaccacctcctttatctctccctgtcgggtgactctataaaaagacaggagaagctgaggctcattcactcactttgtccacttcattcccaagagaagtgtcggggggacctgccaggcttaggggaagctctgagctgagccccttgtgcaaagaggcgagccacccagaggcagctgttcccttctaggcctggaagtgcacatgctcatctacagctttcttggaagaagaaagaaacaaaaactgagatttagaacaccaggtctgtttccactggcggccactcttgggcactggagaccagcaagagctttgtttttaaaaggctcttccatggcagatattcgcagaggcatcagggctacacttaaatgaagggctccggctggcacctgaggagcggcatggtgggcacgttgatcaccaccatcctgccgcactggcggaggacagcgcacgtgggcaccaacatcctcacggccgtgtcctacctgaaagggctctggatggagtgtgtgtggcacagcacaggcatctaccagtgccagatctaccgatccctgctggcgctgccccaagacctccaggctgcccgcgccctcatgggcatctcctgcctgctctcgggcatagcctgcgcctgcgccgtcatcgggatgaagtgcacgcgctgcgccaagggcacacccgccaagaccacctttgccatcctcggcggcaccctcttcatcctggccggcctcctgtgcatgggggccgtctcctggaccaccaacgacgtggtgcagaacttctacaacccgctgctgcccagcggcatgaagtttgagattggccaggccctgtacctgggcttcatctcctcgtccctctcgctcattggtggcaccctgctttgcctgtcctgccaggacgaggcaccctacaggccctaccaggccccgcccagggccaccacgaccactgcaaacaccgcacctgcctaccagccaccagctgcctacaaagacaatcgggccccctcagtgacctcggccacgcacagcgggtacaggctgaacgactacgtgtgagtccccacagcctgcttctcccctgggctgctgtgggctggttcccggcgggactgtcaatggaggcaggggttccagcacaaagtttacttctgggcaatttttgtatccaaggaaataatgtgaatgcgaggaaatgtctttagagcacagggacagagggggaaataagaggaggagaaagctctctataccaaagactga

SEQ ID NO: 2206 - DNA, 2637 bp, Homo sapiens
tttcgtctctcgtccataaaaggggggaagaggcaccagaactgccatttgaaggggctttggtggtgttcacagctgcctctttggcacctcctcccaagccggagtcaaggaggcccctgagccttggaccagccactgccacctccgacctgctcggccagaagctgcccagggacaaagcagagtgcaggtcatttatcttcaggctttgagatctgcgtggggggagctgttgcagcagcccaagccgcaggaattgctgagacaggatggcctggcaggggctggtcctggctgcctgcctcctcatgttcccctccaccacagcggactgcctgtcgcggtgctccttgtgtgctgtaaagacccaggatggtcccaaacctatcaatcccctgatttgctccctgcaatgccaggctgccctgctgccctctgaggaatgggagagatgccagagctttctgtcttttttcaccccctccacccttgggctcaatgacaaggaggacttggggagcaagtcggttggggaagggccctacagtgagctggccaagctctctgggtcattcctgaaggagctggagaaaagcaagtttctcccaagtatctcaacaaaggagaacactctgagcaagagcctggaggagaagctcaggggtctctctgacgggtttagggagggagcagagtctgagctgatgagggatgcccagctgaacgatggtgccatggagactggcacactctatctcgctgaggaggaccccaaggagcaggtcaaacgctatgggggctttttgcgcaaataccccaagaggagctcagaggtggctggggagggggacggggatagcatgggccatgaggacctgtacaaacgctatgggggcttcttgcggcgcattcgtcccaagctcaagtgggacaaccagaagcgctatggcggttttctccggcgccagttcaaggtggtgactcggtctcaggaagatccgaatgcttactctggagagctttttgatgcataagcacctcttttcatggagtagagtcaggagaaacccctgacaccttttcaggttggagtgcattcattcatcctcttatatgtgccccttccccatgctcagctcagcattgtgtacaaaatatccaagcccagcctatctctcttctgcgtgggagtatgttatttctctggggtctgtgatggggaagggtggatgtcccttccccacaataggcttagtgcttggctcagacacctagactctaaaactatcagcagcggcagcagcagcagcagcagcagtttgtgatctgtccttccaacctgttcacgtgactcctcaattccagggaaccagagcgatgtgttctttgtacctgtaggtctatgatgtccaaacttaacagatcacatgcccctcttagaagaaatatgagcatgctccctcatgcagatagtatacacatcataaacaaagagtagaactttaaaagaaggtaaataatcatacacagaaatcctaacattatattcccaaatctcaaaagatctcctgtgcacctgactttggagacgatgctttaggtaaaaagcttaaacattgccttatattggatcaggaacccttacagtagagggtccagtcttctagtgggtttaatgtttagtcagtgtactctgagtcctcattgttcagaaaagcacctcttgaagaactgacttcctgaactcccagtcatgttggtaccctggacagtggcctaaacttcctttacaggaggggagttgaaaaaccttttttcgggaaatgatttgaggagcaggcctcttgaatggcttaaatgatcaaggagggagaaaggcaaaccaatttgttctgtgcaacaaactcaaaatgtggaccagttccctcagccctcattaaactaattaaactgatgggtatcatgcttctactccatggtgaactgaagcagagtcaagctgatgaagttaagcacaaccatgttcttgagcagctgaattggctgccaagagtccaagccatctggcccaacatacgcactgggcattgggtaagggactccagaagcagcagctagaaagagaaaaagccctcttcaatccccataatgcttctttcctcttaatgtctcaaaataaaacccagaaaaggggaataaaaggattaaagtgccttgaggcccaaatgagttccccttgaaatcaaaataacccctgaaatccagaggcagagacctccctgatgtccttggtttcccatcaaagtccctccctgtctgtctgtctctcttttgctctctcattccccaggcactctcttttgggtttgtgggtcccaggagatgaggctggataggagaggaaaaggcttgagtcctggataatttgtataagatgcctgctgagcacatctcttcatgcgcagtccccaggtatctgatgatgttctgaaatggatagattgttttagagttattttgtgtcctttaaaaaaatcccatttatgcaatttacttggaatttgcttagcctttaataggcttgtgtaatttcctgctcctccagtacaataaataaaagaaagatgctgatga

SEQ ID NO: 2207 - DNA, 624 bp, Homo sapiens
accgccgctgccggcgcctctgctgtaggggaccagcgcgggtgcgcagacgaaaggcgctctttgccagctgaaagttcccacggaaaaactaccatctcccctgcccaccatggcagacgaaattgatttcactactggagatgccggggcttccagcacttaccctatgcagtgctcggccttgcgcaaaaacggcttcgtggtgctcaaaggacgaccatgcaaaatagtggagatgtcaacttccaaaactggaaagcatggtcatgccaaggttcaccttgttggaattgatattttcacgggcaaaaaatatgaagatatttgtccttctactcacaacatggatgttccaaatattaagagaaatgattatcaactgatatgcattcaagatggttacctttccctgctgacagaaactggtgaagttcgtgaggatcttaaactgccagaaggtgaactaggcaaagaaatagagggaaaatacaatgcaggtgaagatgtacaggtgtctgtcatgtgtgcaatgagtgaagaatatgctgtagccataaaaccctgcaaataaacggaaacatcaggcatgaacactgtttatgtctgaatcaactgcaaaaa

SEQ ID NO: 2208 - DNA, 1911 bp, Homo sapiens
  misc_feature (1)...(1911): n = a,t,c or g
tttcgtccaggcggctggcggaggaggagagacggaggaggccgagaccggagcgccgctcgccgcagacttacttccccggctcagcagggaaaggttcctagaaggtgagcgcggacggtatgcaaagttgtgaatccagtggtgacagtgcggatgaccctctcagtcgcggcctacggagaaggggacagcctcgtgtggtggtgatcggcgccggcttggctggcctggctgcagccaaagcacttcttgagcagggtttcacggatgtcactgtgcttgaggcttccagccacatcggaggccgtgtgcagagtgtgaaacttggacacgccacctttgagctgggagccacctggatccatggctcccatgggaaccctatctatcatctaacagaagccaacggcctcctggaagagacaaccgatggggaacgcagcgtgggccgcatcagcctctattccaagaatggcgtggcctgctaccttaccaaccacggccgcaggatccccaaggacgtggttgaggaattcagcgatttatacaacgaggtctataacttgacccaggagttcttccggcacgataaaccagtcaatgctgaaagtcaaaatagcgtgggggtgttcacccgagaggaggtgcgtaaccgcatcaggaatgaccctgacgacccagaggctaccaagcgcctgaagctcgccatgatccagcagtacctgaaggtggagagctgtgagagcagctcacacagcatggacgaggtgtccctgagcgccttcggggagtggaccgagatccccggcgctcaccacatcatcccctcgggcttcatgcgggttgtggagctgctggcggagggcatccctgcccacgtcatccagctagggaaacctgtccgctgcattcactgggaccaggcctcagcccgccccagaggccctgagattgagccccggggtgagggcgaccacaatcacgacactggggagggtggccagggtggagaggagccccgggggggcaggtgggatgaggatgagcagtggtcggtggtggtggagtgcgaggactgtgagctgatcccggcggaccatgtgattgtgaccgtgtcgctaggtgtgctaaagaggcagtacaccagtttcttccggccaggcctgcccacagagaaggtggctgccatccaccgcctgggcattggcaccaccgacaagatctttctggaattcgaggagcccttctggggccctgagtgcaacagcctacagtttgtgtgggaggacgaagcagagagccacaccctcacctacccacctgagctctggtaccgcaagatctgcggctttgatgtcctctacccgcctgagcgctacggccatgtgctgagcggctggatctgcggggaggaggccctcgtcatggagaagtgtgatgacgaggcagtggccgagatctgcacggagatgctgcgtcagttcacagggaaccccaacattccaaaacctcggcgaatcttgcgctcggcctggggcagcaacccttacttccgcggctcctattcatacacgcaggtgggctccagcggggcggatgtggagaagctggccaagcccctgccgtacacggagagctcaaagacagcgacaaaatagaagccacctggaggcaacttcctcacccatcgacaagctcaccagccttcatgcctgtcctttggagcttccctgcagacagaggcagctagttctcaatttggtgtggtgtcctagccccacctgtggagtcaagtcccacctcctacctcaatcagaacctgagtttttttccaacacgagctccaggaaacaacttttggcttcatgatcctctcttttattctggctgttggccacttgangtata

SEQ ID NO: 2209 - DNA, 1976 bp, Homo sapiens
cagcttggtacgaggcgctgcctgcgtggggacaaggttaccaacgccatgcaggactttttggtcaccaacctggagccacgcttcattgaaccccagacagccaatctgtcagtggtgttcaaagactccaactccaccacacccctcatctttgtgctgtcacccggcacagaccctgctgccgacctctacaagtttgccgaagaaatgaagttctccaaaaagctctctgccatctccctgggccaggggcagggccctcgggcagaagccatgatgcgcagctccatagagaggggcaaatgggtcttcttccagaactgccacctggcaccaagctggatgccagccctagaacgcctcatcgagcacatcaaccccgacaaggtacacagggacttccgcctctggctcaccagcctgcccagcaacaagttcccagtgtccatcctgcagaacggctccaagatgaccattgagccgccacgcggtgtcagggccaacctgctgaagtcctatagtagccttggtgaagacttcctcaactcctgccacaaggtgatggagttcaagtctctgctgctgtctctgtgcttgttccatgggaacgccctggagcgccgtaagtttgggcccctgggcttcaacatcccctatgagttcacggatggagatctgcgcatctgcatcagccagctcaagatgttcctggacgaatatgatgacatcccctacaaggtcctcaagtacacggcaggggagatcaattacgggggccgtgtcactgatgactgggaccggcgctgcatcatgaacatcttggaggacttctacaaccctgacgtgctctcccctgagcacagctacagcgcctcgggcatctaccaccagatcccgcctacctacgacctccacggctacctctcctacatcaagagcctcccactcaatgatatgcctgagatctttggcctgcatgacaatgccaacatcacctttgcccagaacgagacgttcgccctcctgggcaccatcatccagctgcaacccaaatcatcttctgcaggcagccagggccgggaggagatagtggaggacgtcacccaaaacattctgctcaaggtgcctgagcctatcaacttgcaatgggtgatggccaagtacccagtgctgtatgaggaatcaatgaacacagtactagtacaagaggtcattaggtacaatcggctgctgcaggtgatcacacagacactgcaagacctactcaaggcactcaaggggctggtagtgatgtcctctcagctggagctgatggctgccagcctgtacaacaatactgtgcctgagctctggagtgccaaggcctacccatcgctcaagcctctgtcatcatgggtcatggacctgctgcaacgcctggactttctgcaggcctggatccaagatggcatcccagctgtcttctggatcagtggattcttcttcccccaggctttcttaacaggcactctgcagaattttgcccgcaaatttgtcatctccattgacaccatctcctttgatttcaaggtgatgtttgaggcaccatcagagttaacacaaagaccccaagtagggtgctatatccatggattattcctggaaggtgcccgctgggatccagaggccttccagctggctgagtctcagcccaaggagctgtacacagagatggccgttatctggctcttgccaacacccaaccgcaaggcccaggaccaggacttttacctgtgccccatctacaagacactgactcgtgctggaacactatcaaccacaggacactctaccaactatgtcattgctgtggagatccccacccatcagccccagcgacactggataaagcgtggtgtggccctcatctgtgccctggactactagactcagacagaagggctggggccattaaagctgaattttctaagcaa

SEQ ID NO: 2210 - DNA, 1023 bp, Homo sapiens
gatggctggacaccagttcacgcagctgtggacactggtaatgtggacagcctcaagcttcttatgtaccatagaataccagctcatggaaattctttcaatgaggaggagtccgagtcaagtgtctttgacttggatggaggagaagagagtcctgaaggcatatccaagcctgttgttcctgcagacctcattaaccacgccaacagagaaggctggactgctgcccacattgctgcttccaaaggttttaagaactgcctagaaatcttgtgtaggcacggagggcttgagccagaaaggagagacaagtgcaatcggactgtgcatgatgttgccactgatgactgcaagcatttgctggagaatctgaatgctcttaaaatacccttaaggatttcagtgggtgagattgaaccaagcaactatggttctgatgacttggaatgtgaaaacacaatatgtgctttaaatatccgcaaacagacatcatgggatgatttttcaaaagcagtgagtcaagctctgacaaatcatttccaggcaatctcttctgatggatggtggagtctggaagacgtgacttgcaataacaccactgattccaacatcggcctcagtgcaagaagcatacgatccatcacgctaggaaatgtgccgtggtcagtgggtcagagcttcgcgcagtccccgtgggactttatgaggaagaataaggcagagcacatcactgtgcttttgtcaggtcctcaagaaggctgtctcagtagtgtgacttatgcctccatgatccctctccagatgatgcagaactacctcaggctggttgagcaatatcataatgtcattttccacggcccagaaggaagcttgcaagactacatagtacatcagcttgcactctgcctgaagcacagacaaatgggctggcaggattctcctgtggaaatagttgaggagcttgaagtaggatgctggttttttccaagggaacagctacttaggacctgttcattagtagcg

SEQ ID NO: 2211 - DNA, 1812 bp, Homo sapiens
atggcagcctcggcgcaggtgtctgtgacctttgaggatgtggctgtgacattcacccaggaggagtggggacagttggatgcagcccagagaaccttgtatcaggaggtgatgctggagacctgcggacttctcatgtctctgggctgtcctttgttcaaaccagagctgatctaccagttggatcacagacaggagctatggatggctacaaaagacctctcccaaagctcctatccaggtgacaacacaaaacccaagaccacagagcctaccttttctcacctggccttgcctgaggaagtcttactccaggaacaactgacacaaggagcctcaaagaactcccaattagggcaatccaaggatcaggatgggccatctgaaatgcaagaagtccacttgaaaatagggataggcccccagcgggggaagctgctggagaaaatgagttctgaacgtgatggtttggggtcagatgatggtgtatgtacaaagattacacagaaacaagtttcaacagaaggtgatctctatgaatgtgattcacatggaccagttacagatgccttgattcgcgaagagaaaaattcctataaatgtgaggaatgcgggaaagtgtttaaaaagaatgccctccttgttcagcatgaacggattcacactcaagtgaagccctatgaatgcacagagtgtgggaaaacctttagcaagagcactcatcttcttcagcacctcatcatccacactggggagaagccctataagtgcatggagtgtgggaaggcttttaaccgcaggtcacacctcacacggcaccagcggattcacagtggagagaagccttataagtgcagtgaatgtggaaaggccttcacccaccgctccacttttgtcttgcatcacaggagccacactggagaaaaaccctttgtgtgcaaagagtgtggcaaagcctttcgagataggccaggtttcattcgacactacatcatccacacgggagagaagccctatgagtgcattgagtgtattgagtgtgggaaggccttcaaccgccggtcatacctcacgtggcaccaacagattcacactggagtgaaaccctttgaatgcaacgagtgtggaaaagctttttgcgagagtgcagacctcattcaacactacattatccacactggggagaagccctataagtgcatggagtgtgggaaggcgttcaaccgtaggtcacacctcaagcagcatcaacggattcacactggggagaagccttatgaatgcagtgaatgtggaaaggccttcacccactgctccacttttgtcttgcataaaaggacccacacaggagaaaaaccctatgaatgcaaagaatgtggaaaagcctttagtgatagggcagacctcattcgccacttcagcatccacactggagagaaaccctatgagtgcgtggagtgtggaaaggccttcaaccgcagctcacacctcacgaggcaccaacagattcacactggagagaaaccctatgaatgcatccagtgtgggaaagccttttgccggagcgcaaaccttattcgacactccatcattcacactggagagaagccgtatgaatgcagtgagtgtggaaaggcttttaatcgcggctcatccctcacacatcatcaaaggattcatactgggagaaaccctaccattgtaacagatgtgggaagaccttttatgactgcacagacttcagtcaacatccaggaacttttattagggaaagagtttttgaatatcaccactgaagaaaatctgtggtga

SEQ ID NO: 2212 - DNA, 1398 bp, Homo sapiens
tttttcactttacaagaagttcactcttattcatggaggcatcatgctgacaggactggatccaaggaaaatgctagtgactttcccaacttcattccccaatcaaagaggacagtttctggtttgccactggtgagtttattacacgactaaagttcaaataaaaaaataaaaaccaaaatcttggcagggaagctagagccagaatcaggaaaatctgcttccttgtccccagactccctggccaagcccagctccactaactcatcttgactcgatcaagttcctcatcaagacttgcatctgtaccctggacatctctgctgctcccactggagagtgagtctggagtccctggcactggggctttggtgagggctccatatacacccatggcctgagccaccatgctggtgacatcgccagggttggagggcagtaggatagtgttggagtccttggccagtttggagaacgcgctgacatactgctcggccacagtcagtgaagctgctgcatctccattatgttgtgtcagagctgcagccaggattcgaatagcttcagctttagccttggccttcgccagaactgcactggcctctcctgctgcctgatttatctgttcagccttttctgcttcggaggccaggatctgggcctgtttcttcccttctgccacattgatggccgactctcgggtcccctcagactctagaactgtggcccgtttccgccgctctgcctccacctgcatctgcatagactctttcacccggggtggcacatggatatccttgatctcataacggaggcagcggataccccagcagtcagcagcttggttgatggcatccacaatgctggcattcagggactcccgttcccggaagactttgtccagagagagtttgccgagctctgatctcatggttgtttgagctagctgggtgacggcatactcagggtcctccacaccgtagcttgccttgtaagggtccatgatgcgcaggtaaaggactccatcgatttgcagagttacattgtcgagagtcacagccgactgctcaggcacgttgatgacaatttccttgagactctgcacatatcggatccggtctaacacagggatgaggatgttcaaaccaggctccaggatccggtggaatcggcccattcgctccaccacccaggcctcctgctgcggcacgaacagtaccacggtgtttcggggcaatccagaggaggcgcggcgcggagcgcggccagaagccagtagagagcccctcagcaaaagggccccagtgccccgcgccgcgcgcgccagcatttcccaccgccgcagcgacctccggaaccaacgagacgagcggagcggtcgctcccagaagcctaccc

SEQ ID NO: 2213 - DNA, 3632 bp, Homo sapiens
tttcgtgctcttaatgtgtagattacaacaaattcgctgcatccacaccgacctgacacgcttgactctgggagtgcgctgctgcagctgcaggacagcgggacgggggagtcactttgttcctgaaggggcgagtcctcggcagacgctgcgccgcctccctctttgctagggaggtctgtgtttctacctcctcttcacgccccgcttgcttcctgcactgtgcccgcgctcgtggggagcagatgcaccagatggcgtccggggtggggtcaatgaagcgcagcccgaggaagatgtggcgccctggagaaaagaaggagccccagggcgttgtctatgaggatgtgcgggacgacacggaggatttcaaggaaccgcttaaggtggtttttgaaggaagtgcatatggattacaaaactttaataagcaaaagaaattaaaaacatgtgacgatatggacaccttcttcttgcattatgctgcagcagaaggccaaattgagctaatggagaagatcaccagagattcctctttggaagtgctgcatgaaatggatgattatggaaatacccctctgcattgtgctgtagaaaaaaaccaaattgaaagcgttaagtttcttctcagcagaggagcaaacccaaacctccgaaacttcaacatgatggctcctctccacatagctgtgcagggcatgaataatgaggtgatgaaggtcttgcttgagcatagaactattgatgttaatttggaaggagaaaatggaaacacagctgtgatcattgcgtgcaccacaaataatagcgaagcattgcagattttgcttaacaaaggagctaagccatgtaaatcaaataaatggggatgtttccctattcaccaagctgcattttcaggttccaaagaatgcatggaaataatactaaggtttggtgaagagcatgggtacagtagacagttgcacattaactttatgaataatgggaaagccacccctctccacctggctgtgcaaaatggtgacttggaaatgatcaaaatgtgcctggacaatggtgcacaaatagacccagtggagaagggaaggtgcacagccattcattttgctgccacccagggagccactgagattgttaaactgatgatatcgtcctattctggtagcgtggatattgttaacacaaccgatggatgtcatgagaccatgcttcacagagcttcattgtttgatcaccatgagctagcagactatttaatttcagtgggagcagatattaataagatcgattctgaaggacgctctccacttatattagcaactgcttctgcatcttggaatattgtaaatttgctactctctaaaggtgcccaagtagacataaaagataattttggacgtaattttctgcatttaactgtacagcaaccttatggattaaaaaatctgcgacctgaatttatgcagatgcaacagatcaaagagctggtaatggatgaagacaacgatgggtgtactcctctacattatgcatgtagacaggggggccctggttctgtaaataacctacttggctttaatgtgtccattcattccaaaagcaaagataagaaatcacctctgcattttgcagccagttatgggcgtatcaatacctgtcagaggctcctacaagacataagtgatacgaggcttctgaatgaaggtgaccttcatggaatgactcctctccatctggcagcaaagaatggacatgataaagtagttcagcttcttctgaaaaaaggtgcattgtttctcagtgaccacaatggctggacagctttgcatcatgcgtccatgggcgggtacactcagaccatgaaggtcattcttgatactaatttgaagtgcacagatcgcttggatgaagacgggaacactgcacttcactttgctgcaagggaaggccacgccaaagccgttgcgcttcttctgagccacaatgctgacatagtcctgaacaagcagcaggcctcctttttgcaccttgcacttcacaataagaggaaggaggttgttcttacgatcatcaggagcaaaagatgggatgaatgtcttaagattttcagtcataattctccaggcaataaatgtccaattacagaaatgatagaatacctccctgaatgcatgaaggtacttttagatttctgcatgttgcattccacagaagacaagtcctgccgagactattatatcgagtataatttcaaatatcttcaatgtccattagaattcaccaaaaaaacacctacacaggatgttatatatgaaccgcttacagccctcaacgcaatggtacaaaataaccgcatagagcttctcaatcatcctgtgtgtaaagaatatttactcatgaaatggttggcttatggatttagagctcatatgatgaatttaggatcttactgtcttggtctcatacctatgaccattctcgttgtcaatataaaaccaggaatggctttcaactcaactggcatcatcaatgaaactagtgatcattcagaaatactagataccacgaattcatatctaataaaaacttgtatgattttagtgtttttatcaagtatatttgggtattgcaaagaagcggggcaaattttccaacagaaaaggaattattttatggatataagcaatgttcttgaatggattatctacacgacgggcatcatttttgtgctgcccttgtttgttgaaataccagctcatctgcagtggcaatgtggagcaattgctgtttacttctattggatgaatttcttattgtatcttcaaagatttgaaaattgtggaatttttattgttatgttggaggtaattttgaaaactttgttgaggtctacagttgtatttatcttccttcttctggcttttggactcagcttttacatcctcctgaatttacaggatcccttcagctctccattgctttctataatccagaccttcagcatgatgctaggagatatcaattatcgagagtccttcctagaaccatatctgagaaatgaattggcacatccagttctgtcctttgcacaacttgtttccttcacaatatttgtcccaattgtcctcatgaatttacttattggtttggcagttggcgacattgctgaggtccagaaacatgcatcattgaagaggatagctatgcaggtggaacttcataccagcttagagaagaagctgccactttggtttctacgcaaagtggatcagaaatccaccatcgtgtatcccaacaaacccagatctggtgggatgttattccatatattctgttttttattttgcactggggaaataagacaagaaataccaaatgctgataaatctttagaaatggaaatattaaagcagaaataccggctgaaggatcttacttttctcctggaaaaacagcatgagctcattaaactgatcattcagaagatggagatcatctctgagacagaggatgatgatagccattgttcttttcaagacaggtttaagaaagagcagatggaacaaaggaatagcagatggaatactgtgttgagagcagtcaaggcaaaaacacaccatcttgagcct

SEQ ID NO: 2214 - DNA, 3036 bp, Homo sapiens
aattcccgggtcgacgatttcgtggcagggtggggggtgtggaaaaataaaaggaaaagtccttgcaccatgtagatcagcgtcccccactttggcatcccggccggccggggacctcccagtctgcggccatgaacgcgagcagcgagggcgagagcttcgcgggctcggtgcaaattccaggtggcacaacggtgctggtggagctgactcccgacatccatatctgcggcatctgcaagcagcagtttaacaacctggatgcctttgtagctcacaagcaaagtggctgccagctgacaggcacatccgcagcagcccccagcacggtccagtttgtatcggaggaaacagtgcctgccacccagactcagaccaccaccagaaccatcacctcggagacccagacaatcacagtttcagctccagaatttgtttttgaacatggctatcaaacttacctgcccacggaaagtaatgaaaaccagacagccactgtcatctctctccctgccaagtcacgcaccaaaaagcccacaacaccacctgctcagaaaaggcttaactgttgctatccaggttgccaattcaagactgcttatggcatgaaggacatggagcggcatttaaaaattcacacgggagacaaaccccataagtgtgaagtctgtggcaagtgctttagccggaaagacaagctgaaaactcacatgcggtgccacacgggcgtgaagccctacaagtgtaagacgtgtgactacgccgctgccgacagcagcagcctcaacaagcacctgaggatccactcggacgagcggcccttcaaatgccagatctgcccctacgccagccgcaactccagccagctcactgtccacctgcgatcccacacgggggacgcccccttccagtgctggctctgtagcgccaagttcaaaatcagctcggacttgaaaaggcacatgcgggtgcactcgggggagaagcctttcaagtgcgagttctgcaatgtccgctgcaccatgaaggggaacctcaagtcgcacatccgtatcaagcacagcgggaataacttcaagtgtcctcattgcgccttcctgggtgacagcaaagccaccctccggaagcacagccgcgtgcaccagtcggagcatcgtgagaagtgctcggaatgcagctactcctgctccagcaaggccgccttgcgcatccacgagcgtatccactgcaccgtccgccctttcaagtgcaactactgcagcttcgactccaaacagcccagcaacctgagcaagcacatgaagaagttccacggggacatggttaagactgaggctctagagaggaaggacaccggcaggcagagcagccggcaggtggccaagctggatgccaagaagagtttccactgcgatatatgcgatgcctccttcatgcgggaggactcgctccgcagccacaagagacagcacagtgagtacaatgagagtaagaactcggacgtgaccgttctccagtttcagatcgaccccagcaagcagcccgccacgcccctcactgtgggacacctccaggtgcccctccagcccagccaagtgccccagttcagcgagggaagagtcaaaatcatcgttgggcatcaggtgccccaggcgaacaccatcgtccaggctgccgccgctgcagtgaacatcgtcccgcctgccttggtggcccagaacccagaggaactcccagggaacagccggctgcagatcctgcgccaggtcagtctgatcgccccccctcagtcctcgcggtgtccgagcgaggcgggcgcaatgacccagccggctgtcctgctgaccacccacgagcagacggacggagccactctgcaccagactctcatccccacggcctcaggtggcccccaggaaggctctggcaatcaaactttcattaccagttcgggtattacttgcactgactttgaaggcctaaacgccttgattcaggaggggacagcagaagtgacagtggtgagcgatggaggccagaacatcgcagtggccaccacagcgccaccggtcttctcctcctcttcccagcaagaactacccaagcagacctactccatcattcaaggggcagcccatccagctttgctctgtcccgccgactccattccagattagtgcttaaaaaaacaaaaggagtgggggaaaggaattgagaaaaagaaatcttaagtagaattctctaaaaggtttgctcttaatgttttctttgttttgttttgtttttgagacggagtctcgctctgtttcccaggctggagtgcagtggcgctatcttggctcactgcaacgtccgcctcccaggttcaagcgattctcatgcctcagccctccgagtagctgggaccacaggtgtacgacatcatgactggctaatttttgtatatttagtagagacggggtttcatcatgttgaactcctgacctcaagtgatctgcccacctcagcctcccaaagtgctgggattacaggtgtgagccaccatgcctggccgtggtttgctcttaatgtttttaaggatggttgtgaatccccctggccccataataaattgtaattttatactgcttactataatttttttaacactgtaacaactttgagaccacctctgaatcgtcgcattataactgttgtagaatcttaaatgttaccaagatgattccaatgaggggttggaattaaatgcattaagtagtgaattcatgtgtttgtttccaacttgattttccaactctaataaaggtttctgtccatcttattacatttttgtagtaaatggtacttcccagcctctcttttgccccattctggaatactccccagagtttgggggtgttcatgttttatacatgtaagtctgttggcatgaaggaccattttctacataatatgacatggatacttgacccaaaaaaaaatgtttagtgctaatgagcagaaaatgaatggttccataataaattgatatctgat

SEQ ID NO: 2215 - DNA, 2787 bp, Homo sapiens
agagtgaaataacaaagcttccacagcatggaaggtgatccgagtgggttgccactgctggctaggggcgccagctgttattcccttatttgtccctgcccacgtcctgctgattggtccattttacagggtactgattggtccattttacagagtgctgattggtgcatttacaatcctttagctagacacagagcgctgactggtgtgtttttacagagtgctgattggtgcacttataatcctttagctagacagaaaagttctccaagtccccactcgacccaggaagtccagctggcttcacctctcaccaggaggccaaacaaaaaggacagtgctgagaggaaccatcgtcctgctagggaagggagtgtggcacaaaggcagcccaaccctgctgccctggagaaagccgagcctgcagcgcggaagaggaatgagagagaaggtggaggttcacaggagccaggcagggagcacagcctggagaaaggatactgggctccaggcctgggcccagatccctctatgtgctcgaagcaggtggacccctcggagggcgcgagttcccacctcaagcaccgtggcggctcccgcgctgcgcacctggaagtgcgcaggctgctccgccgcctcgtcggcgcgctggtagctgaagcaggcttctgctatgtccaggtggccgaggggcagcgggtcgtgggggttcttgaagtagcagaggcagcagcggcgcccgtccaacacgaaccgacggctgcggtagccacgcagtcgcgctggttcccgcgcggtacccgccccgggctctgcagcctccccatcgccgtcgctgccctcctctgcccgggttccggccccggcgctcaaagtggcctggaatttgtagaacgcccccctccaagcccgttggcagttgtcctagcccgctggcccttgcccccgcccgctggccgttgcccccgcgacgccccggaagccagagtaccggaaaaagctcgagcagaggggtcggaaagggaaaacaactacggctgcggtgtggttggtggtgagatgacgaccttagtgctggataatggagcttacaacgccaaaatcggttacagccatgaaaatgtgtcggttattcctaattgtcagttccggtcaaaaacagcacgtcttaaaacttttactgccaaccagatagatgaaataaaagacccttctggactcttttacatcctcccttttcaaaagggctacttggtgaattgggatgttcagagacaagtttgggattacctttttggaaaagaaatgtatcaggttgattttttagatactaatattattatcactgaaccatactttaacttcacttcaattcaagaatcaatgaatgaaattctatttgaagaataccagtttcaagcagtattaagagtaaatgctggggctctcagtgcacataggtatttccgagataatccttccgaattatgctgtatcattgttgatagtggatattcctttacacatatagttccttattgtagaagtaaaaagaaaaaagaagcaattattcggataaatgtgggaggaaaactcttaaccaatcatctaaaggagatcatatcttacaggcagctacatgttatggatgaaacacatgtgattaatcaagtgaaagaagatgtatgctatgtgtctcaggatttttatagagacatggatattgcaaagttgaaaggagaagaaaatacagtaatgatagactatgtcttgcctgacttcagtacaattaaaaagggcttttgtaagccaagggaagagatggtgttgagtggaaaatacaaatctggggaacaaattcttcgtttggccaatgagagatttgctgttccggaaatactctttaatccttctgatataggcattcaagaaatgggaattccagaagctattgtctattcaattcaaaatctacctgaagaaatgcagccgcatttttttaagaacattgtcttgacaggaggaaattcccttttcccaggatttagggatcgggtttactcagaagttcgatgtcttactccaacagattatgatgtttctgttgtgctgcctgaaaaccctattacttatgcctgggaaggtggaaaattgatatcagagaatgatgattttgaagatatggtggtaacaagagaagattacgaagaaaatggacatagcgtctgtgaagagaaatttgatatttaaggcaacatttttggaatgaaagttgtgaccataaggtttaatttcaaagttccttttaaaagaggttaagggaactgtgttaccttttgtcctaaggaaaaagggcttgaatttatgttaaatactttgatccgattgctaattttcaaaggcttcttaggtaggttactacagtaaactgtaactcagtccacattttcatttaggagctagactaccataacaatgcttatgctgtttccaagggtaggttatttttcattaaaagaagaactgaatgccttttaaagtttaaattcttcatagcctgaaagccacaaactttaacggctctcacctggacacgtttctccttagaaggctagttcttgtgtgactgtgactaaactattttctattttaaaactgtcattctctattatatacattcctaaagtctggaaacgactgtattcttatcatgtgtatcaatgttatattttgtacctagagtacatttaaaagggtggagcactcagctaataaagtttttttggc

SEQ ID NO: 2216 - DNA, 1319 bp, Homo sapiens
aggctgtacagagaattcgtcacgagatgaacattttccggctgactggggacctgtcccacctggcggccatcgtcatcctgctgctgaagatctggaagacgcgctcctgcgccggtatttctgggaaaagccagcttctgtttgcactggtcttcacaactcgttacctggatctttttacttcatttatttcattgtataacacatctatgaaggtatggtatgccatccacaggaatgtatttcatctacagtgcacaggtctatggacacttaatttatgtcagctgtgtatttttaattaaaatgctccaaaaataatgtcttaatatgctgttcttgactttaaaactttcagaccaccttgtatatataactgggactaaacgagctatcagtaagcatacatttttggtttcaaaacagtagttaattaaaatactttgaagttagaacttttttattttaggttccttaagtatgataaatctaaagctcttgataactctgtaagtaagagcggtaactattatattttcaagccgtggggaaattacagagtccccagaggaaatccagccaagttgggtacataacaagggaacggaaagccagggactcctagttgcagtgtctcatttcgctgctgtgttgaggaactgtctataggctttctatcttttttctttgccactgagtcagttttacttaaactgttgtgtgtgtgtcatttttattacatttgccatgcttaaatgagtctctataccatcatttacttactaacgtatttttttaaacctttcaacttggcctaattattagtatctataacacctttgttggctttcttatattttttctaattcacattaaaacaagtgtataactattaaaatacaaaatgtttgcacaccacctaacactttgtgtagcactggttggcacacaccccacactggggggaagttgtggactacgtgagcttcagttctttcgcacagtgttgaattcatgcttgtgaacacctacagagctgggaactgaggatgcggcagaaaataagcagaagtctctaggctggtgtgggagagtacacagatcatggcagtacaaatgactgcgatttatgatgggtgccacaaaggaaaagtataagagttgcgaacctatggatataaaaaacatgaaacaggcccagtagctcccgcctgtaatcccagcactttgggaggccaaggtgggtggattgcttgagccaaggaatccgagaccagcctgagcaacatagttagacccctgtctcaaaaaaaaaa

SEQ ID NO: 2217 - DNA, 589 bp, Homo sapiens
attcggcacgaggggaggggccagcgaggcaagatggagttagtgcaggtcctgaaacgcgggctgcagcagatcaccggccacggcggtctccgaggctatctacgggtttttttcaggacaaatgatgcgaaggttggtacattagtgggggaagacaaatatggaaacaaatactatgaagacaacaagcaattttttggccgtcaccgatgggttgtatatactactgaaatgaatggcaaaaacacattctgggatgtggatggaagcatggtgcctcctgaatggcatcgttggcttcacagtatgactgatgatcctccaacaacaaaaccacttactgctcgtaaattcatttggacgaaccataaattcaacgtgactggcaccccagaacaatatgtaccttattctaccactagaaagaagattcaggagtggatcccaccttcaacaccttacaagtaaagacaatgaagaacagttgaaacatgcaaaatatggagcttttcatgtaattactcttttactgtttaccattcactataattcacaattaaaattgtgtgactaaacaaaaaaaaaa

SEQ ID NO: 2218 - DNA, 997 bp, Homo sapiens
aggtgtcacgcgtcgacccacgcgtgcgatttgaaaaaccactgggttccgagttcattactacaggaaattctgttctcttctgcggcacagagaaccctgcttcaaagcagaagtagcagttccggagtccagctggctaaaactcatcccagaggataatggcaacccatgccttagaaatcgctgggctgtttcttggtggtgttggaatggtgggcacagtggctgtcactgtcatgcctcagtggagagtgtcggccttcattgaaaacaacatcgtggtttttgaaaacttctgggaaggactgtggatgaattgcgtgaggcaggctaacatcaggatgcagtgcaaaatctatgattccctgctggctctttctccggacctacaggcagccagaggactgatgtgtgctgcttccgtgatgtccttcttggctttcatgatggccatccttggcatgaaatgcaccaggtgcacgggggacaatgagaaggtgaaggctcacattctgctgacggctggaatcatcttcatcatcacgggcatggtggtgctcatccctgtgagctgggttgccaatgccatcatcagagatttctataactcaatagtgaatgttgcccaaaaacgtgagcttggagaagctctctacttaggatggaccacggcactggtgctgattgttggaggagctctgttctgctgcgttttttgttgcaacgaaaagagcagtagctacagatactcgataccttcccatcgcacaacccaaaaaagttatcacaccggaaagaagtcaccgagcgtctactccagaagtcagtatgtgtagttgtgtatgtttttttaactttactataaagccatgcaaatgacaaaaatctatattactttctcaaaatggaccccatataaactttgatttactgttcttaactgcctaatcttaattacaggaactgtgcatcagctatttatgattctataacc

SEQ ID NO: 2219 - DNA, 1402 bp, Homo sapiens
caaatatcgttaccggaggccttatccagtcatgaggaagatctgtcaagtggggccagcaggtctggcttttatcctaaacatcagccctgtggcacaccgtgtggcgctctgtcacctggctggctgccaggagcaagcagcctggtaccacaccctccagatcctcttcttcctggttagcgcttatttcttctcctgccccgtgcctgagaagtacttcccgggttcctgtgacatcgtgggccatgggcatcaaatcttccatgcatttctgtccatctgtacgctctcccagctggaggccatcctcctggactaccaggggcggcaggagatcttcctgcagcgccatggacccctatctgtccacatggcctgcctctccttcttcttcctggctgcctgcagtgctgccaccgcagcccttctgaggcacaaagtcaaggccagactgaccaagaaagattcctgaggctggcaagtggggcaacgtgtggaggaagcccctcataatttggagaaaacttgatacaatagaagctgactcttaaggcattggcttttaaattaatacatatatccaaggatatgttatagctgcagtgtttgaaagccaaaggatttaagagttttgttgttgttaataaaaggaatactccttttccttttggatcatagcttaacaaggcacaggaagggaagggatcttgactaagattcatgagacattgaattaaggagaatcatcttcatgcctgaaaatttagcaaaattccgactatggcctccaggggcaattcctaaaagctgaatggataataaaattggactggaaagtaagtaggtggctggtcctcaccctgttggaatggctatcctactatgctgttctttggtaatggaataaattgacccaaggaccgaatttcatttggatttcaaattgtccagagtggaaaagccttcaagatgacatgatgaattactcagttcatctgatttctggtccctcctttctcgacaactataatactaacccttttctcaggataactgtctacacctggcagttttctctgacgtgctgttcactcacatccctaccttgcatggtaatataaaggactaggaagcagtcatacttccaggaaatgcttggattcatgtggacattcaggaagcttattctcatataatactaatctaaacagtactagaaattacagtgccaagagccaccaggaggcccagccaataagcatagatactatatggtatcatgggacccatctattttttaccagtggactacaggattacttgagagttatcagggctgcctaacagaccaggagatctgggggttgcaccagggaatcgccatatttgaccagcatgt

SEQ ID NO: 2220 - DNA, 1972 bp, Homo sapiens
  misc_feature (1)...(1972): n = a,t,c or g
tttttttctgcggggaatcaggtaggggcctttattggccagcacacatctacctcctggcatctgtcacaagcatttgcaggagtaggcggccccttcctctccatgtccccatccccaacctgagatgcgggagggcctgggggctcagagggaagaactgaggcaagaagcccccggtgatccagtcagaggattgggcagcctgacctcggggtggggaacccagcactggacaacaaggagggaggggcacaggaagggctccccgaggtttggtcggggagggggaaggaagactgccccctgccctgtcatctctgcatgtgccgagccccagctcctgactccctcagtgcctttgggcctggatgctcagacagcagatgagacgaagccttgtacctctatccctccttgaaggcctgcctccccccacttcacagagggaaactgaggcccaagcctctcctctcagcccttgctcagcctcagacatgtgcatggtgccaggactgagacctgcttacccctaaggcctagatggcagaagggaccctgaggacattaataaatatggacgggcggtccctggaggcagctggccgagtccaggtaggaggggaagcctggcctggtctgcctcaggggccgccaccaccctcagcctctctcgtcccggctcctgggggccacgatccggtagttggttgcatgtccgcccctcttgccccgaaggaggctgggggtgcctgtgccggcagggcccgccccagaccccagctctggttcatagagcccaatcattgtttccaagattaaaaccctctcagctaaaatcttcaaagcctcgcgtagctggtgcaacccctccccccagtggctcttctcaccagggtctcccttagggccaggttccccccgctgcccagcagagccttgggggccaggctccccacgcagtcctctctcgcccttctctcctgggtggccagagattcctttgggtccagtggggcctgggggtcctatgtgaccaggactcccagggacacctgtggggccaggaggcccagggggacccatgggccctggagggcctggaggcccagtgggtccctggggccagtggttgttggtctcagtgaaggtgttggacagcaatgggtctcctggtgggcctctcatccccattgggccccgactgccggcatctcccttggggccggtgggcccgggaagcccccaagcaccgacttggtcctggaggcctccatctccggggctgccctgggcaggagggggaccccagagcggggcagggtcctcaggggtagctggtgttggaggtactggctgctctatgacagtcagcatggtcatcttggcctccagcaccttcagccgctctgtcagctctgacactttgctgcagttgagacaacctgagaaggctgtgggccgaagcgccatccgccgcatggtactgcccgaccacatgggctccaaggaggcagaggaacctgcaacttcctcgcagctcactcttgagtgcccagggcagcacctccactcacgggcggtcactatcttgtacatcaccttgtatgtgggtctcaccacagttctgtagctgctccccggacagctcatgggccaggggcagttctgcagcactcgctgaaggtaggtgccattctgcacatggcatgagatggtgcgggtcaccacataggagcaccagttcctccaagcagctgggaggattctggagctgatgaatgcaggtaacggagccgactcaggctaactgttgtctgcacacaataggtggtggctgtaacatctgccacacgtccccccctgtctcagacaactgctattctggcctttgatgcttcagccacctccgtcctccccnnnnnnnnnnnnnnnnnnnnnnnnnnnnttcggagatccacctagggtcgag

SEQ ID NO: 2221 - DNA, 2857 bp, Homo sapiens
  misc_feature (1)...(2857): n = a,t,c or g
ttttttttttttaaagaattaccataagttttatttttgcttagttttattaaaaaaataaatatgtcataaagctttctttttccttagggagaaaaaaaggaacaagtctcataaaaccaaataagcaatggtaaggtgtcttaacttgaaaaagattaggagtcactggtttacaagttataattgaatgaaagaactgtaacagccacagttggccatttcatgccaatggcagcaaacaacaggattaactagggcaaaataaataagtgtgtggaagccctgataagtgcttaataaacagactgattcactgagacatcagtacagatacatcttgcttaaacaacacagaagttcctgaaaagttttgtgtaaatgatataaccacaaacattaccaggagagcttggtaactgaaagaattccatggcgaattcttttgtgaacaactactttcacttttgtaaatccaggtatttgctttttataaggagtttacctagttgctacctctctgaactgaggaaacagcatattcaccaaacgttgtgctccagctggaccactggcacaatttccaagtttgtgtttctattaagtaagtagtgtaagtaaggtacagagtcagccagggaacccagctgtatctgacaaagcaggtgtaggagtgggactgccatctaccaataattccagcaaatacttttgctaatatactttgtgcaaaacacagtaataaccttatcaattcggctatagatgtacttcctttttctaaaactttcagtcacaagctaggtctggaacccgaaaaggaagtaatacttctaaccctcaagactgcctttaaccaaattagctgcccaactccttcaaattggaatggatgataatgaaagagactgagttttccaaagctgaagtttaacaacacaaaaatcacatttcatatcactaattagtgaaaagttttgctggtgacaaaaatttttcaaatggttgttttttgttgttgttttaacttcctctaaatagaactctgaattctggggcaaactctgcagaagttaaagtcactgatgttctctggttggctgatacattttagtactgctgatagaaataaaaatttctttctacccaccagaatttcatgaacttatactataccaaagcagtgatgctttggacagggaatacgcatggtagtactagttccagtaagttttatcaaacgtaaataaataaatagaatcctcacattgctcacagcctccattccatttggtcaaacttctaccaggcccaagccacatttaaattaggctgttcagttttttaatttaatgctcctaataacattgctgtctatatgtacaagtgtgaatgaaaagagtgtgtaatctgtagtcttttcccccctgagtcccctagcaattagtaaataattaaagagtaagtggtcattttaaaacttgtattttttttttaaaaaaagcattttctagcactttaaaaaatgggtctgaaaagtgccctattaatgtccaatgctgttccccacccagtcccacccattcaaaacctgctacaaatgctggattgagttcatatcaaataatttagcagtaccaagatttttcaaatggaaacagtgttactgacttcttcatattggataacaaaataagggtaactctggtcatcattaaaaatgacaaaaatctgaggctcaaagaaattatccacacaagagtcataaaggtcactggtgacactgccaggattgactggcgggggccttctcatgccatgactgcccattgtgtatctgcccgtcagcactttggccagaaacatgaagtggactcctttggaggacttcttagaaaagttatgagagtagcttgccttctttgcaaaataactgccttgtccaaacattgtagcatgctttccacagactcgagggtcaaagttgtgtttgcagattccatctaccacatcctgggatgttccatgaaataaatgtctctcatttattatcctgtcacggccaaacattttcctgttcatatattcctttttccttttatatttctcccaaagaaactggttttggactctcaatatctgcaaaattctgtatttaaactcaggcacagtcttatgaaaaagattgtaaatgatccgataacttttatcctctgcagaaacagggacttggatgaagtcctgagatggatgcatataaacccaagtttcagggtaaaagtttgctgaagtgaccccatctgggcagataatttgtgatgatgaagttgcttcaagaggtggaggagcttgtgtgggaaccccaccaagtgtctgtaaatatggaagcagtataaaacaggagcggaagaggggtctcctttttatctctctcctgaagaatgaattgtggaggatgtagtggttattccacatcataaatcgaacctctttcagaccccgagagttggcttcttcaatcaatcgaatgacagactcgggatactctctccatccaaagtggtccctacagaagaatttccagactgtgtggtaaatagagttgacattgctagagggtggtgtggacagccttcgtagttggtcaaattcagttgtttcatacacgttcatggcattcaaatctgcccaaaattcttgtcctccatacttcattctcattctatcattttctgggttacagtaaaatctttccaagtgctcctgagaatcattgaatacactctgccacttttgagtagaagtccttngnntctgccaaagatatcagttcccgccnctnccaaggtctccagtg

SEQ ID NO: 2222 - DNA, 6850 bp, Homo sapiens
actttcaggagtaatggtgtgtgatgtgagatttgaaatttatttcctttttgttaaaatattaataaaacagttaatatgtttgccttttctgaataaatttgaactttaagaaaacatttaaaactctacagatccatttgaacatctactaaaatgtcactattttaatatttgaagttgctatctcattctacctttccttctatttaaagatggccttcgccggattttatgtcaagttggtttacaagaagggccagatggtgaaaactcttctctagtggacagactgatgcttagtggattccaaattatggaaaggtgctaggagtgtatatcatcagttgttcatgagcagtctgcttatggatttgaaatacaagaaactatttgctgttcgatttgcaaaaaactatgagcgtttgcagagtgattatgtgacagatgaccacgacagagagttttcagtcgcagacctctcggttcagatattcacggttccttcacttgctcgaatgctcatcacagaagaaaacttgatgagcattatcattaagacttttatggatcatttgagacatcgagatgcccagggcagatttcagtttgaacgatacactgctttacaagccttcaaatttaggagagtacagagccttattttagatctcaagtatgtgttaattagcaaaccaactgaatggtcagatgagctgaggcagaagttcctagaagggtttgatgcctttttggaattactaaaatgtatgcagggaatggatccaattacacgtcaagtaggacaacatattgaaatggaaccagagtgggaagcagccttcacactacaaatgaaattaacacatgtcatttcaatgatgcaggactggtgtgcttcagatgaaaaagtgttaatcgaagcttacaagaaatgtctcgctgtactgatgcagtgtcatggtggttatactgatggtgaacagccaatcacactaagcatttgtggacattcagtggaaactatcagatactgtgtttcccaagaaaaagttagcattcacctcccagtttctcgcttacttgcaggtttacatgtattattaagcaaaagtgaagtggcatataaatttccagagctcctacctctaagtgaacttagcccacccatgttgatagaacaccctcttagatgtcttgttctgtgtgcccaagtacatgccggaatgtggagaagaaatgggttctctctagtaaaccagatttattactaccataatgtgaaatgcagacgtgagatgtttgacaaggatgtagtaatgcttcagacaggtgtctccatgatggatccaaatcatttcctgatgatcatgctcagccgctttgaactttatcagattttcagtactccagactatggaaaaagatttagttctgagattacccataaggatgttgttcagcagaacaatactctaatagaagaaatgctatacctcattataatgcttgttggagagagatttagtcctggagttggacaggtaaatgctacagatgaaatcaagcgagagattatccatcagttgagtatcaagcctatggctcatagtgaattggtaaagtctttacctgaagatgagaacaaggagactggcatggagagtgtaatcgaagcagttgcccatttcaagaaacctggattaacaggacgaggcatgtatgaactgaaaccagaatgtgccaaagagttcaacttgtatttctatcacttttcaagggcagaacagtccaaggcagaagaagcgcaacggaaattgaaaagacaaaatagagaagatacagcactcccacctccggtgttgcctccattctgccctctgtttgcaagcctggttaacattttgcagtcagatgtcatgttgtgcatcatgggaacaattctgcaatgggctgtggaacataatggatatgcctggtcagagtccatgctgcaaagggtgttacatttaattggcatggcactacaagaagaaaaacaacatttagagaatgtcacggaagagcatgtagtaacatttaccttcactcagaagatatcaaaacctggtgaagcgccaaaaaattctcctagcatactagctatgctggaaacactacaaaatgctccctacctagaagtccacaaagacatgattcggtggatattgaagacttttaatgctgttaaaaagatgagggagagttcacctaccagtcccgtggcagagacagaaggaaccataatggaagagagttcaagggacaaagacaaagctgagaggaagagaaaagcagagattgccagactgcgcagagaaaagatcatggctcagatgtctgaaatgcagcggcattttattgatgaaaacaaagaactctttcagcagacattagaactggatgcctcaacctctgctgttcttgatcatagccctgtggcttcagatatgacacttacagcactgggccccgcacaaactcaggttcctgaacaaagacaattcgttacatgtatattgtgtcaagaggagcaagaagttaaagtggaaagcagggcaatggtcttggcagcatttgttcagagatcaactgtattatcaaaaaacagaagtaaatttattcaagatccagaaaaatatgatccattattcatgcaccctgatctgtcttgtggaacacacactagtagctgtgggcacattatgcatgcccattgttggcaaaggtattttgattccgttcaagctaaagaacagcgaaggcaacagagattacgcttacatacgagctatgatgtagaaaacggagaattcctttgccccctttgtgaatgcttgagtaatactgttattcctctgctgcttcctccaagaaatatttttaacaacaggttaaatttttcagaccaaccaaatctgactcagtggattagaacaatatctcagcaaataaaagcattacagtttcttaggaaagaagaaagtactcctaataatgcctctacaaagaattcagaaaatgtggatgaattacagctccctgaagggttcaggcctgattttcgtcctaagatcccttattctgagagcataaaagaaatgctaacgacatttggaactgctacctacaaggtgggactaaaggttcatcccaatgaagaggatcctcgtgttcccataatgtgttggggtagctgcgcgtacaccatccaaagcatagaaagaattttgagtgatgaagataaaccattgtttggtcctttaccttgcagactggatgactgtcttaggtcattgacgagatttgccgcagcacactggacagtggcatcagtttcagtggtgcaaggacatttttgtaaaccttttgcatcactggtgcctaatgacagccatgaggaacttccatgcatattagatattgacatgtttcatttattggtgggcttggtgcttgcatttcctgcgttgcagtgtcaggatttttcagggatcagccttggcactggagaccttcacattttccatctggttactatggcacacatcatacagatcttacttacctcatgtacagaagagaatggcatggatcaagaaaatcccccttgtgaagaagaatcagcagttcttgctttgtataaaacacttcaccagtatacgggaagtgccttgaaagaaataccatccggctggcatctgtggaggagtgtcagagctggaatcatgcctttcctgaagtgttctgctttattttttcattacttaaatggagttccttccccacccgacattcaagttcctggaacaagccattttgaacatttatgtagctatctttccctaccaaacaacctcatttgcctttttcaagaaaatagtgagataatgaattcactgattgaaagttggtgccgtaacagtgaagttaaaagatatctagaaggtgaaagagatgctataagatatccaagagaatctaacaaattaataaaccttccagaggattacagcagcctcattaatcaagcatccaatttctcgtgcccgaaatcaggtggtgataagagcagagccccaactctgtgccttgtgtgcggatctctgctgtgctcccagagttactgctgccagactgaactggaaggggaggatgtaggagcctgcacagctcacacctactcctgtggctctggagtgggcatcttcctgagagtacgggaatgtcaggtgctatttttagctggcaaaaccaaaggctgtttttattctcctccttaccttgatgactatggggagaccgaccagggactcagacggggaaatcctttacatttatgcaaagagcgattcaagaagattcagaagctctggcaccaacacagtgtcacagaggaaattggacatgcacaggaagccaatcagacactggttggcattgactggcaacatttataattattgcaccaccaaaaaacacaaacttggatttttttaacccagttggctttttaagaaagaaagaagttctgctgaatttggaaataaattctttatttacaactttccttcccagttttatagtttctggttctgaggactgatgaaaatcatcttccatcagcagattttcttgcactgtttgctgtgccccttcaaatataatgtcttgggttttaagatcgagcaaggagcttctcttcctagattggatcccagcccctttgtgggggtctgactgcatagtcccagccattatgtgatatttcacgttattgatgatagtgaaccgtgggtccgaagctgactcaacggaggcagggaacaaagtctctgtggtctgttgggtcatacttcctggttccactgagtggcccaacactgggactgggttggtgtcccctctgctgacaggaccctactcctaggagcaaagtggttgattttgaaggcagtgttcccttctctccattgactatgagagagttgggggacacacatgcagaagaagcccgtggggagaaggtggattcctggtgtgctgggttggtttttcagggctgttagaggttttttttttcttttttttttttatggcaagacttttggctttgagaaaactcacttagagggctttccaaaaacttaggatggtctaaaaaattaggatattcttttagaattaggaagaaaaattaggatattctaaaagaatatggattaaaaatttaggatattcttttagatatcctaatatctagatgagaggccttccttcataagatctggttgtttgggctgtggttggcataagtgatatttattttggcctctgtcacatccagtttcttgagcttttaaggtaagcttcttttggctttttttcagatgttcaccaagcttaagtttaaaataataggtattctaaaagagtatcctaattttcttatctgtattcttttacaataccctaatgtttcagacagtgatattctcttgttatttctaaggctaaattggcagagtatatcatctaaagccaaacactgaagaaggtgagaacccgctcccacccagccagcatttcctggaacagacaagctgctgcttccttgctggctcacttagtgcattcctgggatggtctggcacccaggctttttattctttttgatcattgttcttactgaggtgccttcctagaacaagagccacttacaaaatagcttataattattatgtaccacacaactactattgtttgatgtatgactgctgagagcttgaatacatgcagagagtgactgaagacttagtagaggaataaattctgagcctgtctaaggtggggctaaggaacagatgagtaataagaggctcttggatttttttaaccaatgcaactgaccctttcaatcagttttctttgaattacatctacaagttttgttccactcagctaccagtcaactaggcatgctccacagtatcacaggaagaaggtcagaaatctggaactgaagctaaaagaagtgaggatgtagaagccacattcctctccaaggtagtgtgtgaaagaaccgccccctcttgacaggaggatgaccgtcgccattcttgcgtgggactgactcacccagctgagaggaggaccaatagaaagaaaattcacatttgagtccacctctctccccctttttctgaccttcattcataagatctggttgtttgggctgtaggtggcataattcatgtttattttggcctctgtcacatccagtttctttagcttttaaggtaagcttcttttggctttttttcatatgttcaccaagctaaaatttaaaataataagaccaggtttctctctctacaagtggattataaacattttcaccaaatcataacaatactccagctttccggtccgacttcctaggagcctggagttagcaaaggttgtctctggatttcattctctgagaatatcacagagcctgggagaagatgaatttaccatgaaattggcaacatacacaccctttttattttctggtgttaagcctagttgtcctttccctaccttacaaatccatgttagttttatgatttgttcccgcatgttttatgtttattgtaggaaatgtttatataacatacgctttccatatcaggggaaaatccatatctgtttaattaaattggccataactttaatatctgtggacaacttgtaaaatttggaatgtatcatatgtaaaaagtttaaagatatcccaaataaatgcttttaggtgttggcattaaaa

SEQ ID NO: 2223 - DNA, 3639 bp, Homo sapiens
tcagagtggtggaattcgctgactgtggcggcggcggcctcgaggtgacaactgtctccgtcgcaggctccggcgggggcgcaggaggtcgcccggcgcgtcactgtcgggtcggcgagccacgggggccgccgcagcaccatggcgaccaccgtcagcactcagcgcgggccggtgtacatcggtgagctcccgcaggacttcctccgcatcacgcccacacagcagcagcggcaggtccagctggacgcccaggcggcccagcagctgcagtacggaggcgcagtgggcaccgtgggccgactgaacatcacggtggtacaggcaaagttggccaagaattacggcatgacccgcatggacccctactgccgactgcgcctgggctacgcggtgtacgagacgcccacggcacacaatggcgccaagaatccccgctggaataaggtcatccactgcacggtgcccccaggcgtggactctttctatctcgagatcttcgatgagagagccttctccatggacgaccgcattgcctggacccacatcaccatcccggagtccctgaggcagggcaaggtggaggacaagtggtacagcctgagcgggaggcagggggacgacaaggagggcatgatcaacctcgtcatgtcctacgcgctgcttccagctgccatggtgatgccaccccagcccgtggtcctgatgccaacagtgtaccagcagggcgttggctatgtgcccatcacagggatgcccgctgtctgtagccccggcatggtgcccgtggccctgcccccggccgccgtgaacgcccagccccgctgtagcgaggaggacctgaaagccatccaggacatgttccccaacatggaccaggaggtgatccgctccgtgctggaagcccagcgagggaacaaggatgccgccatcaactccctgctgcagatgggggaggagccatagagcctctgcctcgatgccgttttgcccccgctctttggacacgccgacccggcgctccccaaggaatgctgtcccaacaagattcccgtgaaagagcacccgtgtcgccccctcccgtggacttctgtgccgccccgtccacacctgttcttgggtgcatgtgggttttcggttcctggcggtccaggacggggcgggggctcccctcccatctcgtgctgggaggtctcagcgcgctctcctgtccctgggacgtgcgtctctccttctcatgccgttctggaaaatgctcttgctgtagagagcagctgcttctgccagggtgttggaggtggtggagcgccttccgattccattcatggcattttgtgatgtgatgtaattggaatagagctgttgatttaaggcacacacaatccctcacactgtgggttttttttagaacttcccagacgaaaactcacgcccttgccctaacgcgctttgctgtgagcctggcccctgcccagggcttgggtctggtgagctgagcagcttcctgtggatggtgtggggccggcctctggcctggctcacctggccactgtccagccagccttgtgacagactccggcctgaaggcagaatgaacccacacctggagtgaggaagggggcctggcacggttggccaggctctgcctgattgccagccagcgggcatctgaagccgggtccttcgcccgccggaggctgccgtccgtctctcctgctgcgctcgtgccagctccgtgggtgtcctcccagggagcttctcttctcaacaggccttgcgaggctggggtgagaggtgatagaggcagcactgtgcatgattccgagagggtgtggtggcactgccagccgactgctgacagcttgggagctgctgtgcccaggacgtgggttcagcgtgggcgaggaaagcctggcgagcgtggccctgtaaaagctttctgaggcgggaggcgctcacttacctctgactgcctgggcgctgcgtgtagcatcttggcctacaggacagattttaggtgacacctggttatgacagtcagaaatttgagaagcttctcacaagtgatgcactttaaataatctgcatgccattgagacacctgcatgtctggtgtttgtggttcaagtgtcttgccgccggccttcggatgtaaacccactgataacggacagaaagagaatgcccacaagtgggtcttctgtggaagatgcagaaggaggaagttagtgcttacattttagtctttttctccctcaaaaaaataggttaagtttcagtgccagctagaaaatactgctttctgccatcgattgggggtggtttttgtcaaatatactgttgataaatatttatttttgtaaacttgaagtgtgtggtggccgtgggggagggacatgctggcagcaggcgccttcttcagctgtgggtcctaaaggcctttgatcctttgaagaagaaagacatggtatttgttcagcagacgccgaccactcagacggaggggcccctgggattccctgtctcagatggcctggtcttacgcctgtgtagatttcttctccattgggaatgaaggtgtcaggcgggactggaacgttctagatggtatgttccgtgatattaacaactctaacccaggacagaccacaagccacactcagaggcctcactgtgctgggggcttcggtgtccaggcgcccaggtgtggccaccagcaccggtttctgccttcgcgttgctggggtgcagtgagactgccacacgcgtgcacatgtggctctgtgggtgtctcctagagaggacgtggcccctgctgccagcccttgagcagcccgtgtgggggcccgagggacccacacagtgggggccagcctcgctggagggagagcaaccctttgccgatgaccacgcttgccgccatctcttagttttctttttcacaagcgctttatttttttaatagacaaatcacattttgcaaggcctttaattaaataagattcttctttccttcattttatgctttatttcctgtttgaaggcttactgtagaagtggcttactgtagaagcagcttgctgagcccctccgagcggtccccagaattagctggttcacaacccccaccctcccccgcccccgcctgtgtcaggtgtggatgaggtcgtcacactcagaaggacaggcttgtctgccagctcacaaggggaggctgcagtgggtttgggagctgggtttaggcccctggtgtctgagggcccaggccttgccagcctctgctgctcctgctcctgggtttgaagatgcaggccgatcgccagctccgtggcagcggtcactaaggacagcctgactgtgccatcttggagcctcaggcggggctccggagatagaagacaggtcgccggaggctccccctcctctcctctcccctctgcagatgctccctgggcgctaccctgcagggtgccaggcaggagtggtctcagaacgtgcgcttctgattattttactggggtccattgtccagatttttctttgattgtaaaatatatttttactttttagtcttctaatttaataaatgatccatataaaaatagagaaataaagtcctttaagggaaggttaaaaaaa

SEQ ID NO: 2224 - DNA, 1605 bp, Homo sapiens
atgtggaagcgctcgcgcaggagaccccgggtgacggggcccggcgccgctaactggagcgaaccccagcgtccgccgacatggcctggaccaagtaccagctgttcctggccgggctcatgcttgttaccggctccatcaacacgctctcggcaaaatgggcggacaatttcatggccgagggctgtggagggagcaaggagcacagcttccagcatcccttcctccaggcagtgggcatgttcctgggagaattctcctgcctggctgccttctacctcctccgatgcagagctgcagggcaatcagactccagcgtagacccccagcagcccttcaaccctcttcttttcctgcccccagcgctctgtgacatgacagggaccagcctcatgtatgtggctctgaacatgaccagtgcctccagcttccagatgctgcggggtgcagtgatcatattcactggcctgttctcggtggccttcctgggccggaggctggtgctgagccagtggctgggcatcctagccaccatcgcggggctggtggtcgtgggcctggctgacctcctgagcaagcacgacagtcagcacaagctcagcgaagtgatcacaggggacctgttgatcatcatggcccagatcatcgttgccatccagatggtgctagaggagaagttcgtctacaaacacaatgtgcacccactgcgggcagttggcactgagggcctctttggctttgtgatcctctccctgctgctggtgcccatgtactacatccccgccggctccttcagcggaaaccctcgtgggacactggaggatgcattggacgccttctgccaggtgggccagcagccgctcattgccgtggcactgctgggcaacatcagcagcattgccttcttcaacttcgcaggcatcagcgtcaccaaggaactgagcgccaccacccgcatggtgttggacagcttgcgcaccgttgtcatctgggcactgagcctggcactgggctgggaggccttccatgcactgcagatccttggcttcctcatactccttataggcactgccctctacaatgggctacaccgtccgctgctgggccgcctgtccaggggccggcccctggcagaggagagcgagcaggagagactgctgggtggcacccgcactcccatcaatgatgccagctgaggttccctggaggcttctactgccacccgggtgctccttctccctgagactgaggccacacaggctggtgggccccgaatgccctatccccaaggcctcaccctgtcccctccctgcagaacccccagggcagctgctgccacagaagataacaacacccaagtcctctttttctcactaccacctgcagggtggtgttacccagcccccacaagcctgagtgcagtggcagacctcagctctctggacccctcctacagcactagagctaaatcatgaagttgaattgtaggaatttaccaccgtagtgtatctgaatcataaactagattatcatagttatctagtttatgagtcataagctagatttgattcttcaaagaagaaaagtcagtgagcaaatttaaaa

SEQ ID NO: 2225 - DNA, 1999 bp, Homo sapiens
tttcgtaggtgattgtggccacactgtcacactccattgtcttttcagggcagctgtcatagtagaactttgctggtgactggcatgtgccctttcagcctgagccaaggtggtttccttgaaagagttttcatgtttctggagaagagagaaacctgtttcctctctgtcttctctccaggtgaaagcagaagcctcctgggactccgcggtgcatggctgccctcagctcagcaggggcacgcccgtggacgagcggttgttcctgatcgtgcgcgtgacggtccagctcagccaccctgctgacatgcaactggtgttacgcaagagaatctgtgtcaatgttcacggccgccagggttttgcacagagtctcctaaaaaagatgtctcatcgaagttctattcctggctgtggagtgacttttgaaattgtctccaatattccagaggatgcccagggagtggaagaacgggaagcattagcaagaatggcagccaatgttgaaaacccagcttctgctgactcggaggcttatattgaaaagtacctcaggagcgtgctggctgtagaaaacctcctgactttagatcgtctgcgccaggaagttgcagtgaaggaacagttaacaggaaaaggaaagttgagcaggaggagtatcagttctccaaatgtgaacagattgtctggaagccgacaagatctcattccatcatacagtctaggcagcaacaagggccggtgggaaagtcagcaggatgtatcccaaaccacagtttccagaggaatagctcctgcccccgccctctctgtttctccccaaaataaccattctccagatccaggactcagtaaccttgcagcatcctacttgaatcctgtcaaatccttcgtgccgcaaatgccaaagctcctcaagtctctctttcccgtccgcgatgagaagaggggcaagcggccgtctcccctcgcacaccagcccgtgccccgcatcatggtgcagtcagccagcccggacatcagggtgaccaggatggaggaggctcagccggagatgggccctgacgtgctggtgcagacgatgggggccccggccttgaagatctgcgacaaacctgccaaagtgccttccccaccgcctgtcatagctgtcacagcggtcaccccggctccggaggcacaggacgggccccccagccccctgagtgaagcctctagcgggtacttctcccacagcgtctccaccgcgaccctgtcggacgccctgggccccggcctggacgctgcggccccgccggggtccatgcccaccgcccctgaggccgagcccgaggcgcccatcagccaccccccaccgcccacggccgtccccgccgaggagccccctggcccccagcagctcgtgagccccggtcgggagcgccccgacctcgaggccccggcgcccggctccccgttccgcgtccggagggtgcgggcctcggagttgcgctccttctcgcgcatgctggctggggaccccggctgctccccgggggccgaggggaatgcgccggccccgggcgccgggggacaggccctggcctctgattccgaggaagctgacgaggtcccggagtggctccgagagggcgagttcgtcaccgtgggcgcccacaaaacgggcgtggtgagatacgtggggcctgccgacttccaagagggcacgtgggtcggcgtggagctcgacctgccctcaggtaagaatgacggttccatcggcgggaagcagtacttcaggtgtaaccctggctacgggctgctggtcaggcccagccgggtccgcagggccacgggccctgtgcggcggcgcagcacaggactccggctgggtgcccccgaggcccgccggagcgccaccctctcgggctccgccaccaacctggcctcgctgacagctgccctggccaaggccgacaggagccacaagaaccctgagaaccggaaatcctgggccagc

SEQ ID NO: 2226 - DNA, 1094 bp, Homo sapiens
ggaattcacagagattccccgcccgggtccccgccaacggcgctagccgcgatgccccgcctcactccccgcccccgggatgcacggcgcgtgctggtaatccgcggctcaagccccgcccccactgtccccattctccgctcacctctctccaaggacactgcgcacgcgccacgacgtcccgcctttctccccgccctgccgcggccccggggcgcagcgcgcacgcaatcgcgtttccggagagacctggctgctgtgtcccgcggcttgcgctccgtagtggactccgcgggccttcggcagatgcaggcctggggtagtctcctttctggactgagaagagaagaatggagaagcccctcttcccattagtgcctttgcattggtttggctttggctacacagcactggttgtttctggtgggatcgttggctatgtaaaaacaggcagcgtgccgtccctggctgcagggctgctcttcggcagtctagccggcctgggtgcttaccagctgtatcaggatccaaggaacgtttggggtttcctagccgctacatctgttacttttgttggtgttatgggaatgagatcctactactatggaaaattcatgcctgtaggtttaattgcaggtgccagtttgctgatggccgccaaagttggagttcgtatgttgatgacatctgattagcagaagtcatgttccagcttggactcatgaaggattaaaaatctgcatcttccactattttcaatgtattaagagaaataagtgcagcatttttgcatctgacattttacctaaaaaaaaaaagacaccaaatttggcggagggggggaaaatcagttgttaccattataaccctacaaagggggggagcatgtaacatgagcttattgagaccatcataaagaccgattcttgatattgattttatctctttctgtatctatagggaaacctcaagggtaaaatgttaggggttgacattgaaaaccctgaaaccccattccctgctcaaaggaacagtgtgaaaaaaaatctcttgagagattaaaaatatctttttttttgctcatcttaaaccac

SEQ ID NO: 2227 - DNA, 1166 bp, Homo sapiens
ttttttttttttacagaattccccaaactttaatgctgtgctctgaaaagggaggctggaggttgtggtgggtcacagtgttgctgacacctctggcctccagccctgcatccctaggcaccatgtgaccaggcagtgagaaggacggggcctcactcccatgccagactgctcctcgggctgagcaggacctgaagctctcagggcttccaccaaagcccagcaaacttgggggaggcctgagggggcatcagcagtccttaaaggcctgagcttgcaacactcaggcaggactcggctgagggcctctgtggtgccaccatggggtaggaggtaaagagagaccctggttccagcctgggaaccagtgggtgccctgaagggaggggaggcctcagggagttcgggacaggagtgtgcatggtactgggcggcccatgggggctcctggcctcttggttcaggcaatccctgagctggggacacattccatcttaggtccaagagacggaggtcaggagcatccctagaacgacctcccaggcacgaggaaggcccggggcagggccgggcgcagcgtggctggcttcagtaccctcgggcatcttgactcctgccctctgggactgcaaagggatctgcgggcgcctctgctgagtcaatcgtctggtaggcactacggtcctgagaagacccaaggaaaccagtgtggaccaggagctcacccccgcgctcccggtacatgtggtagacgaagcagcaggagagcggcttgagcagcaagctgaggatggccatgcccacgccaaagcggcccgtgtccgtgaggctgacccgcgggtagaagatgctgatgtgcacgatgtccaggaagatggtggccagcaagccacccagaaacatgcttatggcgtcgatggagtcccgctgagccacagcccacacgcccaaggccaggatggtgaagttggcccaggcataggagcctgagaatacaatgcagccccaggttgtcagcagccagtgacctaggagaatcaccttcaggttcacagcaggcagctccatcccgactcaggccgagggcacctgcgccgcagccgcggggggctcctaggctccgaactcggggaacaaacttgcccggccccgccccgcccgttgcg

SEQ ID NO: 2228 - DNA, 3003 bp, Homo sapiens
tttcgttgcggcctggcaccaaaggggcggccccggcggagagcggacccagtggcctcggcgattatggacccggccgaggcggtgctgcaagagaaggcactcaagtttatgatggagtttcgctcttggtgcccaggctggaatacaatggcgcgatctcggctcaccgcaacctccacctcccgggttcaatgctctatgcccaggtctctgtggctgggctgctccagcctggcggacagcatgccttcgctgcgatgcctgtataacccagggactggcgcactcacagctttccagaattcctcagagagagaagactgtaataatggcgaaccccctaggaagataataccagagaagaattcacttagacagacatacaacagctgtgccagactctgcttaaaccaagaaacagtatgtttagcaagcactgctatgaagactgagaattgtgtggccaaaacaaaacttgccaatggcacttccagtatgattgtgcccaagcaacggaaactctcagcaagctatgaaaaggaaaaggaactgtgtgtcaaatactttgagcagtggtcagagtcagatcaagtggaatttgtggaacatcttatatcccaaatgtgtcattaccaacatgggcacataaactcgtatcttaaacctatgttgcagagagatttcataactgctctgccagctcggggattggatcatattgctgagaacattctgtcatacctggatgccaaatcactatgtgctgctgaacttgtgtgcaaggaatggtaccgagtgacctctgatggcatgctgtggaagaagcttatcgagagaatggtcaggacagattctctgtggagaggcctggcagaacgaagaggatggggacagtatttattcaaaaacaaacctcctgacgggaatgctcctcccaactctttttatagagcactttatcctaaaattatacaagacattgagacaatagaatctaattggagatgtggaagacatagtttacagagaattcactgccgaagtgaaacaagcaaaggagtttactgtttacagtatgatgatcagaaaatagtaagcggccttcgagacaacacaatcaagatctgggataaaaacacattggaatgcaagcgaattctcacaggccatacaggttcagtcctctgtctccagtatgatgagagagtgatcataacaggatcatcggattccacggtcagagtgtgggatgtaaatacaggtgaaatgctaaacacgttgattcaccattgtgaagcagttctgcacttgcgtttcaataatggcatgatggtgacctgctccaaagatcgttccattgctgtatgggatatggcctccccaactgacattaccctccggagggtgctggtcggacaccgagctgctgtcaatgttgtagactttgatgacaagtacattgtttctgcatctggggatagaactataaaggtatggaacacaagtacttgtgaatttgtaaggaccttaaatggacacaaacgaggcattgcctgtttgcagtacagggacaggctggtagtgagtggctcatctgacaacactatcagattatgggacatagaatgtggtgcatgtttacgagtgttagaaggccatgaggaattggtgcgttgtattcgatttgataacaagaggatagtcagtggggcctatgatggaaaaattaaagtgtgggatcttgtggctgctttggacccccgtgctcctgcagggacactctgtctacggacccttgtggagcattccggaagagtttttcgactacagtttgatgaattccagattgtcagtagttcacatgatgacacaatcctcatctgggacttcctaaatgatccagctgcccaatctgaacccccccgttccccttctcgaacatacacctacatctccagataaataaccatacactgacctcatacttgcccaggacccattaaagtttgcggtatttaacgtatctgccaataccaggatgagcaacaacagtaacaatcaaactactgcccagtttccctggactagccgaggagcagggctttgagactcctgttgggacacagttggtctgcagtcggcccaggacggtctactcagcacaactgactgcttcagtgctgctatcaaaagatgtcttctatcttttgtgaatgattggaacttttaaacctcccctcctctcctcctttcacctctgcacctagttttttcccattggttccagacaaaggtgacttataaatatatttagtgttttgccagaatctctcttgctttgccattaagcagaagaactagtttccctgtatagcctgctgggagagacccacttctagggtatgggggatgcagcttcaagcccagtgcccagtgtctccctgttaactgcaggaatgccaagcacctggccagagcagcccagccccaatatgcttaggaggagacagagttccctctgtatagcctctgggacaagaaaaagaaaacacaagaatgtatacactggaagatttgggcctcctgcctgccttctctttgtttctgttcctcttcccatctactcccctacgccccttcaaccttttttctctgtctgcttcacctgagaagaaagtgtatgaagagagtgtcctcctctcgcatgagccagatcagccagaaaatgcaacacttggaagagttaaatgctgttcagtgaagatttcagccccaggcctttgctgcaagtgaccctgtggcaacagtggattctcagacatgatactctcatcatatttgcaactcttctctctctttcttccccacacccaagaggaggattggtggtagggggcaggcagagggggtggggagaagtttcctgggctccatcaatggctgcatcttttctggactcagcagtctccttgattccatgtagagtgttggaaaggagtt

SEQ ID NO: 2229 - DNA, 3003 bp, Homo sapiens; identical to SEQ ID NO: 2228

SEQ ID NO: 2230 - DNA, 3003 bp, Homo sapiens; identical to SEQ ID NO: 2228

SEQ ID NO: 2231 - DNA, 2176 bp, Homo sapiens
ggaggcgaggcttgtcggctgtcaaaggggcggcccggcccggcccggaagctacagcagcggcgcggagactgcggggcgggccatggcggcgaacctgagccggaacgggccagcgctgcaagaggcctacgtgcgggtggtcaccgagaagtccccgaccgactgggctctctttacctatgaaggcaacagcaatgacatccgcgtggctggcacaggggagggtggcctggaggagatggtggaggagctcaacagcgggaaggtgatgtacgccttctgcagagtgaaggaccccaactctggactgcccaaatttgtcctcatcaactggacaggcgagggcgtgaacgatgtgcggaagggagcctgtgccagccacgtcagcaccatggccagcttcctgaagggggcccatgtgaccatcaacgcacgggccgaggaggatgtggagcctgagtgcatcatggagaaggtggccaaggcttcaggtgccaactacagctttcacaaggagagtggccgcttccaggacgtgggaccccaggccccagtgggctctgtgtaccagaagaccaatgccgtgtctgagattaaaagggttggtaaagacagcttctgggccaaagcagagaaggaggaggagaaccgtcggctggaggaaaagcggcgggccgaggaggcacagcggcagctggagcaggagcgccgggagcgtgagctgcgtgaggctgcacgccgggagcagcgctatcaggagcagggtggcgaggccagcccccagaggacgtgggagcagcagcaagaagtggtttcaaggaaccgaaatgagcaggagtctgccgtgcacccgagggagattttcaagcagaaggagagggccatgtccaccacctccatctccagtcctcagcctggcaagctgaggagccccttcctgcagaagcagctcacccaaccagagacccactttggcagagagccagctgctgccatctcaaggcccagggcagatctccctgctgaggagccggcgcccagcactcctccatgtctggtgcaggcagaagaggaggctgtgtatgaggaacctccagagcaggagaccttctacgagcagcccccactggtgcagcagcaaggtgctggctctgagcacattgaccaccacattcagggccaggggctcagtgggcaagggctctgtgcccgtgccctgtacgactaccaggcagccgacgacacagagatctcctttgaccccgagaacctcatcacgggcatcgaggtgatcgacgaaggctggtggcgtggctatgggccggatggccattttggcatgttccctgccaactacgtggagctcattgagtgaggctgagggcacatcttgcccttcccctctcagacatggcttccttattgctggaagaggaggcctgggagttgacattcagcactcttccaggaataggacccccagtgaggatgaggcctcagggctccctccggcttggcagactcagcctgtcaccccaaatgcagcaatggcctggtgattcccacacatccttcctgcatcccccgaccctcccagacagcttggctcttgcccctgacaggatactgagccaagccctgcctgtggccaagccctgagtggccactgccaagctgcggggaagggtcctgagcaggggcatctgggaggctctggctgccttctgcatttatttgccttttttctttttctcttgcttctaaggggtggtggccaccactgtttagaatgacccttgggaacagtgaacgtagagaattgtttttagcagagtttgtgaccaaagtcagagtggatcatggtggtttggcagcagggaatttgtcttgttggagcctgctctgtgctccccactccatttctctgtccctctgcctgggctatgggaagtggggatgcagatggccaagctcccaccctgggtattcaaaaacggcagacacaacatgttcctccacgcggctcactcgatgcctgcaggccccagtgtgtgcctcaactgattctgacttcaggaaaagtaacacagagtggccttggcctgttgtcttcccctattttctgtcccagctcatccgtgtctctgaagaacaaatatgcttttggaccacg

SEQ ID NO: 2232 - DNA, 1154 bp, Homo sapiens
ccctcttagagccatcgtacatttacaccttggcatttggtgtgtacctcagttttccagggcctgacagtcctggatgaacttatagggtccaaaccagaaaagcaagggctcagaccctggcaccaaggctgctccatgtaaagaatgctaccccgtgtggccagactcgggtaagccaccttttaactgcttcagtgtaatttattttcccacatcccagaaagctctggaaaaacacataaatgaatacatttattctctcacaggatactacactgttacccagtgtgaagggagcagccatgtggctcccaagctcccttagcaaaagggtggttctcagaactgctccattcacgagtcctgcaaccagaggcctgggctcaactcacacaaagttctgagcaatggccagcaccttggaatactcgccttcccgcttgcgcaggctggtggggatgggtgtcttaattcgtgtccccacagggttcccgttgtcctcaatgaggaccacgttgttggagtcaaatctgggggtcattcgggggccaggcatgcagtgccccacaatgagcgcctttttcttctgtcccttgatggccagtagtatctggtcgcccaccttgcccactccattcttcttatagacatggatgcagcgaggagcccgatggtatgggctgttccccagggcactgttgtccaccactcgtacccgcgtcatcttctgaatcgcactcagactcccagtggtgctgaaacagtgatggctcagcactctgcttacacaggtgaaggggccccagagcccagtaaagaaagccatgggatcccaagatagatccgctctcgccgcccgggaaaatcccgccgcgggccccaccagcctgcgcaacggggaaggcgagtattccaaggtgctggccattgctcagaactttgtgtgagttgagcccaggcctctggttgcaggactcgtgaatggagcagttctgagaaccacccttctgctaaggaagcttgggagccacatggctgctcccttcacactgggtaacagtgtagtatcctgtgagagaataaatgtattcatttatgtgtttttccagagctttctgggatgtgggaaaataaattacactgaagcagtt

SEQ ID NO: 2233 - DNA, 1566 bp, Homo sapiens
atgctgtgtgccctgctcctcctgcccagcctcctgggggccaccagggccagccccacctcaggcccccaggagtgtgcaaagggctccacggtgtggtgtcaggatctgcagacagctgccaggtgcggggctgtggggtactgccaaggggccgtatggaacaaacccaccgcgaagtctctgccctgcgacgtatgccaggacatagcagccgccgctggcaatgggctgaaccctgacgccacggagtctgacatcctggctttggtgatgaagacctgtgagtggctccccagccaggagtcttcagccggatgcaagtggatggtggatgcccacagttcggccatcctgagcatgctccgtggggccccggacagtgccccggcacaggtgtgcacagcgctcagcctctgtgagccgctgcagaggcacctggccaccctgaggccactctccaaagaggacacctttgaggctgtggctccgttcatggccaatgggccccttaccttccacccccgccaggcgcctgaaggagctctgtgccaagactgtgtacggcaggtctcccgactccaggaggctgtccggtccaacttgaccttggccgacttgaacatccaggagcagtgtgagtccttggggcctggcctggccgtcctctgcaagaactacctcttccagttttttgtccctgctgaccaagcactgaggcttctccccccgcaggagctctgcaggaaggggggattctgtgaggagctaggggcacctgcccgtttgactcaagtagtggccatggacggggtcccctccctggagctggggttgccaaggaaacagagcgagatgcagatgaaggccggtgtgacctgtgaggtgtgcatgaacgtggtgcagaagctggaccactggctcatgtccaacagctctgagctcatgatcacccatgccctggagcgcgtgtgctcggtaatgcctgcctctatcacgaaggagtgcatcatcttggtggacacctacagcccctccttggtgcagcttgtggccaaaatcaccccagagaaggtgtgcaagttcatccgtctgtgtggcaaccggaggcgggcccgggcagtccatgatgcctatgccatcgtgccgtccccagagtgggacgcggagaaccagggcagcttctgcaatgggtgcaagaggctgctcacggtgtcctcccacaacctggagagcaagagcaccaagcgagacatcctggtggccttcaagggtggctgcagcatcctgccgctgccctatatgatccagtgcaagcacttcgtcacccagtacgagcccgtgctcattgagagtctcaaggacatgatggaccccgtggctgtgtgcaagaaggtgggggcctgccacggccccaggaccccactgctgggcaccgaccagtgtgccctgggcccaagcttctggtgcaggagccaggaggccgccaagctgtgcaacgctgtgcaacactgccagaagcatgtatggaaagagatgcacctccacgctggggaacacgcgtga

SEQ ID NO: 2234 - DNA, 1566 bp, Homo sapiens; identical to SEQ ID NO: 2233

SEQ ID NO: 2235 - DNA, 1622 bp, Homo sapiens
ttttttttttttaagagtccaagcatttattttattaccaaaaacaatttgttaataaacacgctcaatgcctccaatcctgtccctgaggataatcatgaaagtccttggggttgtagaggaaaccttaagaggaaaatggctacttggttatcaatgccttggctggtgacaaagaaaggacccttgcagggaccagtcacatgccatccttgggcctaaggagcccgaaagatgggaatggatgtgagctaaggatttaatcactgtcaagcagatcttgagggttatagttaagcctgataacagcctctttaacaagaacacacacatccaggatcccctcaaagaatccagagtcctcaggctccccacaaaatgtagtctggcagaaaagggaagtctttagagtctgcagaatgatgcaaacccaggccagagtggaccacactgctctcggcaccactcctaaaggcatccattggcaacggctgcccactaggggcactgccacttgcctggctcaaacttcaggacctggggaagaaatggtctggctctgcggccttcaaaccatctggatctctggctcctcagctattccttgaagcttttccatgatgccccctgaaggtggctcagggactgggggaggctcccctggggcttcagacagcacatagtagacaatctcttgctggccttgggcattggtctgattcaccacgtggatgacagaactggggttgtcctgagaggctgagagggctgtcccttcgctacccttgccctcctcttcctcttccttacgtcctggctcccctggcactgtttctagaataatgccctgcaggctgctctcgttcagcgacgttcccaggcccgatccctcttgtggttgccgcagcagttgctgtgtcagctctacactctcgtagcgaaccagctgcagccgcatatagccatcttcatgttccttgtaccgaaaacggggatgccctgagggccacttgaactggtgcttcttgcgaaggtgcacggtgaggttgttgccccgtgtgaagcatttgtcacacacatgacatttgtaccttggctcagagtctccttcatgtactttgcggtaatgggacttgatagagcagagggatcgggcactgaaggtgcagttctcaaaatcacacctgtaggctggctcctcgctgtgggtatccaggtgcttctggaggtcaataagattcttgcagctgtagtcacaacagtcacatttaaagggccggtcctcactgtgacgaaagcgcatgtggttgcggagggaggaaggcagcgggcaggtcatgtcacacagagggcacttatagtgattcacatggttgcgcatgtggtcccgcaatagccgctctgtggcaaatctcttggaacagtgagaacactggaagtgctgctgatccaatgaggtctggcgacggatgtgatctaagaacttggtattgttggcaaacatgcccccacaggtggggcaggctaccactttctcctgggtatggctgcggaggtgctctcgaagtttactgcggtccttgaaggtgcaggtacagcctttccagccctcggccgaagta

SEQ ID NO: 2236 - DNA, 2814 bp, Homo sapiens
  misc_feature (1)...(2814): n = a,t,c or g
ttttttttttttggcagctcactccaggtttatttcagggcagtttgggggtgggggacaaagacccccctccagctcctaaactgggtcacttttctcccaggtgaaggggaccatcctcatgggatcctatcgatgtgagagctttgtgtccaccaggtgtggctgggtgcaccaaggtgaagggtttgagggctgcacagggacccccagcactgggagtttggcctcctccctcagactggatggtttcccagggttggaaaggggcaggtctcccctctcagcttgggacttctcagagggaggagctgagtgtctcctccctcagacccgcagcccctcaaggtgctgcgatctgtgccaccctctttgaccggtccctctgccctcagactagcggaagcaaattacacctgaaagtggaggagcgggtctctttctttcttagacccagggcatttgggcaaagtcttagaagcagaaagaatcagcaggggtcccatttcatccccaaaagctttagaccccaaaggcagaaacatttctaaaggaagatagaaacggaaacgaaaaacccaacagtcccaaatgtgcccatggtgggattgttggcagatgagctgtggttcttggatcctggacctaggacccatttcctagggtgggggcttggcgatggtcttggcagttcccacgagggtcagggcagggcagggggtgggcgccccatcccgaggctcagtcatcctcctcactggcgtagatgcgggattcccagcgctctgccatggcgttcttgtgacgggtcacccgtatggcttccaggacctctgagttgataccgtccgaggggttgatgccagcgtaccattgctccttctttctctgcccgggaggagcactgtccactggatcttccactgtccacgccacgtttgagtgtaggtggatggggctgaagaagggagactcagacaccgagtaactgcccgtgatgccggatgcctgggaggagctcctggagttctggtcagagttctcatctggcgttggggagaagacctctgggaagagagcatttctccgctcctctgccacctcttgctcccggcgcaggacactctccctctccctttccagcagatcagatgactgggacttctgcagcctcagtgcaggggccccagccacctcccagccccagacatgggggacttgggcctgctggggctcgtctggggccctgaaccgcagaggacgcaggcggaagtactcccaccgcacgacacccctgttggcttgcgggcatccccgagggggcttcgatgcctcttgctttgtgctcaggggttttccagaggattctgagagatgcctcggggacatcgtggcctttggtgaagtcgcagccttggcctccgctgtggagagactgctgggcttgccgaatgctccgaaggctgagaattctagctggggggtcccggggctcaggtacggctggtaggcatcaggtgggatgcggttcaccttcctcacttctggagctgggtcggccgcacgggcatctggggccgggctgaggatggaatctgagctgagggctctccggagtccgggctggggaccctccgagacccagtcgggtgtggacgcccggcccacgtgcaggccctcccgccggtggtcttcctcacgctgtgtctcctgtactatgtcccgctgcacgtagagggacgggcgccctctctcccgccgtggggctgtgatcaggctcagcttggtcagcagcggcctggtggggatttccaccagctcctggtggtcggttgcctgccgaagccccctctgctctcgcaggtctgcctcacgctcctgagccagacggatctcccgctcgatgggcgtctccttgggggtccccggggactccactgaggccaaggagccagggtcatccacaacttggacactggcccaggtgggcacagcacgcaccttgttctcttccctgaccacccccttcacctggggcttgatgggaaccacgtgcccgttggccaggtggggcttgttgaaggccttgggggcctggctggcccctggggttgtgcctgcgggggtccccctggccggggagctatgaggggcccccttgttcgcctgctccagactcaggaactgctgtctcgctgccaggaagtcaatctgctccctgtcaaccacgttctcctccaggggcgtggaccgaggtgggccgggggtcctggggtctccgtggtcaggagtgccctggagcgtggccacggtgctgctcttcctgactgcctggccctggatgacggcccagcgctcccgctccaggtcacacagcctcctggggtcagcgtccccagcatccaggcggtaggtcttcatctccttgtcctccccgtcctctgggcggagtgcccatgttggacgtccctggtgggcatccctggcgcccaggcggtaaacctgccaaccctcatcctccctgttctccgagtggagcccccgtggggacggctggccagtgtaggcatgcacgctgtaggacaccccctgcctctgcacgccctgctgggccctgtggtcagtgggccatgtctgcggctcatcctggccccagccgctggcctcggggcccatgcacaccagatggtatgtgtagctggtgtctccatccagcaccaggccggtgccacgggtgttccctgagggaatgcccaaggaatnggggtaatttgggtcnacggcgggttcaatctctttccgggggtctttggg

SEQ ID NO: 2237 - DNA, 533 bp, Homo sapiens
agagagagaactagtctcgagttttttttttttttttcttttttccggcgttcaagatgtcgaagcgaggacgtggtgggtcctctggtgcgaaattccggatttccttgggtcttccggtaggagctgtaatcaattgtgctgacaacacaggagccaaaaacctgtatatcatctccgtgaaggggatcaagggacggctgaacagacttcccgctgctggtgtgggtgacatggtgatggccacagtcaagaaaggcaaaccagagctcagaaaaaaggtacatccagcagtggtcattcgacaacgaaagtcataccgtagaaaagatggcgtgtttctttattttgaagataatgcaggagtcatagtgaacaataaaggcgagatgaaaggttctgccattacaggaccagtagcaaaggagtgtgcagacttgtggccccggattgcatccaatgctggcagcattgcatgattctccagtatatttgtaaaaaataaaaaaaaactaaacccattaaaaaaaaaa

SEQ ID NO: 2238 - DNA, 2357 bp, Homo sapiens
tttcgtggcaggcgaggggccgtagggcctggaaggcgccagccgggccggcgggcggtgtgattgatccgcgtcccctggagctggaggctcgggggaaagggccagcacggagcgggcgctcggttgctgcgcacaaaggctgaggctccaagagctgcagggcgtgtttgggaccccagagtcagaaggagtgagaaccctgacccctaatcccactgcatccagccaataggagcccagccaccatggcggagctgcaggaggtgcagatcacagaggagaagccactgttgccaggacagacgcctgaggcggccaagactcactctgtggagacaccatacggctctgtcactttcactgtctatggcacccccaaacccaaacgcccagcgatccttacctaccacgatgtgggactcaactataaatcttgcttccagccactgtttcagttcgaggacatgcaggaaatcattcagaactttgtgcgggttcatgtggatgcccctggaatggaagagggagcccctgtgttccctttgggatatcagtacccatctctggaccagcttgcagacatgatcccttgcgtcctgcagtacctaaatttctctacaataattggagttggtgttggagctggagcctacatcctggcgagatatgctcttaaccacccggacactgttgaaggtcttgtcctcatcaacattgatcccaatgccaagggttggatggattgggcagcccacaagctaacaggcctcacctcttccattccggagatgatccttggacatcttttcagccaggaagagctctctggaaattctgagttgatacaaaagtacagaaatatcattacacatgcacccaacctggataacattgaattgtactggaacagctacaacaaccgccgagacctgaactttgagcgtggaggtgatatcaccctcaggtgtcctgtgatgctggtggtaggagaccaagcacctcatgaagatgcagtggtggaatgtaactcaaaactggaccccacccagacctcgttcctcaagatggctgactccggaggtcagccccagctgactcagccaggcaagctgaccgaggccttcaagtacttcctgcaaggcatgggctacatggcctcatcctgcatgactcgcctgtcccggtctcgtacagcctctctgaccagtgcagcatccgttgatggcaaccggtcccgctctcgcaccctgtcccagagcagcgagtctggaactctttcttcggggcccccggggcacaccatggaggtctcctgttgaatggcccttgttgccctagagtgggacccagccctcacctcccccagagctaacctgggaggtgctgaaggggcattgggccaccgtaagcaagggaaaaagggcagatcatgcggggagatgaccttgatctttgattgctaccctaaccttgacctttaacccgtgattccccccagctcctggaagagatgtcctaatatctcttagggacccagacccctaaattctcctcctcccccattttgatgttaaggtggagagggcatatgcatcctctgtcctgatctaggtgtctatagctgaggggtaagaggttgttgtagttgtcctggtgcctccatcagactctccctacttgtcccatatttgcaaggggaggggatttggggctggggctccattcaccaaagctgaggtggcttctcattaaccctttaggactctgaagggtatggacctacgtgaatgtgtgtcagggggagacttgctggtgggttagtggtcctcaggatgtgatagaaacatccagtgtaaaaaggaagttggaatgggagttggcgggcagtgaacgagtgtggggaaggattggtgctggggcaacaggaaggggcctggggccgtttggctgcactaactttggtagctcagtgtgcatctagagtgggactggggagggagctaagcttgggctgggctgcttggggcttggcatagggtggaaagggctaccctggggctctgaccacactgtagtatgtgtggagggtgccctcccgtctcccacaacttctgctataacaataaactgtagaggaatctgagtaccgttattattctttgtctaggtgtgcctgcatcatgctcctcttcctatcttctccctgtccacgtctcatattctcttctcaaagtgatataaaccctgggagagggcctttgtggcataggcacttcacaaaatatgaccacatagaaactggctcttttccaatacaacggtgttgccttgatattggagtatttttaagcctg

SEQ ID NO: 2239 - DNA, 2469 bp, Homo sapiens
gtcagcctcacgcggcgggaaggaaccggtccgaggccccgggctgccggcgcgggcgcccggcacgtccacaggctgggtcgcgaggtggcgatcgctgagaggcaggagggccgaggcgggcctggtagtcggcccggaggtggggcgccgctggggccggcccgcacgggcttcatctgagggcgcacggcccgcgaccgagcgtgcggactggcctcccaagcgtggggcgacaagctgccggagctgcaatgggccgcggctggggattcttgtttggcctcctgggcgccgtgtggctgctcagctcgggccacggagaggagcagcccccggagacagcggcacagaggtgcttctgccaggttagtggttacttggatgattgtacctgtgatgttgaaaccattgatagatttaataactacaggcttttcccaagactacaaaaacttcttgaaagtgactactttaggtattacaaggtaaacctgaagaggccgtgtcctttctggaatgacatcagccagtgtggaagaagggactgtgctgtcaaaccatgtcaatctgatgaagttcctgatggaattaaatctgcgagctacaagtattctgaagaagccaataatctcattgaagaatgtgaacaagctgaacgacttggagcagtggatgaatctctgagtgaggaaacacagaaggctgttcttcagtggaccaagcatgatgattcttcagataacttctgtgaagctgatgacattcagtcccctgaagctgaatatgtagatttgcttcttaatcctgagcgctacactggttacaagggaccagatgcttggaaaatatggaatgtcatctacgaagaaaactgttttaagccacagacaattaaaagacctttaaatcctttggcttctggtcaagggacaagtgaagagaacactttttacagttggctagaaggtctctgtgtagaaaaaagagcattctacagacttatatctggcctacatgcaagcattaatgtgcatttgagtgcaagatatcttttacaagagacctggttagaaaagaaatggggacacaacattacagaatttcaacagcgatttgatggaattttgactgaaggagaaggtccaagaaggcttaagaacttgtattttctctacttaatagaactaagggctttatccaaagtgttaccattcttcgagcgcccagattttcaactctttactggaaataaaattcaggatgaggaaaacaaaatgttacttctggaaatacttcatgaaatcaagtcatttcctttgcattttgatgagaattcattttttgctggggataaaaaagaagcacacaaactaaaggaggactttcgactgcattttagaaatatttcaagaattatggattgtgttggttgttttaaatgtcgtctgtggggaaagcttcagactcagggtttgggcactgctctgaagatcttattttctgagaaattgatagcaaatatgccagaaagtggacctagttatgaattccatctaaccagacaagaaatagtatcattattcaacgcatttggaagaatttcctacaagtgtgaaagaattaggaaaacttccaggaacttgttacagaatattcattaaagaaaacaagctgatatgtgcctgtttctggacaatggaggcgaaagagtggaatttcattcaaaggcataatagcaatgacagtcttaagccaaacattttatataaagttgcttttgtaaaggagaattatattgttttaagtaaacacatttttaaaaattgtgttaagtctatgtataatactactgtgagtaaaagtaatactttaataatgtggtacaaattttaaagtttaatattgaataaaaggaggattatcaaattcatatatgataaaagtgaatgttctaagtctctcaaactagcgttttatgtaataatatgtaatataaataaaactatggtaaatgtgacaagcatttaataggaaaatgctaaggaggcctcataaatgacccataattaccaacgtagaatttttcagtacatttagggttgctggatttagcaaataaaaataaagattgcccagttagatttgaatttcagataaacaattagttttttaatattttacatggaatatttggaaaatacttatactaaaaaattatttgtttgaaattcaaatttaactgggagtcttgtattttatctggcaatcctaaaatacattggtatgaaacaaatcacttttagaagtatattgctattttgattgggttgtttttgtgtgtagaaacgtacaataacaactcaaaggcacaggagatttctaaacattgtgaaaagttgaatagattatatatttattctcataatactttcactaatactaaataaaatttggggaacacttttt

SEQ ID NO: 2240 - DNA, 1219 bp, Homo sapiens
tcccgggtcgacgatttcgtgggaccgggacgcagctggggagtcagggacgcgcgcagccagcccttccccctccggctcccgcaccgccggccgcctcccctcgccctcctactctcccctccctgctccttcgctttttcctcctcctcctctcccggccccggctgccagcaccatgtccgcagggggagattttgggaatccactgagaaaattcaagttggtgttcttgggggagcagagcgtcgggaagacgtctctgattacgaggttcatgtacgacagcttcgacaacacataccaggcaaccattgggattgacttcttgtcaaaaaccatgtacttggaggaccgcacggtgcgactgcagctctgggacacagctggtcaggagaggttccgcagcctgatccccagctacatccgggactccacggtggctgtggtggtgtacgacatcacaaatctcaactccttccaacagacctctaagtggatcgacgacgtcaggacagagaggggcagtgatgttatcatcatgctggtgggcaacaagacggacctggctgataagaggcagataaccatcgaggagggggagcagcgcgccaaagaactgagcgtcatgttcattgagaccagtgcgaagactggctacaacgtgaagcagctttttcgacgtgtggcgtcggctctacccggaatggagaatgtccaggagaaaagcaaagaagggatgattgacatcaagctggacaaaccccaggagcccccggccagcgagggcggctgctcctgctaatgcagagccgacctgtggcttcccatgacactccttgcttgttgtgttgcttcctattggctagcttcctaaggggggagggaaccgagttatcaagatgggaggatttttcttttctctctgtctttaggagtagggtgggatggggagggaggctgggcatcagggatcacatcactcttaacaacacattggtcataggagttactgatgttctatctacattaatgaacagctattggtgtatgcacagaggatacctcttaaggatgtactaaatggactttgtttggttgatgctgaaaattaattaccaaatcttaacttgcacgtgttaccttgtgaagggaactgcattagcaatgagagctacatcatcatgaagtactttaatgccatgaaattgcaaacact

SEQ ID NO: 2241 - DNA, 5054 bp, Homo sapiens
tgcccgaagtgacgaaaccaagtttaagccaaccaacggccgccagcccaattggcagctctccatcgccaccagtcaatggtggcaacaatgccaaaagggtggcagtgccgaacggacaaccgccaagcgccgcccgctacatgcctcgggaggtgccgccgcgattccgttgccagcaggaccacaaagtgttactaaaacgtgggcagccccctccaccgtcctgcatgctccttgggggtggggcagggcctcctccctgcacagcacctggagcaaacccaaacaacgcacaagtgacaggagcgctgctgcagagtgagagtgggactgcgccagactcaacccttggaggtgctgctgcttcaaattatgcaaattccacttggggctcgggagcctcctccaacaacggcacctcccccaacccaattcacatctgggacaaggtgattgtagacgggtctgacatggaagagtggccttgtattgccagcaaagacactgaatcttcttccgaaaacaccaccgataacaacagtgcctcgaaccctggctctgagaagagcactctgccaggaagcaccactagtaacaaaggaaaagggagccagtgccagtctgcaagttctgggaacgaatgtaatcttggggtctggaaatctgaccctaaggctaaatctgttcaatcttccaactctactacagagaacaacaatggactaggaaattggaggaatgtgagtggtcaggatagaattggacctggctctggcttcagcaactttaacccaaatagcaacccatctgcctggccagcactggtccaagaaggaacttctaggaaaggggcattggaaacagataatagtaattccagtgcacaggttagcacagtaggtcagacatccagggaacagcagtcaaagatggaaaatgcgggtgttaattttgttgtctctggcagagaacaggctcaaattcataacactgatggaccaaaaaatggaaacactaactccttgaacttaagttcaccaaaccccatggagaataagggaatgccctttggaatgggcttggggaacacctccaggagcactgatgccccttcacaaagcactggagatcgaaagactgggagtgttggatcttggggtgcagctagggggccttctggaactgacacagtctctggacaaagcaattctggaaacaatgggaacaatggaaaagagagagaggactcctggaaaggagcttctgttcagaaatcaactgggtcaaaaaatgactcttgggacaacaataacaggtctacgggtgggtcctggaactttggcccccaggactctaatgacaacaaatggggtgaagggaacaaaatgacatctggggtctctcagggagaatggaaacagccgactgggtctgatgagttgaaaattggagaatggagtggtccaaaccaaccaaattctagcactggagcatgggacaatcaaaagggccaccccctccttgaaaaccaaggcaatgcccaggctccctgttggggaagatcttccagctccacaggaagtgaagttgaaggtcaaagcactggaagcaaccacaaagcaggaagtagtgacagtcataactctggccgtcggtcgtacaggcccacacatcctgattgtcaggctgtcttgcagactcttttgagccgaactgatttggaccccagggtgctctcaaacactggctggggccaaactcaaattaagcaggacacagtgtgggacattgaagaggtgccaaggcctgaggggaaatctgacaaaggaactgaggggtgggagagcgctgccacacagaccaagaactcagggggctggggagatgcacccagccaaagcaatcaaatgaagtctggatggggggagctctcagcctctacagagtggaaagaccccaagaacacaggaggctggaatgactacaagaacaacaactcttccaactggggaggaggacgacctgatgaaaagacaccttcctcttggaatgagaatcccagcaaggatcaggggtggggaggtggacgccagcccaatcaaggatggtcttctggaaagaatggttggggggaggaagtcgatcagacaaaaaacagcaattgggaaagttctgcaagtaaacctgtgtctgggtggggtgaaggagggcagaatgaaatcgggacttggggtaatggtggcaatgcaagcctagcttcaaaaggtgggtgggaggattgcaaaagatccccagcatggaatgagacgggccgacagcccaattcctggaataaacaacaccaacagcagcagcccccacagcagccgccgccaccacaaccagaggcttctggttcgtggggaggcccacccccaccacctccaggcaacgttcgaccttccaattccagctggagcagcgggccacagcctgcaacacctaaggatgaggaacccagtggttgggaagagccatccccacagtcaattagtcggaaaatggacattgatgatggcacttcagcatggggagaccctaacagttataactacaagaatgtgaatctgtgggataagaattcccaagggggcccagcacctcgagaaccaaacctgcccaccccaatgaccagtaaatcggcatcagattccaaatctatgcaagacggctggggggagagtgacgggccagtcacaggagctcgccatcccagctgggaagaggaggaggatggaggagtctggaacaccactggctctcagggcagtgcttcctcccacaactcagcaagctggggacaaggaggaaagaaacaaatgaagtgctcactcaaaggaggaaacaatgattcatggatgaatcctcttgccaaacagttttcaaatatgggattgctgagtcagactgaagataatccaagcagcaaaatggatttgtctgtaggaagcctttcagataaaaaatttgatgtggacaagcgagcgatgaatctcggggattttaatgatatcatgaggaaggatcgatctgggttccgtccacctaattccaaagacatgggaaccacagatagtgggccttattttgagaagggcggtagtcatggtttgtttggaaacagcacagcacaatcgagaggtctgcacacacccgtgcagccactaaattcttctcccagtctccgggcgcaagtgcctccccagtttatttccccccaggtttctgcctcaatgctcaagcagtttcccaacagtggcctgagtccaggtcttttcaatgtggggccccagttatctcctcaacaaattgccatgctgagccagcttccacaaattccccagtttcagttggcatgtcagcttctcttgcagcagcagcaacagcagcagttgttacagaaccagagaaagatttctcaagctgtacgccaacagcaagagcagcagctggctcgaatggtgagtgcactgcagcagcagcagcagcagcagcagaggcagccaggcatgaagcactcgccctctcatcctgttgggcccaagccgcatctggacaacatggtacccaacgcattgaatgtggggctcccagaccttcaaaccaaagggccaatacctggatatggttctggcttcagctctggcggcatggactatggcatggttggtgggaaggaggctggaaccgagtctcgctttaaacagtggacctccatgatggaggggctgccctctgtagccacacaggaagccaatatgcacaaaaatggcgctatagtggcccctggtaaaacccggggagggtcaccgtacaaccagtttgatatcatccctggtgacacactgggtggccatacgggtcctgctggtgatagctggttacctgccaaatctccaccaacaaataaaatcggaagtaaatccagcaatgccagttggcctccagaattccaaccaggagtgccatggaaaggtatccaaaacattgaccctgaatctgacccctatgtcaccccaggaagtgtgctggggggtacagccacatctcccattgtagatactgaccaccaactgctgcgggataacaccacagggtctaattcttccctcaacacctcgctgccttcacctggtgcctggccctacagtgcctctgacaactcctttaccaacgttcatagcacttcagcaaagttccctgattacaaatcaacatggtccccagatcccataggacacaaccccactcatctctccaacaagatgtggaaaaaccatatttcctccaggaacactacaccgctgccccgcccacctcctggtctgaccaaccccaaaccatcatctccctggagcagcacagcaccccgatcagtcagggggtgggggacacaggactcacggctcgcctcggcctctacctggagtgatggtggctcagttcgtcctagttactggctggttcttcacaatctcaccccacagattgatgggtcaaccttgagaacgatctgcatgcagcatggcccactgctgacattccatctgaatctaacccagggcactgccctgatccgatacagcaccaaacaggaggcggccaaggcccaaactgcactgcacatgtgtgtgttgggaaacactaccatccttgctgagtttgccactgatgatgaagtcagccgctttctggcacaagctcagccccctacacctgcagcaaccccaagtgcgccagctgcggggtggcagtcgctggagaccggccagaaccagtcagatcccgtgggacctgctctgaatctttttggtgggtccactgggctcgggcagtggagcagcagcgctggtggcagcagcggggccgatcttgctggcgcttcattgtgggggcccccaaactattcttctagcttatggggagtcccaacggtggaagatccccataggatgggcagccctgctcctttactacctggtgaccttctgggaggagggtcggattcaatc

SEQ ID NO: 2242 - DNA, 2460 bp, Homo sapiens
ctcgctgttgtcctccccgttcctcaagggattcctggctggctatgtggtggccaaactgagggcatcagcagtattgggctttgctgtgggcacctgcactggcatctatgcggctcaggcatatgctgtgcccaacgtggagaagacattaagggactatttgcagttgctacgcaaggggcccgactagctctaggtgccatggaagaggcaggatgagcagctcagccttcaggtggagacactttatctggattccccagctgtcatccatttgctatctccaactttcctgccaccttcatccttgcctcccttcctgcagattgtggacagtagttcctcagcctgcaccctggattccttcttccccttcctagctccatgggactcgccccaagactgtggcttcaaggaccaccagccccttactcttcaagccctgactgtggagttggcccgctggaccctgatgctactcctatccactgccatgtacggtgcccatgccccattgctggcactgtgccatgtggacggccgagtgcccttccggccctcctcagccgtgctgctgactgagctgaccaagctactgttatgcgccttctcccttctggtaggctggcaagcatggccccaggggcccccaccctggcgccaggctgctcccttcgcactatcagccctgctctatggcgctaacaacaacctggtgatctatcttcagcgttacatggaccccagcacctaccaggtgctgagtaatctcaagattggaagcacagctgtgctctactgcctctgcctccggcaccgcctctctgtgcgtcaggggttagcgctgctgctgctgatggctgcgggagcctgctatgcagcagggggccttcaagttcccgggaacacccttcccagtccccctccagcagctgctgccagccccatgcccctgcatatcactccgctaggcctgctgctcctcattctgtactgcctcatctcaggcttgtcgtcagtgtacacagagctgctcatgaagcgacagcggctgcccctggcacttcagaacctcttcctctacacttttggtgtgcttctgaatctaggtctgcatgctggcggcggctctggcccaggcctcctggaaggtttctcaggatgggcagcactcgtggtgctgagccaggcactaaatggactgctcatgtctgctgtcatgaagcatggcagcagcatcacacgcctctttgtggtgtcctgctcgctggtggtcaacgccgtgctctcagcagtcctgctacggctgcagctcacagccgccttcttcctggccacattgctcattggcctggccatgcgcctgtactatggcagccgctagtccctgacaacttccaccctgattccggaccctgtagattgggcgccaccaccagatccccctcccaggccttcctccctctcccatcagcagccctgtaacaagtgccttgtgagaaaagctggagaagtgagggcagccaggttattctctggaggttggtggatgaaggggtacccctaggagatgtgaagtgtgggtttggttaaggaaatgcttaccatcccccacccccaaccaagttcttccagactaaagaattaaggtaacatcaatacctaggcctgagaaataaccccatccttgttgggcagctccctgctttgtcctgcatgaacagagttgatgaaagtggggtgtgggcaacaagtggctttccttgcctactttagtcacccagcagagccactggagctggctagtccagcccagccatggtgcatgactcttccataagggatcctcacccttccactttcatgcaagaaggcccagttgccacagattatacaaccattacccaaaccactctgacagtctcctccagttccagcaatgcctagagacatgctccctgccctctccacagtgctgctccccacacctagcctttgttctggaaaccccagagagggctgggcttgactcatctcagggaatgtagcccctgggccctggcttaagccgacactcctgacctctctgttcaccctgagggctgtcttgaagcccgctacccactctgaggctcctaggaggtaccatgcttcccactctggggcctgcccctgcctagcagtctcccagctcccaacagcctggggaagctctgcacagagtgacctgagaccaggtacaggaaacctgtagctcaatcagtgtctctttaactgcataagcaataagatcttaataaagtcttctaggctgtagggtggttcctacaaccacagccatgattgtcttgtgtcttctgtctgcgcaactcccctcaaacaattttgttcctctggggtcctgagtatcttaattctgggataacttttagactaagaaaaaattgttttctccaa

SEQ ID NO: 2243 - DNA, 922 bp, Homo sapiens
cgctccacgcgcgcccggactcggcggccaggcttgcgcgcggttcccctcccggtgggcggattcctgggcaagatgaagtgggtgtgggcgctcttgctgttggcggcgctgggcagcggccgcgcggagcgcgactgccgagtgagcagcttccgagtcaaggagaacttcgacaaggctcgcttctctgggacctggtacgccatggccaagaaggaccccgagggcctctttctgcaggacaacatcgtcgcggagttctccgtggacgagaccggccagatgagcgccacagccaagggccgagtccgtcttttgaataactgggacgtgtgcgcagacatggtgggcaccttcacagacaccgaggaccctgccaagttcaagatgaagtactggggcgtagcctcctttctccagaaaggaaatgatgaccactggatcgtcgacacagactacgacacgtatgccgtgcagtactcctgccgcctcctgaacctcgatggcacctgtgctgacagctactccttcgtgttttcccgggaccccaacggcctgcccccagaagcgcagaagattgtaaggcagcggcaggaggagctgtgcctggccaggcagtacaggctgatcgtccacaacggttactgcgatggcagatcagaaagaaaccttttgtagcaatatcaagaatctagtttcatctgagaacttctgattagctctcagtcttcagctctatttatcttaggagtttaatttgcccttctctccccatcttccctcagttcccataaaaccttcattacacataaagatacacgtgggggtcagtgaatctgcttgcctttcctgaaagtttctggggcttaagattccagactctgattcattaaactatagtcacccgtgaaaaaaaaaa

SEQ ID NO: 2244 - DNA, 2196 bp, Homo sapiens
cggcaactgagaggaagcaaagggaaaaaaactccattaaaaagcccagctttcctccatgttagatgtgacttggaaaatgagaaagatttagcaaaattccaccgtgtcttttgccaggctagagacagggagagcagagtaaaaccctcaggctgctgaaatttctaggctgttaggaagcccctcgaattctgtgaaaatgagggtttcttaactcacactgagagcggaaaggggcagacccttttcataactccctcaagtgtgtgttacctttctttaccagcatggtaagcaacaggacatatcccagcctcggacatgtctgtatgatccaaggtacccaaagtcagacagagtaaactcaagcctggcactggctttctgccgcttcatgtgctttggaaaaagcaggagaagcaatagcagcaggagtccccagcagctggagccgcaagaatgaactgcaaagagggaactgacagcagctgcggctgcaggggcaacgacgagaagaagatgttgaagtgtgtggtggtgggggacggtgccgtggggaaaacctgcctgctgatgagctacgccaacgacgccttcccagaggaatacgtgcccactgtgtttgaccactatgcagttactgtgactgtgggaggcaagcaacacttgctcggactgtatgacaccgcgggacaggaggactacaaccagctgaggccactctcctaccccaacacggatgtgtttttgatctgcttctctgtcgtaaaccctgcctcttaccacaatgtccaggaggaatgggtccccgagctcaaggactgcatgcctcacgtgccttatgtcctcatagggacccagattgatctccgtgatgacccaaaaaccttggcccgtttgctgtatatgaaagagaaacctctcacttacgagcatggtgtgaagctcgcaaaagcgatcggagcacagtgctacttggaatgttcagctctgactcagaaaggtctcaaagcggtttttgatgaagcaatcctcaccattttccaccccaagaaaaagaagaaacgctgttctgagggtcacagctgctgttcaattatctgaggttgtctgggacctgcctccaccccatccagggatgagaatggcagccaatctctgtggccaagctccagccaaaaaggagggcacgaccagaaaggaactccctttgcacggaggcttgccccatcaccctctgagccctcccaacacagcacactagtcagcccactgccacgacctccctgccagccagaagcatccgtactgcacgctgtctgagaatgctgggcctggattgcagacagtgccgctgctgatcgcatcaaaaacaaagtcaaaggccatctcacattttacaaatccccagctcatgaacgtgaagctgataggaaatcaccccagggaacccgaaaaagaaacttgattcctctattgctggccttacttgatgtcttttataaaacttgggactacaatactaacctttttttctgaatctgctgttctacccatgtgtctcacattcatttgtattatttcaagaaatgtactaatttccagttcactcaggccttactaatccataccaaattagcctaaagacaaggcattttatattcatttctattttcagcatgtttctaccaaagctattagaaccaacacgtacctctgaatgcccgattataagaagacatgagaagactttaaaagttttggaaatttacagagccatgatttttgaacctaattgaaagaaaaccatctgaattgttgcaggtccacatttttgccaaagatacactctatagatgcttagtagtggcctgatttttttccatgtattgccacgacaaactaaaaatgaactgtgtttaagaatgtagtatttctgtttttcatccaagttgattgggggaagaatatggcaggatccatcttttacagtattttgtattcagtaaaggggacattcctgctcctcccttcccccattgcatgccctcttcctcccttgatttcactttctctcatgcccggatccttttattctccccagttataacccagttataaaagaaagatctgagcataaagatacgtgtttaaaaataactaaaagtaaaggaaagtgccttaaaaaaaaaa

SEQ ID NO: 2245 - DNA, 1088 bp, Homo sapiens
cgacccacgcgtccgcttccctaggctatttctgccgggcgctccgcgaagatgcagctcaagccgatggagatcaaccccgagatgctgaacaaagtgctgtcccggctgggggtcgccggccagtggcgcttcgtggacgtgctggggctggaagaggagtctctgggctcggtgccagcgcctgcctgcgcgctgctgctgctgtttcccctcacggcccagcatgagaacttcaggaaaaagcagattgaagagctgaagggacaagaagttagtcctaaagtgtacttcatgaagcagaccattgggaattcctgtggcacaatcggacttattcacgcagtggccaataatcaagacaaactgggatttgaggatggatcagttctgaaacagtttctttctgaaacagagaaaatgtcccctgaagacagagcaaaatgctttgaaaagaatgaggccatacaggcagcccatgatgccgtggcacaggaaggccaatgtcgggtagatgacaaggtgaatttccattttattctgtttaacaacgtggatggccacctctatgaacttgatggacgaatgccttttccggtgaaccatggcgccagttcagaggacaccctgctgaaggacgctgccaaggtctgcagagaattcaccgagcgtgagcaaggagaagtccgcttctctgccgtggctctctgcaaggcagcctaatgctctgtgggagggactttgctgatttcccctcttcccttcaacatgaaaatatatacccccccatgcagtctaaaatgcttcagtacttgtgaaacacagctgttcttctgttctgcagacacgccttcccctcagccacacccaggcacttaagcacaagcagagtgcacagctgtccactgggccattgtggtgtgagcttcagatggtgaagcattctccccagtgtatgtcttgtatccgatatctaacgctttaaatggctactttggtttctgtctgtaagttaagaccttggatgtggtttaattgtttgtcctcaaaaggaataaaacttttctgctgataagataaaaaaaaaa

SEQ ID NO: 2246 - DNA, 2803 bp, Homo sapiens
  misc_feature (1)...(2803): n = a,t,c or g
gcgtgctgctgggcctgagctgtctgtctcgtttctgtccgcgcgccctgcatcccggccccgggcgcccgctggaggtcgccgaggagccacagggctgactggtctgctgcccgggcccaggagtgcctggtgtagcagtcgcggagccatcccggcgtctgctgccatgaccgactctcccctcagaggagactcttcctcagcggtggctgcagagacagatgagcggcggctcctggccgcgggaccgtgagacgggttcgtggccggccatttagggggacgctgcgaccaccgcctgcgcccctccggactggttccttgggccccggaagctcgcggcgggccctgcgggaggcggcatgctcccgcggaggctgctggccgcctggctggcggggacgcggggcgggggcctgctggcgcttctggccaatcagtgccgcttcgtcacgggcctgcgcgtgcggcgcgcgcagcagatcgcgcagctctacggccgcctctactccgagagctcacgccgcgttctcctcggtcgcctctggcgccggctgcacggccgtcctggccatgcctctgccttgatggcggcgttagccggcgtcttcgtttgggacgaggagaggatccaggaggaggagttgcagagatctattaatgagatgaagcggttggaagaaatgtcaaatatgtttcagagctctggagtccagcaccaccctccagaaccaaaagcccaaacagaagggaatgaagattcagagggcaaagagcaacgttgggaaatggtgatggataagaaacactttaagctgtggcggcgcccaattacaggcacccacctttaccagtaccgagtttttggaacctacacagatgtgacacctcggcagttcttcaatgttcagctggacacagagtatagaaaaaaatgggatgccctggtaatcaagctggaggtgattgagagggatgtggttagtggttccgaggttcttcactgggtaacccattttccttatccaatgtactcacgggattatgtttatgttcggcggtatagtgtggatcaggaaaacaacatgatggtgttggtgtcgcgtgctgtggagcatccgagtgtgccagagtctccagaattcgtcagggtcagatcatatgaatcccaaatggttatccgtccccacaagtcatttgatgagaatggctttgactacttactaacatacagtgacaatccccaaacggtgtttcctcgctactgtgttagttggatggtttccagtggcatgccagatttcctggagaagctgcacatggccactctgaaagccaagaatatggagattaaagtaaaggactacatctcagctaagcctctggaaatgagtagtgaagccaaggccaccagccagtcctctgagcgaaagaacgagggcagctgtggccctgctcggattgagtatgcttgacaggctttgggataagaagggacaaggtgcttctagccctgtctcagtccgttatcactctgctgtagaagggggacatgccacatgtattagaaggcatctgctgtaacttccagtgcaagataattcaataactgatgtcccatttcattcagagcccttattgctcttatcaaaacagaagaaggctacatttgtgggagtgttgtcatattctcaggccaactgttttgaaattcggtatctcactgagctaatctggaacaaacctctcacctcaggccagaaggggatgacctccatttgcttctctgagtagtttcctctgctgacattccaaatcccaccatcgattgtgcagcgctttggatttccttcagttctccaggtccacctggaaagtatagttggccagttgagtctctcaaatgaggggctactgggagtgctcttggtaacaatcatgatgtgaatgggtgtgaacgatacttggctatgttaagtgccttgtccgcaccttgcttttatctctagagacatgaagttattattaattttttttttttttaagtagagatggagtttcactctgtttcccaggctggtcttgaactcctgggccatgcctggccagggacatgaatttgtacaaagaaatttccctccctgcctgcacaatatcacccattgactcaccttatccaaagcaagtttcctgtgaatcggccagttcttctatattcattggatcattgcctccttcctaaccttccccatttaccaagaacactgggagactaatccttttagatagtagctttttgatgctcaaaacatcacatttaaatttagtttaaaaattttttaacttttgtgtcaaataggagttgaggaattgagcaggattctaccctagtccgattgtatagaaaacaccattttgattcaggtattatttttcatatttcaggtttgacttgttcttttcagaaggctaaagtcagaggaatgggggctgggccactcccttggagctctcagatctacagacaagctgtgtgaatgcatagatgtaatcttgtctcaaatactaatacagtggagatttggtttatgttaccattaagttcctctaaaaagtttttcttcctctcttcagagccaaaataaaagtgaactacactgttcagataaggtcacaatctgatgctgtcagtttgaccgagctggttttgcttatggtcatgctgcaatttgttagaataatagggatcaagttttaaatcctcctccttccctttgttctggagtcttgaagccanaat

SEQ ID NO: 2247 - DNA, 2116 bp, Homo sapiens
tttcgtctctctggaggaggctgggctgccgggcctgtcctccaaggaagaagcagcaccaacttgaagctggatgcagccttgcatgtgttctcaggtcttctgcctcagtttccctgcctgacaatccaggggagcaatgcctgtggggctgctcactgcccccagaccttctgcacatgtgtgactcctgtgacatcatctgtctccaggtttccagacttctcagccccacccttgcagcagcaggtcagcctggcttttagaaagagaattttatttggaatgaaaatatagagcccaccctcccgcctcctctggggagggagcagagggctgggcagtggtcggggagatggtccctcagaggtcgaggagctcgcctgggcgtagacatcctccacaggaacagtgaggaaagctgggcgctggcttcggcctgggcctgggacgggtgggggtgggaactgacccctgcgctgcctcagaggctctgggcagccagctagcccggtgcgacccgctggcagaagctgagtgggaagggggcggcggaggagatgaaggtggcgtgtggctgtggccctacgcatccccgttctccatgcggcccagctgctcctccaggcggcagatgcggtcgccctgctccttgaccagcgccctcagggcccgcagctcctgcatcacctcctccagcttcccagcctccccggctctggccaggctgccgctgggggtggcatcagcagcagtggtggtggaggcgggggcccctaggtgggaggagcccggggccatggcgggccggctgtcagacaacacgttgcgccggctgatcttcaggtcccgctgcttgctgggcacgtaggcctcccgcagtgagatgaggatcgggtcggcatcccgcccgctcacccactcctcagcctccagggctgcctcgggcccggctgtgtcggggtacagatcatcctggaagaggtccgactttcttggcacagtcatgacgatgggctcacacttgcgctcatgcagtttgtagaaccgggcgatctcgcacttgctgacctccaggccccgcttgggcatgctgcccataccccgctgcggctccttgctggtgaacgtgttcaggaagtggatgtagggaggctcctctgtgatctcaaagtaccggatgctggagtcacccttgccgcagacgtagaccacactggtgtcggggtcgtagaagggcagcagggccccgttgctcgagtccagttcctgcagggccatgggttcctcgaggttttctgggtcccagagcgccagctgccgctcgctcattcggctgaagcctgtggtgaacaccttgccatctgccaggaagatggcccgcatgggccgggccccctcatgagccttctcccgctctgccaccagggtgccccgacgggggtcgatgatgcgcacgctcttgtccttgcatgctgagcaaaacaggctgccattgtggttccagctgacattgtagatgaggtcagggtgcaggctgtccaggcggtacagctcctccgctgtgcccacattccagatgagtaccacgttgtcgcagcctgcactgagcagcacgtttcgggccgtggggtgccaggcgatgatgcccactcgcttggtgtgcccctccagtaccaccaccggctctgtcagcggggaggtcagcccgttctctgggatctgccacaccatgaccgtgcagtcctccgagccgctggctatgacttcgtcgttgtgaggacaccagtcgatgtccaggacaggtcccgtgtgcccacacaccgtcgggtaggccttgtcaatgcggcccgtcttgcttagggggagcaccagaaaggcaccccctccactggcctccacaatcaccgccaggaacttggggttgacggcgcagaaggtgctgtcccaggtaacacgggacacgcgaatgtcctcatagcactggtcgttcttgaccggctgcccgaacacatgccggaatttgctctgccggaccactttgcggaaggacatgtcggggtcaccgggggcgcagggggatgaggcaccggcttcgggcggctccggaacgaaa

SEQ ID NO: 2248 - DNA, 1079 bp, Homo sapiens
tacggctgcgagaagacgacagaaggggactccctctctcttctccactatggacagagcctccactgagctgctgcctgcccgccacatacccagctgacatgggcaccgcaggagccatgcagctgtgctgggtgatcctgggcttcctcctgttccgaggccacaactcccagcccacaatgacccagacctctagctctcagggaggccttggcggtctaagtctgaccacagagccagtttcttccaacccaggatacatcccttcctcagaggctaacaggccaagccatctgtccagcactggtaccccaggcgcaggtgtccccagcagtggaagagacggaggcacaagcagagacacatttcaaactgttccccccaattcaaccaccatgagcctgagcatgagggaagatgcgaccatcctgcccagccccacgtcagagactgtgctcactgtggctgcatttggtgttatcagcttcattgtcatcctggtggttgtggtgatcatcctagttggtgtggtcagcctgaggttcaagtgtcggaagagcaaggagtctgaagatccccagaaacctgggagttcagggctgtctgaaagctgctccacagccaatggagagaaagacagcatcacccttatctccatgaagaacatcaacatgaataatggcaaacaaagtctctcagcagagaaggttctttaaaagcaactttgggtccccatgagtccaaggatgatgcagctgccctgtgactacaaggaggaagagatggaattagtagaggcaatgaaccacatgtaaattattttattgtttcatgtctgcttctagatctaaaggacactagcattggcccaggatcttgggagcaagctaccaacaggggaggactcttttcctgtatgggacaggctgctgtgggaaatacttgcctgcttctccccacctcctcaagagccacaggaaagaggaggtgacaagagagagagcaaggaaagtgatgaggtggattgatactttctaactttgcattaaaattattttctagcctgcaaaaaaaaa

SEQ ID NO: 2249 - DNA, 1079 bp, Homo sapiens; identical to SEQ ID NO: 2248

SEQ ID NO: 2250 - DNA, 4504 bp, Homo sapiens
ttttttttttttcagactttcagcccctttaattaggtgctctgagaagaggtcagaatggcaggcagggggtggggaaggcggtgcttcttgagccccacttagcaactggtcactcatcctctggcagctggatcttgctggggtcgaagcagttggattccatgatgggaaggccattggcctctcggtatttcacaagcctctcagcttcgcggcgggaccactctttcatcctgtagtcaggcagataggccacaaaggtgctgccaaggaccaggatgatggagacgccaaagaagaagacaagtcgcatgttccagacgtccaaaacggggtccttgtcataaccatgggagtctgggttcttctcatacaagttttcgtcctcgggttctgggtcctcttgccacggtgtggtcggttctgggggccgctttcccgccacagcggacggggcgaccacagtcctggagaagctagattcccagcggacgcgggcggccgggagccctcgcgtcgccgctgccgccaaaagacggcgagcgctcaaaccaaacagcccagccgccatgacagatggtgctgcagggtctcaggggcggggaaagaaatgcgactgtgcgcagctgcagtgggtgcgagcgcgacaatcatcgccccgcctccgccacgctatataggtcccagatctgatttggttttccaatgaggcggggcgttgagcaaccctctttgcctccagttgtcgtggcttcgtggggccaaccattttcggccaggctgagaaatttcttattgatgggtctgctcatttcctgcataggaagaaatcggtgacatttgggtggatacagttcccagccaatcgccccgagttccctcgcccactggggaaagaggcagacgtccgctagtctttcatcttcaaaggaaatcaagcttctaaaaagcgggccctgccgaattggctaatagctactccttttctccactaggggagcgttcgcaaggggtgtggggaggtggccagcgcttgccaatcagaggaggccagggctgtcccctagcgggcggtgaccaatcgccggggccggccagagcgcgcttccttagtaggtggatggtggtcggagcgccgactcccttctcgtcgtcgccattttgagctggtgactgtggccggctgggagtaggcggcagtgagtttccctgggagggcagcgcgcttggcgcttctcccctccccccgatctgcctccagtctcggacttggttgttgcgcgctccggctccggctgagctgggagagttggaggaggtggcggcgggcagaggtgatgtctgggagcccttccttgacagcccgggccgagaagagtccctgcaggaagcatcacccaggctggcagatcatggtagcagcagcgggggtggctgggaagtgaaacggagccagcggctgaggaggggccccagcagcccccgaaggccctatcaggacatggagtatgaaagacgtggtggtcgtggtgacaggactggccgctatggagccactgaccgctcgcaggatgatggtggggagaaccgcagccgagaccacgactaccgggacatggactaccgttcatatcctcgcgagtatggcagccaggagggcaagcatgactatgacgactcatctgaggagcagagtgcggaggattcctacgaggcctccccgggctccgagactcagcgtaggcggcggcggcggcacaggcacagccccaccggcccgccaggcttcccccgagacggcgactatcgggaccaggactatcggaccgagcaaggggaggaggaggaggaggaggaggatgaggaggaggaggagaaggccagtaacatcgtcatgctgaggatgctgccacaggcagccactgaggatgacatccgtggccagctgcagtcgcacggcgtgcaagcacgggaggttcggctgatgcggaacaaatcttcaggtcagagccggggcttcgccttcgtcgagtttagtcacttgcaggacgctacacgatggatggaagccaatcagcactccctcaacatcctgggccagaaggtgtcgatgcactacagtgaccccaagcccaagatcaatgaggactggctgtgcaataagtgtggcgtccagaacttcaaacgccgagagaagtgcttcaaatgtggcgtgcccaagtcagaggcagagcagaagctgcccctcggcacgaggctggatcagcagacactgccactgggtggccgggagctgagccagggcctgcttcccctgccgcagccctaccaggcccagggagtcctggcctcccaagccctgtcacagggctcggagccaagctcagagaacgccaatgacaccatcattttgcgcaacctgaacccacacagcaccatggattccatcctgggggccctggcaccctacgcggtgctgtcctcctccaacgtgcgcgtcataaaggacaagcagacccaactgaaccgcggctttgccttcatccagctctccaccatcgaggcagcccagctgctgcagatcctgcaggccctgcacccaccactcactatcgacggcaagaccatcaatgttgagtttgccaagggttctaagagggacatggcctccaatgaaggcagtcgcatcagtgctgcctctgtggccagcactgccattgctgcggcccagtgggccatctcacaggcctcccaaggtggggagggtacctgggccacctccgaggagccgccggtcgactacagctactaccaacaggatgagggctatggcaacagccagggcacagagtcttccctctatgcccatggctacctcaagggcaccaagggccctggcatcactggaaccaaaggggatcccactggagcaggtcccgaggcctccctagagcctggggccgactctgtgtcgatgcaggctttctctcgcccccagcctggtgctgctcctggcatctaccaacaatcagccgaggcgagcagtagccagggcactgctgccaacagccagtcgtataccatcatgtcacccgctgtgctcaaatctgagctccagagccctacccatcctagttctgctctcccaccggctaccagccccactgcccaggaatcctacagccagtaccctgttcccgacgtctctacctaccagtacgatgagacctccggctactactatgacccccagaccggcctctactatgaccccaactcccagtattactacaatgctcagagccagcagtacctgtactgggatggggagaggcggacctatgttcccgccctggagcagtcggccgacggacataaggagacaggggcaccctcgaaggagggcaaagagaagaaggagaagcacaagaccaagacagctcaacagattgccaaggacatggaacgctgggcccgcagtctcaacaaacaaaaagaaaacttcaaaaatagcttccagcctatcagctccctgcgagatgacgagaggcgggagtcagccactgcagatgctggctatgccatcctcgagaagaagggagcactagccgagagacagcacaccagcatggatctcccgaaattggccagtgacgaccgcccaagccctccgcgaggactggtggcagcctacagcggggagagtgacagtgaggaggagcaggagcgtgggggccctgagcgggaggagaagctcaccgactggcagaagctggcctgtctgctctgccgacgccagttccccagcaaagaggcgctcatccggcaccagcagctctcagggctccacaagcaaaaccttgagattcaccggcgagcccacttgtcagaaaacgagctagaagcactagagaagaatgacatggagcaaatgaagtaccgggaccgtgcagctgaacgcagagaaaagtatggcatccccgagccgccagagcccaagaggaggaagtacggcggcatatccacagcctctgtagacttcgagcagcctactcgggacgggctgggcagtgacaacattggcagtcggatgctgcaggccatgggctggaaagagggcagcggcctgggccgcaagaagcagggcattgtaacgcctatcgaggcccaaacacgggtgcggggctccggcctgggtgcacggggcagctcctacggggtcacctcaaccgagtcctacaaggagacactgcacaagacaatggtgacccgcttcaacgaggcccagtgagcagcttcaagagcaacttctccacatgttgggtgtccatcctggggcagggaaggacagagtgttggatggctgggacggggccttgctcttgtcggccagcccactccccagccagagagggcttgaccaaatcaaattgaggtggtgacttttgttggaaaattgggctgggatcacgtcctgttttgtaataaaagctgaaaagtc

SEQ ID NO: 2251 - DNA, 1464 bp, Homo sapiens
ctccgagcttcttaaacacaggccttgggcctacggctctgggggtacttgggggggcgggggcaggtctgatgagtaacccctccccccaggttccagaggaagaagcctccacatctgtctgccggcccaagagttccatggcctccacttcccgccgccaacgccgagaacgtcgctttcgtcgttacttgtctgcaggacggctggtccgggcccaggccctcctccagcgacacccaggcctcgatgtagatgctgggcagcccccaccactgcaccgggcctgtgcccgccacgatgcccctgccctgtgcctgctgcttcggctcggggctgaccctgcccaccaggaccgccatggggacacggcactgcatgctgctgcccgccagggcccagatgcctacaccgatttcttcctcccgctgctaagccgctgtccctccgccatgggaataaagaataaggatggggagacccctggccaaattttgggctggggacccccctgggattctgctgaagaggaggaagaagatgatgcctccaaggagcgggaatggagacagaagctccagggtgagctggaggacgagtggcaggaagtcatggggaggtttgaaggtgatgcctcccatgaaacccaggaacctgagtccttctcagcctggtcagatcgcctggcccgggaacatgcccagaagtgccagcagcagcagcgagaagcagagggatcctgtcgacccccacgtgctgagggctccagccagagctggcgacagcaggaggaggagcagcggctcttcagggagcgagcccgggccaaggaggaagagctgcgtgagagccgagccaggagggcgcaggaggctctaggggaccgagaacccaagccaaccagggccgggcccagggaagagcaccccagaggagcggggaggggcagcctctggcgatttggtgatgtgccctggccctgccctgggggaggggacccagaggccatggctgcagccctggtggccaggggcccccctttggaggaacagggggctctgaggaggtacttgagggtccagcaggtccgctggcaccctgaccgcttcctgcagcgattccgaagccagattgagacctgggagctgggccgtgtgatgggagcagtgacagccctttctcaggccctgaatcgccatgcagaggccctcaagtgaccctagggaagaagcaagaaacttcggggctgcagcctcaggatgaggcagaaggaagggtaagggaaaggatggggaccacaaggaagagccaggtgctgctcagcagaggatatgggtgggagcgaaagttgtaacaagtgggggtggggggtgcgggccgccaccactgctccttgactctgccgtttcctaataagacctggttccacatctcaaaaaaaaaaaaataaagtcatttaaccac

SEQ ID NO: 2252 - DNA, 1945 bp, Homo sapiens
  misc_feature (1)...(1945): n = a,t,c or g
ccggacccgccagtggtatggctgagccgactagtgatttcgagactcctatcgggtggcatgcgtctcccgagctgactcccacgttagggcccctgagcgacactgccccgccgcgggacaggtggatgttctgggcaatgctgccgccaccgccaccaccacttacgtcctcgcttcccgcagccgggtcaaagccttcctctgagtcgcagccccccatggaggcccagtctctccccggggctccgccccccttcgacgcccagattcttcccggggcgcaaccccccttcgacgcccagtctccccttgattctcagcctcaacccagcggccagccttggaatttccatgcttccacatcgtggtattggagacagtcttctgataggtttcctcggcatcagaagtcccttaaccctgcagttaaaaattcttattatccacgaaagtatgatgcaaaattcacagacttcagcttacctcccagtagaaaacagaaaaaaaagaaaagaaaggaaccagtttttcactttttttgtgatacctgtgatcgtggttttaaaaatcaagaaaagtatgacaaacacatgtctgaacatacaaaatgccctgaattagattgctcttttactgcacacgagaagattgtccagttccattggagaaatatgcatgctcctggcatgaagaagatcaagttagacactccagaggaaattgcacggtggagggaagaaagaaggaaaaactatccaactctggccaatattgaaaggaagaagaagttaaaacttgaaaaggagaagagaggagcagtattgacaacaacacaatatggcaagatgaaggggatgtccagacattcacaaatggcaaagatcagaagtcctggcaagaatcacaaatggaaaaacgacaattctagacagagagcagtcactggatcaggcagtcacttgtgtgatttgaagctagaaggtccaccggaggcaaatgcagatcctcttggtgttttgataaacagtgattctgagtctgataaggaggagaaaccacaacattctgtgatacccaaggaagtgacaccagccctatgctcactaatgagtagctatggcagtctttcagggtcagagagtgagccagaagaaactcccatcaagactgaagcagacgttttggcagaaaaccaggttcttgatagcagtgctcctaagagtccaagtcaagatgttaaagcaactgttagaaatttttcagaagccaagagtgagaaccgaaagaaaagctttgaaaaaacaaaccctaagagggaaaaaagattatcacaactatcaaacgttattcgaaccaagaacacaccatccatatctcttggaaatgcttctagctccggacattcgacatgaaagaaatgtgattttgcagtgtgttcggtacatcatcaaaaaagacttttttggactggatactaattctgcgaaaagtaaagatgtataggcatctggtgtttcagcatacataactgaagcatgtgaaacagtatcatcctcgttagtagaggaaaaccaaaacccttttttccgtcaaaattggatttgtaattaaattgtaagcctcgtaggatgtatgttggaattttaagtctttcctttggttctatgcaaataaaaaaataactgattttttaagactgtgtctgtattgttgggattgaatctagtatttgctgggagaattttttctttgtatttattttaatgtattgttctcatgtaagaatgactgatgttgtgttagttaagaattgaagataggtttagcagtaaagaagaaagcttttaaaaggattgattcagctaagcaaagttgggcagtcctcgtgccnnnctggncgtnttgnangtccatcaggtccatctaatnnnnnntgctcgca

SEQ ID NO: 2253 - DNA, 3805 bp, Homo sapiens
ttttttttttttggaagagggacggattgtgaaactttattgataaagaattccgttccaaaggtgtattccagtcacatttaccctacataaaataccaacatcttcttattgcaaaaacagaaactccggccgttgtattgatgctgacttaagagaaatagaagcctctatataaggcaagagtccataccagaagaattccgaccaatatgaggatacctccaaaaaaaatcaacttcaataacctactttatatggtaaggaggacccaaaaaaggtcaggcttttgtgggaagttgatatgcagtttattgaacaaacagagtgtacagtaactaaacgaactgtgtatttccaaaggaattaagaccgcatatctggattcacacctaaaagcacatagaaaattaaaccaaagaagggcaagttttgtactaaaatcacttgggcccaggttattctataagaagattctcactggcatttgatagtaacttatcaccttctgtgcgagcttgggaaccagctgactcagtgaactgcttcctgtcttcagtgcgtgatgacacagatgtgtcaagcttaatagatcttatatgtaaatttaagaataagaagttttatacccaccctggttttattccaaagttactgctctgcaattttgggctccatccttaggaagatactggaaaagcaagagaacctttctcagctgcctgtgtgaagtgacgttgttctagaacggtgccctggggcctcatgcacgatttcacaagtatagctgcataatctgtggatgtcactgaatggaagaagaatcatcaatggtatatttaggttatagaaggttccactgagataagaaaaggttctacaatgcaggtagctgtcaagcctcctaaatatttaactcgttttagttaacatcacactgtgcattgagtgcaagattctttggttacaccatattaaccaccaggaggataactcctggtttgtaaaagacatcagtggttcttaacggaggggtgatatggccccaggagacatctgactatgtctggagagaatttttcacagctctagcgggggtgctactggcacctaatggatatggatggcaggaatgctgctgaacattctaccatgcacagggtggccccacaacaaacacctctcaggccactaatatgaatagtcccgaggttgaaatgtcctgaaaaaggttcagaaaacatgtctagacgtttgcaaagtcaaatgtatattatggaggctgcaaggcgccccttgcatctcacagctgagggaccccgtcacctctcaccatcagaggcccattcattcccgccttccattccaggcccagtgcctgctccttctcactgaagaactcaatagagatttgctgaatgaatgagggaaaaataagctagaagcatagtttaaagtcttccatcgactacattaaacagcaattttatgtggcctaaactttattctgaaccttagtggtgtcatagtctctgactatatagaacctcaaagttaaggctaacacgttcttaaagatggagtgcacatcttaaggggagtttgtctaaacacttctcgagtcattttagtgggacaaaccaaataaaatggtgctaaaggcaaacattcaatatacttcattttaaactaaaaaattaacatataaaatgccatgcacagcagacaccattcttttttttacatatttacaattttacatatttacttatcaatataatttctatctttacaattataaaattattccaaactgtggaagagtggtaccatttaattttcttgaacatacactttgtagcattcatttgtttaatcctttaaaaggcaattatttaccaaaaccacagtgaatgccagaggaagcacataggaaaatcatggagggaaaaaaagattgagacaaaatttgcacacaagccttaaatgaatctgtatcagtaactcaaataagtagtattttattattaactaaggttcccctgctaggaaaaacgaaacaatccccatatactgtacctttaaaaaatgctctgacatttataagcaatttagttacattctagatcccaatcagttgagtgtagtaagggctacctacaatttaggctcaaataaatactctccactaaattgtgatcatcctgcataaacttgaggttgcagtggtggaggaagtttatcattttcaacgttttcagagtcaatagctgctaacggttgattcggaggcttaatttccagtgggtatttctcaacgatgtcttgaacttctcttgcaattccatctgtccaatctatgaggtctttttccagtttcttggcttcattcatgatcctttcttgtcgttcattcaactgagacaagagatccaagttcttatacatttgcttgacgcctaagcaagcatcaggagaccaactctcagcttcttgcttcctgggagaggtctggccagacatgtagcgatcaaaatcctcctgacttagattcaaagactgggcgtctagcttctcaatgaaagccacagcacagcacagattggtgaaatagtagccatcctctccagtcatcagtcggcttggattgcagaagcgcgtgatatactggatattagactgaaggcgtggggggttgcccttcaaaacaatgtagatgagggtggggaggaagtcatccgctgacgccggctcattcttggtgatcttgatggcattgaagatgtgcttgctgcacttggtgatgcaggccagcttgtctcgaggcacacgcttggaatccatttcaatgatatctgtgatcgccttcaccaccatatcagacacttctgggatgtcttcattaacagggacacacagcatctgaggcgtaacccagcgcagggctctgattctcttttgaatggcaagatctttcttctcatcatcagtagtttctggacagaatacatatttatagagacgagtcatgatgtacttttcaatctgatccattatcttctcgactctttctggaggcactttcccacgagtttgcatcctttcggccacattgtggtagaaatcctgagcacactctgactgttcttcaatgcttagatcccttttgtaatgcattccttccaaaaacagcttggtctgtttatagatttcttggcctgtcttgtggaaggtcttgagaaattctatgaactccttagacactctatccgtttcaatgctggtttgccggtttatggaaggactgggagcttttgcttcctgaatttccttctttgatccgaccctggaagatgcactgaagaatttcttcactgtggtaaccttgcgggtcttctcgttggttttcttttcttcaaacttggagaatgtgagggattgggccccttggctgctctgactgctggcaaaggcctcttcttcctcccgctggagtcgctccgccagctcccagtcctcctgaatctgcttctgcctggctttgtggtactcttccctccagcacttggagcagaaaccctgccaggcagggttgccgtagtaaccacatcctttcttgcacaggagatccgattgatccacatgaattcctcggcgttcagacttaaggctcatcttcttcctgctaaccactcgcccgcgtctccgccggcgtccaaaccaccgctcgcccgcttcgcccgggtaggtctgggctccgcggccagctcccgcctcacacccaccctcctgctcgcccacgaaa

SEQ ID NO: 2254 - DNA, 1408 bp, Homo sapiens
ttaagtaacaaatattgaaaaatttcatttgtacagtttatggttttaaagaaaccatcctgaataagctcaagttatagctaccagttatgaatttataaagtttatgttgacctttattataattaatatttgtattaatcatcacatattattatatataagatataaatttaatataactatctggtaattatacctatgtttactaacaattttacaactgctggctgcagcggtcgcatcgacattcattattattacaatttccattttgcaaaatgtttagaggaactccttcccatttgtcaggtgtgaccccatgacttgcatgtctctggggacactctgggaagatgtcttcataagataatgaagctcagataaacatgagacagaacagtcccaaaatccctcagcatgccccagccctcaggggagttcctacttgtttatgaatctgtccatattatagctcgttgagtagagaaattccaggatcttcctgcatggatttctgatcagaagagtggtccagagtgagctgtcataatacacttcttcttggcgcagagctccccctttgatgatctccagggcacattcctcctttggagctgcttgcatatggactatcccagaaactgccttcatggctgtttctgtgtctatgaggccaagaacacagagagtgattgatacattgaccctggacactgaatattcctttctgatggaggagaagaacccatccaaagcaaacttgcttgcagaataggcagcaaccattggataagccactttcccagccagagaggagacgacaacaatgcttccattgctctgcttcagcatgggcaaggcagctacagtcaggaccacgtaactgaggaagttgacttccatgcttttgcgcacatggtgaatatcatcatgaaaaagattcaaagaagtgttggtgatgtggttgagaatgagcatgtctagtcctcccatgagctttcctgcttgggcaacaaattgctctgcgaaggtcatgtcttccatggtgccagcaatgtagtgtgctgaggctgctccaagctccaggcagtgggataccaccttctgtagagtttcttttgacctcgctgtcaccaccacatgggctcccatcttcgccagatgataagccatctctcttccgatccctttgctggcccctgtgacaatcactttctttccttggagcatctctggtctgaattcctcgtttgcagaatagtagtagtaggccatgaagagccccagaatggggaggagatattttttcataaaagccatccgacagggagctggcctgaagactcctgtaggacacacagagagaacctacagagctttctacaacctcctaagcaggcagcag

SEQ ID NO: 2255 - DNA, 422 bp, Homo sapiens
tgcttcccccaaccctcgacgacgaaaaggacttcggcccccggccgggcggctccgggggaaaaaagagagagcgaccgccgccccgcgctcagggccactctagagggagaagctgccccgaggctggcagagcgcccagccgcggtggagaccggaagccttctggagcccaaggctgtgcacgtcccctgtgctgattctctgcctaggaaaggaccatgcagctggagatcaaagtagccctgaacttcatcatcttctacttgtacaacaagctgctctggcgcctctgaaaaagaaataagaagcccactggtaccctgacaaaccactgaagggctctggcttccacaccgagagatggtggaccccgttggggagctggccgctaagcgaagtggcctgacagtggaagatgt

SEQ ID NO: 2256 - DNA, 1505 bp, Homo sapiens
atagacccccgtccggagcagagcaccaagatcgttctggcaggaacagccagtgggaggttccagctgagcgctccccagagcatcatcagcatcatgctattacaatcccaaaccatgggggtttctcacagctttacaccaaagggcatcactatccctcaaagagagaaacctggacacatgtaccaaaacgaagattacctgcagaacgggctgccaacagaaaccaccgttcttgggtttggcattactggatccctctcaattatctctggaaaacaatcaactaagccctttgacctgagcagcttgacctcaaatgcagtgagttctgttactgcaggagcaggcctcttcctccttgctgacagcatggtagccctgaggactgcctctcaacattgtggctcagaaatggattatctatcctcattgccttattcggagtactattatccaatatatgaaatcaaagattgtctcctgaccagtgtcagtttaacaggtgtcctagtggtgatgctcatcttcactgtgctggagctcttattagctgcatacagttctgtcttttggtggaaacagctctactccaacaaccctgggagttcattttcctcgacccagtcacaagatcatatccaacaggtcaaaaagagttcttcacggtcttggatataagtaactcttggcctcagaggaaggaaaagcaactcaacactcatggtcaagtgtgattagactttcctgaaatctctgccattttagatactgtgaaacaaactaaaaaaaaaaaagcttttgttttgtatttgtttactatgagtcgttatttaatttctcttgaaaataatttcctcaaagcccaagtcagtaaaatgttatcagccagtcttccaaaatggtcataaactttataaactgctttgggtaaactgagcagaaggtgatacacagaagggaaaatgtgcactcatgctagtgtgaatttggtaagtcgcgtgactctgcaggctgtttctgtattattttcacactcatattgcttaaatattacatattagggattgtaagaaaactttaattaaaaattaaagactatatataattaaactactctgccctggacactctctgagaaacagatctactgggccctttttcatgagccattaggtggaagacagcaaagagatcttctcaagtgcttaggattacctctcaacacacagcaagcatgtccctgcctcccatgaatcttaccatgtaaatccaaatctctgcaatcctgtggcaccaaccagtggtgctcattctattggttaaaaatggccttcttggctgggcgcggtggctcactcctgtaatcccagcactttggtaggccgaggtggacggatcacccgaggtcaggagttgagaccagccggccaacaaggtgaaaccctgtctttctaaaaatacaaaaaattagccaggcctggtgtgcgcacctgtagttc

SEQ ID NO: 2257 - DNA, 582 bp, Homo sapiens
tggtgcctgacgcctggacacgtcggaattcctggtcgacccacgcgcccgcggacgcgtgggcggggcctttgtccctcgctgtggcctgagctccaggtctcgtcttcagcgctctgtgtcctctgctcctagaggtccaggctctgtggccctgtgacctgcaggtattgggagatctacagctaagacgccaggaacccctggaagcctagaaatggagaacctgaagtctggagtgtatcctctcaaggaagcaagtggatgccctggggctgacaggaatcttctggtgtactctttttatgaaaaggggccattgacatttagggatgtggccatagaattttctctggaggagtggcaatgcctggacactgctcagcaggatttgtatagaaaagtgatgttagagaactacagaaacctggtcttcttggcaggtattgctgtttctaagccagacctgatcacctgtctagagcaaggaaaagagccctggaatatgaagagacatgcgatggtagatcaacccccaggtaggtgagagtgaacacaacagacgacatgaatgagaggtcc

SEQ ID NO: 2258 - DNA, 420 bp, Homo sapiens
acatttcgtgttaatggcgggcagtagccgctgaggggattgcagataaccgcttcccgcacggggaaagtctaccctgcctgccactttctgctcgccgtcagcgccggagctcgccagcatgtctgtggtaccgcccaatcgctcgcagaccggctggccccggggggtcactcagttcggcaacaagtacatccagcagacgaagcccctcaccctggagcgcaccatcaacctgtaagtgcggcgcggccttggcgggcatttctctcgtgaaagctcctatagactctccgacgcgcccccggcttttcggcgcgcttcacgcctctgcacctccccgcctccaactcccgctggcggatgcgcgccttcctccctctctcaggcccctttctcatcctccagcctccaggattc

SEQ ID NO: 2259 - DNA, 890 bp, Homo sapiens
tttcgtgcgagggacgagcggagtaaaatctccacaagttgggaacaaacctcgtcccaactcccacccaccggcgtttctccagctcgatctggaggctgcttcgccagtgtgggacgcagctgacgcccgcttattagctctcgctgcgtcgccccggctcagaagctccgtggcggcggcgaccgtgacgagaagcccacggccagctcagttctcttctactttgggagagagagaaagtcagatgccccttttaaactccctcttcaaaactcatctcctgggtgactgagttaatagagtggatacaaccttgctgaagatgaagaatatacaatattgaggatatttttttcttttttttttcaagtcttgatttgtggcttacctcaagttaccatttttcagtcaagtctgtttgtttgcttcttcagaaatgttttttacaatctcaagaaaaaatatgtcccagaaattgagtttactgttgcttgtatttggactcatttggggattgatgttactgcactatacttttcaacaaccaagacatcaaagcagtgtcaagttacgtgagcaaatactagacttaagcaaaagatatgttaaagctctagcagaggaaaataagaacacagtggatgtcgagaacggtgcttctatggcaggatatggtaagataaccgtagaatatttctagtttcctccaatccctgtttaaagatggttttggaaattgaacttattacttcatgcataggtctttgcaaagtaattttttcttgactttttattatgaaaatttcaaatgtactgaaaaatagagatactatgataaatacgtacatattcatcatccagacttaacagttattaacatttggcag

SEQ ID NO: 2260 - DNA, 1391 bp, Homo sapiens
aagggataggagggctcaaagccggcacacatctgagtcctcatggacgggaggatgatgagaagcatgaggctgagagaggaggagtcacccggacccagccacacagcgtcctgcctctgcggctctgccccctgcatcctgtgcagctgctgccccgccagccgcaactccaccgtgagccgcctcatcttcacgttcttcctcttcctgggggtgctggtgtccatcattatgctgagcccgggcgtggagagtcagctctacaagctgccctgggtgtgtgaggagggggccgggatccccaccgtcctgcagggccacatcgactgtggctccctgcttggctaccgcgctgtctaccgcatgtgcttcgccacggcggccttcttcttctttttcaccctgctcatgctctgcgtgagcagcagccgggacccccgggctgccatccagaatgggttttggttctttaagttcctgatcctggtgggcctcaccgtgggtgccttctacatccctgacggctccttcaccaacatctggttctacttcggcgtcgtgggctccttcctcttcatcctcatccagctggtgctgctcatcgactttgcgcactcctggaaccagcggtggctgggcaaggccgaggagtgcgattcccgtgcctggtacgcaggcctcttcttcttcactctcctcttctacttgctgtcgatcgcggccgtggcgctgatgttcatgtactacactgagcccagcggctgccacgagggcaaggtcttcatcagcctcaacctcaccttctgtgtctgcgtgtccatcgctgctgtcctgcccaaggtccaggacgcccagcccaactcgggtctgctgcaggcctcggtcatcaccctctacaccatgtttgtcacctggtcagccctatccagtatccctgaacagaaatgcaacccccatttgccaacccagctgggcaacgagacagttgtggcaggccccgagggctatgagacccagtggtgggatgccccgagcattgtgggcctcatcatcttcctcctgtgcaccctcttcatcagtctgcgctcctcagaccaccggcaggtgaacagcctgatgcagaccgaggagtgcccacctatgctagacgccacacagcagcagcagcaggtggcagcctgtgagggccgggcctttgacaacgagcaggacggcgtcacctacagctactccttcttccacttctgcctggtgctggcctcactgcacgtcatgatgacgctcaccaactggtacaagcccggtgagacccggaagatgatcagcacgtggaccgccgtgtgggtgaagatctgtgccagctgggcagggctgctcctctacctgtg

SEQ ID NO: 2261 - DNA, 426 bp, Homo sapiens
tttcgtgaggagtttttaatttgagagccctcaaatgggccagtggtctagtcatcattgggaaatgaagatgatgagatcctgtctctcgcaaaagatatcacaggaatgttcgtggcatcacacagaaagatgagagctcaccaggtgctcaccttcctcctgctcttcgtgatcacctcggtggcctctgaaaacgccagcacatcccgaggctgtgggctggacctcctccctcagtacgtgtccctgtgcgacctggacgccatctggggcattgtggtggaggcggcggccggcgccggcgccctgatcacactgctcctgatgctcatcctcctggtgcggctgcccttcttcaaggagaaggagaagaagagccctgtgggcctccactttctgttcctcctggggaccctgggcccg

SEQ ID NO: 2262 - DNA, 1179 bp, Homo sapiens
ggcacgaggtttgcggcagcggctgctgctgccactgctgtgctgggggcccggtcgccaggcaaaaagccctcccacgtttgaggggagtcatgagccgtttcctgaatgtgttaagaagttggctggttatggtgtccatcatagccatggggaacacgctgcagagcttccgagaccacacttttctctatgaaaagctctacactggcaagccaaaccttgtgaatggcctccaagctcggacctttgggatctggacgctgctctcatcagtgattcgctgcctctgtgccattgacattcacaacaagacgctctatcacatcacactctggaccttcctccttgccctggggcatttcctctctgagttgtttgtctatggaactgcagctcccacgattggcgtcctggcacccctgatggtggcaagtttctccatcctgggtatgctggtcgggctccggtatctagaagtagaaccagtatccagacagaagaagagaaactgaggccagcattatcacctccaggactttctcgttttccaccttggccatcttcttccttcgtcgtctctcctctttaatttcttttctattccatcatctgcccttttattcacttttagcctctttttttaatttttaaaatttaaagatatgcatactgaaaagtatataacatgtacgtacaatttaaagaataattttaaagtgaatactacgtaactccatccaagtcaagaaattgccagcttctcggaagcccactgtgtctccttcccctacctgcaacctcttccaggctcccttttccagccttcccctttttcccttttattttcatgccttgatttgacttgtgtggtgggaacatgtgaactatgaaacttaaacctgctgcccacccagagcagctgtgaccaagggctgcctcaaggggttgtccacgcaggttgggctcctctctgctgctggacccaagactctgaaccttccaagggacaggcagttcttctaagaagggctcccctgtgtgtgagcaagaccacagctctccttctatctacagatgcatgagggttggaagagtctgggctgtttttagaccttctggtcagctgtatttgtgtaacaacttttgtaataaatagaaaaaccctcaaaaaaaaaa

SEQ ID NO: 2263 - DNA, 1787 bp, Homo sapiens
gaacgtttgtgcttcccgtgcatgcagtcaaagatctattcctacatgagcccgaacaaatgctctggaatgcgtttcccccttcaggaagagaactcagttacacatcacgaagtcaaatgccaggggaaaccattagccggaatctacaggaaacgagaagagaaaagaaatgctgggaacgcagtacggagcgccatgaagtccgaggaacagaagatcaaagacgccaggaaaggtcccctggtaccttttccaaaccaaaaatctgaagcagcagaacctccaaaaactccaccctcatcttgtgattccaccaatgcagccatcgccaagcaagccctgaaaaagcccatcaagggcaaacaggccccccgaaaaaaagctcaaggaaaaacgcaacagaatcgcaaacttacggatttctaccctgtccgaaggagctccaggaagagcaaagccgagctgcagtctgaagaaaggaaaagaatagatgaattgattgaaagtgggaaggaagaaggaatgaagattgacctcatcgatggcaaaggcaggggtgtgattgccaccaagcagttctcccggggtgactttgtggtggaataccacggggacctcatcgagatcaccgacgccaagaaacgggaggctctgtacgcacaggacccttccacgggctgctacatgtactattttcagtatctgagcaaaacctactgcgtggatgcaactagagagacaaatcgcctaggaagactgatcaatcacagcaaatgtgggaactgccaaaccaaactgcacgacatcgacggcgtacctcacctcatcctcatcgcctcccgagacatcgcggctggggaggagctcctgtatgactatggggaccgcagcaaggcttccattgaagcccacccgtggctgaagcattaaccggtgggccccgtgccctccccgccccactttcccttcttcaaaggacaaagtgccctcaaagggaattgaatttttttttttacacacttaatcttagcggattacttcagatgtttttaaaaagtatattaagatgccttttcactgtagtatttaaatatctgttacaggtttccaaggtggacttgaacagatggccttatattaccaaaacttttatattctagttgtttttgtactttttttgcatacaagccgaacgtttgtgcttcccgtgcatgcagtcaaagactcagcacaggttttagaggaaatagtcaaacatgaactaggaagccaggtgagtctcctttctccagtggaagagccgggaccttccccctgcacccccgacatccagggacggggtgtgaggaagacgctgcctcccaatggcctggacgggatgtttccaagctcttgttcccctaacgtctcaacaggcgctcactgaagtgtatgaatattttttaaaaaggtttttgcagtaagctagtcttcccctctgctttctcgaaagcttactgagccctgggccccaagcacgggccgggcatagatttcctcttccacaagctgccgcttttctgggcaccttgaagcatcagggcgtgaaatcaaactagatgtgggcagggagagggttgcttacctgccctgctggggcagggtttcctgaaactgggttaattctttatagaaatgtgaacactgaatttattttaaaaaataataataaaaatttaaaaaaattaaaaataaaaaaaaccacagaaaacaactttacatgtatataggtcttgaagtgaaaa

SEQ ID NO: 2264 - DNA, 1105 bp, Homo sapiens
atcccgggtcgacgatttcgtgttccgaactcaaaggaacccagtgccgggccacagccgggtcacgtggccggcggccccccatgacgtgctggctgcggggcgtcacggcgacgttcgggcgacctgccgagtggccaggctacctcagtcacctgtgtggtcgcagtgctgccatggacctgggacccatgcgcaagagttaccgcggggaccgagaggcatttgaggagactcatctgacctcccttgacccagtgaaacagtttgctgcctggtttgaggaggctgttcagtgtcctgacataggggaagccaatgccatgtgtctggctacctgcaccagagatggaaaaccctctgctcgcatgttgctgctgaagggcttcgggaaagatggcttccgcttcttcactaacttcgagagtcgaaaaggaaaagagctggactctaatccctttgcttcccttgtcttctactgggagccacttaaccgtcaggtgcgtgtggaaggccctgtgaagaaactgcctgaggaggaggctgagtgctacttccactcccgccccaagagcagccagattggggctgtggtcagccaccagagttctgtgatccctgatcgggagtatctgagaaagaaaaatgaggaactggaacagctctaccaggatcaagaggtgcccaagccaaaatcctggggtggctatgtcctgtaccctcaggtgatggagttctggcaaggtcaaaccaaccgcctgcatgaccggatagtctttcggcggggcctacccacaggagattcccctttggggcccatgacccaccgcggggaggaagactggctctatgagagacttgcaccttaactctgggacctgctggcccagagtggagctagggctaggtgtcaagagagggtgtgggattgggacccaggcccttctttctaaactcaacccatttccctccctaccccttatcttcaggactcttcagagctaatcctctaagttctctgtactcagttggttctcagttagctggtcaagtggagtgtaatggtggcgtagagaatcacaaatggaaaataattccataatta

SEQ ID NO: 2265 - DNA, 1606 bp, Homo sapiens
tacggctgcgagaagacgacagaagggggggtcccatattgaactcgggttggaagaggcgagtccggtctcaaaatggaggtaaaaccgccgcccggtcgcccccagcccgactccggccgtcgccgtcgccgccggggggaggagggccatgatccaaaggaaccagagcagttgagaaaactgtttattggtggtctgagctttgaaactacagatgatagtttacgagaacattttgagaaatggggcacactcacagattgtgtggtaatgagagacccccaaacaaaacgttccaggggctttggttttgtgacttattcttgtgttgaagaggtggatgcagcaatgtgtgctcgaccacacaaggttgatgggcgtgtagtggaaccaaagagagctgtttctagagaggattctgtaaagcctggtgcccatctaacagtgaagaaaatttttgttggtggtattaaagaagatacagaagaatataatttgagagactactttgaaaagtatggcaagattgaaaccatagaagttatggaagacaggcagagtggaaaaaagagaggatttgcttttgtaacttttgatgatcatgatacagttgataaaattgttgttcagaaataccacactattaatgggcataattgtgaagtgaaaaaggccctttctaaacaagagatgcagtctgctggatcacagaggggtcgtggaggtggatctggcaattttatgggtcgcggagggaactttggaggtggtggaggtaattttggccgtggtggaaactttggtggaagaggaggctatggtggtggaggtggtggcagcagaggtagttatggaggaggtgatggtggatataatggatttggaggtgatggtggcaactatggcggtggtcctggttatagtagtagagggggctatggtggtggtggaccaggatatggaaaccaaggtggtggatatggtggaggtggaggatatgatggttacaatgaaggaggaaattttggcggtggtaactatggtggtggtgggaactataatgattttggaaattatagtggacaacagcaatcaaattatggacccatgaaagggggcagttttggtggaagaagctcgggcagtccctatggtggtggttatggatctggtggtggaagtggtggatatggtagcagaaggttctaaaaacagcagaaaagggctacagttcttagcaggagagagagcgaggagttgtcaggaaagctgcaggttactttgagacagtcgtcccaaatgcattagaggaactgtaaaaatctgccacagaaggaacgatgatccatagtcagaaaagttactgcagcttaaacaggaaacccttcttgttcaggactgtcatagccacagtttgcaaaaagtgcagctattgattaatgcaatgtagtgtcaattagatgtacattcctgaggtcttttatctgttgtagctttgtctttttctttttcttttcattacatcaggtatattgccctgtaaattgtggtagtggtaccaggaataaaaaattaaggaatttttaacttttcaaaaaaaaaa

SEQ ID NO: 2266 - DNA, 1711 bp, Homo sapiens
cggacgcgtgggcagagagtgcgcgccctgagtcgcaggccgaggagacatggctgcacttcgtgacgctgagatacagaaggacgtgcagacctactacgggcaggtgctgaagagatcggcagacctccagaccaacggctgtgtcaccacagccaggccggtccccaagcacatccgggaagccttgcaaaatgtacacgaagaagtagccctaagatattatggctgtggtctggtgatccctgagcatctagaaaactgctggattttggatctgggtagtggaagtggcagagattgctatgtacttagccagctggttggtgaaaaaggacacgtgactggaatagacatgaccaaaggccaggtggaagtggctgaaaagtatcttgactatcacatggaaaaatatggcttccaggcatctaatgtgacttttattcatggctacattgagaagttgggagaggctggaatcaagaatgagagccatgatattgttgtatcaaactgtgttattaaccttgtgcctgataaacaacaagtgcttcaggaggcatatcgggtgctgaagcatggtggggagttatatttcagtgacgtctatacgagccttgaactgccagaagaaatcaggacacacaaagttttatggggtgagtgtctgggtggtgctttatactggaaggaacttgctgtccttgctcaaaaaattgggttctgccctccacgtttggtcactgccaatctcattacaattcaaaacaaggaactggaaagagttatcggtgactgtcgttttgtttctgcaacatttcgcctcttcaaacactctaagacaggaccaaccaagagatgccaagttatttacaatggaggaattacaggacatgaaaaagaactaatgtttgatgccaattttacatttaaggaaggtgaaattgttgaagtggatgaagaaacagcagctatcttgaagaattcaagatttgctcaagattttctgatcagaccaattggagagaagttgccaacatctggaggctgttctgctttggagttaaaggatataatcacagatccatttaagcttgcagaagagtctgacagtatgaagtccagatgtgtccctgatgctgctggaggctgctgtggcacaaagaaaagctgctaaatctatagccaaccaggggaccacagtagtgggcaagagtgatctgcatgttttttaacctgcttttccccatagcacagaccataagaaacaacaaatggagccactgcgcccggccataaatgaattatttttaagaggcattgattaaagattcacagcaaatcactagttaagcagattttttttctatttcctacttcaaagttctgggtgccacatagtggtcagaaatggaacagagaagctgtcttaagccttgttcaagaagcaggaaaggcatcagaagaagtaacagttggcagagggtctcgggaaaaacatcttccttctgatcttttgcatagcaccttttggaattttcatcatgtttgcttattaaacaaagctcctactgccatcatactaatcatgcaaaaagattgccaaatcatgtttggtaggaggacttttgaggtagcttttgaacaaatgtttttttctttaattctttttttttgcaataaagaaaacaaattaatcataaaaaaaaaa

SEQ ID NO: 2267 - DNA, 1711 bp, Homo sapiens; identical to SEQ ID NO: 2266

SEQ ID NO: 2268 - DNA, 1945 bp, Homo sapiens
cccctgggttcgaacacggcacccgcactgcgcgtcatggtgcaggcctggtatatggacgacgccccgggcgacccgcggcaaccccaccgccccgaccccggccgcccagtgggcctggagcagctgcggcggctcggggtgctctactggaagctggatgctgacaaatatgagaatgatccagaattagaaaagatccgaagagagaggaactactcctggatggacatcataaccatatgcaaagataaactaccaaattatgaagaaaagattaagatgttctacgaggagcatttgcacttggacgatgagatccgctacatcctggatggcagtgggtacttcgatgtgagggacaaggaggaccagtggatccggatcttcatggagaagggagacatggtgacgctccccgcggggatctatcaccgcttcacggtggacgagaagaactacacgaaggccatgcggctgtttgtgggagaaccggtgtggacagcgtacaaccggcccgctgaccattttgaagcccgcgggcagtacgtgaaatttctggcacagaccgcctagcagtgctgcctgggaactaacacgtgcctcgtaaaggtccccaatgtaatgactgagcagaaaatcaatcactttctctttgcttttagaggatagccttgaggctagattatctttcctttgtaagattatttgatcagaatattttgtaatgaaaggatctagaaagcaacttggaagtgtaaagagtcaccttcattttctgtaactcaatcaagactggtgggtccatggccctgtgttagttcatgcattcagttgagtcccaaatgaaagtttcatctcccgaaatgcagttccttagatgcccatctggacgtgatgccgcgcctgccgtgtaagaaggtgcaatcctagataacacagctagccagatagaagacacttttttctccaaaatgatgccttggggtggggagtggtagggggaagagctcccaccctaaggggcacacactgagttgcttatgccacttccttgttcaaaataaagtaactgccttaatcttatactcatggcttggagttaccttatattcaggtatatgtgatattttgcctggtttgttaaaattgccccatttagattccttctataattgttcttatagataagtaatttatatatgagctgtgttagtattttttcagtgtgagatctctggattctttcacaataaagctgttgaattttaacaggagtattagtacataaattttctactcaacaattccgagataggattatgcctagtttgtcatatcacagaaaaactccaagttaacttcatgttttggaagggcaggtcgtttttaaagtatttctttttttaactggatgaaaaatcttcatgttaggattaattttcttaatcacctccacactgtacagaggaaactcaagccttaaatgtttaagtaaactctgtctcagttttaggattaaaatacccaccggtggtgtgatgatgccatataccgcagggcttgcttctgtcaagtgtgactctatctcagtaattaaaataagtgctgatctactgattttttttaatggattcatttctaaatgggcattataaatagagcttgttcatttttaagaacgaaacattcatatgataaactatcgctttaaattgcctttcttgcttcatataacttttccctgtcaggatccttagtgtttgaaactcctcgtgcggggctggcctcctgcggactctagtttcgcctccttgatgtggcgcctgggatttcttcacttcagagctgtatttttacaggcaagagtaagttcctgggcacagtggctcatgcctgtggtctcagctactcaggaggctgaggtgggaggattcttagagcc

SEQ ID NO: 2269 - DNA, 1646 bp, Homo sapiens
ggcacgagccgcggcgcattgtgggatctgtcggcttgtcaggtggtggaggaaaaggcgctccgtcatggggatccagacgagccccgtcctgctggcctccctgggggtggggctggtcactctgctcggcctggctgtgggctcctacttggttcggaggtcccgccggcctcaggtcactctcctggaccccaatgaaaagtacctgctacgactgctagacaagacgactgtgagccacaacaccaagaggttccgctttgccctgcccaccgcccaccacactctggggctgcctgtgggcaaacatatctacctctccacccgaattgatggcagcctggtcatcaggccatacactcctgtcaccagtgatgaggatcaaggctatgtggatcttgtcatcaaggtctacctgaagggtgtgcaccccaaatttcctgagggagggaagatgtctcagtacctggatagcctgaaggttggggatgtggtggagtttcgggggccaagcgggttgctcacttacactggaaaagggcattttaacattcagcccaacaagaaatctccaccagaaccccgagtggcgaagaaactgggaatgattgccggcgggacaggaatcaccccaatgctacagctgatccgggccatcctgaaagtccctgaagatccaacccagtgctttctgctttttgccaaccagacagaaaaggatatcatcttgcgggaggacttagaggaactgcaggcccgctatcccaatcgctttaagctctggttcactctggatcatcccccaaaagattgggcctacagcaagggctttgtgactgccgacatgatccgggaacacctgcccgctccaggggatgatgtgctggtactgctttgtgggccacccccaatggtgcagctggcctgccatcccaacttggacaaactgggctactcacaaaagatgcgattcacctactgagcatcctccagcttccctggtgctgttcgctgcagttgttccccatcagtactcaagcactataagccttagattcctttcctcagagtttcaggttttttcagttacatctagagctgaaatctggatagtacctgcaggaacaatattcctgtagccatggaagagggccaaggctcagtcactccttggatggcctcctaaatctccccgtggcaacaggtccaggagaggcccatggagcagtctcttccatggagtaagaaggaagggagcatgtacgcttggtccaagattggctagttccttgatagcatcttactctcaccttctttgtgtctgtgatgaaaggaacagtctgtgcaatgggttttacttaaacttcactgttcaacctatgagcaaatctgtatgtgtgagtataagttgagcatagcatacttccagaggtggtcttatggagatggcaagaaaggaggaaatgatttcttcagatctcaaaggagtctgaaatatcatatttctgtgtgtgtctctctcagcccctgcccaggctagagggaaacagctactgataatcgaaaactgctgtttgtggcaggaacccctggctgtgcaaataaatggggctgaggcccctgtgtgattttgaaaaaaaaaa

SEQ ID NO: 2270 - DNA, 1523 bp, Homo sapiens
ctgcagtccgccggcgagggagttacgcacgtcctgattctcctggagtctccagcccgcccagtggccgcagtcacccaggtccagaggcggcggtatcacaggctctccgacatgtctatgctggctgaacgtcggcggaagcagaagtgggctgtggatcctcagaacactgcctggagtaatgacgattccaagtttggccagcggatgctagagaagatggggtggtctaaaggaaagggtttaggggctcaggagcaaggagccacagatcatattaaagttcaagtgaaaaataaccacctgggactcggagctaccatcaataatgaagacaactggattgcccatcaggatgattttaaccagcttctggccgaactgaacacttgccatgggcaggaaaccacagattcctcggacaagaaggaaaagaaatcttttagccttgaggaaaagtccaaaatctccaaaaaccgtgttcactatatgaaattcacaaaagggaaggatctgtcatctcggagcaaaacagatcttgactgcatttttgggaaaagacagagtaagaagactcccgagggcgatgccagtccctccactccagaggagaacgaaaccacgacaaccagcgccttcaccatccaggagtactttgccaagcggatggcagcactgaagaacaagccccaggttccagttccagggtctgacatttctgagacgcaggtggaacgtaaaagggggaagaaaagaaataaagaggccacaggtaaagatgtggaaagttacctccagcctaaggccaagaggcacacggagggaaagcccgagagggccgaggcccaggagcgagtggccaagaagaagagcgcgccagcagaagagcagctcagaggcccctgctgggaccagagttccaaggcctctgctcaggatgcaggggaccatgtgcagcccgcctgagggccgggacttcaccctgaagcccaaaaagaggagagggaagaaaaagctgcaaaaacccagtagagatagcagaggaccgctacactagaagaaaccgctagttgaaaaaagaaggaagaagaaagattccaaaatgaatcctttcccagccggggcctttcccgaccacttcagctgtcagggcactgcgggggcagacacctctggcctgaagtcacagcagagttcaccccagagcgcctgggcgcatcttgtggcatgcccatgggctgccgagtcctgccctctcgccacatttcccccaagttacattcccaggaggacctttttaatgttctcaatcgtggctctcagacacaaataaatttttttgtaaactctgagcccttcagcaagagagtttaattataatcattacaaatacatgcattcatgtaagtgtgcacacgtgtgtgtgcatgtgcgcatctgtgtgtgtgtgtgtgtgtcactatctccgtttgctctcggttcccttcaataacaatgaatggtgctttcttctgaaagac

SEQ ID NO: 2271 - DNA, 741 bp, Homo sapiens
ggcacgagagactcggcgggcgctgttgagggagtcgggccgcgactgtggtcgtttttataccttcccgcgcggacgccggcgctgccaacggaagggcgggtagggcgagacggagtttcgtcatgttggccaggcccatttgagatctttgaagatatcctcaacgtgaggctctgctgccatgaaggtgaagattaagtgctggaacggcgtggccacttggctctgggtggccaacgatgagaactgtggcatctgcaggatggcatttaacggatgctgccctgactgcaaggtgcccggcgacgactgcccgctggtgtggggccagtgctcccactgcttccacatgcattgcatcctcaagtggctgcacgcacagcaggtgcagcagcactgccccatgtgccgccaggaatggaagttcaaggagtgaggcccgacctggctctcgctggaggggcatcctgagactccttcctcatgctggcgccgatggctgctggggacagcgcccctgagctgcaacaaggtggaaacaagggctggagctgcgtttgttttgccatcactatgtttgacactttttatccaataagtgaaaactcattaaactactcaaatcttgctggaggcctctgggtgcctgtgttctcagcatatagatgtggtctcggtgtgttttgatatgaaaactctcatgaataaacatctccgtgaaacgccaaaaaaaaaaaa

SEQ ID NO: 2272 - DNA, 1879 bp, Homo sapiens
tacggctgcgagaagacgacagaagggtacggctgcgagaagacgacagaaggggacactagaggaagtcgtgctacccccgcggagttgtcgtgtgttctggattcattccggcaccaccatgtcgaaggtttcctttaagatcacgctgacgtcggacccacggctgccgtacaaagtactcagtgttcctgaaagtacacctttcacagcagtcttaaagtttgcagcagaagaatttaaagttcctgctgcaacaagtgcaattattaccaatgatggaataggaataaatcctgcacagactgctggaaatgtttttctaaaacatggttcagaactgcggattattcctagagatcgtgttggaagttgttaatatctgctacttggaacatacgattgcctttcagaataaatattggtattttttgttgttgtaaaattgaaatcaggcatttaacatactatgaaaacaccaggagtcaatgattaatgaaaggtgactcatctgtccctttttgttgtccatactcttcctatgaagagggaatgcgtatgaattaaggctactactgtcacagaagatcatagtctttgatgctacctcacaacacaaacaggtagttcgttgggggcaaatgaattagccaactgttaactggaagcttttgataatttttttttttagaacaatttggaacattaaaatttactgaatcgtatatattcatctgagataaaaatataaaaagaattatggaccctggatggcaatttgcttgatagcatctgatttgcagactcataatttgatttttaattaaatatataggttatgatgaagtgaatagacatatcagtgaacagttaactatattaaatttttatcatttactttttttaagattcagacctcagttatataaatttcagtttaatatcaaccaaaaaattaaaattttaatctaacccttatgtgtataaattggtgtcccataccagcttttaatggtggacctatagaatccagtacttttaatggtgggaatttacagtagaagcatcctttgctgagttatacattcctttatcaatctcttttgatacaacatttaaaacaagtagcttcaagaaaccactggtgttttgaggatagtatttctaaatagcattcaggaacagagtattattgcacagatctgaagatcaaaaaaaagctcaaggaaatacagatcggaagtgctgatgagttatatttattgaaaacccaacttttaaggaagtgctaagatcagtcacccatgtgaataagaagccaggaaaggaaagatggggaagcccagatcaccaggcttctattaaggaggaaagcaacagaggaaacagtgaaggggaacagaagggggtagcaaagtgttacagaaaagcggactggatagacaaaactgcagaaggtgtatgttggggagaactgaaagggaaaacaaaatacttgacatagtcttaagtagaagaaggcagttagagaaaacaaagtatctactggccttgtcaacatacagacttcaaaataccccttatgagaatccaaagaatgatgtgtgtaagggaagattttatttgcccttccggaagaaatcagtatctatgcaaatcttgaaagacaaaatcaaagcccattaatgattcagaatcagtgcttgacctcctgtattctgaatggtgaactctggaagcagggattgtgtctggctctttttagagctggaaatgtagtggctttcattaaatacttgctgtaaagtctttctaagaccaattattatcttagcatgtttcagtatcttctctatcataggccctaagttcattgggg

SEQ ID NO: 2273 - DNA, 1749 bp, Homo sapiens
atggctgcagcgcagcggcggccggggccgggagcgggccctgggcggcccaggagaagcagttcccgccggcgctgctgagtttcttcatctacaacccgcgcttcgggccgcgcgaaggacaggaggaaaataagattttattttatcatccaaatgaggtagaaaagaatgagaagattagaaatgtcggattgtgtgaagctattgtacagtttacaaggacatttagcccatcaaaacctgcaaaatctttacatacacagaagaacagacagttcttcaatgaaccagaagaaaatttctggatggtcatggttgttcggaatcctataattgaaaaacagagtaaagatggaaaaccagttattgaatatcaagaggaggagttgttggacaaggtttatagctcggtgctgcggcagtgctacagcatgtacaagctttttaatggtacatttctgaaagccatggaagacggaggcgtcaagcttctgaaagaaagattagagaaattcttccatcggtatttgcaaacgctacatttgcagtcatgtgacctacttgacatttttggtggaatcagcttcttcccgttggataaaatgacttatttgaaaatccagtcctttattaatagaatggaggaaagcctgaatatagtcaaatacactgcttttctctataacgatcagctcatctggagtggattagaacaagatgacatgagaattttatacaaataccttaccacctcccttttcccaaggcacatcgaacctgagttagcaggaagggattctccaataagagcagaaatgccaggaaatcttcaacactatggaagatttcttaccggacccttgaacctcaatgatccagatgcaaaatgcagattccccaaaatttttgtaaatacagatgacacttatgaagagctccatttaatcgtttataaggccatgagtgcggctgtgtgctttatgatcgacgcctctgtccacccaacgttggatttttgccgaagactggacagcatcgttgggccccagctcacagtgctggcctctgacatctgtgaacagtttaacatcaacaagaggatgtccgggtctgagaaagaaccccagtttaagtttatctacttcaaccacatgaatctcgccgagaagagcacagttcacatgaggaaaacgcccagcgtgtcgctcacttccgtgcacccggatttaatgaagattctcggtgacatcaacagtgactttaccagagtggatgaagatgaggagatcattgtgaaggccatgagtgattactgggttgttggaaagaagtctgatcggcgggagctctatgttattttgaatcaaaaaaatgcaaacctgattgaagtaaatgaagaggtcaagaaactttgtgcaacgcagttcaacaacatcttcttcttggattgacggatgacggctcaccgagagcatatctaaaaaacactctgcaaacatttggtcacatgcaagttagtggtcatatgacggactgcattcaggacaagggtaaagcaatacttgctttgaagaatcagatttcgactcggtctgctgatctgaggtttttagattttaaatatttatgtggaattaattaaaggtagttggctatatcgctatcatttcattcttttgacattatttgaatattttactggaaaataagactaataaattgttaaaagtttttaaaaaaaaaaaa

SEQ ID NO: 2274 - DNA, 1854 bp, Homo sapiens
ccgatttcgttggggctgcacgtgtggtgaggcctacagaagcggccttcagctggaccttggtctccccgccggacttcgagggtgtcatcgccgcccctgttgggggtgagcgccgcgcggctgcagcatgcctcacaggaagaaaaagccctttatagagaagaagaaagctgtgtcttttcacttggtccaccggagccaacgagatcctttagcagcagatgagagtgcaccccagagggttctattgcccacacaaaaaatagacaatgaagaaaggcgagcagaacagaggaagtatggagtgttctttgatgacgactatgactacctgcagcacctgaaggaaccatctgggccttcagagcttattccctcaagtaccttcagtgcacacaacaggagagaggagaaagaagaaacgctagtaattccaagcactggaattaagttgccttcatcagtgtttgcttcagagtttgaggaagatgttggattgttaaataaagcagctccagtttcaggacctcgactggattttgatcctgacattgttgcagctcttgatgatgattttgactttgatgatccagataatctgcttgaggatgactttattcttcaggccaataaggcaacaggagaggaagagggaatggatatacagaaatctgagaatgaagatgacagcgagtgggaagatgtggatgatgagaagggagatagcaatgatgactatgactctgcaggcctattgtcagatgaagactgtatgtctgtgcccggaaaaactcacagagctatagcagatcacttgttctggagtgaggaaacaaagagtcgcttcacggagtattcgatgacttcctcagtcatgaggagaaatgaacagctgaccctacatgatgagaggtttgagaagttttatgagcaatatgatgatgatgaaattggagctctggataatgcagaattggaaggttctattcaagtggacagcaatcgcttacaggaagttttgaatgactactataaagagaaggcagagaattgtgtaaaattgaatacccttgaacccttggaggatcaagacctgccaatgaatgagcttgatgagtctgaggaggaagaaatgattactgtagtccttgaagaagccaaagagaagtgggattgtgaatctatttgtagtacatactcaaatttatataaccatccacagcttatcaagtatcaaccaaagcccaaacaaattcgaatatcttctaaaacaggaatacctctcaatgtcttaccaaagaaaggactcacagcaaagcaaactgaaagaatacagatgattaatggcagtgatcttcctaaagtatcaactcagccacgttctaaaaatgaaagcaaagaagataaaagagcaagaaagcaagctataaaagaagagcgcaaggaacgaagagtggagaagaaagctaacaaattagcatttaaactggagaaaagaaggcaagaaaaagagctgctgaacttgaagaagaatgttgagggtctaaagctatagacagtggagcatacagggcaaggcactttattaggggctccatcatctttggttattggactagaaacttcagaaagacaaaacctgtttgccattttttactggcagataagaggaaaatacaatatttgtattatttttatactagtaagtgtcccctgcccaaccatcttggtaaatattgtaatactttaatttttaatattataagcttacatttgctctgaagtaaatgacttcatgaatgtgaaatgtttgataaattaaaggaaaatatcttcataacgtgaaaaaaa

SEQ ID NO: 2275 - DNA, 965 bp, Homo sapiens
atcaaatggaaccaggaaatgatacacaaatttcagaatttcttcttctgggattttcacaagaacctggactgcaacccttcctctttgggctgttcctgtccatgtacctggtcactgtgctcgggaacctgctcatcatcctggccacaatctcagactcccacctccacacccccatgtacttcttcctctccaacctgtcctttgctgacatttgtgttacttccaccaccattccaaaaatgctgatgaacatccagacacagaacaaagtcatcacctacatagcctgcctcatgcagatgtattttttcatactctttgctggatttgaaaacttcctcctgtccgtgatggcctatgaccggtttgtggccatctgtcaccccctgcactacatggtcattatgaaccctcacctctgtggactgctggttctagcatcctggaccatgagtgctctgtattccttgctacaaatcttaatggtagtacggctgtccttctgcacagccttagaaatcccccactttttctgtgaacttaatcaggtcatccaacttgcttgttctgatagctttcttaatcacatggtgatatattttacagttgcgctgctgggtggaggtcccctgactgggatcctttactcttactctaagataatttcttccatacatgcaatctcatcagctcaggggaagtacaaggcattttccacctgtgcatctcacctctcagttgtctccttattttatggtgcaatcctaggggtgtaccttagttctgctgccacccgcaactcacactcaagtgcaacagcctcagtgatgtacactgtggtcacccccatgctgaacccctttatctatagtctgaggaataaagacataaagagggctctgggaatacatttgttgtggggaacaatgaaagggcaatttttcaagaagtgcccatga

SEQ ID NO: 2276 - DNA, 7445 bp, Homo sapiens
ttttttcccacagcaactgccaatgaaggatgaatcccctttttaaaaagttgttgttgttgttgtttatttgatttcccaccacctccattagaccaagtgcaggaggaggaatgtgaagtagaaagggtgactgaacatgggacaccaaagccctttcgaaagtttgacagtgtagcttttggagaaagtcaaagtgaggatgaacaatttgaaaatgacttagagacagacccacccaactggcagcagcttgttagtcgagaagtgttactgggactaaaaccttgtgaaatcaaaagacaggaagtgattaatgaattgttctacactgaaagagctcatgttcgaacactgaaggttcttgatcaagtgttctatcagcgagtatccagagaaggaattctgtcaccctcagagctacggaaaattttttcaaacttggaagatattcttcaacttcatattggattgaatgaacaaatgaaggctgttcgaaagagaaatgagacctctgttatcgatcagattggggaagatttgctgacatggttcagcggaccaggagaggagaaattgaaacatgctgctgctaccttttgcagtaaccaacctttcgccctggaaatgatcaaatctcgtcagaaaaaggattctcgatttcagacttttgtgcaagatgctgaaagtaatccactgtgtcgtcgtcttcaactgaaggatattattcccactcaaatgcaaaggcttactaagtacccacttctgttggataatattgccacatacacagaatggccaacagaaagggagaaggtgaagaaagctgcagatcactgtcgtcagatcttaaattatgtaaatcaggctgtcaaggaggcagaaaacaagcagcgcctagaagattatcagcgtcgccttgatacctccagcctgaagttgtcagagtacccaaatgttgaagagctcaggaatttggatttaacaaaaaggaagatgattcatgaagggccattggtttggaaggtgaatagagataaaactattgatttatacacgttgctgctggaagacattcttgtattgttacaaaagcaggatgatagactggttttaaggtgtcatagtaagattctggcatctacagctgatagcaaacacacgtttagccctgtcattaagttgagtacagtgttggttcgacaagtggcaacagataacaaagctttattcgtcatttccatgtcagacaatggcgctcagatttatgaactggtggcacagacagtttctgaaaagactgtctggcaggacctaatctgtcggatggctgcatcagtgaaggagcaatccacaaagccaattccattaccacagtcaacacctggcgaaggagataatgatgaagaagatccttcaaaattaaaagaggagcagcatggcatttcagtcactggtttgcagagtccagacagagatttgggattagaatctaccttaatatcgtcaaaacctcagtctcattcactgagtacctctgggaaatcagaggtacgtgatctgtttgtggctgagagacagtttgcaaaggaacaacatacagatgggacactaaaggaagttggagaagattatcaaatcgcaatcccagattcacacctgcctgtctcagaagaacggtgggcattggatgcactaagaaatttgggtttgttgaagcagttgctggtgcaacagctaggtttgactgagaagagcgttcaggaagactggcaacatttcccaagatacagaacagcctctcaggggccgcagacagacagtgtcatccagaactctgaaaatattaaggcctatcattctggtgaaggacatatgccctttagaactggaactggtgacattgcaacttgttacagtccacggacttcaactgaatcttttgctccacgggattcagtgggactggcaccccaggatagccaggcaagtaacattttagtaatggaccacatgattatgaccccagagatgcctaccatggagccagaagggggtcttgatgacagtggagagcacttttttgatgcccgtgaagcacatagtgatgagaatccatcagaaggtgatggagcagttaacaaggaagagaaggatgttaatttacgcatctcaggaaactatttgatccttgatggctatgacccagtgcaggagagttccacagatgaggaggttgcttcctcacttaccctgcagcccatgacaggcatccctgctgtggaatccacccaccagcagcaacattctcctcagaatactcactccgatggggcaatttcaccattcacccccgaatttctggtccagcagcgctggggagctatggagtattcctgttttgagatccagagtccctcctcttgtgcagattcacagagccagatcatggagtacattcataagatagaggctgaccttgaacacttaaagaaggtggaggaaagttacaccattctttgccaaaggctggctggatcagccctcacagacaagcactcagataaaagttagagccgcatgtcctggaggtgactgcaggttgttggatttggagtatcggccgtgtctcaccacatcctggctccagtgtggatgcagagagagtgtgacagaggatctgcctgtgaaccacctgggattagtcaagtcccaaggtgcccagagtgggactagttcttcacagtgtggcagctgcactaatctgtttgtgagggaatatccattccctcactctactctcctcactatcggaaattcattttgattcagaataaaaaccaaatgtatagagctttgggtgtaggatatgaaattgtacttagatttaagaaaaagagaaaatcagatggatttatttgacttcattccgtatttgaaagcacattttaatttttatttgccttgttttgttttaattgagtagtgagagttttagacctttgtctttagtacacccaaggatcaactgctcctgaagcaaagaggtcaggatggagtatgcagaagttgggtagagaggttaagaagaggaggaagtgagacggggaagggaggagcaccttgcttcactatacagtattccaagctctctgctgtccagtaggctgcttctctgagggtcacctcaaaggtatgctatgccgtgtggctcttatgtgcccaggtggtgtggtcagagagtggatgggcttcctcccgccctgaggcaagcacctcttctctgtagctgggatcaaccacaattaataggaatcctcaacatactaaatagcaggcacttgaaaatgggtgtgttttcttccattgtcgtcttttctattgagggttgggatttgggtgggagaggaaagcaaattttattttcttgactataaatttgttattcttggtatcatttcatttttataattatacattagacattggcacttgtgtaaaactgtccctgcagattgagcaggaagtaaaaacaaatggaaatgcttcggatagtggcaggggtgggggttgctaaggaaagggtgggatgggagtgggtaaagagtttgggaaggttatctaactgaatcactactgagttgaatcatggctatcattagccacaggtactgctgattataaggccagtaaaattttagtacctggaggtttgactctaatttttgcactgatggtgccaaagggccctgagtcaaaaggatagccaagggtggagtggaaaaagatatggtgaaggcagaactgctcacaccagctccagaagcacgtcctctgacttcactgccgcagctctttccacacggggccgtgattgaccctaaaaattgcagaccagcacatacactggacactgcaggcaaggtgttggtaactgcctgctctaggatgaatagtagcgttagcagcaccctacagagggtaagtttcagaattgtaatttgagaactccttcaattatattgactttctttggttttccttgtgcattaaggtatatattttttgaagtaattttggccaactaaaaatgaagtctgtaaattctgttaataaacaaggagttcatccgttgctcacatctttcattggtgccctctgaactctgtgggttgctaggatgtaattttaatgcttccctgcagtccaaagatgattttttcaccacaaatggtaagggatgcccacctacttttataaacaccactgcaacttaacaagtttatttatctatgtccagatttctgtttctgtcctaaattgatctgtgtttttaggtggatcaacttggatctttagacctcatctataaattgaaattatatttttaagtcataagccaagtacaatctaactcagaatgggattaaaaattttagaagcagaagctaatatataaatgaagtttgggatttggaactttctgtatctcttaggaggaacaagtaaaaaccaaatggttacattgtgctgctagaaataatgtcattctcaattaaaagggttacacctgtagccacttgacactaacaccatcgagggcaattaatcaggagaaaagtaaatataaaaactttgctcttaacgtcacacactacagggtaattatgtaattctctagcactcaattaagaagcttgtaggttagcaaaatttcagtttctctagttcagccagtgtcttgtccttagtaattatttgctttccctgcagatcaatttctccttggaactctaacaggactaactggaaaaatactttgaccatagctctagtacttccaaataaattcatatctagattttcaaacaaagccccaagatgaagtctaattctgaaaatatctcacaatttttgaatgttctttttatcttaccgacctaacttctcttttccctcccaacttggcctcccacacgttccatttcattttggccattatagtcacatccgtttgactttggttgtgacatcttcctttcaggatgatggaattagatgcagtctgtctttgagtgagactggtcaccatcagaggagttttttctaagtgacgtgactagaagttgaaatctacttccctgctaaagggcacaggggtggtgtacaaagaaagctaccttcccagagcaagcaggctgcattttagctatggaagtgacctgctgtgacactgtgctctcttctgtgggcttaatggttcctttgctatgaagtggcaaattacatgtagagtgtctccttccttttcagagaacagttaatcaaggcaaatcagcaagcccccaaagtgctgtaatttaacatcatgattaccaccttcgaagctatatattttgcatactttaaaatcacctaacttggactgcttgaattacattggcttttagaaccgaaattgtaactatgtattgtatttcatgggaggtatattttatgagctttttggctttcttttttcccacagcaactgccaatgaaggatgaatcccctttttaaaaagttgttgttgttgttgtttatttgattttgagttaggagggataatagagaagtccatttaaaaattatttttagaagctaaagaaagtaattatgcttcctgtgaattgtcttttactggcatctttgttttcctctttgatgttagtaaatttggtgtaatacgtggggcttccatatttcaaagtggaagctttcttctctgaagtcgatatatggttttgaattactagagctttggtcagtatttccttccctatatgtcacagagggcaccactgagaactgcgtgcataggacctcaaaatacaaaattagcagggcctcacagtcagcttcctcatggctagtttttcccccttatattacaatttttgttttataagtcatttttttcctgatatttccaccacttttcagagtcatctacaaaatttttctttcctcaagaaaagagttccttttgccttattccttatgccttccccactggtattgagggttttgataataaattggtaggaaaaaaaagtacctcctagaaggaagccttccccaccatttccaggtgccaactgctaagcagatatattccaaaaatggtaactgtcatgtgcacactgttggttatttttaataagcctcttcctactagaacattttattttccttgttcaccatacaatcatgtactctttaacagaaattgcttttaaaaaatatctggaactatctttaaaaaaactttattaataatcatgtatttttactgatcacattttgaaatgcctaaaagactttattgttctaattatccagatgtacctttgtaaaatagctcttttatgaattagctgataaggctgtatgtttctggaacaaaatattggtcatctaaaaactttctgttttctggggtctgggaaaatagaaaataagatttcaaatattaaataagcttaaaggaaccaagcatgtgactttttatttgtattctggttgatttgtcttgtccaagttatattagaaaagttgaggagtcgaggagcctgtaattaattttcctgtcagtgactgtcagacatcttcctgcttattagagcatccctagcaacaaggctaaaccttcatgacagtgctggcaggtgggcttgccctaggcatgtggggcaggtttgttgtttttttaatagctttattgaggatatttcacatatcatataattcatccatttaaagtgtataatcagatgggttttggtatattattgatttttaattgtggtgaaatatatatataacaaaatttgctattgtaactatttttaagtataaagttcagtgaggtaggccagcttttatgacgcacctgaagataactttggttttaatcctaccctaaatgaagcatatgcctctatttttcctgtccccagtgctgggcttcttcacataccaacatttctgtgcttttaccaacagcattttagctcagaaggctcgcttactttgggcatttgctgtattttggttttgaaatacttgtaatttgacttattcttgggataatattttagttttcagtcattcaagggcacatttggctgacggagctaataagcgtaataaaatgcttagtagtttataccatcttttagttaaacattttaaagattaagactattcaaatgtactttgcggaaattaacctgtttgtatgcctggctttgtttacaaacatatatctatatctatatatatagatacagatacagatacatatctggtggaacaaagaaatacctgtaccattcccacttgctctttgatagccacctcctaggaatggagacaataaaactctgtatttgcatgtgaaaaa

SEQ ID NO: 2277 - DNA, 2208 bp, Homo sapiens
gcggtggaattcgcggagggagcgctgaccatggctccctggcctgaattgggagatgcccagcccaaccccgataagtacctcgaaggggccgcaggtcagcagcccactgcccctgataaaagcaaagagaccaacaaaacagataacactgaggcacctgtaaccaagattgaacttctgccgtcctactccacggctacactgatagatgagcccactgaggtggatgacccctggaacctacccactcttcaggactcggggatcaagtggtcagagagagacaccaaagggaagattctctgtttcttccaagggattgggagattgattttacttctcggatttctctactttttcgtgtgctccctggatattcttagtagcgccttccagctggttggaggaaaaatggcaggacagttcttcagcaacagctctattatgtccaaccctttgttggggctggtgatcggggtgctggtgaccgtcttggtgcagagctccagcacctcaacgtccatcgttgtcagcatggtgtcctcttcattgctcactgttcgggctgccatccccattatcatgggggccaacattggaacgtcaatcaccaacactattgttgcgctcatgcaggtgggagatcggagtgagttcagaagagcttttgcaggagccactgtccatgacttcttcaactggctgtccgtgttggtgctcttgcccgtggaggtggccacccattacctcgagatcataacccagcttatagtggagagcttccacttcaagaatggagaagatgccccagatcttctgaaagtcatcactaagcccttcacaaagctcattgtccagctggataaaaaagttatcagccaaattgcaatgaacgatgaaaaagcgaaaaacaagagtcttgtcaagatttggtgcaaaacttttaccaacaagacccagattaacgtcactgttccctcgactgctaactgcacctccccttccctctgttggacggatggcatccaaaactggaccatgaagaatgtgacctacaaggagaacatcgccaaatgccagcatatctttgtgaatttccacctcccggatcttgctgtgggcaccatcttgctcatactctccctgctggtcctctgtggttgcctgatcatgattgtcaagatcctgggctctgtgctcaaggggcaggtcgccactgtcatcaagaagaccatcaacactgatttcccctttccctttgcatggttgactggctacctggccatcctcgtcggggcaggcatgaccttcatcgtacagagcagctctgtgttcacgtcggccttgacccccctgattggaatcggcgtgataaccattgagagggcttatccactcacgctgggctccaacatcggcaccaccaccaccgccatcctggccgccttagccagccctggcaatgcattgaggagttcactccagatcgccctgtgccactttttcttcaacatctccggcatcttgctgtggtacccgatcccgttcactcgcctgcccatccgcatggccaaggggctgggcaacatctctgccaagtatcgctggttcgccgtcttctacctgatcatcttcttcttcctgatcccgctgacggtgtttggcctctcgctggccggctggcgggtgctggttggtgtcggggttcccgtcgtcttcatcatcatcctggtactgtgcctccgactcctgcagtctcgctgcccacgcgtcctgccgaagaaactccagaactggaacttcctgccgctgtggatgcgctcgctgaagccctgggatgccgtcgtctccaagttcaccggctgcttccagatgcgctgctgctgctgctgccgcgtgtgctgccgcgcgtgctgcttgctgtgtggctgccccaagtgctgccgctgcagcaagtgctgcgaggacttggaggaggcgcaggaggggcaggatgtccctgtcaaggctcctgagacctttgataacataaccattagcagagaggctcagggtgaggtccctgcctcggactcaaagaccgaatgcacggccttgtaggggacgccccagattgtcagggatggggggatggtccttgagttttgcatgctctcctccctcccacttctgcaccctttcaccacctcgacccgggaattccgg

SEQ ID NO: 2278 - DNA, 1681 bp, Homo sapiens
tacttcccggatgagaagggcggccgtgaagccagcagggaagccagccccacaggcaagggccccccagcctcctcacagctccccatagcctggacctgccggccctccctccaggaccgaggggctcccaagggaaactcaggcgtgtgctggtcccaatgtcagtgaaacccagctgggggcctggcccctcggagggggtcaccgcagtgcctaccagtgaccttggagagatccacaactggaccgagctgcttgacctcttcaaccacactttgtctgagtgccacgtggagctcagccagagcaccaagcgcgtggtcctctttgccctctacctggccatgtttgtggttgggctggtggagaacctcctggtgatatgcgtcaactggcgcggctcaggccgggcagggctgatgaacctctacatcctcaacatggccatcgcggacctgggcattgtcctgtctctgcccgtgtggatgctggaggtcacgctggactacacctggctctggggcagcttctcctgccgcttcactcactacttctactttgtcaacatgtatagcagcatcttcttcctggtgtgcctcagtgtcgaccgctatgtcaccctcaccagcgcctccccctcctggcagcgttaccagcaccgagtgcggcgggccatgtgtgcaggcatctgggtcctctcggccatcatcccgctgcctgaggtggtccacatccagctggtggagggccctgagcccatgtgcctcttcatggcaccttttgaaacgtacagcacctgggccctggcggtggccctgtccaccaccatcctgggcttcctgctgcccttccctctcatcacagtcttcaatgtgctgacagcctgccggctgcggcagccaggacaacccaagagccggcgccactgcctgctgctgtgcgcctacgtggccgtctttgtcatgtgctggctgccctatcatgtgaccctgctgctgctcacactgcatgggacccacatctccctccactgccacctggtccacctgctctacttcttctatgatgtcattgactgcttctccatgctgcactgtgtcatcaaccccatcctttacaactttctcagcccacacttccggggccggctcctgaatgctgtagtccattaccttcctaaggaccagaccaaggcgggcacatgcgcctcctcttcctcctgttccacccagcattccatcatcatcaccaagggtgatagccagcctgctgcagcagccccccaccctgagccaagcctgagctttcaggcacaccatttgcttccaaatacttcccccatctctcccactcagcctcttacacccagctgaggtagaggccagactcctccaacagtgaaggaaaaggcacagatcaccttagaggccacgctcccaagattagttatcaccctggcagtatgaatacttccctaaggcctcccatccatggaggggaagagtgggaaccagctgttacactcagcatttactgagcactgatgggagccctgcctgggccatgtgctgtggggccaaatggacatcactccctaacttcttgaggtctgtctcctctgtggattcacgcatgtatcaacctcattaaactatgccaaacttttaaaaaaaaaaaa

SEQ ID NO: 2279 - DNA, 1231 bp, Homo sapiens
caggcccgcagcccgagtgtcgccgccatggcttcgccgcagctctgccgcgcgctggtgtcggcgcaatgggtggcggaggcgctgcgggccccgcgcgctgggcagcctctgcagctgctggacgcctcctggtacctgccgaagctggggcgcgacgcgcgacgcgagttcgaggagcgccacatcccgggcgccgctttcttcgacatcgaccagtgcagcgaccgcacctcgccctacgaccacatgctgcccggggccgagcatttcgcggagtacgcaggccgcctgggcgtgggcgcggccacccacgtcgtgatctacgacgccagcgaccagggcctctactccgccccgcgcgtctggtggatgttccgcgccttcggccaccacgccgtgtcactgcttgatggcggcctccgccactggctgcgccagaacctcccgctcagctccggcaagagccaacctgctcccgccgagttccgcgctcagctcgaccccgccttcatcaagacctacgaggacatcaaggagaacctggaatcccggcgcttccaggtggtggactcccgagccactggcaggttccgcggcaccgagcccgagccccgagacggcattgaacctggccacatcccaggtaccgtgaacatccccttcacagacttcctgagccaggaggggctggagaagagccctgaggagatccgccatctgttccaggagaagaaagtggacctgtctaagccactggtggccacgtgtggctctggcgtcacagcctgccacgtggcactaggggcctacctctgcggcaagccagacgtgcccatctacgatggctcctgggtggagtggtacatgcgcgcccggcccgaggatgtcatctcagagggccgggggaagacccactgaagctgggcaggacacaggcgagctcaggtgatgccggccaccagcaatgcctggcctggtagctccgcttctgctttcaccaagagagtgtttcttcactcaactcaggtggcatttggggtgacatctcaaaggccaggaattccgttgacttgttggctgccagtaggggcgggaggaaaggcggaggcgagccctggaggagggaggccacaactccgagctgcccacctggtgctgagctggggccccgcctcctttctgttttatttttgaggaaataaaataaccaagtgctaaaaaaaaaaaa

SEQ ID NO: 2280 - DNA, 1599 bp, Homo sapiens
gcccgccggtccacgccgcgcaccgctccgagggccagcgccacccgctccgcagccggcaccatgcgcgagatcgtgcacatccaggcgggccagtgcggcaaccagatcggcgccaagttttgggaggtcatcagcgatgagcatgggatcgaccccacaggcagttaccatggagacagtgacttgcagctggagagaatcaacgtgtactacaatgaggctgctggtaacaaatatgtacctcgggccatcctggtggatctggagcctggcaccatggactctgtcaggtctggacccttcggccagatcttcagaccagacaacttcgtgttcggccagagtggagccgggaataactgggccaagggccactacacagagggagccgagctggtcgactcggtcctggatgtggtgaggaaggagtcagagagctgtgactgtctccagggcttccagctgacccactctctggggggcggcacggggtccgggatgggcaccctgctcatcagcaagatccgggaagagtacccagaccgcatcatgaacaccttcagcgtcatgccctcacccaaggtgtcagacacggtggtggagccctacaacgccaccctctctgtccaccagctggtggaaaacacagatgaaacctactccattgataacgaggccctgtatgacatctgcttccgcaccctgaagctgaccacccccacctacggggacctcaaccacctggtgtcggccaccatgagcggggtcaccacctgcctgcgcttcccgggccagctgaacgcagacctgcgcaagctggcggtgaacatggtgcccttccctcgcctgcacttcttcatgcccggcttcgcgcccctgaccagccggggcagccagcagtaccgggcgctcacggtgcccgagctcacccagcagatgttcgactccaagaacatgatggccgcctgcgacccgcgccacggccgctacctgacggtggctgccatcttccggggccgcatgtccatgaaggaggtggacgagcagatgctcaacgtgcagaacaagaacagcagctacttcgtggagtggatccccaacaacgtgaagacggccgtgtgcgacatcccgccccgcggcctgaagatgtcggccaccttcatcggcaacagcacggccatccaggagctgttcaagcgcatctccgagcagttcacggccatgttccggcgcaaggccttcctgcactggtacacgggcgagggcatggacgagatggagttcaccgaggccgagagcaacatgaacgacctggtgtccgagtaccagcagtaccaggacgccacggccgacgaacaaggggagttcgaggaggaggagggcgaggacgaggcttaaaaacttctcagatcaatcgtgcatccttagtgaacttctgttgtcctcaagcatggtctttctacttgtaaactatggtgctcagttttgcctctgttagaaattcacactgttgatgtaatgatgtggaactcctctaaaaattacagtattgtctgtgaaggtatctatactaataaaaaagcatgtgtagaaaaa

SEQ ID NO: 2281 - DNA, 895 bp, Homo sapiens
cgcgtccgcggacgcgtggacggacgcgtgggcgtctcttggcccgcgcttaaggccctcgcggggggcttgtgggtcctcctccccctcccactgacaactgccccaactgctcttcccgccccggtcacagtgaaaatgtagacggggtcgttgtccgtacgactgtgcgccagggctcggggaggggcgccctccgcgtgagcgcccccctgggaatattgaacataatcacctctcattccagactatgttaggtcttaatggtgggaggacgcccgagtgctcggcccgtttcaccccgaggaggaaggacactgggtcatgacgccatcagagggcgccagagcagggaccggacgcgagttggagatgttggactcgctgttggccttgggcggcctggtgctgcttcgggattccgtggagtgggaggggcgcagtctcttgaaggcgcttgtcaagaaatctgcactgtgtggggagcaagtgcatatcctgggctgtgaagtgagcgaggaagagtttcgtgaaggttttgactctgatatcaacaatcggctggtttaccatgacttcttcagagaccctctcaactggtcaaaaactgaggaggcctttcctggggggccgctgggagccttgagagccatgtgcaagaggacagatcctgttcctgtcaccattgctctcgattcactcagctggctgctacttcgccttccctgcaccacactctgccaggtcctgcatgctgtgagccatcaggactcttgtcctggtgagacccctccttcattgtttcccctcatacatctccctctgccaaggagtgtgccccttttcctttctaccctagaataaacatctgggttctccagtcggaaaaaaaaaa

SEQ ID NO: 2282 - DNA, 2710 bp, Homo sapiens
  misc_feature (1)...(2710): n = a,t,c or g
cgcagcgggtgcgggcgccgacgggcgagagccagcgagcgagcgagcgagccgagccgagcctcccgccgtcgccatgggccagaacgacctgatgggcacggccgaggacttcgccgaccagttcctccgtgtcacaaagcagtacctgccccacgtggcgcgcctctgtctgatcagcaccttcctggaggacggcatccgtatgtggttccagtggagcgagcagcgcgactacatcgacaccacctggaactgcggctacctgctggcctcgtccttcgtcttcctcaacttgctgggacagctgactggctgcgtcctggtgttgagcaggaacttcgtgcagtacgcctgcttcgggctctttggaatcatagctctgcagacgattgcctacagcattttatgggacttgaagtttttgatgaggaacctggccctgggaggaggcctgttgctgctcctagcagaatcccgttctgaagggaagagcatgtttgcgggcgtccccaccatgcgtgagagctcccccaaacagtacatgcagctcggaggcagggtcttgctggttctgatgttcatgaccctccttcactttgacgccagcttcttttctattgtccagaacatcgtgggcacagctctgatgattttagtggccattggttttaaaaccaagctggctgctttgactcttgttgtgtggctctttgccatcaacgtatatttcaacgccttctggaccattccagtctacaagcccatgcatgacttcctgaaatacgacttcttccagaccatgtcggtgattgggggcttgctcctggtggtggccctgggccctgggggtgtctccatggatgagaagaagaaggagtggtaacagtcacagatccctacctgcctggctaagacccgtggccgtcaaggactggttcggggtggattcaacaaaactgccagcttttatgtatcctcttcccttcccctcccttggtaaaggcacagatgttttgagaactttatttgcagagacacctgagaatcgatggctcagtctgctctggagccacagtctggcgtctgacccttcagtgcaggccagcctggcagctggaagcctcccccacgccgaggctttggagtgaacagcccgcttggctgtggcatctcagtcctatttttgagtttttttgtgggggtacaggagggggccttcaagctgtactgtgagcagacgcattggtattatcattcaaagcagtctccctcttatttgtaagtttacatttttagcggaaactactaaattattttgggtggttcagccaaacctcaaaacagttaatctccctggtttaaaatcacaccagtggctttgatgttgtttctgccccgcattgtattttataggaatactgaaaacatttagggacacccaaagaatgatgcagtattaaaggggtggtagaagctgctgtttatgataaaagtcatcggtcagaaaatcagcttggattggtgccaagtgttttattgggtaacaccctgggagttttagtagcttgaggcaaggtggaggggcaagaagtccttggggaagctgctggtctgggtgctgctggcctccaagctggcagtgggaagggctagtgagaccacacaggggtagccccagcagcagcaccctgcaagccagcctggccagctgctcagaccagcttgcagagccgcagccgctgtgggcagggggtgtggcaggagctcccagcactggagacccacggactcaacccagttacctcacatggggccttttctgagcaaggtctcgaaagcgcaggccgccctggctgagcagcaccgccctttcccagctgcactcgccctgtggacagccccgacacaccactttcctgaggctgtcgctcactcagattgtccgtttgctatgccgaatgcagccaaaattcctttttacaatttgtgatgccttaccgatttgatcttaatcctgtatttaaagttttctaacactgccttatactgtgtttctctttttgggggagcttaactgcttgttgctccctgtcgtctgcaccatagtaaatgccacaagggtagtcgaacacctctctggcccctagacctatctggggacaggctggctcagcctgtctccagggctgctgcggcccagccccgagcctgcctccctcttggcctctcatccattggctctgcagggcaggggtgaggcaggtttctgctcataagtgcttttggaagtcacctacctttttaacacagccgaactagtcccaacgcgtttgcaaatattcccctggtagcctacttccttacccccgaatattggtaagatcgagcaatggcttcaggacatgggttctcttctcctgtgatcattcaagtgctcactgcatgaagactggcttatctcagtgtttcaacctcaccagggctgtctcttggtccacacctcgctccctgttagtgccgtatgacagcccccatcaaatgaccttggccaagtcacggtttctctgtggtcaaggttggttggctgattggtggaaagtagggtggaccaaaggaggccacgtgagcagtcagcaccagttctgcancagagcgcctccgtcctagtgggtgtcctgtttctcctggccctgggtggntaaggctg

SEQ ID NO: 2283 - DNA, 1011 bp, Homo sapiens
ttttttttttttaaaaacaaagaaggacacatttattatttgttgtgcacctttagaaatggtccacaggtccactgcagtgcacaagctgctgcatgcacaccgcacgtgacaatccagtctgcctgactcccaggacagcctgtgtgatatgcaaaatgccattcccatgagggcgcatcatgtttcccaggagctctgaaggacacagatagagcttgtgctctaggctgcccccctgttcccgtgctggctccatgctggtgtccagaatgagccagttcacactccagtgccacgtggggggagaagtggctcccaaactcccctgctgacctccccccggcccctaggtgtaccttccaagtcagatgacagtcataggctaacatccccagctttgcctggaactcaggaaaggatacttacgggtagacagaaagattctgcagtgggcatggacttggccattgaagaccctgagaggacatcttgtccaccctctccaggctaggccctgtctgtgctgcctggagccagaagaaaaagattccagccttggaatctgcagggagggagactccttgcagtgagctttcttgcatttcattctagtatttgccacagatgctgatttcttgcctgagtcatatatattgaagtttttgctcatttcttactaggcttaagaaattggaattctctgccttacaaatcccaaagggctaaacatgcctccaagcccatgaacaagctttgagcatctgaaggacaaaaccccagctcctaaaacgttcatgagcatccactttctgctcagcctggaagagaaggagcactgctgccctctggtggtcaggcagcagagcatctaggagccacccaagggagctgggtcccctttgctttgtctttgggacagcagctttgagtattaggtcaatggatgtcctttcactgttcctggaacatggcaagcttgtttttgcctcagggctctctcctcgtgcc

SEQ ID NO: 2284 - DNA, 697 bp, Homo sapiens
tatttcatcaaatccaagatataccaattgtaagatgcaccattattatatgcatcactgataattttatgcatcactgatatttttcaaaaggcatcctgaatgttataagaagctgactgatatcagagatgttagaataggatctcagaacggatgaaatatgttatgaaatatggttatggttatgcaaatacctagtcataacagtcatcaatagaagtgtagctcctttttgcccacctcaaaggcaaagcctgtgtcatctttatacccactatggaacctaagactggatcatgatggaatgatggcaataaaaaacataactgatatttactgagcactttatttgtgttgcagcgcaactttatatgaattaatactcaagataacttttattgcttgttttggtaagtactattattcccactttgcagataagggtactgagacttaaagagaagttaaacatctcaaccaagttaggaagatgcttggattacaaacccaagtctatctaatgctagatctacaccttctaagccactgtgttacactgtccttaaggagggtcaggttgtgggtgtcaagactacaaaggcaagtaacacacgtgagaagctcaggccagaatcagagagaaggatggtcaagagttttggagatgaggtaacttaaagaactggctcgtgcc

SEQ ID NO: 2285 - DNA, 1065 bp, Homo sapiens
cgggtcgacccacgcgtccggcgcgagacccagcctaaagagagcccggagccagcgtgggaggccgctgccgtcgcgcgccttgccatcagcccacaaagacatgactaccaacgcgggccccttgcacccatactggcctcagcacctaagactggacaactttgtacctaatgaccgccccacctggcatatactggctggcctcttctctgtcacaggggtcttagtcgtgaccacatggctgttgtcaggtcgtgctgcggttgtcccattggggacttggcggcgactgtccctgtgctggtttgcagtgtgtgggttcattcacctggtgatcgagggctggttcgttctctactacgaagacctgcttggagaccaagccttcttatctcaactctggaaagagtatgccaagggagacagccgatacatcctgggtgacaacttcacagtgtgcatggaaaccatcacagcttgcctgtggggaccactcagcctgtgggtggtgatcgcctttctccgccagcatcccctccgcttcattctacagcttgtggtctctgtgggccagatctatggggatgtgctctacttcctgacagagcaccgcgacggattccagcacggagagctgggccaccctctctacttctggttttactttgtcttcatgaatgccctgtggctggtgctgcctggagtccttgtgcttgatgctgtgaagcacctcactcatgcccagagcacgctggatgccaaggccacaaaagccaagagcaagaagaactgaggagtggtggaccaggctcgaacactggccgaggaggagctctctgcctgccagaagagtctagtcctgctcccacagtttggagggacaaagctaattgatctgtcacactcaggctcatgggcaggcacaagaaggggaataaaggggctgtgtgaaggcactgctgggagccattagaacacagatacaagagaagccaggaggtctatgatggtgacgatttttaaaatcaggaaataaaagatcttgactctaaaaaaaaaaaa

SEQ ID NO: 2286 - DNA, 996 bp, Homo sapiens
ggtcttggacaagtgaggggacacaggcccacaaatacttatgtcatatttagattcagttgcatcaaagttattgcaaatggtgaaaaaattatcccagtccttttgcagtaattttaaatatctaacaaaatattcaagaaaacaggtttctgatgaaatcaaaaagtcaagaagaactgtggaatcaaatcctatatttttcaagaagaacaagaaaatacagtgaggattatagccattttcatgagtgtgatggtcccacatttcttttccctgagtcaagctttcagtggcttcacatcctctggtcagtgttaagtagatgcccagtgatgccttggcagcctccagcatgtcatcgtcttgttctatgaaaacccgagacagccatttgcacggattgtgtaattgcagagagggctgaagatgaggctttaagaaggtcagtaactcagacatgaacctctgtaagtcaactttcatttcacttgctgaagaataattttgaaacttgatttctaaggatttcattataactaagcttgctgctctaaggatcacatgatctggactagtgataagttcacattcaggttgaacttcatcacctccaaaaaaggaatgtttttcataaacagacagtgtcttcaacaaccccgaattcacagcttgcaaaacagcattagctaaagccagcatgtccaccgctacatgatggtctggcggcattaaggcaggcacagatccacgacagaggtcttcacccactttacagagaaggcactttttgaggaatatgatgaccttccttttaacaaaagcctgaataggccaggtaataacttctagcatgcaagatggtttcaaaaataaaatcctctggcaagtgaaatgtaacttcaggtggattctggaggcgatgagaagctcaagcaactccagaaaacacatcaggatgtttactattttagaagtatcccggcagttttcaaa

SEQ ID NO: 2287 - DNA, 1599 bp, Homo sapiens
tttgcaaacgccacagtgatgccctgcagaaaagctgtggcagaatccccttgatagtccccagcactcttcacatcactctccccatcaccagacaaccacatcagagcctgactgacgatgagatgcaggtaaaggtaacaagacaaggcccaggctcgcaagcttctgtccccaaaaggccacctgcttgacagccacaggtgtcacagctgtaactgggttcattttggccaagagataggtaaagtttaaaatattgataccctgttaactataatttcataactcctattttttaaagataatttcttcaaattccaaaagttttaaacagcaacagcaaattgttactggtgttaacaaattgttaaacagcaacagcaaactcttactgtggctggtcaccacagtgtagatacagtccgggctttctctgtgctttgcagacctcagtgagacaccagagggcagggcaggtgtcccagggtgcccacactcgtgtgacggtgtggcatcaggcaggccctgcagtcccagttctgctggttaacctgccacatgcacttctgtcctgacacacaaggacggcagggcaagaccgtaaaccatgaccttgtctttgtaaagaaaggcccagagcctgagaaaagcaggcctttagcaggaagggctctgccctcctcacctcagagcaaatccatttgccgcgttctgaagctcattaatagacctcctcaggccaaagagaacaatgtccccaccaaccctccctaacagtcacagatacacttcattgtccggacttacaggtcagttaatcagaagcctgagctctggaatattgtcaaagaaatggagttttgagtagtgagtacatggtgtactctcccaaatgcagcctaatcttagtaaccttgaagtttatcattctttaaaaataaatagaataccaatggtttagatattccaacaaagaatgctagaaacaaatgtctaatctcgattattagctttaccaaccctgtgaacactgaggttgcagaactgccaggttaatccctgtggcctagactactgaggattctgatagcacatgtaagactaagcactcttcaagctgtaataaagcatccacatgtatctgtgatgattttcattgctttagcattgcagccatgtaacaactgcagaaagaaggtatttttaaaaatacaatagactacactttttggatcacagagaaatacagatgcactctgagactgcctatgtttataaacatgttgtgtcccctaactgaagtgacaggtcttctggaattgacattaagaagtgtggatagtcatatcacacgcaatgtatttgttttcagcagtgagcagaccgtacaggagcagcacaccaggagccatgagaagtgccttggaaaccaacagggaaacagaactatctttatacacatcccctcatggacaagagatttatttttgcagacagactcttccataagtcctttgagttttgtatgttgttgacagtttgcagatatatattcgataaatcagtgtacttgacagtgttatctgtcacttattt

SEQ ID NO: 2288 - DNA, 2148 bp, Homo sapiens
aaaacctccagcaggttttaggaagtattcatgtatttttctggttactttctgtcatctctaattgaactcacctgatgaaggttcagtgttctggggccagaatttatgattttagatcaccttctttggaaccttagatcactgtgttttgaaatcatgagtttgcttttaacttcatagggtcaactttaaaatgatatgcactgttaattttaaagcatttgctgcagataattaaacttagaagtgcctttgactttaggatacaaatattacagaagaaaatataatttcactttttaaaattggggtgggaaaatcccattgcatatttgaaataggcttttcatactaagcttcatagccaggagtccccagagtcttgttcctctgaaagccactggggagtggcctctggggtgctgattccacagaggtgtatgctgtagacaggagagtgccatctatgccaaaactcgccctcaaaaacaaacaaggcttgctgggaggcgtgctgggcttggccatcagtatttccagtgtggtaaactattgctggcacttccccctggaaataactaatgaggttacgagttgggcacctgcacagatgtccttctctcatagttcctaatgcttaggaatagaggagaaataaaaaaatggattctctcaaaacactgccatttgaatagcgacagaagtgctcccccagcccccaactttggacagcaaagttgaggagaatgagcagacacagttgtttgcttgatctgaatctctctaaagtaaagtatttccaaactgtgtgacaagagcctacctaccactgtagcggtcaaagctgaagcttcttacagcagtgaaacggggcaccacctcccccacactcctcattccccgcttaaaacatggatactttcaaatttgactgtttcttaaactgccatcctaagatatggaaaatttttatagtaaagtgtctagttagcttatttccttttctaaaacaagtgttttcaagataactgtattttacctttatatgtactgaatagctgtttctttttgaattatttgccttttaaaatttgataatgtctctggatataacaggacaggagttcttaaaaaatatcttaagaaattcactttatgggtaaacccaaggtttttgccaacttgttgcctagaaaataagggctagtttcagtttatacaaatagaattattaaacattttacagtccttgattagaaaccagacccaatctccttataacaccacagcgtatcctgccattgacagtgtaatcacaattctccctttttcatttagctgcttttttattattactaaatgttttggattgagcatttttccctctgtaattttcttccttcacgtttattttattttaactcttgtagtattttattgttgttaatttacaagtttaaaaatattaggtactattaataatggttaaaaatagaaaaatgcatatttttgtatgataatcaaatgtaaaatacttttatttttgctggacagttgttatatcatgattattgtgctacagtttattgtgcataatatgaaaaacaactatgacagccttcagtcgggccagggtgaagctgcttataccacctctgccgtcagagggacatgtggtgacagcagtggtgtggctgcacagggcgcactagagagagctcagcacccctgctgcccgccagcagagcccgtgctgagggaatgccgcacagatgctgatgcactgggtgaaatttctagtattgaacgtaaaggtgtacagtgtcttgctgttattttatgatggaaactgattttgaaaccaaaaatagctaactaactttatttaaggaaaggatattaatttgtactaacagagggtgaaagctgttcacatttgtcaacaaaatctgcttgctgcagtagtaacctcaagtggttaaaacttgatttcccgagaaaactaaaacctttgtgcctaaaattgatgacttgagttcaagtgggatgagcaagaagatgtgttatcttgttgttcaacagtattgagtgtgaaggaaattttgatggcttaataaaattccacagcgactgttaaaaaaaaaa

SEQ ID NO: 2289 - DNA, 2395 bp, Homo sapiens
tttcgtgtcaccagcacttacggcactgaaaactcgctgctgccccaacctggcttgacaggcttggtctctgcaagtggctctcagccccttcttctttcctgcctcaccttccaattcgtttgccgccgccgtcccgcagctgctgtttccggagttgccccttccccatgttccggggcaggagtccgcaaagcgaagatccgcccgccggttcctcatcatgtccgaactgactaaagagctgatggagctggtgtggggcaccaagagcagccccggtctctcggacaccattttctgccgctggacgcaagggtttgtgtttagtgaatcagagggatctgcattagaacagtttgaaggtggcccctgtgctgttattgcacctgttcaggcatttcttttgaagaagctcctgttttcttcggagaagtcttcttggcgggattgttcacaggaagagcagaaggaactcctttgtcataccttgtgtgatattttagaaagtgcttgttgtgaccactctggatcatactgcttggtttcatggttaagaggaaagacaactgaggaaactgctagtatttctgggagtcctgcagagtctagttgccaagtggaacattcttctgccttggctgtcgaagagcttggctttgagcgatttcatgcattaattcaaaaaagatcgttcagaagtttaccagaattaaaagatgctgtcttggaccagtattcaatgtggggaaataaatttggagtattgctttttctgtattctgtattactgacaaagggcattgaaaacataaaaaacgaaattgaagatgcaagtgaacccttgatagatcctgtatatggacatggcagccaaagtttaattaatctcctgctgacgggacatgctgtttctaatgtatgggatggtgatagagagtgctcaggaatgaaacttcttggtatacatgaacaagcagcagtaggatttttaacactaatggaagctttaagatactgtaaggttggttcttacttgaaaatctccaaaattccctatttggattgtttggcaagtgagactcacctcaccgtattttttgccaaggatatggctttagttgcccctgaagctccttcagaacaagccagaagagtttttcaaacctacgacccagaagataatggattcatacccgattcacttctggaagatgtgatgaaagcattggaccttgtttcagatcctgaatatataaatctcatgaagaataaattagatccagaaggattaggaatcatattattgggcccatttcttcaagaattttttcctgatcagggctccagtggtccagaatcttttactgtctaccactacaatggattgaagcagtcaaattataatgaaaaggtcatgtacgtagaagggactgcagttgtgatgggttttgaagatcccatgctacagacagatgacactcctattaaacgctgtctgcaaaccaaatggccatacattgagttactctggaccacagatcgctctccttcactaaattaatttgtctaagtatttataaggaagatcttaataacagatgttgaaagaaggagtcaagactggcaattggctggattaagctaaacactggtatcactgattaactgtaaataacaattaaaaacacattttcagtgtttatgatatgtttaaattatttgtcctaaagctttatgttaaagattatcctattttaccccttcgtgtgaaatttactagcaaaattaagctttcatcaaagttcatcacttttgcattcagatacttggtcatttacttaccaaattacaaacgcaatactacagcatttgtatattaagtatcacagttactattgataaactacttttgggttttatttcattgaggcactttttttattgtttgaatgattccggcttgtaatatatcagcctctacaatgaaatgcagaagagttcatttttctaagatctgtttttcattagaaatattgacaaataacacattgtcaacctggatcctttgacaatttacttaactctggcatgttcacaaaaagtagaaactctaagagaccattaccatttattcacagatgtataggggatgtattctaaaaactgacagaaaagagaatctgatagtcaacactgttaacttttactgtgtaattgccaaatacactttttccaaatttgtcccaacagccctgtaagccagctttcttctatatttataaacacgataaatgcatgagaagatctgttattacattagtatattacgttatttattatgatcctagttgatggcctaaataaacacctttttctttaaaaaaaaaaaaac

SEQ ID NO: 2290 - DNA, 1944 bp, Homo sapiens
ggggggttttggttcgagaccctagtcaccgtgctggaattccggaagagctgggtgctgacggcgctgggcgggtcaggggcggagagcgtgctaaccaatgacttgagggagtagggggccgggtttgggccctcagttgctaagggctacccgagtgggaagcggttcaagagatggggtgaagggtggttcaccggttcttcaagtcctcagccttctggcccgcggaagttaagcaaccaagaggcgggcctaagaccggaagcaggaaggagggcgcaggaagcagggcgccgcagcctgtcgtacggtccttctgtgggtctgtcggtgccgagggcaggatggagaagctgcggctcctgggcctccgctaccaggagtacgtgactcgtcacccggccgccacggcccagctggagacagcagtgcggggcttcagttacctgctggcaggtcgattcgccgattcgcacgagctgtcagagctggtgtactctgcctctaacctgcttgtgctgctcaatgacgggatcctacggaaggagcttcggaaaaagttgcctgtgtcgctgtcccagcagaagctgctgacatggctgagcgtgctggagtgcgtggaggtgttcatggagatgggagctgccaaggtgtggggtgaagtgggccgctggcttgtcatcgccctcatccagctggccaaggctgtactgcggatgctcctgctgctctggttcaaggctggcctccagacttcaccccctatcgttccactggacagagagacccaggcacagcccccggatggtgaccacagccctggcaaccatgagcagtcctacgtggggaagcggtcaaaccgggtggtgcgaaccctccagaacacgccgtccctgcactccaggcactggggagctccccagcagcgggagggacggcagcagcagcatcacgaggagctgagtgcgacccccacccccctggggctgcaggagaccatcgcagagtttttgtacattgcccggccgctgctgcacttgctcagcctgggcctgtggggtcagaggtcgtggaaaccctggctcttggctggtgttgtggacgtgaccagcctgagcctcctgagtgacagaaagggcctgacccggagggagcggcgggagctgcggcgccggaccatcctgctgctctactacctgctgcgctctcctttctacgaccgcttctccgaggccaggatcctcttcctgctccagttgctggccgaccacgtccctggcgttggcctggtcacaaggccgctcatggattacttgcccacctggcagaaaatctacttctacagttggggctgacagacctcccggaaggagggtgtggggaggggtggggcagggagcccctcttccctaataaaactgactccggcagcgtcccagcgtgcggcctctccgtgcctaccggccaggccacacacagccctggtcgccaccagcgttcctcccaggacacccttgactgcgctctcctgtgacgatgccactgcagcccgcaccttgtcactgctgggccaagaagccttcactaggagtgggatccaggctcctctcccacagaaagcggtgacttcacctcatggagcccgggaagctgcttgcctcggcagccataggagcgaacactgctgctctctcgctggcccctggtgaggacaggaagcctgaacccgggtgatggctgaacgctgcccagcgtgtcttctggctggggccctccgtcctgccccttctccgcagggccctgtggctctggcagccccaggccatggggttgccagcctccctgtgacagagcctggtgaacagtgagcctggctcccacgcaagtggccctttaagccctgcatcctcggttgagagtaaaaggcttttctcccttaga

SEQ ID NO: 2291 - DNA, 920 bp, Homo sapiens
  misc_feature (1)...(920): n = a,t,c or g
ttttattttttttttctgctttaatgttaaaaatatttattttttttcctaaaagatcacacaaaagttgggaagagaaggatgtcaattagactacatcaaaatctgggcagagggaggacaaagagctgcctaaagaaactggtagctggagcaaactgcagagatcaagatgaccctagtccacggaaccagcagcccaggtcagccacattcaggagcaccaccgaggcacggcagggagagcaaagttgctggccccaatcattcctccttttcagggcaggagaggcagaagctcactctttagacatgttcttgatggtcttgtgctctttcatggccttctcccaatcgctgccattgaattcctcagtgaccatactccgcacagtgccctcatccaggcagtggggggcaattccgaagcctccggggtttgatcgtggagtatagaagctctgaacgccacatctcttacagaaggtatgctgggctttgtgagtattgaacgtgtaagtcgttatgtgctcagctcccttcaggagcttgaagcgagaagctggaacaatgaagtgtctattctgcttcttcttgcaaatgctgcaactacagaaagacagagcaaattccagattgtgagcagccacctgcatcctctatgcctgagcggcccagccatgagagccagccgaccccacagatgatgcccctttcagcaccatccagggccgaggagctggggcaaaggcctggatagcagtgcctctggtttgcaggtacagcagagcccaggggggtcccaagtcagcagtcgaggttctgcaatgctcagaacacaggaccaacagacaggtctgtactgcccacccctcagttcgaattccaccacactgactaggggnctacgagtcttctat

SEQ ID NO: 2292 - DNA, 348 bp, Homo sapiens
  misc_feature (1)...(348): n = a,t,c or g
gactngaaggcggctggtcaccgactcctccttgctgccggtcatccttccatgcccagctctgattgcctcctctgggaaggctccctggagttacgtcccctgcagcatatttcctcactgctcgtgcttgtctctaccacatgcctgtttgctttcccgagagtccctatagcctttgaaagcaagagctgtctcatttatcattgccattgcgccttcactgtgaggcattatatgtgctcctcacacactggatgaatggataaaaccatcgtcttatgactcatttgtcagggattattgataatcaacttaataaatgaactgctattagcgacgccgatn

SEQ ID NO: 2293 - DNA, 2483 bp, Homo sapiens
tttcgtagaagctgggggtggagccggaggaggaaggcggcggcgacgacgaggaagacgccgaggcctgggccatggaactggcggacgtgggggcggcagccagctcgcagggagttcatgatcaagtgttgcccacaccaaatgcttcatccagagtcatagtacatgtggatctggattgcttttatgcacaagtagaaatgatctcaaatccagagctaaaagacaaacctttaggggttcaacagaaatatttggtggttacctgcaactatgaagctaggaaacttggagttaagaaacttatgaatgtcagagatgcaaaagaaaagtgtccacagttggtattagttaatggagaagacctgacccgctacagagaaatgtcttataaggttacagaattactggaagaatttagtccagttgttgagagacttggatttgatgaaaattttgtggatctaacagaaatggttgagaagagactacagcagctgcaaagtgatgaactttctgcggtgactgtgtcgggtcatgtatacaataatcagtctataaacctgcttgacgtcttgcacatcagactacttgttggatctcagattgcagcagagatgcgggaagccatgtataatcagttggggctcactggctgtgctggagtggcttctaataaactgttggcaaaattagtttctggtgtctttaaaccaaatcaacaaacagtcttattacctgaaagttgtcaacatcttattcatagtttgaatcacataaaggaaatacctggtattggctataaaactgccaaatgtcttgaagcactgggtatcaatagtgtgcgtgatctccaaaccttttcacccaaaattttagaaaaagaattaggaatttcagttgctcagcgtatccaaaagctcagttttggagaggataactcccctgtgatactctcaggaccacctcagtcctttagtgaagaagattcatttaaaaaatgttcatctgaagttgaagctaaaaataagattgaagaactacttgctagtcttttaaacagattatgccaagatgaaaggaagcctcatacagtgagattaataatccgtcggtattcctctgagaagcactatggtcgtgagagtcgtcagtgccctattccttcacatgtaattcagaaattagggacaggaaattatgatgtgatgaccccaatggttgatatacttatgaaactttttcgaaatatggtgaatgtgaagatgccatttcaccttacccttctaagtgtgtgcttctgcaaccttaaagcactaaatactgctaagaaagggcttattgattattatttaatgccatcattatcaactacttcacgctctggcaagcacagttttaaaatgaaagacactcatatggaagattttcccaaagacaaagaaacaaaccgggatttcctaccaagtggaagaattgaaagtacaagaactagggagtctccactagataccacaaatttttctaaagaaaaagacattaatgaattcccactctgttcacttcctgaaggtgttgaccaagaagtcttcaagcagcttccagtagatattcaagaagaaatcctttctggaaaatctagggaaaaatttcaagggaaaggaagtgtgagttgtccattacatgcctctagaggagtattatctttcttttctaaaaaacaaatgcaagatattcccataaatcctagagatcatttatccagtagcaaacaggtatcctctgtatctccttgtgaaccgggaacatcaggctttaatagcagtagttcttcttacatgtctagccaaaaggattattcatattatttagataatagattaaaagatgaacgaataagtcaaggacctaaagaacctcaaggattccactttacaaattcaaaccctgctgtgtctgcttttcattcatttccaaacttgcagagtgagcaacttttctccagaaaccacactacagatagccataagcaaacagtagcaacagactctcatgaaggacttacagaaaatagagagccagattctgttgatgagaaaattactttcccttctgacattgatcctcaagttttctatgaactaccagaagcagtacaaaaggaactgctggcagagtggaagagaacaggatcagatttccacattggacataaataagcatattcagcaaaaaggtctgaaaagcaagggaataccattattttcggattagcggtttattaagctcttctatattaaacactaatagatattcaataacggagtaaactgttccagataaagcaagaatagttgcaagaagtaaattctggcacaaagcgtaaaaatataacagaagaaataatgtaaaatacttatcttttatgtctaaagccattttatatatacttttcaattaaaaggatttcattgtccaaa

SEQ ID NO: 2294 - DNA, 1302 bp, Homo sapiens
ggcctgcgcctccacgtggatttggtagagaaaccccggactgggatcatggcagccgagactcggaacgtggccggagcagaggccccaccgccccagaagcgctactaccggcaacgtgctcactccaaccccatggcggaccacacgctgcgctaccctgtgaagccagaggagatggactggtctgagctatacccagagttcttcgctccactcactcaaaatcagagccacgatgacccaaaggataagaaagaaaagagagctcaggcccaagtggagtttgcagacataggctgtggctatggtggcctgttagtggaactgtcaccgctgttcccagacacacttattctgggtctggagatccgggtgaaggtctcagactatgtacaagaccggattcgggccctacgcgcagctcctgcaggtggcttccagaacatcgcctgtctccgtagcaatgccatgaagcaccttcctaacttcttctacaagggccagctgacaaagatgttcttcctcttccccgacccacatttcaagcggacaaagcacaagtggcgaatcatcagtcccaccctgctagcagaatatgcctacgtgctaagagttggggggctggtgtataccataaccgatgtgctggagctacacgactggatgtgcactcatttcgaagagcacccactgtttgagcgtgtgcctctggaggacctgagtgaagaccccgttgtgggacatctaggcacctcaactgaggaggggaagaaagttctacgtaatggagggaagaatttcccagccatcttccgaagaatacaagatcccgtcctccaggcagtgacctcccaaaccagcctgcctggtcactgactgcttactctaccttagctggacctcgtctcccagggattagagaaaagagcaggagtcctgggtcttcccagttgagactgctggagctgagacacagtactctcttaaagaaggtggggagctgcccagggcagaacccactggtgttcatgactacccctggctcctctcaccttgtccctccactgccaacagaaaacaaagcagctgactgagatggtcaaaggactttggaccataggggatctttggaaggctgtggggtcttgctcttccttagcactcctttctccttgtgagatctctcctcagctggaatgaggaatgtagtccatctaaactgcttgctaggctcaattaccacttctgtttgctttgtggatcctgggataacatgtatatgtgtacacaaaaaaaaaa

SEQ ID NO: 2295 - DNA, 4732 bp, Homo sapiens
gaaaagccaacgctccacgcccattttcgtcagggaatatgtacccatcggctttagataaataaggaaacagggggctgaaccagaactaagagaagattgggcagagagaaggcaatggcgagtccacctaggggctggggctgcggagagctgctgctgcccttcatgctcctggggacgctgtgcgagccaggatccgggcagatccgctactcgatgccggaggagctggacaaaggctccttcgtcggcaacatagccaaggaccttgggctggagccccaggagctggcggagcgcggagtccgcatcgtctccagaggtaggacgcagctttttgccctgaacccgcgaagcggcagcttggtcaccgcgggcaggatagaccgggaggagctctgcgctcagagcccactgtgtgtggtgaactttaacatcttggttgagaacaaaatgaaaatttatggagtagaagtagaaataatcgatattaatgataacttcccgcgtttccgggatgaagagttaaaagtaaaagttaatgaaaatgcggctgcagggacacggttagtgcttcccttcgcgcgggatgcggatgtgggtgtgaactctctccggagttaccagctcagctccaatctgcacttctctctggatgtggtaagcggaactgatggacaaaagtatccggagctggtgttggaacagcccctagaccgcgagaaagagactgttcacgacctcctcctcacagctttagatggcggagacccggtactctccggcaccacgcacatccgtgttacggtcctcgacgcaaacgacaatgcgcccctgttcaccccatccgagtacagcgtgagtgttccagagaacatacctgtgggcactcggctgctcatgctaaccgccacggatccagatgagggaataaacgggaaattgacctactcttttcgcaatgaagaagaaaaaatttcggagactttccaacttgattccaacctgggggaaatctcaactctacaatcactggactatgaagaatccagattctacctcatggaagtggtagctcaggatggaggcgctcttgttgccagcgctaaggtggtggtcacagtacaggacgtgaatgacaatgcccccgaagtgatcctcacctctctgaccagttcgatctctgaagactgtcttcccggaactgtaatcgcgctgtttagcgtacatgatggtgattctggagaaaatggtgagattgcatgctctattcctaggaatttgccttttaaattggagaagtcagttgataattactatcacctattaacaactagggacctggacagagaagagacttcagattataatatcactttaaccgtcatggaccatggaaccccgcccctctctacagaaagccacatccccttgaaagtagcagacgttaatgacaacccacccaatttccctcaagcctcctactccacctctgtcacagaaaacaatcccagaggtgtctctatcttctctgtgacagcccatgaccccgacagcggcgacaacgctcgagtcacctactccctggctgaagacacatttcagggggcgcccttgtcctcctatgtatccattaactctgacaccggtgtcctgtatgctctgagatccttcgactatgagcagttgagagacctacagttgtgggtgacagccagcgacagtgggaaccctccacttagcagcaacgtgtcgctgagcctgtttgtgctggaccagaacgacaatacgcctgagatcctgtaccccgccctccccacagacggttccacgggcgtggagctggcgcctcgctccgcagaacctggctacctggtgaccaaggtggtagcggtggacaaagattcaggccagaacgcctggctgtcctaccgcctgcttaaggccagcgagccaggactctttgcggttgggctgcacacgggcgaggtgcgcacagcgcgagccctgctggacagagacgcgctcaagcagagcctcgtggtggccgtcgaagaccatggccagccccctctgtcagccaccttcacggtcaccgttgccgtggccgacaggatccctgacatcctggctgacctaggcagtatcaagacccccattgaccctgaggatctggacctcacactctatcttgtggtggcagtggctgcagtctcctgcgtcttcctggccttcgtcatcgtgctgctggtgctcagactgaggcgctggcacaagtcacgcctgcttcaggctgaaggcagcaggttggcgggtgtgcccgcctcgcactttgtgggcgtggatggggttcgggctttcctgcagacctattcccacgaggtctccctcaccgcggactcgaggaagagtcacctgatctttccccagcccaactacgcagacacgctccttagtgaagagagctgtgagaaaagcgagcctcttctgatgtctgataaggtagatgcaaacaaagaagaacggcgagttcagcaagccccgcccaacacggactggcgtttctctcaggcccagagacccggcaccagcggctcccaaaatggcgatgacaccggcacctggcccaacaaccagtttgacacagagatgctgcaagccatgatcttggcgtccgccagtgaagctgctgatgggagctccaccctgggagggggtgccggcaccatgggattgagcgcccgctacggaccccagttcaccctgcagcacgtgctgcagggtgaactggggtccgactaccgccagaatgtctacatcccaggcagcaatgccacactgaccaacgcagctggcaagcgggatggcaaggccccagcaggtggcaatggcaacaagaagaagtcgggcaagaaggagaagaagtaacatggaggccaggccaagagccacagggcggcctctccccaaccagcccagcttctccttacctgcacccaggcctcagagtttcagggctaacccccagaatactggtaggggccaaggccatgctccccttgggaaacagaaacaagtgcccagtcagcacctaccccttcccccccagggggttgaatatgcaaaagcagttccgctgggaacccccatccaatcaactgctgtacccatgggggtagtggggttactgtagacaccaagaaccatttgccacaccccgtttagttacagctgaactcctccatcttccaaatcaatcaggcccatccatcccatgcctccctcctccccaccccactccaacagttcctctttcccgagtaaggtggttggggtgttgaagtaccaagtaacctacaagcctcctagttctgaaaagttggaagggcatcatgacctcttggcctctcctttgattctcaatcttcccccaaagcatggtttggtgccagccccttcacctccttccagagcccaagatcaatgctcaagttttggaggacatgatcaccatccccatggtactgatgcttgctggatttagggagggcattttgctaccaagcctcttcccaacgccctggggaccagtcttctgttttgtttttcattgtttgacgtttccactgcatgccttgacttcccccacctcctcctcaaacaagagactccactgcatgttccaagacagtatggggtggtaagataaggaagggaagtgtgtggatgtggatggtgggggcatggacaaagcttgacacatcaagttatcaaggccttggaggaggctctgtatgtcctcaggggactgacaacatcctccagattccagccataaaccaataactaggctggacccttcccactacataatagggctcagcccaggcagccagctttgggctgagctaacaggaccaatggattaaactggcatttcagtccaaggaagctcgaagcaggtttaaggaccaaggtccccttgagaggtcagaggggcctctgtgggtgctgggtactccagaggtgccactggtggaagggtcagcggagccccagcaggaagggtgggccagccaggccattcttagtccctgggttggggaggcagggagctagggcagggaccaaatgaacagaaagtctcagcccaggatggggcttcttcaacagggcccctgccctcctgaagcctcagtccttcaccttgccaggtgccgtttctcttccgtgaaggccactgcccaggtccccagtgcgccccctagtggccatagcctggttaaagttccccagtgcctccttgtgcatagaccttcttctcccacccccttctgcccctgggtccccggccatccagcggggctgccagagaaccccagacctgcccttacagtagtgtagcgccccctccctctttcggctggtgtagaatagccagtagtgtagtgcggtgtgcttttacgtgatggcgggtgggcagcgggcggcgggctccgcgcagccgtctgtccttgatctgcccgcggcggcccgtgttgtgttttgtgctgtgtccacgcggctaaggcgaccccctcccccgtactgacttctcctataagcgcttctcttcgcatagtcacgtagctcccaccccaccctcttcctgtgtctcacgcaagttttatactctaatatttatatggctttttttcttcgacaaaaaaataataaaacgtttcttctg

SEQ ID NO: 2296 - DNA, 2025 bp, Homo sapiens
  misc_feature (1)...(2025): n = a,t,c or g
cgctnccagcgccgcgcgatgtagcgcgggggaccgcggcccccagcagagcccgcctgcccggcttgtctaccatcagagggagatctctgccccctggggctgagagaccccaacctttccccaagctgaagctgcagggtattgaggtaccagccagatgtcttcccacaaaggatctgtggtggcacaggggaatggggctcctgccagtaacagggaagctgacacggcggaactggctgaactgggacccctgctagaagagaagggcaaacgggtaatcgccaacccacccaaagctgaagaagagcaaacatgcccagtgccccaggaagaagaggaggaggtgcgggtactgacacttcccctgcaagcccaccacgccatggagaagatggaagagtttgtgtacaaggtctgggagggacgttggagggtcatcccatatgatgtgctccctgactggctaaaggacaacgactatctgctacatggtcatagacctcccatgccctcctttcgggcttgcttcaagagcatcttccgcattcatacagaaactggcaacatctggacccatctgcttggtttcgtgctgtttctctttttgggaatcttgaccatgctcagaccaaatatgtacttcatggcccctctacaggagaaggtggtttttgggatgttctttttgggtgcagtgctctgcctcagcttctcctggctctttcacaccgtctattgtcattcagagaaagtctctcggactttttccaaactggactattcagggattgctcttctaattatggggagctttgtcccctggctctattattccttctactgctccccacagccacggctcatctacctctccatcgtctgtgtcctgggcatttctgccatcattgtggcgcagtgggaccggtttgccactcctaagcaccggcagacaagagcaggcgtgttcctgggacttggcttgagtggcgtcgtgcccaccatgcactttactatcgctgagggctttgtcaaggccaccacagtgggccagatgggctggttcttcctcatggctgtgatgtacatcactggagctggcctttatgctgctcgaattcctgagcgcttctttcctggaaaatttgacatatggttccagtctcatcagattttccatgtcctggtggtggcagcagcctttgtccacttctatggagtctccaaccttcaggaattccgttacggcctagaaggcggctgtactgatgacacccttctctgagccttcccacctgcggggtggaggaggaacttcccaagtgcttttaaaaataacttctttgctgaagtgagaggaagagtctgagttgtctgtttctagaagaaacctcttagagaattcagtaccaaccaagcttcagcccactttcacacccactgggcaataaactttccatttccattctcctagctggggatggggcatggtcaaacttagccatcccctcctcagcaaggcatctaccggcccctcacagagacagtactttgaaactcatgttgagattttaccctctcctccaaccattttgggaaaattatggactgggactcttcagaaattctgtcttttcttctggaagaaaatgtccctcccttacccccatccttaactttgtatcctggcttataacaggccatccatttttgtagcacacttttcaaaaacaattatataccctggtcccatctttctagggcctggatctgcttatagagcaggaagaataaagccaccaacttttacctagcccggctaatcatggaagtgtgtccaggcttcaagtaacttgagttttaattttttttttttcttggcagagtaatgtaaaatttaaagggggaaagatatttaatatttaatactaagctttaaaaagaaacctgctatcattgctatgtatcttgatgcaaagactatgatgttaataaaagaaagtccagaagaaaaaaaaaaaa

SEQ ID NO: 2297 - DNA, 1904 bp, Homo sapiens
cggccgcgtcgacggcagccatctttctcttgccgcgtgctggtgttggaggaccctccctgcttcagatttaccaacagcatgaatcaagaaaagttagccaaacttcaggctcaggtccggatagggggcaagggtacagctcgcagaaagaagaaggtggtacatagaacagccacagctgatgacaaaaagcttcagagttctctaaaaaaactggctgtgaataatatagctggtattgaagaggtgaacatgattaaagatgatgggacagttattcatttcaacaatcccaaagtccaagcttccctttctgctaatacctttgcaattactggtcatgcagaagccaaaccaatcacagaaatgcttcctggaatattaagtcagcttggtgctgacagtttaacaagccttaggaagttagctgaacagttcccacggcaagtcttggacagtaaagcaccaaaaccagaagacattgatgaggaagatgatgatgttccagatcttgtagaaaattttgatgaggcatcaaagaatgaagctaactaaaagtttggtttttggaagctggcatggactagatttaacaaatcagctatgtggttccaaagttttacagacatggagaacatcacctgttactagttcagtaatataaatattttgtatattaataatgctgtttgttcagcatttttcggtcatttgattttgcattttgcacttcctcccaggatatttttttggtcaaaatatgaagtattggtgcagtttgagggtgttttggtttttgattcctggtttttttgttttttgtttggggtatttttggtgtatgtatgtttatgtatgtgtgtgggtatgtgtgtatacagtggagagcaaattggaaaacagttctatttatcctcctccctccccagtagaaataaaaaaaatctttacatttgttacttttcttttccccccgtaagacacagaattaatggaaagtgagtatcttggatttcaaatctgaagagatttttaccattagtggtttgattttaatttgcttggttaactatcatatttttcatacacttctctggatttaaaatatcttgaggtattttgccactggcttcatgctggagtaatgggtaacatatctttggtatggttgccttagattaacttacctagtcagacccagaagaacttcttttactagcttgcttcctaaatgccttttttcctctccttttggtctccaaatggcctggtcagcttttggtaatattcttcctcatcttccacctagcttgagaaggatgttctccatatagagtttagcgagtgcctaatccctccttttgtaagattttgttccctcagcttgaggaacaacttcatcttcaactttttatttctccctgatgttacagtttggtagatttcaaactggaatagctagcatgtgcttgctaaataattttatgccagccttatcctgtatcctagctgttcttaacagcaggtacaaaaatgcctgtttttcagcaaggttgaaattgggaatgtccttttgaatcagaagaaaataggccatagactcatctcccagcacaaatgggcattctatgaaatggtactggccctaggaggatttcctcaaccactctcctactcttggccttgaacctacctctgggttggatcttactattgtagctgctcactataccctcctgcatgcttagaataatgctttgaggggagcactggtaaaacacagtatttatttttttacctcctttaagaggacttggaggtaagttgcattcattcactcaagtttccctcttgctgtctaatagaagcttactttttgctatatcagcatttgttacagc

SEQ ID NO: 2298 - DNA, 1489 bp, Homo sapiens
gcggccgctcctaccaccctgggcagccgagcagagtcgtccccagcgggtctccctccctgcctccctgactttgcaacaccgcgttccgggaggaccggcctcggcgagggaggaggcgggggagctgcgaacacccagacccaaaccctgacatgctctggggcggagaggaggaagccaggagctgagcgcagccgcgtgtggctgcttcgccctccggctccgagcgccgggctccgggcgccctgcccttgcgcctggggcagcagcctttgctggtcttgggggcgccccccgcttcccgccccgggggtccgcggccggcaggaccatgctgctgaaagagtaccggatctgcatgccgctcaccgtagacgagtacaaaattggacagctgtacatgatcagcaaacacagccatgaacagagtgaccggggagaaggggtggaggtcgtccagaatgagccctttgaggaccctcaccatggcaatgggcagttcaccgagaagcgggtgtatctcaacagcaaactgcctagttgggctagagctgttgtccccaaaatattttatgtgacagagaaggcttggaactattatccctacacaattacagaatacacatgttcctttctgccgaaattctccattcatatagaaaccaagtatgaggacaacaaaggaagcaatgacaccattttcgacaatgaagccaaagacgtggagagagaagtttgctttattgatattgcctgcgatgaaattccagagcgctactacaaagaatctgaggatcctaagcacttcaagtcagagaagacaggacggggacagttgagggaaggctggagagatagtcatcagcctatcatgtgctcctacaagctggtgactgtgaagtttgaggtctgggggcttcagaccagagtggaacaatttgtacacaaggtggtccgagacattctgctgattggacatagacaggcttttgcatgggttgatgagtggtatgatatgacaatggatgatgttcgggaatacgagaaaaacatgcatgaacaaaccaacataaaagtttgcaatcagcattcctcccctgtggatgacatagagagtcatgcccaaacaagtacatgacaatggatgaagtccgagaatttgaacgagccactcaggaagccaccaacaagaaaatcggcattttcccacctgcaatttctatctccagcatccccctgctgccttcttccgtccgcagtgcgccttctagtgctccatccacccctctctccacagacgcacccgaatttctgtccgttcccaaagatcggccccggaaaaagtctgccccagaaactctcacacttccagaccctgagaaaaaagccaccctgaatttacccggcatgcactcttcagataagccatgtcggcccaaatctgagtaactttatataaatatctcatggggttttatattttcaa

SEQ ID NO: 2299 - DNA, 698 bp, Homo sapiens
cggacgcgtggggtgccggcgggagagctggcttggggcgctggcacctcctcttacagctttactcctgccagcttgggaaaaggccggagaaggtgaaattctgtgtgctccctccggcgagagactttgtcagctcccgcacagtaacatcctgaataaagtcaaaactcaaccaacaggtggaagtccaagaatccgagtggaggctcaccgaggcgaaggggccaaccatgggaaaggagagtggatgggactcaggcagggctgctgtagcagctgtggtcggaggagttgtggctgtggggactgtgctcgtggcgctcagtgccatgggcttcacctcagtaggaatcgccgcatcctccatagcagccaagatgatgtctacagcagccattgccaacgggggcggagttgctgctggcagtctggtggctattctgcagtcagtgggggcagctggactctctgtgacatctaaagttatcgggggctttgctgggacagctcttggggcctggctgggttcacccccttccagctgaacaccacactgaggcagggagttggctctcttggtggagatgactttcctgggcctctggatgacaatcttccaaaggacaagtctcctactcccaaaactatttaaggaagcatgaaaaataaagatgctggttatcttcaaaaaaaaa

SEQ ID NO: 2300 - DNA, 858 bp, Homo sapiens
gaatgtaaggaaaaaaaggttgagaccatgtacagcgcggggaattcggaaagggttccaagtgctttagtacccgacgctgtctgggaattccgggcgtttcggctccttggtcgcagaggcaggaggcgtgcgtggcaggagggttcgggttatatactcctaggtcctgggacagaatagttacgacctctgggacaggaactcttctctcttttgttaataaacttccaactccctcctcagacccgaccgcatgtctgtcatggacctcgccaatacttgctccagctttcagtcggacctggatttctgttcagattgcggctcggtcctgcctctgcccggggctcaggatacggtcacctgtattcgctgtggcttcaacatcaacgttcgggactttgaggggaaggttgtgaagacttcggttgtgttccaccaactggggacagccatgcctatgtcggtggaggaagggcctgagtgccagggacctgtggttgacaggcgctgccctcgatgtggtcatgaaggaatggcataccacaccagacagatgcgttcagccgatgaagggcaaactgtcttctacacctgtaccaactgcaagttccaggagaaggaagactcttgacctttttcctgggcaactctacagtccctccctcctttcggaaggtgaaggatactgggtttttagatgccttgtccatcctgtctggttgcaatgttttgctcccagaagagaatcagatcatcatgtggggattaccattgttcctggagtactcctacccttagttgaatttccttattaaagttatatttttctataagaccccgaaaaaaaaaaaa

SEQ ID NO: 2301 - DNA, 2001 bp, Homo sapiens
aagcctcttttattgtaagcttataatttacaatggactgttaaacacattttataatttatgcattttaatttagttttaaatgttattatctaaaaataagtatctgctttttgttttaacataggttatcttatgatgaggcttttgctatggctaatgatcccttggaaggcttccatgaagtaaaccttgcttcacctacttctccggaccttcttggtgtgtatgaatcaggaactcaagagcagactacctcaccaagtgtcatctaccggccacacccttcagctttatcctctgtacctatccaggcaaatgcattagatgtttctgaacttcctacacaacccgtgtattcatcccccagacgtttaaattgtgcggaaatatctagtatcagctttcatgttacagacccagccccttgctctacctctggagtcacagctggattaactaaattaactacaagaaaggacaactataatgcagagagagagtttttacagggtgctactataacagaggcttgcgatggcagtgatgatatttttgggttgagtactgatagtctgtctcgtttacgaagcccatctgttttggaagttagagaaaagggctatgaacgattaaaagaagaactcgcaaaagctcagagggaactgaagttaaaagatgaagaatgtgagaggctttcaaaagtgcgagatcaacttggacaggaattggaagaactcacagctagtctatttgaggaagctcataaaatggtgagagaagcaaatatcaagcaggcaacagcagaaaaacagctaaaagaagcacaaggaaaaattgatgtacttcaagctgaagtagctgcattgaagacacttgtattgtccagttctccaacatcacctacgcaggagcctttgccaggtggaaagacaccttttaaaaaggggcatacaagaaataaaagcacaagcagtgctatgagtggcagtcatcaggacctcagtgtgatacagccaattgtaaaagactgcaaagaggctgacttatccttgtataatgaattccgattgtggaaggatgagcccacaatggacaggacgtgtcctttcttagacaaaatctaccaggaagatatctttccatgtttaacattctcaaaaagtgagttggcttcagctgttctggaggctgtggaaaacaatactctaagcattgaaccagtgggattacaacctatccggtttgtgaaagcttctgcagttgaatgcggaggaccaaaaaaatgtgctctcactggccagagtaagtcctgtaaacacagaattaaattaggggactcaagcaactattattatatttctcctttttgcagatacaggatcacttctgtatgtaacttttttacatacattcgatacattcagcagggactcgtgaaacagcaggatgttgatcagatgttttgggaggttatgcagttgagaaaagagatgtcattggcaaagctgggttatttcaaagaggaactctgatgctctgcgtgggaccatgcctgaactccccgaataactgaaaaatggctgaatatttttatggttacttgatatttatttccaaggagtgagcctaagacttttttccccttttgcaaattgctctaagaagtaccatgatttcttttaaactgatctatgctgtgtttgcttattctttagttgaacacactatgaagaattccaggtgtactagtgaatgtaatttatagttgccaaaaaaaaaaaaaacctgaaaaaaaaaaaggtaaaatgaaaggggggcactttttttttttaacctttgactgggattttgggtttaccaaatggtttaaaaaagaatttttaaacctacccagtggtttctttctttgggaaaggcaaaaaaaaatcctgggggaataaaatattttttcaagggcccccccttaaaaaagggtttattttaacgggcttcaattgg

SEQ ID NO: 2302 - DNA, 719 bp, Homo sapiens
cggggccttcgcagagcatggcggcgggcgagcttgagggtggcaaacccctgagcgggctgctgaatgcgctggcccaggacactttccacgggtaccccggcatcacagaggagctgctacggagccagctatatccagaggtgccacccgaggagttccgcccctttctggcaaagatgagggggattcttaagtctattgcgtctgcagacatggatttcaaccagctggaggcattcttgactgctcaaaccaaaaagcaaggtgggatcacatctgaccaagctgctgtcatttccaaattctggaagagccacaagacaaaaatccgtgagagcctcatgaaccagagccgctggaatagcgggcttcggggcctgagctggagagttgatggcaagtctcagtcaaggcactcagctcaaatacacacacctgttgccattatagagctggaattaggcaaatatggacaggaatctgaatttctgtgtttggaatttgatgaggtcaaagtcaaccaaattctgaagacgctgtcagaggtagaagaaagtatcagcacactgatcagccagcctaactgaagatgatgtatgaaggagttggagttgttgaaaccaaggtgtccatgatccctccccactgaccttttctaagaaaattcttgtgcccgcattggtattaaatcctcgcattcagtcaaaaaaaaaaaa

SEQ ID NO: 2303 - DNA, 1085 bp, Homo sapiens
tctgacgaggtcttacggaagttcccgaaacttccggtggccggcttagttaggagctatggctaaacatcatcctgatttgatcttttgccgcaagcaggctggtgttgccatcggaagactgtgtgaaaaatgtgatggcaagtgtgtgatttgtgactcctatgtgcgtccctgcactctggtgcgcatatgtgatgagtgtaactatggatcttaccaggggcgctgtgtgatctgtggaggacctggggtctctgatgcctattattgtaaggagtgcaccatccaggagaaggacagagatggctgcccaaagattgtcaatctggggagctctaagacagacctcttctatgaacgcaaaaaatacggcttcaagaagaggtgattggtgggtggccccttcctccccccaacatcagtctgctgcagctgccagaaaacatgcctactactaccagcagaaagggagcagagcccagagcatcaccaggagtgcctgctagtgtactggcagcttgccaccccctcctctcccttcacccagacacgtggtagggatggaaaaggattcttcacagagcactctggcacaccatatcggagaaaacttgatagattagttaatggtttttcttgaattcgagaagcatagatctgttctccatattggtatgttctccctcaaccaagatcttctaaaaagaaataatattttagtcttctgcttgaggaactgactgtgaagcgacgcccagtgaaaaacatgttcttgcagcagctctggtggcagctgtccttgaggaacctttggtgtgtggtgggaagctatcagaacaagaaatgtaggcatttcccgtttttttggggggggggggggggggggccagggctctgccctcttgaaaggcatttacttgtttaacacttgtccagctacagtggggtacagtagctggctattcacaggcatcatcatagcccactagtctcatattattttccttttgagaaattggaaactctttctgttgctattatattaataaagttggtgtttattttctggtaaaaaaaaaaaa

SEQ ID NO: 2304 - DNA, 606 bp, Homo sapiens
ggaggacgacctttttccggttccggccttgcgagagtttgtgcggcgacatgaaactgcttacccacaatctgctgagctcgcatgtgcggggggtggggtcccgtggcttccccctgcgcctccaggccaccgaggtccgtatctgccctgtggaattcaaccccaacttcgtggcgcgtatgatacctaaagtggagtggtcggcgttcctggaggcggccgataacttgcgtctgatccaggtgccgaaagggccggttgagggatatgaggagaatgaggagtttctgaggaccatgcaccacctgctgctggaggtggaagtgatagagggcaccctgcagtgcccggaatctggacgtatgttccccatcagccgcgggatccccaacatgctgctgagtgaagaggaaactgagagttgattgtgccaggcgccagtttttcttgttatgactgtgtatttttgttgatctataccctgtttccgaattctgccgtgtgtatccccaacccttgacccaatgacaccaaacacagtgtttttgagctcggtattatatatttttttctcattaaaggtttaaaaccaaaaaaaaaaaa

SEQ ID NO: 2305 - DNA, 2226 bp, Homo sapiens
gcaggttgttgtcgggataccagatttcctactccgagaggccccgggtccctctgccacaacttctgtcgctctgccgcctgcaccgtgacccgcactattcacgggagccctagagaggacaccgggacacccagaagccgggaaatgatgtttcaggattcagtggcctttgaggatgtggctgtcagcttcacccaggaggagtgggctttgctggatccttcccagaagaatctctacagggatgtgatgcaggaaaccttcaagaacctgacctctgtaggaaaaacatggaaagttcagaacattgaagatgagtacaaaaatcccaggagaaatctaagtcttatgagagagaaactctgtgaaagtaaagaaagtcatcactgtggagaaagcttcaaccagattgcagatgacatgctgaacaggaaaactcttcctggaataacaccatgtgaaagcagtgtgtgtggagaagttggcacgggtcattcatctcttaatacgcatatcagagctgacactggacacaagtcatctgagtatcaggaatatggagagaatccatatagaaataaggaatgtaagaaagccttcagttatcttgactcctttcaatcacatgataaagcttgcactaaagagaaaccctatgatggtaaagaatgtacagaaaccttcatttcccattcatgcattcaaagacacagggtaatgcacagtggagatggaccttataaatgtaagttttgtgggaaagccttctattttctcaatttatgtcttatccatgaacgaattcacactggtgtgaaaccatataagtgtaaacaatgtggtaaggcctttactcgttccactacccttccagtacatgaaagaactcacacaggagtgaatgccgatgaatgtaaagaatgtgggaatgcattcagttttcctagtgaaattcgtagacataaaaggtctcacactggagaaaaaccctatgagtgtaagcaatgtgggaaagtcttcatttctttcagttccattcagtatcataagatgactcacactggagagaaaccctatgaatgtaagcagtgtgggaaagcctttagatgtggctcacaccttcaaaagcatggaaggactcacactggagagaaaccctatgaatgtaggcaatgtggtaaagccttcagatgtacctcggaccttcaaaggcatgaaaagacacacactgaggataaaccctatggatgtaagcagtgtgggaaaggctttagatgtgcttcacaacttcaaattcatgaaaggacgcacagtggagagaaaccccatgaatgtaaggaatgtggaaaagtattcaagtatttttcttccttgcgtatacatgaaaggacgcacactggagagaagccccatgaatgtaagcaatgtggaaaagcattcaggtatttctcttccttgcatatacatgaaaggacacacactggagataagccatatgagtgtaaggtatgtggcaaagccttcacttgttccagttccattcgatatcatgaaaggactcacactggagagaaaccctatgaatgtaagcactgtggtaaggcctttatttccaattacattcgatatcatgaaaggactcacactggagagaaaccctatcaatgcaagcaatgtggcaaagcctttattcgtgccagttcatgtcgagaacatgaaagaactcataccattaatagatgagaaatccttttagtggaagcaacgggagaagctttctgttgtcccacttcctttgaaacacaagaaaagagagtggtgaaagaacctctggataactgctttttgaattgagaagagagacttgcgataggacaataaaatctagaagaacttggatggtttcgtaatacaattcacctatagccaatcttgcatgagatttcaaaggcacagaaaaggaaggcatcagtcacatattagaggccccacacagggagagaggtgtgtggctacccgcttccagcccattttcctgattctttggcttgttaatcggagaatatcccccaaatcacttgtctctgttcctcagagttgtaggtctccagatatgtccccagtgctccacattaaagataacatgcccactttgctgtttcttcagaaatgttaaaatgtttaccagagaactaataaatgttgttatggctggaaatactc

SEQ ID NO: 2306 - DNA, 2117 bp, Homo sapiens
cggccgcccgcgatccagctccgacaacaggaattttctccgagagcgggccgggctcagttcagctgctgtccagacccggatcggcaacagtgccgcctccagacgttctcctgccgctcgcccgcccgtcccagcgcccccagccctcccgcgagggcgccccgggacggaaggatccaccagtctgtcggcgcccgccgttctcgtggtcgccgtcgccgtcgtcgtggtggtagtctccgccgtcgcctgggccatggccaattacatccacgtccctcccggctccccggaggtgcccaagctgaacgtcaccgttcaggatcaggaggagcatcgctgccgggagggggccctgagcctcctgcaacacctgcggcctcactgggacccccaggaggtgaccctgcagctcttcacagatggaatcacaaataaacttattggctgttacgtgggaaacaccatggaggatgtagtcctggtgagaatttatggcaataagactgagttattagtcgatcgagatgaggaagtaaagagttttcgagtgttgcaggctcatgggtgtgcaccacaactctactgtaccttcaataatggactatgctatgaatttatacaaggagaagcactggatccaaagcatgtctgcaacccagccattttcaggctaatagctcgtcagcttgctaaaatccatgctattcatgcacacaatggctggatccccaaatctaatctttggctaaagatgggaaagtatttctctctcattcccacaggatttgcagatgaagacattaataaaaggttcctaagtgatatcccaagctctcagattctccaggaagagatgacttggatgaaggagattctttccaacctgggctcacctgttgtgctttgccataatgacctattgtgtaagaatataatctacaatgagaaacaaggtgatgtacagttcattgattatgaatattctggatacaactacctggcatatgatattggaaatcatttcaatgaatttgcaggtgtgagtgatgtagactatagtctgtatccagatagagaactacagagtcagtggctgcgtgcttaccttgaagcctacaaagaatttaagggctttgggactgaagttactgaaaaggaggtagaaatactcttcattcaagtcaatcagtttgcattggcttctcatttcttttggggattgtgggctttgattcaagccaaatactccactattgagtttgatttccttgggtatgcaattgttcgttttaaccagtactttaaaatgaagcctgaggttactgcattaaaagtgcctgagtaaagaagagatttaattattctccagtagctgagcaatgcttgtgaatcttttcttaagaaatcccaaaaagccaatattagttaaaattctgttgtttaatttggttatcttgctttataaattatgcctctaaacaatcaaatctatttttgaaatagactgaatgatgtcaagaaatatacctactgctatccgtatgtggtggattagaaatgtgttaaatctgcaaaaggtataaagatgtcagtttaatttctttgataatttaacctatgttgtatgtgaattatttattataaacttagcacgattctgtgactgtttttctctgtttcacgttcgttgagtgtaagcaatgaaaatgtcccaaataagttttttaagttttactttaataagattaatttcagtaaacattctagttgttcagtgtaacctttttatcttgatgcattgtaagtaaaatgaatcatttactcttgaaatgccagtcattgactgatgtagataatttaggattttcatataaaaataggctgtttaggaaggtgaaatacattcactgtctctgttggtggtacatcttgttgaattcaatattagaaagtatttctttttggggtaatataacttagaattaaatccctgtttctctatgtagtctggcagtataaatataaatatttaccatataatcttggaataagtattagttaatgttaccaaaatctgtattaaataatgttttcaaatgctaaaaaaaaaa

SEQ ID NO: 2307 - DNA, 969 bp, Homo sapiens
gcggccgctccaacatgttaccattctgatgttggagccggttagcgaaccccaagagtgcagagtgtggagcgtggagcgccgggactgtgcacgcttgaccggaagcccagaccagtgcggtcctagccagagagaaaggacatttgccaacaatgagacacgaagcgcccatgcagatggcctctgcccaagatgccaggtacggccagaaagactcctctgatcagaactttgactacatgttcaaattactcatcatcggcaatagcagtgtggggaaaacatcttttctattccgttatgcagatgactcctttacatctgcattcgtcagcacagttgggatcgatttcaaagtaaaaactgtattcaaaaatgaaaagagaatcaagcttcagatttgggacacagcaggccaggaaagatacaggactatcaccacagcctattatcgtggagccatgggctttattttaatgtatgacattacaaatgaagaatccttcaatgcagtacaagattggtcaactcaaatcaaaacatactcttgggacaatgcccaagttattctggttgggaacaagtgtgacatggaagacgagcgggtcatctcaactgagcgaggtcaacatttaggagaacagcttgggtttgagttttttgaaacaagtgccaaggacaacattaatgtcaagcagacatttgagcgccttgtggatatcatctgcgacaaaatgtcagagagtttggagactgatcctgccatcactgctgcaaagcagaacacgagactcaaggaaactcctcctccaccgcagcccaactgtgcctgttagtgtccccgtgcacacaggcagctccagggggctctggttgccaacaaacagcatttgtaaatggtctattagccttcatttatactgcctaacaattatttgaaggaataaattgatgtcaatggctcgt

SEQ ID NO: 2308 - DNA, 5365 bp, Homo sapiens
tgatcgaccgccctggaattcccgggtcgacgatttcgtcacgaacctaattcatctctccagcaaaggacacatctctccagcaaaggacacctctctccagcaaaggacacctgcagagatgtccccagtccttcacttctatgttcgtccctctggccatgagggggcagcctctggacacactcggaggaaactgcaagggaaactgccagagctgcagggcgtcgagactgaactgtgctacaacgtgaactggacagctgaggccctccccagtgctgaggagacaaagaagctgatgtggctgtttggttgccccttactgctggatgatgttgctcgggagtcctggctccttcctggctccaatgacctgctgctggaggtcgggcccaggctgaacttctccaccccaacatccaccaacatcgtgtcagtgtgccgcgccactgggctggggcctgtggatcgtgtggagaccacccggcgctaccggctctcgtttgcccaccccccgtcagctgaggtggaagccattgctctggctaccctgcacgaccggatgacagagcagcacttcccccatcccatccagagtttctcccctgagagcatgccggaacccctcaatggccctatcaatatactgggtgagggccggcttgcgctggagaaggccaaccaggagcttggtctggctttagactcttgggacctagacttctacaccaagcgcttccaggagctacagcggaacccgagcactgtggaggcctttgacttggcgcagtccaatagcgagcacagccgacactggttcttcaagggccagctccacgtggatgggcagaagctggtgcactcactgtttgagtccatcatgagcacccaggaatcctcgaaccccaacaacgtcctcaaattctgtgataacagcagtgcaatccagggaaaggaagtccgattcctacggcctgaggaccccacacggccaagccgcttccagcaacagcaagggctgagacatgttgtcttcacagcagagactcacaactttcccacaggagtatgcccctttagtggtgcaaccactggcacagggggccggattcgagatgtccagtgcacaggccgcggggcccacgtggtggctggcactgccggctattgctttggaaatctgcatattccaggttacaatctgccctgggaggatctaagcttccagtatcctgggaattttgcccggcccctggaggttgccattgaagccagtaatggagcttctgactatggcaacaagtttggggaaccagtgctggctggcttcgcccgctccttgggcctccagctcccagacggccagcggcgtgagtggatcaagcccatcatgtttagtgggggcattgggtccatggaagctgaccacataagcaaggaggccccagagccaggcatggaagttgtaaaggttggaggtcccgtctacaggattggagttggaggtggagctgcttcatctgtgcaggtgcagggagataacaccagtgacctggactttggggctgtgcagcgaggagacccggagatggaacagaagatgaaccgtgtgatcagggcttgtgtggaggcccccaagggaaaccccatctgcagccttcatgatcagggcgctggtggcaatggcaatgtcctaaaagagctgagtgacccagctggagccatcatttacaccagccgcttccagcttggggacccaaccctgaatgccctggaaatctggggggctgagtaccaggaatcaaatgctcttctgctgaggtcccccaaccgggacttcctgactcatgtcagtgcccgtgaacgttgcccggcttgcttcgtgggcaccatcactggagaccggagaatagtgctggtggacgatcgggagtgtcctgtcagaagaaatggccagggggatgcccccccgacacccccgccaacccctgtggacctggagctcgaatgggtgctgggcaagatgcctcggaaggagttcttcctgcagaggaagccccccatgctgcagcctctggccttgcccccagggctgagcgtgcaccaggctctggagagggttctgaggctgcccgccgtggccagcaagcgctacctcaccaataaggtggaccgctccgtgggaggcctggtggcccagcagcagtgcgtggggcccctgcaaactcctctggcagatgtagcggttgtggcactgagccatgaggagctcataggggctgccacagccttgggagaacagccagtcaagagcctgctggacccaaaagtcgccgcccggctggccgtggccgaagccctcaccaacctggtgtttgctctggtcactgacctccgggatgtgaagtgtagcgggaactggatgtgggcagccaagctcccaggggagggcgcagctttggcggatgcctgtgaggctatggtggcagtgatggcagccctgggtgtggcagtggatggtggcaaggactccctcagcatggctgctcgggttggcactgagaccgtgcgggctcctgggtcactggtcatctcagcctatgccgtctgcccagacatcacagccactgtgaccccagacctcaagcatcctgaagggagaggccatctgctctatgtggctctgagccctgggcagcaccggctcgggggcacagctctggcccagtgcttctcccagcttggggaacaccctccagacctggaccttcctgagaacttggtgcgggccttcagcatcactcaggggctgctgaaagaccgcctcctctgctcaggccacgatgtcagtgacggaggcctcgtcacatgcctgctggagatggcctttgctggaaattgcgggctacaggtggatgtgcctgtccccagggttgatgtcctgtctgtgctgttcgctgaggagccaggcctcgtgctggaggtgcaggagccagacctggcccaggtgctgaagcgttaccgggatgctggcctccattgcctggagctgggccacacaggcgaggccgggccccacgccatggtccgggtgtcagtgaacggggctgtggttctggaggagcctgttggggagctgcgagccctctgggaggagacgagtttccagctggaccggctacaggcagagcctcgctgtgtggcagaggaggaacggggcctgagggagcggatggggcccagctattgcctgccccccacctttcccaaagcctccgtgccccgtgagcctggtggtcccagcccccgagtcgccatcttgcgagaggagggcagtaatggagaccgggagatggccgatgccttccacttagctgggtttgaggtatgggacgtgaccatgcaggacctctgctctggggcaattgggctggacactttccgtggcgtggccttcgtgggcggcttcagctatgcagatgtcctgggctctgccaaagggtgggcagctgctgtgacctttcatcccagggctggggctgagctgaggcgcttccggaagcggccagacaccttcagcctgggcgtgtgtaatggctgtcaactgctggctctgctcggctgggtgggaggcgaccccaatgaggatgctgcagagatgggccctgactcccagccagcccggccaggccttctgctacgccacaacctgtctgggcgctacgagtctcgctgggccagcgtgcgtgtggggcctgggccagccctgatgctgcgagggatggagggcgccgtgctgcccgtgtggagtgcgcacggggaaggttacgtagcattttcttctccggaactccaagctcagattgaggccaggggcttggctccactgcactgggctgatgatgacgggaaccccacagagcagtaccctctgaatcccaatgggtccccagggggcgtggctggcatctgctcctgtgatggccgccacctggctgtcatgcctcaccctgagcgggccgttaggccttggcagtgggcatggcgaccccctccatttgatactctgaccacctccccctggctccagctctttatcaatgcccgaaactggaccctggaagggagctgctgactggccacaggggctcacctgggccccatggcttttcacctaagtgggtcctgccccctcccccatgaccttcaggagcaccccatattatttccaaaaatatcttggacagacaaggaccaaaatgccaaaatctcagcggactcgataatctgcctgctgatgttccttctgtggctgtgtctattttcagttctgctctaacatggcatgccctttctcagcccaggaaacagcatgtggttcagagaaaagagcgacaaggaaaagttaggactcctgaggtccgaacaggggcttctgttgcccacttcacaacacccagtgatcaccggtgtgcaattgcctccttggctctgagggatgttttgcgctcccttttctcatcattggggttagcgggtgcagacaaattcagcaatagtatgcagatcagcccctcaccacctcattgttctcatctggaactgaaactttctggatttctcttgaagtgctacactgcactgaatgtaaggaattgttgcttgtggaagtttctcagcgtttctggctgtcttagggctggcctcagaacccagcattcctgttatttgcttctaaattagcagctctctttttttttttttttttgaggcagtctcactctgtcacccaggctggagtgcagtggcgtgatctcggcccactgcaacctctgcctcctgggttcaagcaattttcctgcctcagcctcccgagtagctgggagtacaggcacacaccaccacacccagctaatttttgtatttttagtagagatagggtttcaccatgtctcccaggctggtctcaaactcctaacctcaagtgattcgcctgcctcggcctcccaaagtgctgggattacaggtgggagccactacagctggcccagcagctctgtttctgatagaggtggttggggctctcatccctagatcctaaccctttagtatgctggaattctactcttcacttactgcattgactgttgttgattagttattattgcaaagcactgtcaccggcctcagggagtttatgtgtaatagaattaaaaataatagctgtgtataacacttagctcaagccacgcatgtgtgaggcatttggtatgtatctgaattaattctcactaaaattcagcaaaggacttgatagcctctccccgccttttcaataaaggatgaatgaagaaaaaaaaaa

SEQ ID NO: 2309 - DNA, 1187 bp, Homo sapiens
gcacgagcgcaaatagggtcactgggccgcttggcggtgtcgttgcggtaccaggtccgcgtgaggggttcgggggttctgggcaggcacaatggcgtctcgagcaggcccgcgagcggccggcaccgacggcagcgactttcagcaccgggagcgcgtcgccatgcactaccagatgagtgtgaccctcaagtatgaaatcaagaagctgatctacgtacatctggtcatatggctgctgctggttgctaagatgagcgtgggacacctgaggctcttgtcacatgatcaggtggccatgccctatcagtgggaatacccgtatttgctgagcattttgccctctctcttgggccttctctcctttccccgcaacaacattagctacctggtgctctccatgatcagcatgggactcttttccatcgctccactcatttatggcagcatggagatgttccctgctgcacagcagctctaccgccatggcaaggcctaccgtttcctctttggtttttctgccgtttccatcatgtacctggtgttggtgttggcagtgcaagtgcatgcctggcagttgtactacagcaagaagctcctagactcttggttcaccagcacacaggagaagaagcataaatgaagcctctttggggtgaagcctggacatcccatcgaatgaaaggacactagtacagcggttccaaaatcccttctggtgattttagcagctgtgatgttggtacctggtgcagaccaggccaaagttctggaaagctccttttgccatctgctgaggtggcaaaactataatttattcctggttggctagaactgggtgaccgacagctatgaaacaaatttcagctgtttgaagttgaactttgaggtttttctttaagaatgagcttcgtccttgcctctactcggtcattctccccatttccatccattaccccttagccattgagactaaaggaaatagggaataaatcaaattacttcatctctaggtcacgggtcaggaaacatttgggcagctgctcccttggcagctgtggtctcctctgcaaagcattttaattaaaaacctcaataaagatggccctgcccacactgtgccttgtgtttggggcttgatagagtgtgaaaggtgtgttgcttgaaaggtgtggccttagacacta

SEQ ID NO: 2310 - DNA, 2198 bp, Homo sapiens
ctcgttagtgccccctgtgtttggggccccgtgatctcaacggtcctgccctcggtctccctcttcccccgccccgccctgggccaggtgttcgaatcccgactccagaactggcggcgtcccagtcccgcgggcgtggagcgccggaggacccgccctcgggctcatggcggccccggtccgcctgggccggaagcgcccgctgcctgcctgtcccaacccgctcttcgttcgctggctgaccgagtggcgggacgaggcgacccgcagcaggcaccgcacgcgcttcgtatttcagaaggcgctgcgttccctccgacggtacccactgccgctgcgcagcgggaaggaagctaagatcctacagcacttcggagacgggctctgccggatgctggacgagcggctgcagcggcaccgaacatcgggcggtgaccatgccccggactcaccatctggagagaacagtccagccccgcaggggcgacttgcggaagtccaggactcttccatgccagttcctgcccagcccaaagcgggaggctctggcagctactggccagctcggcactcaggagcccgagtgatactgctggtgctctaccgggagcacctgaatcctaatggtcaccacttcttaaccaaggaggagctgctgcagaggtgtgctcagaagtcccccagggtagcccctgggagtgctcgaccctggccagccctccgctccctccttcacaggaacctggtcctcaggacacaccagccagccaggtactcattgaccccagagggcctggagctggcccagaagttggccgagtcagaaggcctgagcttgctgaatgtgggcatcgggcccaaggagccccctggggaggagacagcagtgccaggagcagcttcagcagagcttgccagtgaagcaggggtccagcagcagccactggagctgaggcctggagagtacagggtgctgttgtgtgtggacattggcgagacccgggggggcgggcacaggccggagctgctccgagagctacagcggctgcacgtgacccacacggtgcgcaagctgcacgttggagattttgtgtgggtggctcaggagaccaatcctagagacccagcaaaccctggggagttggtactggatcacattgtggagcgcaagcgactggatgacctttgcagcagcatcatcgacggccgcttccgggagcagaagttccgactgaagcgctgtggtctggagcgccgggtatacctggtggaagagcatggttccgtccacaacctcagccttcctgagagcacactgctgcaggctgtcaccaacactcaggtcattgatggcttttttgtgaagcgcacagcagacattaaggagtcagccgcctacctggccctcttgactcggggcctgcagagactctaccagggccacaccctacgcagccgcccctggggaacccctgggaaccctgaatcaggggccatgacctctccaaaccctctctgctcactcctcaccttcagtgacttcaacgcaggagccatcaagaataaggcccagtcggtgcgagaagtgtttgcccggcagctgatgcaggtgcgcggagtgagtggggagaaggcagcagccctggtggatcgatacagcacccctgccagcctcctggccgcctatgatgcctgtgccacccccaaggaacaagagacactgctgagcaccattaagtgtgggcgtctacagaggaatctggggcctgctctgagcaggaccttatcccagctctactgcagctacggccccttgacctgagcttatgccgtgaaacagcccccagcccccgtctgtcccccaacccaggctagccagccttttaacaacatcttttggggtacaattagaatctaagtgtttgcagccatatgtgtcatgtagaagatgcctagccctggggaccttgtgaaatacgcaggaaccagggataccatctggtccagtggtttttaaacaaagctgcttagcacctggaattccctggtcagggagatggagtcagtggggcattgcagcttggaatctattttatgtcaccagttggtcctcatcaaataaaatttccttaggagtgcagagggctcattgggaaaataaaaataataaaaataaataaaacttcctaaaagaaaaa

SEQ ID NO: 2311 - DNA, 1978 bp, Homo sapiens
ggaattccacccccacacccaagtgagcggcctgctcactcctcagctgcaggagccagacgtgtggagtcccagcagaggccaacctgtgtctcttcatctccctgggaaaggtgcccccgaggtgaaagagatggcctggtggaaatcctggattgaacaggagggtgtcacagtgaagagcagctcccacttcaacccagaccctgatgcagagaccctctacaaagccatgaaggggatcgggaccaacgagcaggctatcatcgatgtgctcaccaagagaagcaacacgcagcggcagcagatcgccaagtccttcaaggctcagttcggcaaggacctcactgagaccttgaagtctgagctcagtggcaagtttgagaggctcattgtggcccttatgtacccgccatacagatacgaagccaaggagctgcatgacgccatgaagggcttaggaaccaaggagggtgtcatcattgagatcctggcctctcggaccaagaaccagctgcgggagataatgaaggcgtatgaggaagactatgggtccagcctggaggaggacatccaagcagacacaagtggctacctggagaggatcctggtgtgcctcctgcagggcagcagggatgatgtgagcagctttgtggacccggcactggccctccaagacgcacaggatctgtatgcggcaggcgagaagattcgtgggactgatgagatgaaattcatcaccatcctgtgcacgcgcagtgccactcacctgctgagagtgtttgaagagtatgagaaaattgccaacaagagcattgaggacagcatcaagagtgagacccatggctcactggaggaggccatgctcactgtggtgaaatgcacccaaaacctccacagctactttgcagagagactctactatgccatgaagggagcagggacgcgtgatgggaccctgataagaaacatcgtttcaaggagcgagattgacttaaatcttatcaaatgtcacttcaagaagatgtacggcaagaccctcagcagcatgatcatggaagacaccagcggtgactacaagaacgccctgctgagcctggtgggcagcgacccctgaggcacagaagaacaagagcaaagaccatgaagccagagtctccaggactcctcactcaacctcggccatggacgcaggttgggtgtgaggggggtcccagcctttcggtcttctatttccctatttccagtgctttccagccgggtttctgacccagagggtggaaccggcctggactcctcttcccaacttcctccaggtcatttcccagtgtgagcacaatgccaaccttagtgtttctccagccagacagatgcctcagcatgaagggcttggggacttgtggatcattccttcctccctgcaggagcttcccaagctggtcacagagtctcctgggcacaggttatacagaccccagccccattcccatctactgaaacagggtctccacaagaggggccagggaatatgggtttttaacaagcgtcttacaaaacacttctctatcatgcagccggagagctggctgggagcccttttgttttagaacacacatccttcagcagctgagaaacgaacacgaatccatcccaaccgagatgccattaacattcatctaaaaatgttaggctctaaatggacgaaaaattctctcgccatcttaataacaaaataaactacaaattcctgacccaaggacactgtgttataagaggcgtgggctcccctggtggctgaccaggtcagctgccctggccttgcacccctctgcatgcagcacagaagggtgtgaccatgccctcagcaccactcttgtccccactgaacggcaactgagactgggtacctggagattctgaagtgcctttgctgtggttttcaaaataataaagatttgtattcaactcaaaaaaaaaa

SEQ ID NO: 2312 - DNA, 868 bp, Homo sapiens
ggcacgaggggtggtgtagggccgggcgataatggcggcgtcgaggctggagctaaacctggtgcggctgctatcccgctgcgaggcgatggcagcggagaaacgggacccggacgagtggcgcctggagaagtacgtgggagccctagaggacatgttgcaggccctgaaggtccacgcgaggttttgtttttcttcttcctgccttccagcaaaccggcctctgaggtgatcaatgaatattcctggaaggtggattttctgaaggggatgctgcaagccgagaagctgacctcctcctcagagaaagcactggccaaccagttcctggcccctggccgtgtgccaaccacagccagagagcgagtgcccgccacaaagacggtgcatctgcagtcacgggcgcggtacaccagcgagatgcggagtgagctactaggcacggactctgcagagcctgagatggacgtaaggaagagaactggagtggcagggtcccagccagtgagtgagaagcagtcggcagctgagctagacctcgtcctgcagcgacatcagaacctccaggaaaagctggcggaagagatgctaggactggcccggagcctcaagaccaataccctggccgcccagagtgtcatcaagaaggacaaccagaccctgtcacactcactgaaaatggcggaccagaacctggagaaactgaagacggagtcagagcgtctggagcagcacacgcagaagtcagtcaactggctgctctgggccatgctcattatcgtctgcttcatcttcattagcatgatcctcttcattcgaatcatgcctaaactcaaataaagacccccgcccacctaaaaaaaaaaaa

SEQ ID NO: 2313 - DNA, 671 bp, Homo sapiens
gacatcagaaccccaggctctccagcctttggacttcaggactgacacaagcaacctgctgggttcttaggcctttggcttggtactgagacttacaccatcagcttccctggtcctgagacttttggacttggattgagccacgctactggcatcccaggatctccagcttgcagacagcctgtcgtgggacttcacagcctccataattatagaatggcaatggtctctgcgatgtcctgggtcctgtatttgtggataagtgcttgtgcaatgctactctgccatggatcccttcagcacactttccagcagcatcacctgcacagaccagaaggagggacgtgtgaagtgatagcagcacaccgatgttgtaacaagaatcgcattgaggagcggtcacaaacagtaaagtgttcctgtctacctggaaaagtggctggaacaacaagaaaccggccttcttgcgtcgatgcctccatagtgattgggaaatggtggtgtgagatggagccttgcctagaaggagaagaatgtaagacactccctgacaattctggatggatgtgcgcaacaggcaacaaaattaagaccacgagaattcacccaagaacctaacagaaggctttgttgtagtaaagggaaaaccaaccctttggaaaatacttttt

SEQ ID NO: 2314 - DNA, 1483 bp, Homo sapiens
  misc_feature (1)...(1483): n = a,t,c or g
tcatggcaagagcgagcagtggtgctgatgttgagagaagcccagggtaccactaattgagggagtgaggaagagagcagctcgcttctaactggactgcacgttggtgacagcgtcccaagctggtgacagacccactctgtaactttcagctagattcagccaccagatcccagaaacatgacccttgctgcctacaaagagaagatgaaggagctcccgctggtgtccttgttctgctcctgcttcctggccgatcccctgaataagtcgtcctacaaatatgaagcagacacggtggacctgaattggtgcgtcatttccgacatggaagtcatcgagctgaacaaatgcacctcgggccaatcctttgaagtcatcctgaagccaccctcctttgatggggttcccgagttcaacgcctccctgccaaggcggcgagacccatccctggaagagatccagaagaaactagaagcggctgaggagcgaaggaagtaccaggaagcggagctcctgaaacacctagcagagaaacgggaacatgagagagaggtgatccaaaaggccattgaggaaaacaacaacttcatcaagatggctaaggaaaaactggcccagaagatggaatccaacaaggagaacagggaggcccacctcgccgccatgttggaacggctgcaagagaaggacaagcacgccgaggaggtgcggaaaaacaaggagctgaaggaagaggcctccaggtaaagcctagaggccaaagaactttccaggtcagccggacagctccagcagctccacgttccaggcagcctcgcccgccggctgcgctcccagcactggggtttggggggaggggggtggccaaggggcggtttcctctgcttttggtgtttgtacatgttaagaattgaccagtgaagccatcctatttgtttccggggaacaatgacggggtgggagaggggagaggagagagtttgggaaagggagatggagaagaactcaaggacattgcaaccctgcccggcgcagatctgattttcacatctctacctggacattgagcctccaggcaccatgttgaggagagatgaaaaccagggcggtagaacttcagggtgaaggacagagtcctgggtggggcagcggctgcagggcgcaccagagaacccagccagagggggtgtgagtaccagtggtgttgcttccaccctgcagcaggtgggatgaggtctgtgtgtgtgtgtgaaccatcattttttgatcatcatgaccaatgaaacattgactccaagtgtccagttctttatttcccaaatgtgtcctttgggtaattgttaaaaagttctcgaaacctggctttcatccatctgatggcagatgcccctttgcttccttaattctgccattcaagcatctggagcctgggtgaggtgggttgaatcangccagcctttggcataattgaaaggttttt

SEQ ID NO: 2315 - DNA, 1110 bp, Homo sapiens
gtgaacacaacttccggccccactgagcggtgtcctgagccgattacagctaggtagtggagcgccgctgcttacctgggtgcaggagacagccggagtcgctgggggagctccgcgccgccggacgcccgtgaccatgtggaggctgctggctcgcgctagtgcgccgctcctgcgggtgcccttgtcagattcctgggcactcctccccgccagtgctggcgtaaagacactgctcccagtaccaagttttgaagatgtttccattcctgaaaaacccaagcttagatttattgaaagggcaccacttgtgccaaaagtaagaagagaacctaaaaatttaagtgacatacggggaccttccactgaagctacggagtttacagaaggcaattttgcaatcttggcattgggtggtggctacctgcattggggccactttgaaatgatgcgcctgacaatcaaccgctctatggaccccaagaacatgtttgccatatggcgagtaccagcccctttcaagcccatcactcgcaaaagtgttgggcatcgcatggggggaggcaaaggtgctattgaccactacgtgacacctgtgaaggctggccgccttgttgtagagatgggtgggcgttgtgaatttgaagaagtgcaaggtttccttgaccaggttgcccacaagttgcccttcgcagcaaaggctgtgagccgcgggactctagagaagatgcgaaaagatcaagaggaaagagaacgtaacaaccagaacccctggacatttgagcgaatagccactgccaacatgctgggcatacggaaagtactgagcccatatgacttgacccacaaggggaaatactggggcaagttctacatgcccaaacgtgtgtagtgagtgtaggagataactgtatataggctactgaaagaaggattctgcatttctattcccctcagcctacccactgaagtctttgggtagctcttaagccataactaaggagcagcatttgagtagatttctgaaaaacaatgttatttgttgatttaaaaagaaaactgtatttttattaaataaaatttaaacatcacttcaggaaaaaaaaaaaa

SEQ ID NO: 2316 - DNA, 2221 bp, Homo sapiens
tttcgtcgcaggcgggcctcgcgggtccgggagcgcggcggagacgatgcctgagatcagagtcacgcccttgggggccggccaggacgtgggccgaagctgcatcctggtctccattgcgggcaagaatgtcatgctggactgtggaatgcacatgggcttcaatgacgaccgacgcttccctgacttctcctacatcacccagaacggccgcctaacagacttcctggactgtgtgatcattagccacttccacctggaccactgcggggcactcccctacttcagcgagatggtgggctacgacggccccatctacatgactcaccccacccaggccatctgccccatcttgctggaggactaccgcaagatcgccgtagacaagaagggcgaggccaacttcttcacctcccagatgatcaaagactgcatgaagaaggtggtggctgtccacctccaccagacggtccaggtagatgatgagctggagatcaaggcctactatgcaggccacgtgctgggggcagccatgttccagattaaagtgggctcagagtctgtggtctacacgggtgattataacatgaccccagaccgacacttaggagctgcctggattgacaagtgccgccccaacctgctcatcacagagtccacgtacgccacgaccatccgtgactccaagcgctgccgggagcgagacttcctgaagaaagtccacgagaccgtggagcgtggtgggaaggtgctgatacctgtgttcgcgctgggccgcgcccaggagctctgcatcctcctggagaccttctgggagcgcatgaacctgaaggtgcccatctacttctccacggggctgaccgagaaggccaaccactactacaagctgttcatcccctggaccaaccagaagatccgcaagactttcgtgcagaggaacatgtttgagttcaagcacatcaaggccttcgaccgggcttttgctgacaacccaggaccgatggttgtgtttgccacgccaggaatgctgcacgctgggcagtccctgcagatcttccggaaatgggccggaaacgaaaagaacatggtcatcatgcccggctactgcgtgcagggcaccgtcggccacaagatcctcagcgggcagcggaagctcgagatggaggggcggcaggtgctggaggtcaagatgcaggtggagtacatgtcattcagcgcacacgcggacgccaagggcatcatgcagctggtgggccaggcagagccggagagcgtgctgctggtgcatggcgaggccaagaagatggagttcctgaagcagaagatcgagcaggagctccgggtcaactgctacatgccggccaatggcgagacggtgacgctgcccacaagccccagcatccccgtaggcatctcgctggggctgctgaagcgggagatggcgcaggggctgctccctgaggccaagaagcctcggctcctgcacggcaccctgatcatgaaggacagcaacttccggctggtgtcctcagagcaagccctcaaagagctgggtctggctgagcaccagctgcgcttcacctgccgcgtgcacctgcatgacacacgcaaggagcaggagacggcattgcgcgtctacagccacctcaagagcgtcctgaaggaccactgtgtgcagcacctcccagacggctctgtgactgtggagtccgtcctcctccaggccgccgccccttctgaggacccaggcaccaaggtgctgctggtctcctggacctaccaggacgaggagctggggagcttcctcacatctctgctgaagaagggcctcccccaggcccccagctgaggccggcaactcacccagccgccacctctgccctctcccagctggacagaccctgggcctgcacttcaggactgtgggtgccctgggtgaacagaccctgcaggtcccatccctggggacagaggccttgtgtcacctgcctgcccaggcagctgtttgcagctgaagaaacaaactggtctccaggctgtcttgcctttattcctggttagggcaggtggtcctagacagcagtttccagtaaaagctgaacaaaaaaaaaaaaaagggggggcccgtttaaaagaatcaattttaacgcccgggggcggggaaggtaaaattttttttagggggccccaaaaattaattccggggcccgtggttaaacag

SEQ ID NO: 2317 - DNA, 450 bp, Homo sapiens
atgcattcgaactgagccagctgcagctttccgccgcttgggcgccttgtccggagctgcggccttaggcttcgcttcctacggggcgcacggcgcccaattcccagatgcctacgggaaggagctgtttgacaaggccaacaaacaccacttcttacacagcctggccctgttaggggtgccccattgcagaaagccactctgggctgggttattgctagcttccggaacgaccttattctgcaccagcttttactaccaggctctgagtggagaccccagcatccagactttggcccctgcgggagggaccctgctactcttgggctggcttgccttggctctttgagctcccttttgcttaattactgggttttctgggcagttttttttttaaagagttggagtaagaagaggattaaaaaggaaaggcaaataaaaaaaaaaaaa

SEQ ID NO: 2318 - DNA, 1184 bp, Homo sapiens
aagggcccccgcttgtgtgcccttcgccctgccggagccgggaaaatggaggctgtgattgagaaggaattgcagcgcgctcggaggcctcttccagaccatcatcagcgacatgaaggggagctatccagtttgggaagatttcataaacaaagcaggaaagctgcagtcccagcttcggacaacagtagtagcagcagctgccttcttggacgcctttcagaaagtggctgacatggccaccaacacacgtggtgggaccagggagattggatctgctctcaccaggatgtgcatgaggcacagaagcattgaagccaagctgaggcagttttcgagcgctttaattgattgtctgataaacccacttcaagaacagatggaagaatggaagaaagtggccaaccagctggataaagaccacgcaaaagaatataagaaagcccgccaagagataaaaaagaagtcctcggatacgctgaaactgcagaagaaagcaaaaaaagggagaggtgatatccagcctcagttggacagtgctctccaagatgtcaatgataagtatctcttattggaagaaacagaaaagcaggctgtccggaaggctttgattgaagaacgtggccgattctgtaccttcatctctatgctgcggccagtgattgaagaagaaatctcaatgctaggggaaataacccaccttcagaccatctcggaagatctaaaaagcctgaccatggaccctcacaaactgccctcctcaagtgaacaggtgattctggacttgaaaggttctgattacagctggtcgtatcagacgccaccctcttcccccagcaccaccatgtccagaaagtccagtgtctgcagcagcctgaacagtgtcaacagcagtgactcccggtccagcggctcccactcgcattcccccagctcacattaccgctaccgcagctccaacctggcccagcaggctcctgtgaggctgtccagcgtgtcctcccatgactcaggattcatatcccaggatgccttccagtccaagtcaccatcccccatgccgccagaggcccccaaccagcgccgcaaagagaagcgagaaccggaccccaacgggggaggacccactaccgccagcggcccacctgcagcagctgaggaggctcagagaccacggagcatga

SEQ ID NO: 2319 - DNA, 1828 bp, Homo sapiens
ttttttttttttcgttccatgttttttatttgtgcactgggaaagaagtcttccctcccatcacatgagccacgtggtgagtcctctggaggcttgaagattatccccctccctgggagtcttgggccatggagggtgggggcggtgaacggaaggggattttgtctctgccctcagcctggtgccctctccttccaggaatgtcccagcggaattgtcaatgaggagaacttcaagcagatttactcccagttctttcctcaaggaggtgaggggacaagggccaaggggaagcagttgtccttctctaggctgagggagggagggattccggaggagttgggaatgccaaggtgatggggggtatggggagctccttagagggaggaagtcctctcctgtgtggaagccaacttctccacactcaccctgcagactccagcacctatgccacttttctcttcaatgcctttgacaccaaccatgatggctcggtcagttttgaggtgagctgggcgaggtgggccagggaagcctgtttcctggagttcagggccaggatctccaggccaaacccagagaaggagttgggtgaagagtacccgaggacacagctccctcctgcctccttcccaggactttgtggctggtttgtccgtgattcttcggggaactgtagatgacaggcttaattgggccttcaacctgtatgaccttaacaaggacggctgcatcaccaaggaggaaatgcttgacatcatgaagtccatctatgacatgatgggcaagtacacgtaccctgcactccgggaggaggccccaagggaacacgtggagagcttcttccagaagatggacagaaacaaggatggtgtggtgaccattgaggaattcattgagtcttgtcaaaaggatgagaacatcatgaggtccatgcagctctttgacaatgtcatctagcccccaggagagggggtcagtgtttcctggggggaccatgctctaaccctagtccaggcggacctcacccttctcttcccaggtctatcctcatcctacgcctccctgggggctggagggatccaagagcttggggattcagtagtccagatctctggagctgaaggggccagagagtgggcagagtgcatctcggggggtgttcccaactcccaccagctctcacccccttcctgcctgacacccagtgttgagagtgcccctcctgtaggaattgagcggttccccacctcctacccctactctagaaacacactagacagatgtctcctgctatggtgcttcccccatccctgacctcataaacatttcccctaagactcccctctcagagagaatgctccattcttggcactggctggcttctcagaccagccattgagagccctgtgggagggggacaagaatgtatagggagaaatcttgggcctgagtcaatggataggtcctaggaggtggctggggttgagaatagaagggcctggacagattatgattgctcaggcataccaggttatagctccaagttccacaggtctgctaccacaggccatcaaaatataagtttccaggctttgcagaagaccttgtctccttagaaatgccccagaaattttccacaccctcctcggtatccatggagagcctggggccagaatatctgggctcatctctggcattgcttcctctcctttcctttcctgcatgtgttggtggtggttgtggtgggggaatgtggatgggggatgtcctgggctgatgcctgccaaaatttcatcccaccctccttgcttatcgtccctgtttt

SEQ ID NO: 2320 - DNA, 437 bp, Homo sapiens
  misc_feature (1)...(437): n = a,t,c or g
cccagctgcttttgagtcccgcctggagaaacgcagtgaatttcggaagcagccagtggggcattccaggcaaggtgattttatcaaatgtgtggaacagaagacagatgccttggggaaacagtctgtgaacagaggattcactaaggacaagactctcagttcaatctttaacattgagatggtaaaagaaaaaactgcagaagaaataaaacagatttggcagcaatattttgcagcaaaagatacagtctacgcagttattcctgcagaaaagtttgatttgatctggaaccgggctcagtcctgtccaacatttctatgtgctctgccaagaagggaaggttatgagttttttgtaggacaatggacaggtactgaactccactttcactgcacttataaatattcagaccccgaggggaaagcctncaagc

SEQ ID NO: 2321 - DNA, 483 bp, Homo sapiens
attagacgcctgcagtaccggtccgtattcccggtcgacacacgcgtccgcggacgcgtgggcggacgcgtgggttgtggtagtgcttaaagttgttggaatgaccttatttctactttatttcccacagatttttaacaaaagtaacgatggtttcaccaccaccaggagctatggaacagtctcacagatttttgggagcaggtccccaagtcccaacggcttcattaccacaaggagctatggaacagtctgccccaaagactgggaattttatcaagcaagatgtttttttcttatccacttatgaatcatcttggaatgaaagctgggacttttgcaaaggaaaaggatgcacattggcaattgtggacaactccgagactctgaagttgcttcatgacctacatgatgctgagaagaattacattgccttgccctaccgtagttctaagtacatgtctacatgtaatggaacatttg

SEQ ID NO: 2322 - DNA, 1949 bp, Homo sapiens
caccctctcttcagcctgcctgattggagacgcctggaaggagctgaccatagtggcaggtgctgtttccaaccagctcttggtctggtacccagcaactgccttagcagacaacaaacctgtagcacctgaccgacgaatcagtgggcatgtgggcatcatcttcagcatgtcatacctggaaagcaagggattgctggctacagcttcagaagaccgaagcgttcgtatctggaaggggggcgacctgcgagtgcctgggggtcgggtgcaaaatattgggcactgctttgggcacagcgcccgtgtgtggcaggtcaagcttctagagaattaccttatcagtgcaggagaggattgtgtctgcttggtgtggagccatgaaggtgagatcctccaggcctttcggggacaccagggacgtgggatccgggccatagctgcccatgagaggcaggcctgggtgatcactgggggtgatgactcaggcattcggctgtggcacttggtagggcgtgggtaccggggattgggggtctcggctctctgcttcaagtcccgtagtaggccaggtacactcaaggctgtgactctggctggctcttggcgactgctggcagtgactgatacaggggccctgtatctctatgacgtcgaggtcaagtgctgggagcagctgctagaggataaacatttccagtcctactgcctgctggaggcagctcctggtcccgagggcttcggattgtgtgctatggccaatggggaaggtcgtgtcaaggttgtccccatcaacactccaactgctgctgtggaccagaccctgtttcctgggaaggtgcacagcttgagctgggccctgcgtggttatgaggagctcctgttgctggcatcgggccctggcggggtagtagcttgcctagagatctcagccgcaccctctggcaaggccatctttgtcaaggaacgttgtcggtacctgctgcccccaagcaagcagagatggcacacatgcagtgccttcctacccccaggtgacttcctggtgtgtggtgaccgccggggctctgtgctgctattcccctccagaccagggcgtgatggagcctactaccagctgtttgtacgagacggccagctccagccagtcctaaggcagaagtcctgtcgaggcatgaactggctagctgggctccgtatagtgcccgatgggagcatggttatcctgggtttccatgccaatgagtttgtggtgtggaaccctcggtcacacgagaagctgcacatcatcaactgtggtggagggcaccgttcgtgggcattctctgatactgaggcggccatggcctttgcttacctcaaggatggggatgtcatgctgtacagggctctgggtggctgcacccggccacacgtgattctccgggagggtctgcatggccgtgagatcacttgtgtaaagcgtgtgggcaccattaccctggggcctgaatatggagtgcccagcttcatgcagcctgatgacctggagcctggcagtgaggggcccgacttgactgacattgtgatcacatgtagtgaggacactactgtctgtgtcctagcactccctacaaccacaggctcagcccacgcactcacagctgtttgtaaccatatctcctcggtacgtgctgtggctgtgtggggcattggcaccccaggtggccctcaggatcctcagccaggcctgactgcccatgtggtgtctgcgggggggcgggctgagatgcactgcttcagcatcatggttactccggaccccagcaccccaagccgcctcgcctgccatgtcatgcacctttcgtcccaccggctagatgagtattgggaccggcaacgcaatcggcatcggatggttaaggtagacccagagaccaggtaatatatgctcctgggcagggtgtggt

SEQ ID NO: 2323 - DNA, 927 bp, Homo sapiens
ccggacttcccgggtcgagaagggactacgaaaggccggcgccgctgttaccatggagtcagatgagtggttttctcaggctttaccagcaaacacctcagcacaaaaggctgaattgatcgccctcactcaggctatccgatggggtaaggatattaacgttaacactgacagcaggtacgcctttgctacggtgcatgtacgtggagccatctgccaggagcgcaggctactcacctcagcagaaaaggctatcaaaaacaagaatcccccgtcttcaaagcctaacagatcaagcagctctctggggaacaacctgcgaccaggtaaatgccaaacaaggtcctaaacccagcccaggccaccgtctccgaagaaacttgccaggagagaagtgggaaattgactttacaaaagtaaaaccacaccaggctgggtacaaataccttctagtactagtagacaccttctctggatggactgaagcatttgctaccaaaaacgaaactgtcaatatggtagttaagtttttactcaatgaaatcatccctcgacatgggctgcctgttgccatagggtctgataatggaccggccttcgccttgtctatagtttagtcagtcagtaaggcgttaaacattcaatggaagctccattgtgcctatcgaccccagagctctgggcaagtagaacgcatgaactgcaccctaaaaaacactcttacaaaattaatcttagaaaccggtgtaaattgtgtaagtctccttcctttagccctacttagagtaaggtgcaccccttactgggctgggttcttaccttttgaaatcatgtatgggagggtgctgcctatcttgcctaagctaagagatgcccaattggcaaaaatatcacaaactaatttattacagtacctacagtctcccc

SEQ ID NO: 2324 - DNA, 2163 bp, Homo sapiens
ttgtacatctctcctagacaagtccaaggaactactaacgagaagatttcaggaagaggcctacagcaattgcttggtgcttgggttcatttgcggaatcttggcaacaggtctacagagaagcagttccacggcaaaagagcttgctatgggaacgaattgggcctgaccagtgatgacgaggactacgtgccccctgacgacgacttcaacacaatgggatactgtgaagagatccctgtggaagagaatgaagtgaatgacagctcatccaagagcagcatagagaccaagccagatgccagtccacagctgcccaagaaatccatcaccaacagcacactaacatccacagggagcagtgaggcccccgtctcgtttgatgggctgcccctggaggaagaggcgctggagggagacgggtccctggaaaaggagctcgccattgacaacatcatgggggagaagattgagatgatcgctcctgtgaactccccttcactggacttcaatgacaatgaggacatccccactgagctcagtgactcttccgacacacacgatgaaggagaggtccaggccttctatgaggacctgagtggccggcagtacgtgaatgaagtcttcaacttcagcgtggacaagctctatgacctcctcttcaccaactcgcccttccagcgggatttcatggagcagcggcgcttctctgatatcatcttccatccatggaaaaaggaggagaatggaaaccagagccgagtgattccctacaccatcacccttaccaaccctctggaacacaaaactgccactgtcagggagacacagaccatgtacaaggcgagccaggagagtgaatgttacgtgatagatgccgaagtcctcacccacgacgtgccctaccatgactacttttacacaatcaatcgctacacgctcacccgtgtggctcggaacaagagccgactcagggtctccacagagctgcgctatcgaaaacagccctgggggttagtgaaaacgttcatcgagaagaacttctggagtgggctggaggactacttccgccatttagagagcgagctggccaaaacggagagcacttatttggctgagatgcacagacaatctcccaaagagaaggccagcaagactacaacggtgcggaggaggaagcgtccccatgcccacctgcgagtccctcacctggaagaggtgatgagcccggtcaccacgcccacagatgaggatgtgggccacaggatcaaacatgtggcaggttccacacagacgcggcatatcccggaggacacccccaacggtttccacctgcagagcgtgtccaagctgctgctggttatcagctgtgttctggtgctgctggtcatccttaacatgatgctcttctacaaactctggatgttggaatacaccacgcagaccctcactgcctggcagggtctaaggctccaagaaaggttaccccagtctcagacagaatgggcccagctcttagagtcccaacaaaagtaccacgatactgagctccaaaaatggagggaaatcatcaaatcctcagtgatgctccttgaccaagatgaagggactcgctcatcaaccttcagaacggcatcaggtcccgcgactacacgtcggaaagtgaagaaaagaggaatcgctatcattgacaaggcaggaacagggtggctgcaagaggcctgtgcaatacatgtacatagaccatataaatatatatatataaatatatatatatacagaatataaatatatatattatatacagattttaaaaaagagataatgcctatgtaccagggagaaggagcgggccctcccgcgccctgtgctggccggagcagcgttttcttatggtggagcagctgaggagggcaggaaccgcctctcagcaccgacctcccctgatctccctcctcccaccctctgttccccaccccttcccttgctggccattcttggcttttagaagggaaatgttgagccaaagttatgcctgcgaagaccctaaggtctcaaaaagaagtcttaagaccggcattgcttaaggtgcttcattccctaatccccttttgatttgtttccaaaataaaagagaatcttttcttccctacaaaaaaaaaa

SEQ ID NO: 2325 - DNA, 2163 bp, Homo sapiens; identical to SEQ ID NO: 2324

SEQ ID NO: 2326 - DNA, 1216 bp, Homo sapiens
ctcgcctttgtgccatccgggtctctcgcgcgagcgatttagtctgaggcgaagcttcggagcggccggtactgttgaaagcgacaagtggaggcgccgctctagcggccgggactctgaactatggcggctagtgatacagagcgagatggactagccccagaaaagacatcaccagatagagataagaaaaaagagcagtcagaagtatctgtttctcctagagcttcaaaacatcattattcaagatcacgatcaaggtcaagagaaagaaaacgaaagtcagataatgaaggaagaaaacacaggagccggagcagaagcaaagagggaagaagacatgaatccaaagataaatcctctaagaaacataagtctgaggaacataatgacaaagaacattcttctgataaaggaagagagcgactaaattcatctgaaaatggtgaggacaggcacaaacgcaaagaaagaaagtcatcaagaggcagaagtcactcaagatctaggtctcgtgaaagacgccatcgtagtagaagcagggagcggaagaagtctcgatccaggagtagggagcggaagaaatcgagatccagaagcagagagaggaagaaatcgagatccagaagcagggaaagaaaacggcggatcaggtctcgttcccgctcaagatcaagacacaggcataggactagaagcaggagtaggacaaggagtaggagtcgagatagaaagaagagaattgaaaagccgagaagatttagcagaagtttaagccggactccaagtccacctcccttcagaggcagaaacacagcaatggatgcacaggaagctttagctagaaggttggaaagggcaaagaaattacaagaacagcgagaaaaggaaatggttgaaaaacaaaaacaacaagaaatagctgcagcagctgcagctactggaggttctgttctcaatgttgctgccctgttggcatcaggaacacaagtaacacctcagatagccatggcagctcagatggcagccctgcaagctaaagctttggcagagacaggaatagctgttcctagctactataacccagccgctgttaatccaatgaaatttgctgaacaagagaaaaaaaggaaaatgctttggcagggcaagaaagaaggggacaaatcccaatctgctggaaatatggggaaaaattgaattttgggaaacaagg

SEQ ID NO: 2327 - DNA, 412 bp, Homo sapiens
tttcgtcttggtgtggccactgaggacggcgctgagagggggaaagtcatgggcagggcctggtgtgggatgtggaggagacggcgcccggggaggaggaggtgagctccccgtcctgggagtgagcaagtgtggactgggccttgggggcgtaatccttggaggaatttggatggggtctccttggaacatcattattgaggtgttcttaggaaacaccctttgaaatgtcctgtgacagcttaagttttgagaaggtcgttggttttaatgccttcgtgggcggcactcatggatattttgtcgcagagccttcttggggccacaggggtgggctggggcctcgctcacactcacgtggggcctccagggggaggctttgtaaacctcgaatttgcaattacaccgagcc

SEQ ID NO: 2328 - DNA, 426 bp, Homo sapiens
gccttgagagtccccgccactgacccccttgctggggacctctcatctgggcattgactgtctcctctgtccccagtcccacccctgagctctcatgcattctcaagtctcctctcctgcttgtccggtgctgggctatggccatctcttctgtccccggccccaccccagagctctggtccactcttgggtctctccccttgtcctggtgctgggcagtggccatctcctctgtccccagccccacccccgagctctgatccactctcaggcctctccccctgtcctggtgctgggccgcggtcgtctcctttcggcatctgctccctgcagggccgtgccgctgtccccacgtcggctcacctggccacctcacctgcaggtaggaattctgataccaaccgggaggccctggaagaatttaag

SEQ ID NO: 2329 - DNA, 162 bp, Homo sapiens
ttttttttttttctgaaaaagtctcgctgggtcacccaggctggagtgcaggggggcaatctcactgcatcctccgcctcccgggttcaagcgattctcccgccttagcctcctgagtaactgggattacaggcaaccgcggctggctaaattttgtaattg

SEQ ID NO: 2330 - DNA, 162 bp, Homo sapiens; identical to SEQ ID NO: 2329

SEQ ID NO: 2331 - DNA, 465 bp, Homo sapiens
gtagggtcgacccacgcgtccgatatgggcgccggcgcggagcgccgcggggcaacgcggtgtctatcatggctgagctgcagcagctccgggggcaggaggcggaggggtccatggtgaagagtctggaaagagagaacatccggaagatgcaggtagcggggctggggccgaaccaggacccccttctcagcgggtgggtgccgggcccttccctcagccaccacgcgacgccttgcactgcagccgcgtacccgcagaccgggtgtgggcggccctggggtcgccggggcggcctcggacaggacttcggatgctttggcggatcggatgaaatacgtgtgcccttgccgtgcgcgaggcgtgtttccgccccttccagcctggggcaggagcgtcctcggcggcaggtgggaagcccctggtggcaggcgctcgccccaccaactttccctcttacgcggg

SEQ ID NO: 2332 - DNA, 2307 bp, Homo sapiens
aaaatcacctcgggaccctgatgcaaaactgggattcttcttcccgtgtacctttttcaagtgggcagcactcaactcaatctttcccaccctcattgatgtcaaagtccaattcaatgttacagaaacccactggcctatgtgcggcccatggacggacaggagtccatggaaccaaagctgtcctctgagcactacagcagccaatcccatggcaacagcatgactgagctgaagcccagcagcaaagcacatctcaccaagctgaaaataccttcccaaccactggatgcatcagcttctggtgatgtgagctgtgtggatgaaatcctaaaagagatgacgcattcatggcctccccctctaacggctattcatacaccatgcaaaacagaaccttccaaatttccttttccaactaaggagtctcagcagtccaattttggcactggagaacaaaaaagatataatccttctaaaacttcaaatgggcaccagtctaaatctatgttaaaagatgacttaaaactaagcagcagtgaagacagtgatggggaacaggattgtgataagacaatgccgaggagtacaccaggaagtaactctgaaccttcacaccataatagtgaaggagcagataactccagggatgattctagtagccacagtggatctgaaagcagctctggatctgactcagagagtgaaagtagttccagtgacagtgaggcaaatgagccatcccagagtgcatctcccgagcctgaacccccgccaacaaacaaatggcaacttgataattggctgaataaagtgaacccacataaagtgtcacccgcctcttcagtggacagtaacatcccatcatctcaaggctacaaaaaggaaggccgagagcagggcactgggaatagctacactgatacaagtggacctaaagaaacgagttccgctactccgggacgagactcccaaacccatccaaaagggatcagaaagtgggcgtgggaggcagaaatctcctgcacagagtgacagcacaacacagagaagaactgtaggcaaaaaacaacccaaaaaggctgagaaggcagctgctgaagagcctcgtggaggcctgaagatagaaagtgaaacccctgtagacttggctagcagcatgccctccagcagacacaaagcagccaccaaaggctcaaggaaacccaatataaagaaggagtctaagtcttcccctcgacctacagcagagaaaaagaaatataagtcaacaagtaaatcttcccagaaatcaagggaaatcatagaaacagatacctcatcctcagattcagatgaaagtgagagccttcctccttcctcacaaactcctaagtaccccgagagcaataggactcctgttaaaccctcctcagtggaggaagaagatagcttttttcggcaacgaatgttctctcctatggaagagaaggaacttctttcacccctcagtgagcctgatgacaggtacccacttattgtgaagattgacctgaatcttttgactagaataccaggaaagccttacaaagaaacagagccgcccaagggggaaaagaaaaatgtgccagaaaagcacacgagagaggctcagaaacaagcctcagaaaaagtttccaacaaaggcaagaggaagcataagaatgaagatgataaccgagccagtgagagcaagaaacccaaaacggaggacaagaattcagcaggccataagccatccagcaacagagagtcatctaagcagagtgctgcaaaagaaaaggatttgttgccttctcccgctgggcctgttccttcaaaagatccaaaaacagagcatggctctcggaagaggactattagtcagtcttcttccttaaagtcaagcagtaacagcaacaaggagacgagtggcagcagcaaaaacagttcctccacatcaaagcagaagaagaccgaagggaagacttccagtagctccaaggaggttaaggtaaaggctccaagtagctcctctaactgtcctccatctgcaccaactcttgattcttctaagcctcggagaacaaagcttgtctttgatgacagaaattattcagcagaccattatttacaagaagcaaaaaagctaaagcacaatgcagatgcattgtctgataggtttgagaaagctgtatactatcttgatgctgtggtatctttcattgaatgtgggaatgcattagagaagaatgctcaggaatccaaatccccattccctatgtattcagagacggtggatctcatcaa

SEQ ID NO: 2333 - DNA, 496 bp, Homo sapiens
gtcaggacctggaagaacataagaccatgaagttccgctatcaaaccagatgtccaaaatatcctgacctggcacatattccaaggcatcagggccaccaacctcagataagacttcttttggaagaagttgttcagggggaagagtccaccagatatcactgccgtgttgttccactagtttaacaatatgctcagtggtttggctgttgatcaagtattcatccttggtcttatgatgaaacacaggaattggaacaccccaaactctttgccttgatatacaccaatatggccgcctgtccatcatttcaaccatgccattcagtgctgatccaggaataaatttcaccttttttaacaattccttggctgcagtcttaatatcccgtgatgtttataaaccactgccttgctggcacgatataaccacaggtttcttgggtcctccagtcatacggatagctatgcaccaatttctcgtcttgcaacaaatt

SEQ ID NO: 2334 - DNA, 512 bp, Homo sapiens
agcttggcacgagggcgactcccgaagtgaccagtgccaccatccatataattatgggtttgactactactatggcatgccgttcactctcgttgacagctgctggccggacccctctcgtaacacggaattagcctttgagagtcagctctggctctgtgtgcagctagttgccattgccatcctcaccctaacctttgggaagctgagcggctgggtctctgttccctggctcctgatcttctccatgattctgtttattttcctcttgggctatgcttggttctccagccacacgtcccctttatactgggactgcctcctcatgcgggggcacgagatcacggagcagcccatgaaggctgaaacgagctggatccattatggtgaaggaagcgattttcctttttaggaaagggcacagtaaagggaaacttttccttctcttttttcttccttttcttcaagtgcacaaaactttccccaccacggacggatttcattgggcacct

SEQ ID NO: 2335 - DNA, 407 bp, Homo sapiens
tttcgtgatgctgggtacgctgcgcgccatggagggcgaggacgtggaagacgaccagctgctgcagaagctcagggccagtcgccgccgcttccagaggcgcatgcagcggctgatagagaaggtgcggcccccgccggtccgccgggaggggaggcctgcgtgtcggagtgaggctgggaggggacgtaggacgggaagggaaggggctctgaggactcggagcgggggttggggaagcgggactggggcttgaatgcggagagaaggtggaggcggagctgggggctccggagagggaaaaaggaggcagcgccgaaggcttcggtgcggggacggggaggaaagactggggcctccggaacggggagtggggaagcaggcctggggcttcggtgcagagagga

SEQ ID NO: 2336 - DNA, 4086 bp, Homo sapiens
cgaccacgcgtgcgcccacgcgtccgactgtgtacagtaaatggcttatccagctggtgagtgatgcggcagattgagttttcttctgtgattcggtggagactatcagcccaagatgctttaagtgcacaacattacagggaatgcctgagtgcctggccaaagggatatttggtttggccatctctggatgcctgattgccaagctcaggaccaggcaatgtgactttgcatcagcaacaaccagcatcccttgaccaggcctgggccagagtattggtctcctctcagcccctgatcctgtgaagtaaggatgtgggggaagacctggcaaggacacagatgaaacacaaacaatagtaattctcaggccatcatcagtggagccatgttaatgtaatctgatggcttctccagggtccacaggaagtgaagaatctgtttcccagcagtggactcaaaacccatctgggctcctaaccttcctgtaaacccctttagtggcttcattagagcaggcgttcagctcactgttctattcatctcaaggaataatgggcttaaagcagtttctgtcctgctggttaacttgtttggcctattccattctggattttgtcaagcagtagacaagcaattagacaagaacttggaggcaccatttgtatccactttttagacttaatagaaacattgaagatgaacataatctaccaacgaaagacgtgattcaattcaacactcccttcccatgacccaggctgggcaaggaggccacgtgatgtggagggcacattccttgcctgcacaaactcaccatctgtgcacgcagtggccttccctaaaatcagggaattgttttaagtcttatcaagcagccaagggatgaaagagaaggtgggttttcatcaagactggaaggtggggacagggatgagcatggagctggccgtgggcctggggtaccaagagactccttgagagaccaggcaaagcaagtgattgggacagaggttatctgtcccaggttatctgggcatagatgcaggtgagcccatggccctcccagtacctcctgtctctggcctgttttagaaggttctctcctccccaaggagacacaacaactcctagggccactgaagatataactattgcccaggtttctggtctctaggctggggaagtcctctgggtaggaatcagcaagaagatcctaaaacaaaagctcatccatttgcgttccatgatgctgggatttacacttgaggcttagctttgctctgccaacttcttcagagctgacacaggatgaaggcaatgccatcctcaaacactgcaggcatcacagctaacaattgtgaagtcgtcttaactcaccataaaaaggaatccactcccaggcagccctacttctttgctttgcccagcattttactgattcatacattatctcacttgtgccaacactcaagaagcaggctacactgacactggtattcctgcctccatattttctttaaaagacaaatcaaagcagatatattaagtgactgttcaagagcacacttggcccaagtggcagagcttggactggatgcatgttttccagctcctcatccagggctctgaccagtttaacctgatgcagtcacgtggaggagcagtgcaggcacagtatgtcccataggcccagtgagatgcattcttggttggctggccttccacttggctacacagggatgtacaaggcgatcccatcttgataagaccaccacctcagagtatggagctcagagagggcaggcatgaagtttccttggctggtgcacctagaattggctgaactcatgagaagttgatatagaacagtgcttgccacagagcggggactcggtaagcacttaacgaatgaatgaattctaagtcaatccaagagtctgatgatttcttgaaaagggtgttagctaaaggatcttaggcatgactgtagaatttgtagttgcaatagaacagagaaagaggaagctttctgtctccttaacactgagctgtcatgttttaaagcttgctcacatcttggcacatttaagagacagtcaccccaggactcaaaaatagggaagtaacagtaacgcaggggaaacgttttctgtttggaggagcaaaggctgagaacactgtgaaaacattttgcgcgcacaatagtaacctgggtaaatgcagcgtgaagggattttagtcacacgtggtctttcttacaaggaaggtggtgggggtgcagatgaggttgctagagaatgttagaggatccctctctggattggagatagggaaagaaagttgcacggctgctgaggccccttctaggtggcaaggctgtgctccctggttctgatgatgtgcctgggtggacatggcccctgtgagtttgtacagtcttgcagcaggatctaagagggggggatttccagccagggctgctagacggaggcctactcttccatctttccctgaatggccaggatggccctgcccagggccctggaaagacagagaccctccctgcctccgccctcagtaagacgacaaggaaaggcaaatggcccaagggaaagaaaaggaaggctcttctcccccagagttccccatgcagacatgagtgcgtgctcagttcagaatcacttccgagaactcatcccataatgctgcagatttgggctggaacagattcacactgtctggtttcaccgaggacatgaaactccaccttgcggggataaagagagcaacaccaaattcatcaaatggaagacacattgaaagtgtttttccttaatgcttatcctgtttttaaaccattatttccaagttgacaccttttttaaggaaaaataaatattttgcggcattaaagccatatacaaggtctatatcagaaaaatatatttggggggctgcagcacaggactgagggagcggtacatgcttaaaaggcaacagggcctggttttcagtggcgatgatgattctctatgacagtcagggaaacgtggtctctgagagtgatgggcacataaagccttggtgccagagtgcatcgcatggtgtccaggccgagtctctgtcagatggttagaggcctgggtctaccctgccaggagaggcgtgtttgggtaacaggcagatggagtttggaacacatgaatggctcatcacacgccaaccctgagtggggcaggaggcaggaagggtgggctgccgcctctggttggcattctcagagatgcgcagtccatcagcttgttccaaagagtgaacacaggcctctgcgtgctcccaggctccttggtgtcccaacagctggagctcctcgatgagtcacgggagttctttgccaagaagtaacgatagcattactcatggaattgcttcactgctttctgaaggttggcataaaaccgggtcatgctgcgggggaagaaggagtccaccacgttctgtgggaggtaaccgctgaggtcggtatggaagaatgtgaccaggttggtcttggtgggttcccctggaagaggttcacagaagcaaccacaaggatggttaaatcctctcacaaaacctggcttcgggggacataacggatgctccacatgggtggcgttggaactgatggtcccatcctcatatctcttgactagcaccaagtccacaaaatctctgggagaaatgagcttcatggcagcggagggagtggaggttctgcttacacacagggtgtcagtgatgctttggataatttcaaaaccggtcacattctcatcccacttcactcgtaggcctccaacagctggcttcacacagtcccacacctcctctagtgtcccatatacaatgccttctcctcggtacaggttccctggaaactccacagatggcctccaggaaactgaaactccattgccttcccggcaaatcttccagcctgctgtgtcccgccggtactggagcatcttttcggccacagcctcgctcatttgggctgccagcgccgggtccattgcgtcgggagctgcgcttagctgcggg

SEQ ID NO: 2337 - DNA, 437 bp, Homo sapiens
  misc_feature (1)...(437): n = a,t,c or g
tttcgtggagggaagcgaggacaaggcgcgctggcatctcactctgcttctggtgctggaagaccggctgcaccggcagctgacctacgacctgctcccaacggacagcgcccaggacctcgcctcggagctcgtgcactatggcttcctccacgaggacgaccggatgaagctggccgccttcctggagagcaccttcctcaagtaccgtgggacccaggcctgacccggagccccagccccaggggaccatgccggggtgctgcccgggcaggccatgttggggagactccagcaccgtggggctgccctcctccatgcgcctgggagcacaaaggccccggtagtgaaggaaccccccgtctcctgagagtggggctgaccctgccttgggcgccnaggggttggggggtgggtggtggggagtcgttaggccc

SEQ ID NO: 2338 - DNA, 420 bp, Homo sapiens
gcgattgtggaggacaaacacagtggcaggagttatgacataacctcagatcttgggaatgttctcacttctacttcgatcgccaaaaccgttaatggttaagctgaaagcagtgacagtggagccgagtctgatgaagaagatgcccaagaagatttgatgggagcatatcatagtgatattgataagaaaatgatgaagatagtagcagaccataagaatttggaagtcattgttactaatggctatgataaagatggctttgttcatgatatacagaatgacattcatgccagttcttccctgaatggcagaagcactgtacatgtaaagcccattgatgaaaacttggggcaaactggaaaatctgctgtttgcattcaccaagatataaatgatgatcatgttgaagatgttact

SEQ ID NO: 2339 - DNA, 459 bp, Homo sapiens
tgcctaggacaccctcagtctcaactgcactctccccgagactttgcccatgactccctcattctagctgtcctttctctgatttccaggcctggcccgagccaagtcaatcccaacaaagacatactccaatgaggtggtgacactgtggtaccggccccctgacatcctgcttgggtccacggactactccactcagattgacatgtggtaaggacaggtggaagtgtggcaggggccatgtggtaaagggggtggcttggtcacaacagccacccagccagctgcctttctattcactgtgccctccctgcccaggggtgtgggctgcatcttctatgagatggccacaggccgtcccctctttccgggctccacggtggaagaacagctacacttcatcttccgtatcttaagtgaggaggcatgggccctatgcgctgtggagacacacagggt

SEQ ID NO: 2340 - DNA, 1276 bp, Homo sapiens
  misc_feature (1)...(1276): n = a,t,c or g
caagaagtgtccacagcagtaatggataaagactagttttaaatcctcaaagccctaagaggggccccttggttgccctttgtgaatgccagcccccttaagagagtggtgtttgattaacaaaaaaactgtggccccaagtggaacccttgaccttttcctcagataatctgtgtatgtacacagctaacacagctctttagattccctgttaagtgactcattcacattcctttcttggatataaagtcattgctgtctttttatttttgaaatagtacaagacaaagatttttaacttaacatgaaaaattcactcttttattttggaaaaaaagttaacttttcatactaacaaacagaacaagatttaaggtaaatttcttaaacattatccagaaaaataacaagatttatagtatctacttctggtactaatatacacaaaaggccaaaaccatgcctattctgcaggtgtagcttcggtgctctcctgttcaggggcaggctcactgcccgcttcttttccttctttgcttcttttagattttttgtgtttgtgtctcctgtgactatctccttcttcactttcatggcgacgtctactattacttcgagaagacttatgtctggtttcctctttctccctgtgtcgtctttctctatgtcgttcttctttttctcgacttgctctgtgacgctcataacctctttctgcatattccctgtatctgtatcgttcttcatcgctgttgaaaacacttggtgtaggactgtgatcacgctccctctctctctctctggtgcgttatctttctctgtcccgatcacggnnnnnnnnnnnnnnnnnnnnnnnnnnnnnnnnnnnnnnnnnnnnnnntctggcataatagtcccactgcttgctggtgtccacaagactaggccacgaaggagcagaaccaggaagatggggaaaggcaacattgccatatggaaatgcacgtgcagaacgactatcataaccagaggaatgtccactttctattgttggtataagagatggaggtggagcgcctggtggaggaggaaaacccggtggtggaatcagaggtggagcagtgctgacagtcggagnnnnnnnnnnnnnnnnnnnnnnnnnnnnnnnnntgggaggagctcctgcagggaaaaacggaggtggtttgctaaaattgttgtctacttcagtagcattagacaaaattatttaaagtcaataaattgttattcgagcggacgcgtgggtcgacccggg

SEQ ID NO: 2341 - DNA, 3312 bp, Homo sapiens
ccgggtcgacgatttcgtggaggctgatccaacaagtcagtgagggagggaattctttaaaaatgaaatttgaaaaaaacaaaaacagcctgcagtgttagacgagagtcttttatccaagaaacagatactccagctgtgaaaataacaagacccaaatggatagggaacacgtttgcctgtcagagcggtagtctagcccagaaggcagataggaccacagcaccccacctgcttatcccccaaacgtgcctcctaaaactaaacctgtctcttttctgcttcctgctcttcccttccttccccctcttcctcctttgctcttctgtctacagaaaatactcaaagaacctatcgggtgaatccagatggttccctgcgtgtcacttttgccagcgggatggagatcggcctcagctcagagccccacatcctggcaggggcagtcaaccctaccctgggcaaatgcaacatctcattgcccggagagcacaatgcaaacctcatctcagtgctctaatgaggggaacaaggctgtgcttaaaatgtatttcatatctctttctcataggcccacaacagaaacctactctccatagattttgatcatataacccgcacaggaaagatctatgatgaccatcgaaaattcacccttcgaattctttatgaccagactgggcgacccattctgtggtctcctgtaagcagatataatgaagtgaacatcacatattcaccttcgggattggtgacgtttattcaaagaggaacgtggaatgaaaaaatggaatatgaccagagttttctttagtcgcctcaactttagttgtccataatatgctattctgcctttgtctcgtttcagtctgtgatgcttctcctacacagccagcggcgttacatctttgagtatgaccaaccagattgtctgctctcagtcaccatgcctagcatggtgcgtcacagcttacaaaccatgctttcagtgggctactaccggaacatctacaccccaccggacagtagcacttcttttatccaagactatagtcgagatggccgattgctacagaccctgcatctggggacagggcgcagagtcttatacaagtacaccaagcaagcaaggctttctgaggttctctatgataccactcaggtcacattaacatatgaagagtcttctggagacctttctgactcttccacattgatcgcctagcttcttactgtttttgttttggttcctgcaggacctcttattggacgccagattttcagattcagtgaagaaggccttgtgaatgcacggttcgactacagctacaacaatttccgagtcacaagcatgcaagctgtaatcaatgaaacccctttgcctatagatctttaccgatatgttgatgtctctggcagaacagagcagtttggaaaattcagtgtaattaattacgatttaaatcaggtcataactactacagtgatgaaacacaccaaaatcttcagtgccaatggacaagtcattgaagtccaatatgaaatcctaaaggcaattgcctactggatgaccattcaatatgataatgtgggccgcatggtaatatgtgacataagggtaggagtagatgccaatataacaaggtacttctatgaatacgatgctgatgggcaacttcagactgtttctgtaaatgacaaaacccagtggcgttatagttacgatctgaatggaaacatcaacctcttaagccatgggaagagtgctcgtcttactcctctccgatatgacctccgagaccgcatcaccagattaggagaaattcagtataaaatggatgaagatggctttctgaggcagaggggaaatgatatttttgaatataattctaatggcctgctgcagaaagcctacaataaggcttctggctggactgtgcagtattactatgatgggcttgggcgacgtgtcgcgagtaagtccagcctagggcagcaccttcagttcttttatgcagaccttaccaaccccataagagttactcatttgtacaaccacacaagctcggagattacatctctgtattatgatctccaaggtcaccttattgccatggagttaagcagtggtgaagaatattatgtagcctgtgataatacaggtaccccactagctgtgttcagcagccgaggtcaggtcataaaggagatactatacacaccttatggcgatatctatcatgacacttaccctgactttcaggtcattattggttttcatggaggactctatgatttccttactaaattagtgcacctggggcaaagggattatgatgttgttgctggcagatggacaacgcctaatcatcacatatggaaacagttgaacctccttcctaaaccattcaacctttcaacaaagcttataaagtatgggatttttcattttctttttttaatattgtgtctcacagacatcagaagttggttggagctatttggtttccaattacacaatgtactacctggatttcccaaacctgaattagaaaattcaccaagtatctgacagatgtctaactccatgctgcatctgctctgtgcctctctttcctagactatcctgggcattcagtgtgaactccagaaacagctcaggaatttcatttccttggaccaactacctatgactccccgatacaatgatggacggtgccttgaaggagggaagcaaccaaggtttgctgctgtcccttctgtttttgggaaaggtataaaatttgccatcaaggatggcatagtaacagctgatattataggagtagccaatgaagatagcaggcggcttgctgccattctcaataatgcccattacctggaaaacctacattttaccatagaggggagggacactcactacttcattaagcttgggtctctggaggaagacctggtgctcatcggtaacactggggggaggcggattctggagaatggtgtcaatgtcactgtgtcccagatgacttctgtgttgaatgggaggactagacggtttgcagatattcagctccagcatggagccctgtgcttcaacatccggtatgggacaactgtcgaagaggaaaagaatcacgtgttggagattgccagacagcgcgcagtggcccaggcctggactaaggaacaaagaaggctgcaagagggggaagaggggattagggcatggacagaaggggaaaagcagcagcttttgagcactgggcgggtacaaggttacgatgggtattttgttttgtctgttgagcagta

SEQ ID NO: 2342 - DNA, 1073 bp, Homo sapiens
actcgtacagagtcggcgaattctctctgaagatcttcctatccttttctgggggaatggggtcgatgagagcaacctcctatggttgttgtgagaattaaatgagataaaagaggcctcaggcaggatctggcatagaggaggtgatcagcaaatgtttgttgaaaaggtttgacaggtcagtcccttcccacccctcttgcttgtcttacttgtcttatttattctccaacagcactccaggcagcccttgtccacgggctctccttgcatcagccaagcttcttgaaaggcctgtctacacttgctgtcttccttcctcacctccaatttcctcttcaacccactgcttcctgactcgctctactccgtggaagcacgctcacaaagggctaatctcgggccttgtcgaaggaagaggctgcagacgttaatgaggttagctgctggattccagtattcgtcgcataaggatccttctttgtctgcgaaggaaaaacacactgattatcataatgaggcacgtgggccgtggcccggctgggtcggctgaagaactgcggatggaagctgcggaagaggccctgatggggcccaccatcccggacccaagtcttcttcctggcgggcctctcgtctccttcctggtttgggcggaagccatcacctggatgcctacgtgggaagggacctcgaatgtgggaccccagcccctctccagctcgaaatccctccacagccacggggacaccctgcacctattcccacgggacaggctggacccagagactctggacccggggcctccccttgagtagagacccgccctctgactgatggacgccgctgacctggggtcagacccgtgggctggacccctgcccaccccgcaggaaccctgaggcctaggggagctgttgagccttcagtgtctgcatgtgggaagtgggctccttcacctacctcacagggctgttgtgaggggcgctgtgatgcggttccaaagcacagggcttggcgcaccccactgtgctctcaataaatgtgtttcctgtcttaacaaaaaaaaaaaa

SEQ ID NO: 2343 - DNA, 418 bp, Homo sapiens
tgcagtgaatgtgggaaatccttctgtaaaaagtcaaaatttattatacatcagaggactcacacaggagagaaaccttacgaatgtaatcagtgtgggaaatccttctgccagaagggaacccttactgtgcatcagagaacacacacaggggagaagccctatgaatgtaatgaatgtgggaagaacttttaccagaagttacacctcattcagcatcagagaactcactcaggagagaagccctatgaatgtagttattgtggaaaatccttttgccagaagacacacctcacacaacatcagagaacacattcaggagagagaccttatgtttgtcatgactgtgggaaaaccttctcgcagaagtcagcacttaatgaccatcagaaaattcacacaggtgtgaaactctaca

SEQ ID NO: 2344 - DNA, 411 bp, Homo sapiens
gtcacgaggaagcttcctattttcatagtagatgcattcacagcaagagcatttcgtgggagtcctgctgctgattgcctcctagaaaatgaattggatgaagacatgcatcagaaaattgcaagggagatgaacctctctgaaactgcttttatccgaaaactgcacccgacagacaactttgcacaaagatcctgctttggactgatatggtttacaccaacgaccgatttacaaatcttgacatcatccatactaccttcaatactctaaccttatttactacatatccctaatacatcattctacctttctacataaccaactccttactctttatctctattaatattccacatacctcatcataaatcttccttctatactccttatacactcctacacattcct

SEQ ID NO: 2345 - DNA, 419 bp, Homo sapiens
cccacgcgtccgcggacgcgtgggttcaagacagagaattataagaagagctttcttgttggcaaatctggcaacaaattgcaaatgacttaaccaggtgtcaagactccatgatcaataattctcagtgtcacaaacaaggtgatttcccttaccaggtagggacagaactgtctattcaaatttctgaagatgagaactatatagtaaataaagcagatggtcccaataatactgggaatccagagtttcctatcttgagaacccaggattcttggaggaaaacattcctgactgagtcacagagattgaacagagatcagcaaatttccataaaaaataaattatgtcaatgtaagaagggtgttgatcccatcggttggatttcacatcatgatggtcatagagtacacaaaagg

SEQ ID NO: 2346 - DNA, 430 bp, Homo sapiens
cccacgcgtccggcgagcggcggtgacttgccagtaagggtttggagtcatcaccaggtttaattttggaggaactttacaggtttggctccagcagctgctgttgccaccaccactagttcaagcaccatgcggtttacctcaatatcaaattctttgacctccactgctgctattgggctctcatttacaacttcaacgactaccaccgccactttcaccaccaacactactaccacaatcaccagtggctttactgtgaaccaaaaccaactgttatcaagagggtttgaaaaccttgtaccttatacttcaactgttagtgtagtaacaactcctgtgatgacatatggtcatctggagggtcttataaatgaggggaaccttgagctggaaatcaagagaagactttcttctcaggccactcagg

SEQ ID NO: 2347 - DNA, 407 bp, Homo sapiens
ctacctttggttgttcatgcacagattgcttctttcaaaaatgttgtcctgctgaagctggagttcttttggcttataataaaaaccaacaaattaaaatcccacctggtactcccatctatgaatgcaactcaaggtgtcagtgtggtcctgattgtcccaataggattgtacaaaaaggcacacagtattcgctttgcatctttcgaactagcaatggacgtggctggggtgtaaagacccttgtgaagattaaaagaatgagttttgtcatggaatatgttggagaggtaatcacaagtgaagaagctgaaagacgaggacagttctatgacaacaagggaatcacgtatctctttgatctggactatgagtctgatgaattcacagtggatgcggctcgatac

SEQ ID NO: 2348 - DNA, 461 bp, Homo sapiens
  misc_feature (1)...(461): n = a,t,c or g
tgatgagcaggaaaancctgataacctgcggctgacttcgtactacaggcccgacccacgcgtgcggatattttgggaattcattctaaatatgatgaagttagaaaggctggtgcatgcttttataagatgactggcctgggtcctgggcctcaagctctttataatggtgaaccctttaaacatgaagagatgaatattaaagaactaaaaatggctgttcttcaaagaatgatggatgcatctgtatatttacaaagagaagtttttttgggcacattaaatgatcgcacgaatgcaattgattttctaatggataggaataatgttgtaccccgtataaatactttgattttgcgtactaaccagcagtacctcaatttactatctacatcagtaactgctgatgctgaagatttctctactttttttttcttggattcacaagataagagtgcttn

SEQ ID NO: 2349 - DNA, 498 bp, Homo sapiens
  misc_feature (1)...(498): n = a,t,c or g
agatggggccnnnnnnaacggatnacctgaccacgctgcaccggnccggaantaccgggtcgacgatttcgtgccgccggctggagatgtgctgtttcagttggactttcgagttgaccttgacattgcagatctcacagtggaaagttcggtcctgggcaggagcctctggttcccccggggtgggaggccccagccgagggtaagctttgatgggcccgagcccacttcgggcctccagaattgtcttgtgcttagtacctggagcccaaagagggcaggaggtaaggggtggaagaaaaattatccaggcctactgggcctcagaatgcacattcccagttacaatatgagggggaagagggtgggcacagtgtgggttctttctaagctccttgggaccctcccaaagaggtggatcacgagagagtcatatgtaaaggagtaagatggagggaggagctgaggaagtaaagggctaaggaacaggggagatgg

SEQ ID NO: 2350 - DNA, 410 bp, Homo sapiens
  misc_feature (1)...(410): n = a,t,c or g
cccacgcgtccgctgacctttgcacccatggtcatgcccttgtgccttctgctgctctgttccctgcttgcatggcactcacctccttggggcctcaccaggtggaggtggctgtgtgctacgcctgccctagttcttccctgccatccgctgagtgggggtctcaagccactttaggaaaaaatgaagcatgatgtcacaccagagtgcgtcagggtttagtatttcgagtcagaagcactaggcctccatctcaacaaggaggagtcccaggcagcccgccccagctggtgcctcccctgagctggcccatctctccccagcaacctgcggcagatcttccagtccctgccgcccttcatggacatcctcctgctgctgctgttcttcatgatcatctttgccatccn

SEQ ID NO: 2351 - DNA, 448 bp, Homo sapiens
ggtagaagctgtccctgagtagagagccgtaattcccgggtacagccacgcgtccgattaaatgatcgcacgaatgcaattgattttctaatggataggaataatgttgtaccccgtataaatactttgattttgcgtactaaccagcagtacctcaatttaatatctacatcagtaactgctgatgttgaagatttctctactttctttttcttggattcacaagataagagtgctgtaattgcgaagaacatgtattatttaacccaagacgatgagagtataatttctgcagccactctctggattattgcagattttgataagccttctgggagaaaacttctttttaatgcattaaagcacatgataaccagtgttcatagtcgggtggggattatttataatcctttcttctaaataaaggaagagaacacagctatttctg

SEQ ID NO: 2352 - DNA, 1003 bp, Homo sapiens
ccttcctcctactcatctgacgagctgtccccaggcgagcccttgacttcgccgccctgggcccctctgggcgcccccgagcggcccgagcatcttctgaaccgggttctggagcggcttgctggaggggctaccagggacagcgccgcctcagatatcctgctggatgacattgtccttacccattctctcttcctcccgacggagaaatttctgcaggagctacaccagtactttgttcgggcaggaggcatggagggccctgaagggctgggccggaagcaagcctgtctagccatgcttctccatttcttggacacctaccaggggctgcttcaagaggaagagggggccggccacatcatcaaggatctatacctgctaattatgaaggacgagtccctttaccagggcctccgagaggacactctgaggctgcaccagctggtggagacggtggaactaaagattccagaggagaaccagccacccagcaagcaggtgaagccactcttccgccacttccgccggatagactcctgtctgcagacccgggtggccttccggggctctgatgagatcttctgccgtgtatacatgcctgaccactcttatgtgaccatacgcagccgcctttcagcatctgtgcaggacattctgggctctgtgacggagaaacttcaatattcagaggagcccgcggggcgtgaggattccctcatcctggtagctgtgtcctcctctggagagaaggtccttctccagcccactgaggactgtgttttcaccgcactgggcatcaacagccacctgtttgcctgtactcgggacagctatgaggctctggtgcccctccccgaggagatccaggtctcccctggagacacagagatccaccgagtggagcctgaggacgttgccaaccacctaactgccttccactgggagctgttccgatgtgtgcatgagctggagttcgtggactacgtgttccacggggagc

SEQ ID NO: 2353 - DNA, 453 bp, Homo sapiens
  misc_feature (1)...(453): n = a,t,c or g
aactgtggggggaaaaccgaacgtangcaagcacgngncgnggaanncganggccagcgccacgcggtacagcaccttgtagccctccaccaggaagacgtcaaagacccgggcgaagtagcagaggggcagctccccaaacagccagcgctgccagtccgcatagacctgcaggacatcctccgacacggccaccatcagcttgtgggccgcctggcagtacttgttcaccaggtccccaaacgtcatgcaggacgactcaaaggccaggaagctctggtcgatcagcctcctgccggggtcattgcaggccaggatgcggcaggccttctcgaagcactcggcctcgtcgatgctgtagtgcagcagcagggccaccacggccggcagggcggggcagaaggagatgtcggggaactggttggccaggcacaggaggatcttgcgcacggc

SEQ ID NO: 2354 - DNA, 398 bp, Homo sapiens
  misc_feature (1)...(398): n = a,t,c or g
tttcgtgggaaagttcgcggccggagcgcggagatgccgggcagcgacacggcgctcaccgtggaccggacctactcggaccccggccggcaccaccgctgcaagagccgggtagaacgtcatgacatgaataccttaagcctgcccctgaacatacgccgaggggggtcagacaccaacctcaactttgatgtcccggatggcatcctggacttccacaaggtcaaactcactgcagacagcctgaagcaaaaaattctaaaggtgacagagcagataaaaattgagcaaacatcgcgcgatgggaatgttgcggagtatctgaaactagtgaacaacgcggacaagcagcaggcgggacgtatcaagcaagtctttgagaagaagaatcagaaatn

SEQ ID NO: 2355 - DNA, 665 bp, Homo sapiens
gcggccgccgcctccaactgggggctgatcacgaacatcgtgaacagcatcgtaggggtcagtgtcctcaccatgcccttctgcttcaaacagtgcggcatcgtcctgggggcgctgctcttggtcttctgctcatggatgacgcaccagtcgtgcatgttcttggtgaagtcggccagcctgagcaagcggaggacctacgccggcctggcattccacgcctacgggaaggcaggcaagatgctggtggagaccagcatgatcgggctgatgctgggcacctgcatcgccttctacgtcgtgatcggcgacttggggtccaacttctttgcccggctgttcgggtttcaggtgggcggcaccttccgcatgttcctgctgttcgccgtgtcgctgtgcatcgtgctcccgctcagcctgcagcggaacatgatggcctccatccagtccttcagcgccatggccctcctcttctacaccgtgttcatgttcgtgatcgtgctctcctctctcaagcacggcctcttcagtgggcagtggctgcggcgggtcagctacgtccgctgggagggcgtcttccgctgcatccccatcttcggcatgtccttcgcctgccagtcccaggtgctgcccacctacgacagcctggatgagccgtcagtgat

SEQ ID NO: 2356 - DNA, 367 bp, Homo sapiens
ggtaatattgtttacaaagtagcttattagaaatgcttaaaaggaaacttttaggagtcctttgtttactatttatttaacaaatgttgatcaaacatttatgtatcaaatatttaacattaaagggttatttatattttattactgctagaaaaggcctttcagacttgaagtcaaaatggagagttaatagctgacttcttcctctgcaggtgttacaagaggcatttagtcgctgtgtggctgtcttgactcgttctagtaaaccaagtgacatgtcagtacaggtgtgtggatacataagtaaatgctacagtgtggctgctcaatttgaggaatgccgagagaaaatcacggaaatgcctat

SEQ ID NO: 2357 - DNA, 562 bp, Homo sapiens
aatacagtgcctggagatagaggggtcttattatcttaaccacaaaatgattcttgagtgaggaaccctaggtttctcccaaatgccagactgcctacatttaaatcagtccacagtatcagtctagctccacccaaggaaacaaatagacgagggataacactaaagcacactcgatgcactgaatggagctggaatcaaaggatgaaaatattatttgcccttctaggacaaggtttactttcaaccaggaaagaaaaaaagcaaggtaatgttacctgtccttagatatgggagctacaagtggtgcataccagttaactgccacctcacagtgggcatcaaggtatatcaaaacctgtccaagtttagccttctgagcaccaatacttcgtgcttgaattaaaccttcccttctttcatttcgaaataccttcactaggccattccacagcttaatatattcatccagtttttcttttaagtgttctttattactgaaatcgtcaattaacacaatttctgctaaatatttccttggagtccttttaattacactgtg

SEQ ID NO: 2358 - DNA, 384 bp, Homo sapiens
aatacatgtgggtcaagggtgtgtattttgttttggaagatgctattcctcatgagactgttgtggagggaggcagagcttccacctcgctggagacgcggcttagccggtagagttggttcatccttgtccctggctgcagatggctttgcttgggcttctggtgctgtcaccttgacgaccttattgcggtttatcatttgcttcacccatttttctacttggacgttgaatttcatgaaaaccacatagcaaaaataagctgttaagagaagcaagctttcccaccacatgatgacattatccaggaaaaatatgatcagcatgatcaagtcaacaatgtagaaagacacatctcgaaagagcggccaccatgtcaggttt

SEQ ID NO: 2359 - DNA, 385 bp, Homo sapiens
tttcgtgtggacaacagcgaggagtggaaggatgtgttcatcatctccagcgagcgctccttcaagctggacagcctcaagtgtggcacgtggtacaaggtgaagctggcagccaagaacagcgtgggctctgggcgcatcagcgagatcatcgaggccaagacccacgggcgggagccctccttcagcaaagaccaacacctcttcacccacatcaactccacgcatgctcggcttaacctgcagggctggaacaatgggggctgccctatcacagccatcgttctggagtaccggcccaaggggacctgggcctggcagggcctccgggccaacagctccggggaggtgtttctgacggaactgcgagaggccacgtggtacg

SEQ ID NO: 2360 - DNA, 550 bp, Homo sapiens
ttatatataatttttttttctgggtatatttttgaacatctaaccctagacattatcttcttgagtcaaccctggattcaataaacaacgctagggtttctttcaaatatcttatagcccgcatttgctacccctggccctggttagtgagctgggtagttaggtgagtccggagctggcttcctcactcggtactctctgagctggccctggaccgtgtcggagtagacgcggttccactgaaggctgatggctgtgctgttcatgactcggactttaacttcagtgggcgcagccctgggatctgcaatgtgttgggacagagagctggttatgcaggcaggactctacagttgcttctgacttgttctctgctggcctgtacctgcactccactcaacactgggcattccatgagggcaggggccatatctcctccatgagacagtacttgaaaaagtggtggggaaggctcaggacaaaagggtggcagtctaggtggaagagactgcctacatgttcagagggcactcatttgccccctcctgtg

SEQ ID NO: 2361 - DNA, 550 bp, Homo sapiens; identical to SEQ ID NO: 2360

SEQ ID NO: 2362 - DNA, 1537 bp, Homo sapiens
  misc_feature (1)...(1537): n = a,t,c or g
ctgcaggaattcggcacgaggcgcctcctaccacttccaaccgccaccggcgacagattgaccggggtgtcacccacctcaacatttcagggctgaagatgcccagaggcatcgccatcgactgggtggccggaaacgtgtactggaccgactcgggccgagatgtgattgaggtggcgcagatgaagggcgagaaccgcaagacgctcatctcgggcatgattgacgagccccacgccattgtggtggacccactgagggggaccatgtactggtcagactggggcaaccaccccaagattgagacggcagcgatggatgggacgcttcgggagacactggtgcaggacaacattcagtggcccacaggcctggccgtggattatcacaatgagcggctgtactgggcagacgccaagctttcagtcatcggcagcatccggctcaatggcacggaccccattgtggctgctgacagcaaacgaggcctaagtcaccccttcagcatcgacgtctttgaggattacatctatggtgtcacctacatcaataatcgtgtcttcaagatccataagtttggccacagccccttggtcaacctgacagggggcctgagccacgcctctgacgtggtcctttaccatcagcacaagcagcccgaagtgaccaacccatgtgaccgcaagaaatgcgagtggctctgcctgctgagccccagtgggcctgtctgcacctgtcccaatgggaagcggctggacaacggcacatgcgtgcctgtgccctctccaacgccccccccagatgctccccggcctggaacctgtaacctgcagtgcttcaacggtggcagctgtttcctcaatgcacggaggcagcccaagtgccgctgccaaccccgctacacgggtgacaagtgtgaactggaccagtgctgggagcactgtcgcaatgggggcacctgtgctgcctccccctctggcatgcccacgtgccggtgccccacgggcttcacgggccccaaatgcacccagcaggtgtgtgcgggctactgtgccaacaacagcacctgcactgtcaaccagggcaaccagccccagtgccgatgcctacccggcttcctgggcgaccgctgccagtaccggcagtgctctggctactgtgagaactttggcacatgccagatggctgctgatggctcccgacaatgccgctgcactgcctactttgagggatcgaggtgtgaggtgaacaagtgcagccgctgtctcgaaggggcctgtgtggtcaacaagcagagtggggatgtcacctgcaactgcacggatggccgggtggcccccagctgtctgacctgcgtcggccactgcagcaatggcggctcctgtaccatgaacagcaaaatgatgcctgagtgccagtgcccaccccacatgacagggccccggtgtgaggagcacgtcttcagccagcagcagccaggacatatagcctccatcctaatccctcnnnnnnnnnnnnnnnnnnnngttctggtggc

SEQ ID NO: 2363 - DNA, 974 bp, Homo sapiens
aattcagcgcttgatagttcttcctctgctctgcttcccttcggaggaaaatttcaggctgaaggtttagcgggtgccgcctctaaagagagcaatcactacacttatggctgggattttgcgcttagtagttcaatggcccccaggcagactacagaccgtgacaaaaggtgtggagtctcttatttgtacagattggattcgtcacaaattcaccagatcaagaattccagaaaaagtgtttcaggcctcacctgaagatcatgaaaaatacggtggggatccacagaaccctcataaactgcatattgttaccagaataaaaagtacaagaagacgtccatattgggaaaaagatataataaagatgcttggattagaaaaagcacatacccctcaagttcacaagaatatcccttcagtgaatgcaaaattgaaagtagttaagcatttgataagaatcaagcccttgaagttgccacaaggacttccaacagaggagaacatgtctaacacgtgcctcaaaagcactggggagttagtagtgcagtggcatctgaaacctggggagcagaaagcacatgagtcctaatgccccagcagcttccgattggaaaatgcaaattgtttttatttaaagatggtgagaaagtgttttcattaaaatatgttttcaaaaccattttcaggccgggcacggtggctcacctgtaatcccagcactttgggaggccaaggcgggcagatcacctgaggtcaagagttcgagaccagcctgaccaacatggagaaacccccatctctactgaaaatacagaattagccaggcatggtggcacatgcctgtaacccagctactcagggaggctgaagcaggagaatcacttgaacccgggaggcagaggttgcagtgagctgagatggtgccactgtactccagcctgggtgataggatgagactccatctcagggga

SEQ ID NO: 2364 - DNA, 1867 bp, Homo sapiens
ctatcaaagatcacgatgccagttatatgtaatgagcctctgagcttcatacagcgcctaactgaatacatgtagcatacttacttcatccacaggccaagttcactctctgatcctgtggacaggatgcagtgtgtagctgcgtttgctgtatctgctgttgcttctcagtgggaacggactggaaaacctttcaacccactgctgggagagacttatgaattagtgcgagatgaccttggatttagactcatctccgaacaggtcagccatcacccaccaatcagtgcatttcatgctgaaggattaaacaatgacttcatctttcatggctctatctatcccaaactgaaattctgggggaagagtgtagaagcagaacccaaaggaaccatcaccttggagctccttgaacacaatgaggcatatacatggacaaatcccacctgctgtgtgcataatatcattgtgggtaaactgtggatcgaacagtatggcaatgtggaaattataaaccacaagactggggacaaatgtgtgttgaattttaagccatgtggcctttttggtaaggaattacacaaagttgaaggctacattcaagataaaagcaaaaagaagctctgtgccctctatgggaagtggactgaatgtttatacagtgttgaccctgccacgtttgacgcttacaaaaaaaatgataagaaaaatacagaagagaagaagaacagcaaacagatgagcacctctgaggagttggatgaaatgccagtgccggattctgaaagtgtattcattatccctggaagcgttcttctatggcgaatagccccacggcctccaaattctgcccagatgtataattttactagttttgcaatggttttgaatgaagtagacaaagacatggagagtgtgattcccaagacagactgcaggttacggcctgacatcagagccatggaaaatggagagatagatcaagctagtgaagaaaaaaaacgacttgaggaaaaacaaagagcagcccgcaaaaacaggtccaagtcagaagaggactggaagacgaggtggttccatcaaggtcctaatccctacaatggagcacaggactggatttactctggcagctactgggacagaaattacttcaatttgcctgacatttattaaaatgcatacaagtcagggtgtttggctaatctacaaataagtcttaaacctatgtttttaaatttttttcccttggtttctacttatcttttaaaaaaaaaatgaaaaaacactcatgagataactgcatttcacccaacaaaagcagggtataaggcgatattggtgatgaaagtcttaggaaaaatgcataattttgctataaaatgtacttatttggaatactattttatatagaggtaagagaacactgctggggaatatgctttttatggttgctgttgccatatttactgaaggtttatacctaaatgtaactttagctttatggaactatatagtaatcccaaatcaagttattttgaatatttttatgctgtcatgcttgaatgttttagatgtaacctttgacatatttagaactctcctcctatacaatgtttattctcagatatagaggttatgtcattttataaagacttcattgataagatggcttttattcatactaatcctcccaatgttaccccttccatcttccaagaagaaaaaaaatgcctgaatattcagaatagatatttctgatttgaaaattctaaagaattaaactggaaaagtatttcatttacttagtgctctgaatttacttttacagttttctgcagtcagtatcattaaaatggttaagtttaca

SEQ ID NO: 2365 - DNA, 497 bp, Homo sapiens
tttttttttttttttttcccaaatctttggctgtattgcaatggttgtttcaatttgtaatctccaactaaacatttcctaaccatggattaacaatatagttactgactggtttcttttaacagtatttatccaacataacaaaataaactgcaatttgttatagttttttttttttttacaaaacattttataaatatttttacaaaatgtatacaaagcaatttcaagtgagacgtactatacaaatgaaggtatttaagcaaataaagcccacaccacactgacagcgagtgacgcgtcctctttaagtaaagtcagtctgtaaggcctccctaatctaacagaatctactaaatccttcagagctaaaatatttctttttcataattgccaaattaaaattttgcttcatcttcggggaagtacttaaggacacagaaaatcaaatgccttaataacaaattcacgccttttcccacaacagaaaaaaaaaa

SEQ ID NO: 2366 - DNA, 1660 bp, Homo sapiens
ggggcaccagctcaggactgcatctgcctgccatttcccttccactcctcctttctggagtctgacattagaaagccagcgagaaggaagattcaaacaaccaaccctgatttcctgcttctccttttcatgagtgttcctgtggtctctgcacctcctttctgtcccccggcagagggcagtagagatggccggcccaaggcctcggtggcgcgaccagctgctgttcatgagcatcatagtcctcgtgattgtggtcatctgcctgatgttatacgctcttctctgggaggctggcaacctcactgacctgcccaacctgagaatcggcttctataacttctgcctgtggaatgaggacaccagcaccctacagtgtcaccagttccctgagctggaagccctgggggtgcctcgggttggcctgggcctggccaggcttggcgtgtacgggtccctggtcctcaccctctttgccccccagcctctcctcctagcccagtgcaacagtgatgagagagcgtggcggctggcagtgggcttcctggctgtgtcctctgtgctgctggcaggcggcctgggcctcttcctctcctatgtgtggaagtgggtcaggctctccctcccggggcctgggtttctagctctgggcagcgcccaggccttactcatcctcttgcttatagccatggctgtgttccctctgagggctgagagggctgagagcaagcttgagagctgctaaaggcttacgtgattgcaagggttcagttccaaccatggtcagaggtggcacatctgctcagccatctcattttacagctaacgctgatctccagctccagcgatggaacccactacagaggaggtggggcccctgtgtcaaagaggccgaggggcagcaagggcagccagggcacctgtgacttcttagtacaagattgtctgtccttcaggacttccaaggctcccaaagactccctaaaccatgcagctcattgtcacaccaattcctgctttaattaatggatctgagcaaatcttcctctagcttcaggagggtggggagggagtgattgctgtcatggggccagacttccaggctgatttgccaaatgccaaaatgaaacctagcaaagaacttacggcaacaaacgaggacattaaaagagcgagcacctcagtgtctctggggacatggttaaggagcttccactcagcccaccatagtgagtgggccgccataagccatcactggaactccaaccccagaggtccaggagtgatctctgagtgactcaacaaagacaggacacatggggtacaaagacaaggcttgactgcttcaaagcttccctggacctgaagccagacagggcagaggcgtccgctgacaaatcactcccatgatgagaccctggaggactccaaatcctcgctgtgaacaggactggacggttgcgcacaaacaaacgctgccaccctccacttcccaacccagaacttggaaagacattagcacaacttacgcattggggaattgtgtgtattttctagcacttgtgtattggaaaacctgtatggcagtgatttattcatatattcctgtccaaagccacactgaaaacagaggcagagacatgtaaaaaaaaaaaaaagg

SEQ ID NO: 2367 - DNA, 614 bp, Homo sapiens
atggcggcggtggtagctgctacggcgctgaagggccggggggcgagaaatgcccgcgtcctccgggggattctcgcaggagccacagctaacaaggcttctcataacaggacccgggccctgcaaagccacagctccccagagggcaaggaggaacctgaacccctatccccggagctggaatacattcccagaaagaggggcaagaaccccatgaaagctgtgggactggcctgggccatcggcttcccttgtggtatcctcctcttcatcctcaccaagcgggaagtggacaaggaccgtgtgaagcagatgaaggctcggcagaacatgcggttgtccaacacgggcgagtatgagagccagaggttcagggcttcctcccagagtgccccgtcccctgatgttgggtctggggtgcagacctgaggagcgctgcgaccctcctaggctattgactgttaagtcctcaggtttggcccagattccagttcgtgcctctgaggtccaccagagggcgcatgaagcccaggctgttgccaaaccctaccctgccccacaccaaggagccagccaaaggcaaataaagttattgagtgtttagtaaaaaaaaa

SEQ ID NO: 2368 - DNA, 5007 bp, Homo sapiens
gagaactctcttcagaggtcgaagacgacgagaagatgacaggatctcaagacctcatccttcaacagctgaatcaaaggctccaacaccaaagtttgacttattagcctcaaattttccacctttacctggaagttcatcaagaatgccaggtgaactcgttttggagaataggatgtctgatgttgttaaaggtgtctacaaagaaaaggataatgaagagttgacaattagttgcccagtgcctgcagatgagcagacagaatgcacttctgcccagcaactcaatatgagtaccagttctccatgtgctgctgagcttactgcattaagcacaactcagcaagaaaaggatctaatagaagattcctctgttcagaaggatggtctcaatcagacaactataccagtttctcctccaagtactacaaagccatcgagggcaagtactgcttcaccatgtaataataacataaatgcagctacagctgtggctctacaggaaccccgaaagttaagttatgctgaagtgtgccagaagccccctaaagagccatcttcagttcttgtgcagccactacgggaacttcgctccaatgtggtgtctcccaccaaaaatgaagacaatggagctcctgagaactccgttgagaaaccacatgagaagccagaagcaagggctagtaaggattattctggcttccgaggcaatataatccccaggggagcagcaggaaaaatcagggaacagagacgccagtttagccatagggctatacctcagggagtgactcgacgtaatggcaaagagcaatatgtgccacccagatcaccaaagtaaaaaacaacaaaactattcaaaaacttcactctcttcccattaaacttgaactgtggctatattgaactgttttggaggggagggggtagccaggaaggaaacaagagaaagtacgtccatttcattatggattttggagttgtgagtgataggatcccaaaattcatctctaatgtggtttttaaatgctggaggattccaatcaatataaatatatatatatatatacacacacatatataaaaagtataatttttctatttttgtttttggttttaatttgcagagatttgctgccaggaatcaattttgagggttcagatttagcttggaagaaaaaaaagaaacatacatccttcagtataggagatgagggaatgagagaaaatattttttgaagaagcatttctgtaaaattagaaattactttttttaatctatttaaagtttggcttgaagaatgccatctctgactatatggccttgtattgcaaagcagatcagtggctggggtgcctgttgtgggtgtgagtgtgtacaagagcgattgaagccaaatctgttgtcatgttagtaaatgatttgaaaactgaatgtaatacttgagtagatttttttttctagtttgaaatttagtctgtctttttgaccttactaatatttcatttaacaagttgtaaaactctgattgtacttagagatgtgactaccaatcagtttgatactcaaggaaagggggttattcaagaaattgaaaatttcatcttggacctcagtgcatcggtcaaatggatttcagaggtttaaacttccctgtgattccccctgaatacccccaaaatgagaaacaaaattttttttcttactccatttgttactctctgttctttgactgcccacccacagaaaagcaaaataaccaactacctactcaattgtgtgtttgtaattgctttgagcagtctagtcaaatcatataaattgttctaaatttcagaattgaacattgaagtattaactcttctgttcacacatttagaattttagctcccaagatggtagggcagactgaccgtacagtaatttatttgtcgttagtgttaaagattaagcatagtaactgactcttaagtgttaaataatgtagaagtaaaaaaattttttttaaaggcttaatttgggaggggggacttatttctgtttacagtgtattaccttccttccctcctcttctccccccacacccaacaaaatacagtttggaattcactgaaacagtaccagcaagtcatgagattttttagtaaagatgagaaagatggttgaagaaaattagtgcataatttctcagtgaataaagttgtagctctcatatactaaatagacaagtttacatgctgttatttagaaaatgactaaaatattaaaaaccgtgttgtgttaatctgttttaagtcataccatgttcagagttctatgtaaggtgggttttatttttcttttaagggatagtttgtaatagtaagaactgtcccatatgttagtaaattacatatgtacaaattggaaactgtgaaattgtggaacactgggaaagcacccattgtgacataggagtaaacatcttagtaatatattaaagtgaatgtaaatggtggttaaaattacattactgtgaaattcatcttccaactctaagttaagctttggagatacatgttagtggttaactgttaagagctttgaaaacactgcacatatctgtacaagccagaattactatttctttgacttattattagcttggcagttgcttttgatttgattgttttaatgacaatgggtatactaccctatattactcaggttgaaactatttcatttctacacactatttttaaaaattgcctactaggtgaaacataacaataaaactacctgtgctgaaatttgggggaagtttaggtcctttaaaaaaacatattaatcattgactacatctatgataaaagtgcttattttggtttactaagataatgcagttggtggaaatgataaacgttttaagtgttaacatcctttgaatgcgttggatttcagagaataaacattttgtaaaaatcacttggtaaggattataaacttaattactgcacttaaaatgaaacattactttttttaaacaatgtgtcacaaatgtaggtctgtattacttgtatgcttgtgtgacttactgttagtccagctctaaaaatttaaaggttgtaattgaaatacaagaaaagagccttcttttagaagaaagcaagtatatttttgcttttacttcaaatgttatttaaagtagaaatttaatttgtagatataacctttaaaaattttctcattaagacaatgtttttaatttaatttgcctcattacatctaatagttcccatttgatggcatgtatagggaagagtgagagagtgtgtgtgtgtgtatgtgtgtgtaatatttatatatattcacagtatgtatttagcatttattttattacagcagatttaaagtttgtatctaaataatgcctatgagttgtgtgaagctcttggctttttttccaacgttactttgtaactaatgagggtggatgttcattgtagtttatttatttggttctttagatggaggaattttaaaaaatcaaatgttcctccttcaccttaatgaacttgcaattccctgatctggtggaggctaaaagtaggtataaatgatattgaatgttgggtatagtgatactctgccatagttcttactgcatgaagagaacaagagtcacacaagttcaccactttgcacttcatagagaaggtacatagagacattgcaaaacctgtctccatttgctatcctgataattaaggttttcataatacctagggcctgtctctgagtaattttaattttgccaaatacactgacatttaaaatagtgatccatctaaatttttttcagctgggttttgaggaatataagagctttcaatgataaaggtttgttgtagttgtcttatgtgctgaatttgcagatgatcagatgctgtgcagaattctgatttatttttgtttcctaaaattaagatagcttgaatattatttcacattcctttttcttttttaaataaacaggtttgctttggaaaggcttaatgatggaatgttagcatcttcactagggtaaagaagaacaaaaagaatgttgctggaacgtaaaatagtatttaaaagttaatgaacacttctctagttttcttagttatggccttaataattagtctcttggcttaaatgtccactggttttactttgacacagttgaacaacactggggttaagtctctggtatttaggctggcaatatatatattaaccatattttaaaagtaccaattttgtttttacagaaaagataaaactcaaaagagaacagtgtattccttctgaggggcttttataaattattaactataatatatgatggattttttcctaattttttatatttccttacaattttgggggccattaatttaactttaggcttttgggcatatgctagtctgagcttccgaaaagatacatatatgtttcccttttcattagctgaatgaggatattttaagaagttgaaagagaatttattttcaagttgtgagtaaatcctcctttgaaattcacctgattattagataacttaaagtttatttttaaaagctgacaactttttatgaatcttcgagttgacagttcctaaaagcgtaactcagatattaatgggctgtgtattaaatggttttattttcagttttgcagcacagaacactgttgaaatatccatatcaacttgatttttttaacctaattcaggtgtcctttgcatctcttaaatgttgggggtgggggtcagagccagttatccggcttctgttttgtcgattgcttagatttgttcctgttgtcaaaactgttacccccaaaattggtgtgacacatgctcatgcataaaatgttaaaatgagtacatccttgtatttgtatttgttttcaacatcgccaaggtgctatgggaaattaacaaaattagaaaaaaaataaaattattaaaaagcaaaaaaaaaaaa

SEQ ID NO: 2369 - DNA, 1110 bp, Homo sapiens
ttttttttttttcctgtctgtaaccatcagatttaattttaaaatttattaggcagtaggcaaacagatgttggggtagatgacctaaaagggttttcttttggaataatattttttaaaaaatcaaataactgttatcactttaagttgcatgagcctgaagctgcacctggagaggaatttaattttcatgacatgcaaaactgattaggcagtgaactctttcctcccgcttcccctgaacacatttataaacttcaacgggggtgaattccatctaatactttgaaaaccatttctcatctcacagtttacccaaatcatgtgcatgactgcaagaggaaataaacaagaaatctttaagcatagataagccacaatggatagttaatcttgtacagacaatccagcattaaggctaatttgatcttttaaacattttatgggaaacagctgttgagttttctctagaaaagcccacaaggttccataaccccataggcatacagcctcgacaggcagggctccatcaggctcctcttgaactgggcactccttcacggaaggcaggaatgcacgtgtcttcacttcctgctgctctgcacgcacgtcacgatatctggcagaaggtggtttctgttttccttggtgacattaaacaccttcacatcctttctgtttctgatttcttctacaagagccagtggctttcctttaggaactgggattgtgccaaggattatagtccctggggtagacagcgtctgacgaacagcttgaatgaaaagctgactgaagagctccatcttcccaatctcatcgatgacgcacactctttgccctgggccactgctgcagtcggcattcctcaagacgggtagtgccaactgctcaaaagaagtcaggtcgaccacatactgcccaactcggcattcacgttttccaggtggaggctctaacctgggggccccgttaggaacacgtgccgggccatactggtgggcgggggtaggggttgcggtcaggggagcagtccaggttggggtcgcaattcaggtcaggtccggaccagggtcgcgactcaggacccgcccaccgcccacgtgccga

SEQ ID NO: 2370 - DNA, 1306 bp, Homo sapiens
atcattacgcctagcttggcacgaggccgtaggactggttccggcgggctggtgaggaatggagccggtaggctgctgcggcgagtgccgcggctcctccgtagacccgcggagcaccttcgtgttgagtaacctggcggaggtggtggagcgtgtgctcaccttcctgcccgccaaggcgttgctgcgggtggcctgcgtgtgccgcttatggagggagtgtgtgcgcagagtattgcggacccatcggagcgtaacctggatctccgcaggcctggcggaggccggccacctggaggggcattgcttggttcgcgtggtagcagaggagcttgagaatgttcgcatcttaccacatacagttctttacatggctgattcagaaactttcattagtctggaagagtgtcgtggccataagagagcaaggaaaagaactagtatggaaacagcacttgcccttgagaagctattccccaaacaatgccaagtccttgggattgtgaccccaggaattgtagtgactccaatgggatcaggtagcaatcgacctcaggaaatagaaattggagaatctggttttgctttattattccctcaaattgaaggaataaaaatacaaccctttcattttattaaggatccaaagaatttaacattagaaagacatcaactcactgaagtaggtcttttagataaccctgaacttcgtgtggtccttgtctttggttataattgctgtaaggtgggagccagtaattatctgcagcaagtagtcagcactttcagtgatatgaatatcatcttggctggaggccaggtggacaacctgtcatcactgacttctgaaaagaaccctctggatattgatgcctcgggtgtggttggactgtcatttagtggacaccgaatccagagtgccactgtgctcctcaacgaggacgtcagtgatgagaagactgctgaggctgcgatgcagcgcctcaaagcggccaacattccagagcataacaccattggcttcatgtttgcatgcgttggcaggggctttcagtattacagagccaaggggaatgttgaggctgatgcatttagaaagttttttcctagtgttcccttattcggcttctttggaaatggagaaattggatgtgatcggatagtcactgggaactttatattgaggaaatgtaatgaggtaaaagatgatgatctgtttcatagctatacaacaataatggcactcatacatctggggtcatctaaataataattaaagtggctttcataatatgtaaaaaaaaaa

SEQ ID NO: 2371 - DNA, 977 bp, Homo sapiens
ggcacgagctccgggctgggtggggatcggctggctgcccccggcccctcacctccatctttctacccccagggtcgcggcgagcgcgcctatgacatctactcgcggctgctgcgggagcgcatcgtgtgcgtcatgggcccgatcgatgacagcgttgccagccttgttatcgcacagctcctcttcctgcaatccgagagcaacaagaagcccatccacatgtacatcaacagccctggtggtgtggtgaccgcgggcctggccatctacgacacgatgcagtacatcctcaacccgatctgcacctggtgcgtgggccaggccgccagcatgggctccctgcttctcgccgccggcaccccaggcatgcgccactcgctccccaactcccgtatcatgatccaccagccctcaggaggcgcccggggccaagccacagacattgccatccaggcagaggagatcatgaagctcaagaagcagctctataacatctacgccaagcacaccaaacagagcctgcaggtgatcgagtccgccatggagagggaccgctacatgagccccatggaggcccaggagtttggcatcttagacaaggttctggtccaccctccccaggacggtgaggatgagcccacgctggtgcagaaggagcctgtagaagcagcgccggcagcagaacctgtcccagctagcacctgagagctgggcctcctctccagaatcatgtggaggggccagaggcctgccagacccccagctgggccctgctcaccccttgttgctgggcttggaggggcctcttgaggaacttttaatttgcaggggtgcccgctatggacggggcattccagctgagacactgtgattttaaattaaatctttgtggtctttgctctgcgtctgggacaccctcccttctgcaccatgacagcgtgtacacatctgtgtttcacaggccccttctgctt

SEQ ID NO: 2372 - DNA, 645 bp, Homo sapiens
  misc_feature (1)...(645): n = a,t,c or g
ggcacgagagcaggtggaatggtactttgccacgattctagtacagatgaaatctgatagttacttcccccaaattatgaagtctggaatttgcttaacggtagtagttaggggtctatacatatgaaaaaagactgaccatgacnnnnnnnnnnnaaccgtttaaagggtttgttaattatttattaagataaacaatttcttagcccacatattcatgtttcacagatagttcaggaacacaggtacagtgacaaacttttatgtaattcaacccaaagaaatactttatgttccaaaatcactttgtactctgagagatattagccttcctcacctcaaattctttaattcaattataatttctgtagaaatctgcatatgccttctttcttggtcaggccacagcaaacttacagagagctgcaaccccagggttataaggaatgctccaacaatatgaaatgacagatgcttggccagaaggccacacatcccaggttacaccaaggcactgagagccatggtagttattgtccttgacagggatgtcatcatcaacactaatgtctttcccggatgatggagaaaaggaccaacttgataattattgaagctcgaagatacttactatcaacttcgtcg

SEQ ID NO: 2373 - DNA, 408 bp, Homo sapiens
gcgcttggctcctgtggaggcctgctgggaacgggacttctaaaaggaactatgtctggaacgctgtggtccaagggcatttttgctggctataagcggcgtatccggatccaaagggagcacacagctgttcttaaaatcgaaggcagtttacgcccgagatgaaacagaattctatttgcgcatgatatgcgctaatgtatataaagcaaacaacaacacagtcactcctgtcctgacaccagacaaaaccagagtcatgtggcgaaaagtaactcaggcccatggaatcagtatcatggttcgagctcaattccgaaccaatcttcctgctgatgccattggacacagaatccgaatgatgctgtgaccttcaaggatgtacactaccgaaccatcctaaatgca

SEQ ID NO: 2374 - DNA, 5769 bp, Homo sapiens
tttcgtcaggaatttcccttcaaggtagcaggagatgaacgcgtgctgctccaggattttacagaactgattctgcagcaaagacaaatgttgcctgtatttgccagatagtataaacaggagcaaaagttgcacagctaaaccaggggctcattcccaggacagacatgcagttatggattccgaaagacaagtcaaggacactgatgacattgaaagtcctaaacgcagtatccgagacagtggctacatcgactgctgggattccgagcgcagcgactccctctctcctcctcgccacggcagagatgattccttcgacagcctggattcctttggctctcgctctcggcagacgccttcaccagatgtagtcctcaggggaagcagcgatgggagaggaagcgactctgaatccgacttgcctcatcggaagctgccagatgtgaagaaggatgacatgtctgcacggcggacttcccatggtgagccgaaatcagcagtgccttttaaccagtacctcccgaacaaaagcaatcagacggcctacgtccccgcgcctctgagaaagaagaaagcagagagagaggaataccgcaagagctggagtaccgccacctcccccgctgggttggggaagaaggcccttcaagattacggtccgagaacttcctgtgtctgaatgacgcagagagcaccagcatgtttgacatgcggtgtgaggaggaggccgcggtgcagccgcacagcagggcccgccaggagcagctgcagctgataaataaccagctgagggaagaggacgacaaatggcaagatgacctggctcgttggaagagtcgtaaaagaagtgtttctcaggacttaatcaagaaagaggaagaaaggaaaaaaatggagaagttactggctggagaagatgggacaagtgaacgaaggaaaagcatcaaaacctacagagaaattgttcaagaaaaagagcggagagagagagagctgcatgaagcatataagaacgctcggtcccaggaggaggcagaggggatccttcaacagtacattgagaggttcaccatcagtgaggctgttctcgaacgcttggagatgccaaaaattctggaaagaagtcattcaacagagccaaatttatcctccttcctgaatgaccccaatcccatgaaatacctgcggcaacagtcactgcctccacccaaattcactgccactgttgaaaccaccattgctcgtgccagtgttctggataccagcatgtcagcaggcagtgggtctccaagcaaaactgtcactcccaaagcagtgcctatgctgacacccaagccttactcccagcccaaaaattctcaagatgttctgaagacctttaaggtagacgggaaagtcagtgtgaatggagagacggttcatagagaggaggagaaggaaagagagtgtcccacggtggcacctgcccactccttaaccaaatcccagatgtttgaaggtgtggccagagtgcacgggtctccactggagctgaaacaagacaacggtagcatcgagatcaacataaagaagccaaactctgttccccaagagctcgcagcaaccactgagaaaacggaaccgaatagtcaagaggacaagaatgatggtggaaaatcaagaaaagggaatatagaacttgcctcatcagaaccacagcattttacaacaactgtgactcgatgcagcccgaccgtggcctttgtggaatttccctccagcccccagctgaagaatgatgtgtcggaagaaaaagaccagaagaaaccagaaaatgaaatgagtggaaaggtggagttggtgctgtcacaaaaggtggtaaagccaaaatctccagaacccgaagcaacgctgacatttccatttctggacaaaatgcctgaagccaaccaactacatttgccaaatctcaattctcaagtggattctccaagcagtgagaagtcacctgttacgacaccttttaagttctgggcatgggacccagaagaggagcgcaggcgacaggaaaaatggcaacaggaacaggaacgtttgctccaggagagataccaagaaggagcaggacaagcctgaaagaagagttgggaaaaggcccaaaaggaggtggaagaggaagaacgcagatactatgaggaggagccttagattatttgaagaccctgtggttccatttactgtttcttcaagttccgctgaccagctgtctacctcttcctccatgactgaaggcagtgggacaatgaataagatagacctgggaaactgtcaagatgaaaaacaagacagaagatggaagaaatcattccagggagatgacagtgacttattgctgaagactagggaaagtgatcgactggaggagaagggcagcctaactgaaggggccttggctcattctgggaaccctgtatcaaaaggagtccatgaagaccatcagctggataccgaggctggggccccacactgtggaacaaacccacagcttgctcaggatccatcccagaatcagcagacatcaaatccaacgcacagttcagaagatgtgaagccaaaaaccctcccgctggataaaagcattaaccatcagatcgagtctcccagtgaaaggcggaagtctataagtggaaagaagctgtgctcttcctgtgggcttcctttgggtaaaggagctgcaatgatcatcgagaccctcaatctctattttcacatccagtgtttcaggtgtgggaatttgtaaaggccagcttggagatgcagtgagtgggacggatgttaggattcgaaatggtctcctgaactgtaatgattgctacatgcgatccagaagtgccgggcagcctacaacattgtgacacggctttcaagcttccggatcactcaccatttctttactgagagtgtcccctggcaactgcttaacaaaatcccaagctcaggggcttctcagcatttacctaatttctgaaaggctcttctgaaaggtggtatctgttctttcgtagcacagtgtttatgtttttcctgtttattgttttggttttttttttttttggctttggcacagtatacacaaaagaatatggggttgtaatgatcctgaatagctcaaaaaaggttttagcatggtcaaacaggcttatggtttaaaatgtgttattctcttctttgggaattagctaaatgatgcaataaacctgttttgttttagaatgtctaggaattaaacactttatgtttacagaattgagctgcagaaagtgcaagacatgccaatttgagacacacggtcttctaagactgaaggataaatttaatgcatttcagaaactaaacatcacagcaagctctatctctgagctataatttgtttttaatgcaaagacactagtttgataatatatactgtaatcctgaaacatttgtgttacttacctttggaggtagaaattataccaataaattattgcaccgttagtattagattctgtgtaccttggaagttatgtcattaatataggctggttcatcaaataaagcaaaaccttgcaatatcagctagatttacactccgggacgttgcccaaaggtaggaagaaagcagagggaaatatttcagtcatcatttccaaagtcattatcaaaatctgtgaggaagtttaatcttccaaagagtcaatgtcagacatcaggcctctgttgcctgcttctctcgaggcactagattaggagtcttcaataagagacttaacatgaggtatatggaagatgaggcaccgagataagttcatcattaggtgtgagcactgctcacccttgctggcaagttctccttaagggcctgaagcacaggtgtccaaagaaaagcgttaagtccatcttaatagaatctatgtggtatatgatgtggtcagcccctggtctgtgatcagcaagaacctacagcacagattatgccctgcccacttcaatgaatacctactctcctccattctccatcactttttttgctatcaagaactccggaccttgcccatggagaagtttagagaggaactcttgtggagagctggtttattttctgccctgtgcgacgagtttcagctggccaagaaaggagtcaagttattaaaaagcatcacaatgtagatctccaggctggttttttgttttttgttgttaagactggggaaagggggactatttattctgccttaaatcaatggcaaataagtcaagatgacattttgtgaatgtagactatggatacactcctaatagattgatgtagtcataaaagggggtcaagtagatgtttttctgttatgtaagcaataatttttccgtgtcttattgagtatggctagcgattatttattacatgctagatgggttctttgcatgtgggttccatataggtgcagaaatttcctcagccactggagggatttcgaccatatttgtcatttggatgagctgttattagattgaaatctacacatcatttcattaaaaattgtgccttagaaaaacgcaaagctgtttgcacatgggcgataaattatggatgcagtacattgaaggagagatgaagtcacttccccaagtttccaagacttctcatggaggtgtttgctgttttacaggaaaaaataaaaataaaaaaagaaaaaaagaaaaaattaaaaagaaaaattgttttgaaaatgtacagatcaagtccaatattttgattatccacctgcatgttttattaaatattttgataatgtggatgtttacactttgcatgatattagcagagtaccactagtaatgcacaaacatgtacaatatggtcattcataaccgatttttatagaatactttttacatgtgcaactccatccgttatgtaaggattacatgaatattgcacattcccttctggtttcacaaacccatttatacatatttcttagtgaggctcattgtacatgtattgaagctagaatcgagtcaagaaaaataaagccccattctccaactgcaaaatgtgctttcccataatgaacactagtcaccagcacagaataatctccaacattttctaaattctaattgccaactgtttctatttatatttgatttatatttcatttggagtctgttacatggcagcttaggcagactagatcttgttttttccaatgcagcataatgagtatgatctatttcttttcaaataatctttgagatcccaggaaaaaaaaaatgctctgctccattgagctataatgtaaatgtgtttgtttaaaaaacaggtgaggcaagtgagtgatttattgttcctgaggaagtatatctgattttttttctcatactccaaaagctagtccctactctttaataaaaataatgggtaactttttgtttttcactagcgaacttccatgacatttcctttctatgtagggggattaatgcaatacatattatagttatctatacacagtgtaagatttaacaaactgaaatgatccacctcatatgtgagtccgtccaaaagatgttactgctctgggtgggccagtgttctatatcggttatactaactttcatttaaagtatttattctaaaatgcctctgagaaacagtaaaaaataaaaacaacaagttgtctaaaatgcaacagcttttatagtaaatgtacatttataaataaaatactcaaatcaaaaaaaaaa

SEQ ID NO: 2375 - DNA, 368 bp, Homo sapiens
cagaggtcacagcctctagagaagggagaggggcgtgtgcatgggagtgtggctcatctcgggggccatggggcctcctgaggggcacctttgcccctgtaagggcggctacgccctgatcctgactccccaagggctcactaagacacaggccatagtgccccctcccgttcacctaccacccaagtcctcatgccctccgagggcatgggcaggaagggctactagtatgtgaacctcatcttactcgtcagaataccaaccacagaccccataagctcttgttaccctgcctccacgatcatactacctactgacacacttgctcacattaacgcatttacatcatcaaatcctattcgaacccg

SEQ ID NO: 2376 - DNA, 404 bp, Homo sapiens
ggcacgaggaatcggcagcttaggcagggaccactcggggtctggtggcggcacaggcatggcgggcgcgtgggtgcggaaagctgcggactatgtccgaagcaaggatttccgggactacctcatgagtacgcacttctggggcccagtagccaactggggtcttcccattgctgccatcactgatatgaaaagagtctccagagattatcagtcggcggatgacatttgcactatgatgctattctttgacattcgtgagatttgcccactatgtacaactcttggaactggctaatgcttggatgccacactgctgtagactttgaccagcttatttctagtatgccgtgtatctcacacgggatgactgcctcggcgtctgcgctatgactcggaaccgg

SEQ ID NO: 2377 - DNA, 4879 bp, Homo sapiens
ttttttttttttcctggtgcagccagattgttctaacttttgaacaaatgagcgtggtcagtaatgtacaataactcttgagtctgttactttggcctagctaagcccatctggccctcgggcatcctgcaagatgacagacagaagagcaagggcactatcagaaatggaacaggctgccccctactcctcccagcctctaccagtacacagagacagactggagatagagcattcgcagccagttggcatcttggttcttttgtcttctgaaaataaaaataagtgcttgtcttgtctttggaggtcaaagagaaccgcactaatttatttcctcgaggggggcttttctgggagggagaggatcctcagtcctgttgcccaaggtttcacgctgtttgggccacacggcagggcttttcttctgggatctggtctgcacgtccagagatgatggaggaattgcatcagcatcatatgcacagtgaaagggtggctcttgtccagagaggcccattcccgggcctggctacatggcctcagggcctggcggcagtttgaagagtctggctgcagataggagctttccttatgtgtctctcctctgtgatgcccggcctcctgaaggcaagtgtgagacagagaaggcacttggctcaagtgtgctgaagcccgcggtggagagggtgccggcgtacatgggcagaccgatggaaatgagccaatctgacacagaccgaaatgcacccaggagagacgggctttcggcagatttccgtgagtccaccacttggaatcgccatgcggtgctgcttccgaagctgcttcacccggatctggtccatgttggcggcgacgtcccgctcgggctgatccaagtcctctgcgtatctctgcaccagggcttcaaggaaatcccacagcggccatgccttaatcaagaatacggctccctccgtgaagatcgaatgccttcagcgtgcaagcttgttttcagtgagcgtttctagatccactccccgggcacaggagaccttccctggtcaaagccgggcccagcttcacaccgtgctcctggaggcttgtgttctcggggagctctgagagccaggggggcggccttgtgcttggtgggctgccaagcgcctgccctgagagaggcctgggagccagtgctgggggacagtcgctagggctggtggggctggcggggctgccccttttcactggcaggcatggcgcatcgggactggggagggccccactggggcccatgggaacagggtggagtccgttagcaaggcgttctctgctctttttggcaggaacaggtggaggctgtgatggaattttgggctgcattctctgctcagcatctaccccttctttggtgcccaggggatggtgtgttccttcaaactcgtgtccttttctgtggccctccagaggcgtccttgctaaaccgtgtttagctccaggaggctgagcatcatagtttctgggcaaacactgagggggtgacaggccgcgaccagaggctgcgattgagccctccagtttcttagttgtcaatttctgaggttcagaaaatctcttgctttgggtcagtagcaatgcattgtcgacagcagagtcttgctccaggggctgggccttcgtggaagaggcggtcgtcttctgtggcacttcaggtacaatctgagggggcggttctgtcacctcggtaggcacgtcttgctcagcaccaggctccacttgaaggtcatccagggaatgggatcggggccaagtgtccacagtctgggggccctcccagggtctcaacagctccggcaagatggaaaactgggaggcttccttcggtttttaattcaaaaccagtcaacacccaggtgggtcacagctcttggacgtgtcctggggcaaggccaccacccagcctgccctcctcctgtccctgcttcagtgcatcccctgatttcattaaaggcaatgttgggtaattgcccaactggtttctgctaaaagccttcaagctgggctcggtggatgacttggcagataggaggctagctttccgagtcttgccgttttccaggttctcactgctttcgtagcatcatgagtctcggggtgagcatccactcaggccctggctgtcaacgagcagcttctcctgggatcctgactggtcgctgttactgtcatactcttgtaacagctccactgctgtcaagagatcagctctgtgctccgggtccctgatatttaactcatccaagtcttcctcctccagcagcttaaaggtgtccaaatcttcatatccattgaacaggaaagtgggcatgtgctcttttaggttaatccgatccaggagatcctccacagacttgggctggggtggtcgtcctttccgacgcctcctggtggggcgtttgggtttctcctccgtcttcactgagcacgtccacgtagatgaaattgaacgtgccgactttgttgttcagcaggcccatccaggtccccatgggtggcttgctgattatatcgatgatatctcctttcttgagcttgagtgagtctgtgtcatagggactgggggtgaagtcggtgtgcaccctggcacgcccgcagaacgggcctcggtaaggcggctcttcgtcatccccatcttccgacttgacgctttcccggttgctggttgaggaatcagtggtgctcactgtttgaccgctcatggagctctgcccactgagagaactgcgaagactttctacagaacccccggccttgagcttgggcttgtccaagtgttcggggtcgggctgtgaaggcggaggggagccaggcattccatcaaggcccgagtcctgctcagagacagagctgctgtattttttagacattctctttctcatcgtctctttcactgatttcacctttttcccaagagagatgcgagaggcagtaggtgatttgatgacttctttgtacacaaagtctccttctttacccattgggtcagaattattactgccaacgtgcagagagcgattcgtcaagtcaaatcctccaaaactgcaggttctcccgtggcttagggacccgagacccttcttcatctccccctcggtgagggagcgggacactttctgggccttttcttcttctgggtaggagaagaatgtccccatcttcttggggggcttaatcaggccccggctctctcctttgctgaaggttttgaccaacttccggccagccccccaggtgtccaggctgctggaggatggagacgtggtgagagagtctgagtcatcttcgggaggtttctcaggagagccatcaaagaaaaggggcttcttgtgcacgccagagtagagggcggaccgttcatccaggaccggcgaattctcaaacacgtgctcctccccaccttcagtgtctgggttttttcatttcttccaccctaattagtttctttctgactctgcgagtggagtttaccagcttgtgtaacctcttaaacttcaccgactcctcagtctcatcatccgattgttctcttgaattgcagtttgatgagccatcaaacgttgggtaagaaccatctggccagtcagcagggtccagggcagccgactgccggtgctgggcctcgtattccttgagcctagcaagtgcttcctcaattgtgatcatcttttctttgaccatcatcattagctgaatccgctcctcatcgctcatcgttatttcactggcaacataaccaacgtcttctccttttgaagtctgtctcattattcctttctggttctttcggaagttctgccagaaatacttatttttcttcttccagtctccttttcctacagagctgtcttctgagtttgatttatgaagagggttctttctttccacttctggggttgacacggcgctacagaagccaagcgactcttcgatctgggaccgcagctgaagtgacgtggggctagcatcgggtttctccacttccaggtcctgggaaacccgccgtttccgcagctcctccatcctctcgcacacgtcggagaaacaggtgttgtaataatctgcatactgctgcgccaggtcatcgatgtttcccagtgaaccgtccaggatacccatcacgtcggtccagagtcgggagaacgcctcggatgtgccagcacccggcttgggctccggttccggctccggcgcgggctcgggctccggctcgggctcgggctcaggctccggccccgggccagctgctcccgcgtcctccatggccgtgtcccgcgcgcgggccgtgcgtcccagtccccgcggcgccctcgccccgcacccgcgcgcagcctgcccggatgccgggtccccgcccgcggcgtcaccgagccgcgcccccgcgctgcatgccccggcggccccggccaccccgcgggggcccttcgcaggcgcccgcacctcgggtctaggtggccacgggctgcgcgactgacaactccagaaactttcccaccccgctcggcgcagcaacagggtagcaggaggcaaagtccgcaccactgagttgtacggcggggaattcgctcggcccagaagcaattaaacccactgcaaaggcgtttcttcctgtgacgggaaccaactaactaaggcacgcgactcgttccttctagcaagtcttggcaggacccggcaggggtggccgcggagcctctagatcttggagggagctccccgggacccctctcttcaaaatgagctcttccagctccacatgactctctccctcgaggctaaagaaagcgtttagcaacaaaaggtgctctgatgtcaggctctttgcatggaaatgagcctcgga

SEQ ID NO: 2378 - DNA, 5127 bp, Homo sapiens
tttcgtggcggcgtcgggtacgcgcacacgttgcatcttcttcctttcgcggggtcctccgtagttctggcacgagccaggcgtactgacaggtggaccagcggactggtggagatggcgacgctctctctgaccgtgaattcaggagaccctccgctaggagctttgctggcagtagaacacgtgaaagacgatgtcagcatttccgttgaagaagggaaagagaatattcttcatgtttctgaaaatgtgatattcacagatgtgaattctatacttcgctacttggctagagttgcaactacagctgggttatatggctctaatctgatggaacatactgagattgatcactggttggagttcagtgctacaaaattatcttcatgtgattcctttacttctacaattaatgaactcaatcattgcctgtctctgagaacatacttagttggaaactccttgagtttagcagatttatgtgtttgggccaccctaaaaggaaatgctgcctggcaagaacagttgaaacagaagaaagctccagttcatgtaaaacgttggtttggctttcttgaagcccagcaggccttccagtcagtaggtaccaagtgggatgtttcaacaaccaaagctcgagtggcacctgagaaaaagcaagatgttgggaaatttgttgagcttccaggtgcggagatgggaaaggttaccgtcagatttcctccagaggccagtggttacttacacattgggcatgcaaaagctgctcttctgaaccagcactaccaggttaactttaaagggaaactgatcatgagatttgatgacacaaatcctgaaaaagaaaaggaagattttgagaaggttatcttggaagatgttgcaatgttgcatatcaaaccagatcaatttacttatacttcggatcattttgaaactataatgaagtatgcagagaagctaattcaagaagggaaggcttatgtggatgatactcctggtgaacagatcaaagcagaacgtgagcagaggatagaatctaaacatagaaaaaaccctattgagaagaatctacaaatgtgggaagaaatgaaaaaagggagccagtttggtcactcctgttgtttgcgagcaaaaattgacatgagtagtaacaatggatgcatgagagatccaaccctttatcgctgcaaaattcaaccacatccaagaactggaaattaataccaatgttttatccaacatatgattttgcctgccccatagttgacagcatcgaaggtgttacacatgccctgagaacaacagaataccatgacagagatgagcagttttactggattattgaagctttaggcataagaaaaccatatatttgggaatatagtcggctaaatctcaacaacacagtgctatccaaaagaaaactcacatggtttgtcaatgaaggactagtagatggatgggatgacccaagatttcctacggttcgtggtgtactgagaagagggatgacagttgaaggactgaaacagtttattgctgctcagggctcctcacgttcagtcgtgaacatggagtgggacaaaatctgggcgtttaacaaaaaggttattgacccagtggctccacgatatgttgcattactgaagaaagaagtgatcccagtgaatgtacctgaagctcaggaggagatgaaagaagtagccaaacacccaaagaatcctgaggttggcttgaagcctgtgtggtatagtcccaaagttttcattgaaggtgctgatgcagagactttttcggagggtgagatggttacatttataaattggggcaacctcaacattacaaaaatacacaaaaatgcagatggaaaaatcatatctcttgatgcaaagttgaatttggaaaacaaagactacaagaaaaccactaaggtcacttggcttgcagagactacacatgctcttcctattccagtaatctgtgtcacttatgagcacttgatcacaaagccagtgctaggaaaagacgaggactttaagcagtatgtcaacaagaacagtaagcatgaagagctaatgctaggggatccctgccttaaggatttgaaaaaaggagatattatacaactccagagaagaggattcttcatatgtgatcaaccttatgaacctgttagcccatatagttgcaaggaagccccgtgtgttttgatatacattcctgatgggcacacaaaggaaatgccaacatcagggtcaaaggaaaagaccaaagtagaagccacaaaaaatgagacctctgctccttttaaggaaagaccaacaccttctctgaataataattgtactacatctgaggattccttggtcctttacaatagagtggctgttcaaggagatgtggttcgtgaattaaaagccaagaaagcaccaaaggaagatgtagatgcagctgtaaaacagcttttgtctttgaaagctgaatataaggagaaaactggccaggaatataaacctggaaaccctcctgctgaaataggacagaatatttcttctaattcctcagcaagtattctggaaagtaaatctctgtatgatgaagttgctgcacaaggggaggtggttcgtaagctaaaagctgaaaaatcccctaaggctaaaataaatgaagctgtagaatgcttactgtccctgaaggctcagtataaagaaaaaactgggaaggagtacatacctggtcagcccccattatctcaaagttcggattcaagcccaaccagaaattctgaacctgctggtttagaaacaccagaagcgaaagtactttttgacaaagtagcttctcaaggggaagtagttcggaaacttaaaactgaaaaagcccctaaggatcaagtagatatagctgttcaagaactccttcagctaaaggcacagtacaagtctttgataggagtagagtataagcctgtgtcggccactggagctgaggacaaagataagaagaagaaagaaaaagaaaataaatctgaaaagcagaataagcctcagaaacaaaatgatggccaaaggaaagacccttctaaaaaccaaggaggtgggctctcatcaagtggagcaggagaagggcaggggcctaagaaacagaccaggttgggtcttgaggcaaaaaaaagaagaaaatcttgctgattggtattctcaggtcatcacaaagtcagaaatgattgaataccatgacataagtggctgttatattcttcgtccctgggcctatgccatttgggaagccatcaaggacttttttgatgctgagatcaagaaacttggtgttgaaaactgctacttccccatgtttgtgtctcaaagtgcattagagaaagagaagactcatgttgctgactttgccccagaggttgcttgggttacaagatctggcaaaaccgagctggcagaaccaattgccattcgtcctactagtgaaacagtaatgtatcctgcatatgcaaaatgggtacagtcacacagagacctgcccatcaagctcaatcagtggtgcaatgtggtgcgttgggaattcaagcatcctcagcctttcctacgtactcgtgaatttctttggcaggaagggcacagtgcttttgctaccatggaagaggcagcggaagaggtcttgcagatacttgacttatatgctcaggtatatgaagaactcctggcaattcctgttgttaaaggaagaaagacggaaaaggaaaaatttgcaggaggagactatacaactacaatagaagcatttatatctgctagtggaagagctatccagggaggaacatcacatcatttagggcagaatttttccaaaatgtttgaaatcgtttttgaagatccaaagataccaggagagaagcaatttgcctatcaaaactcctggggcctgacaactcgaactattggtgttatgaccatggttcatggggacaacatgggtttagtattaccaccccgtgtagcatgtgttcaggtggtgattattccttgtggcattaccaatgcactttctgaagaagacaaagaagcgctgattgcaaaatgcaatgattatcgaaggcgattactcagtgttaacatccgcgttagagctgatttacgagataattattctccaggttggaaattcaatcactgggagctcaagggagttcccattagacttgaagttgggccacgtgatatgaagagctgtcagtttgtagccgtcagacgagatactggagaaaagctgacagttgctgaaaatgaggcagagactaaacttcaagctattttggaagacatccaggtcacccttttcacaagggcttctgaagaccttaagactcatatggttgtggctaatacaatggaagactttcagaagatactagattctggaaagattgttcagattccattctgtggggaaattgactgtgaggactggatcaaaaagaccactgccagggatcaagatcttgaacctggtgctccatccatgggagctaaaagcctttgcatccccttcaaaccactctgtgaactgcagcctggagccaaatgtgtctgtggcaagaaccctgccaagtactacaccttatttggtcgcagctactgagggatgaacgaaagccccctcttcaactcctctcactttttaaagcattgatattagtatcttctcagatacagaccattttatgattttttaaaaagtaaaagttctaaaatgaagtcacacaagacaattattcttatgcctaagttaacagtggataaaagacttttctgtaaacaactccagtaataaatatcatgaactaatatggtttttgtattcatttgtttctgaaaaatgtgcattatgtactatgaggaaatttctacaaagagatgaagacaattgaaagccagctatctgttattgatctaagcactcccaacatgtctcagaccctgaaccgccagttataccctacactgataggtctcgaagcactttctttccatagctcctaatacagaatctgaaattggcctaaatctttctggtttaaaaacaaagcaaacccacaaatggaaaaagcac

SEQ ID NO: 2379 - DNA, 3880 bp, Homo sapiens
ttagaaggataggggaagagattaagtaattgcagtttaacatgaaaaatgcacatgtgatagaatggagcacaatggaggattcataaaacatgctcatcagaaaaatctgttaagtcgactttgtccagattcagaaagagtaagtttatcaacatctggcatccctcatactttgtgaagatagatcttctactgcttaattatgagaaattattttattcaaagaaaggagctcttaatcttttgataaaacaaaataaaggagtagagagctgactagatgtcaagtgcttgctagaaatgatttttaaaatgcttctacacgtaaaatgtactgacaaattttggtaaaccatttaaaaataagaattagttttaaaatcttggagaaaatgcctttttgcccacatttaaaactgaaaatcaattttactatagataggagttctgtggagtgtacaaaattccttttagagatcaaatggccatcccagatagatatcatgtttcacaggcattacttttagtcaccctcaagtttcagccatgggaccaaaatttagtgttctgtgccatgtggtcacagggtcattggtttcacatcatggcttaagaaaatactggcattttgtttcttacgaagtaagtcctaccttgtgcatacaagcaaaaagaaaaaggaagaaaacaggggagggaaaggcgcaagaagctttttttgtttgtttgttttgaagacaacagattgaaggcaaaagaacacagagctttcacaagctcaaagaaaaatatttgctggctgatcgctgatttgtatgcactataaaacaattccataaataaaaccaatatatcatttcttaatcatgaccctatcaaaaccaagttatttcctaactattctttcaatgtcaaatgtaccctagagttgacgtttcatttttaagggttacagctacctcataggaactgaactagatgtactcttaccctttctctgaagtataacagtacaccactgcacaacagtatccaatttgaagactaatggtaaagaaaattcttcaggaaaaactgaaaatccatcaagctgaaaatctaaaattagttctactttctaatgaaaaatacataaaagtgcatcatcagaataagtaattcttatgccagtttgtattgcaaattttccaaacaatgcatcaaacataaacccaatccagatgtcaattatgaatacaaatatagcttgaggttgttttttttaaaggcagtaatttttgaaatagttaatgcaactgttgctaacacaataataatagtactcctggcttcacatactaacctggacttccgatcaagtgctgattagcccagtaagggaggtcaccaaaaaacccaaatccatttcagtcatgtctagtcttgtaccctccattctccttttttagcatttgaagacaacaggttgagttggcagatattgtttatggacccctgaggttgtttttaccgattcaatctcagttttattgaattcttgataacaggaataggatttgcagggagagcagggatatcagaaaggtctgtactggatgttttctgagaggccaacagagaagccgctgtctgaatagtttctgattgagttgtacttgtctctgtatcaagttgttcctttgcttctgttttatcatgtccactcaaagcaagacagttagcatcttcacttgtttcatcctcttctgttttggttttcttgggactctcttctttatgaggtgaggatgtcctcttgactcctactataggagtaggtatttttgttgctgcatttcctgaagttgctgcatttcctgaagatctaggtggtgggtttaccagacgtgttgaagaaacaactctggagaccgtaggctttggtggtggagaaatggctggttgtgtggcagtttgaggaatgctttcactcgatgtaccccctgagctttcactggaatttacttgtggcacagaaacttcagtagcctgtatgttggtcacagatgctgctgttacagctggagcaggactgtttctgccctgagagctgccagaactgttcaatggactggtcttcgtagcactagtaggtgaaggcacagacatgctgttatcactgtccatagacaagtcgaggctgctgtcattgagagctgtcaatttgacaccttctgttgaatgctttttctttttctgaagcacatgattaggtagtagttgatggagttgctttctttttacatgcattgcagcaattttcatatccacctcaaacatcttgctgtttattgcttgcctataaactgtatctgtgaaagactgaatatcataggtgagatcaacactgaggttttcagagttttctgtttttttaaacactaacccaatcacccacatcgtgcgaaattcttccttgtcgggattttctttgggtgctggaaatgactggggattcacatgagccagtgtaataaattcattcttctccaagcttccaaccaggattcggatttttgattccaccaagcccacccattccaggcgttgattttctgttggtgcacttgctagaagtacaatataatgcttgtacttttgaaagaagtttggagcttcaaaaagtttggaccactctgccttactcagcaaaatttcatctgtgatagcaagaccttgtttaaactcctcaaccatgaccatccgtgttgaaacggacacattgtacgtggagttctgttgtgggtatgctggtgtaattataggcataagatggtacctatcactggggtttacccttgggtcccatacaggcaaattaagattgcattcttcaggctgtttcaatagcactggatttggccattcccatttagaaaataccaagaaaaatttatgtacaagagttgatgctattgcatttggataaagctggcaagttcttgctactagcatagcccaggaaacaccaccgaggaaacctaatatattggaatagatgttgtggcgtttggcccatagtttgatagctctcagagttaacctgaagttgtcaatgtttggtactagatgtaaaatttcatcggttaccctgcaaccgttaagacttcttatacatcttatatctaaattttttagcagactgtcatctcgtagatccaaatcttcaggaattgtctgcagtgctaatcttgcaaacaaaatatcaatctctatcccatcaaaacagagtttaataactggtacgaatgcctcttcaacagctcttaaatcttttacttcttcctgtaatttcaacttatcatagaatgaaggtgaaaaagtcacttcgatcaacatgtcttggtgcaaacacacaaacgccatcaatatcagcaccttttgtatgcacttccctaatctgtaagatcccaaaatgtaaaaatttttcctccaaacattttccaattacagattgtggaagattcttggcttttcactgatttcttcgtatccactcttttaccaggtttatttagtttttcccaaaattaaaattcctgcggctggcagttccctcttccttcttcaaaaaccccccaaagggtttcaatgtctccaattagttttctgtgtaagtacgcagtcagtctccttgggggctgctaagctgataggagaagtaatgccatagtgcttctgtggcggttgtgtttgttgtgatccctgtgttgtaactggaaacggcatcgtctccggcgccgcaccgcccagtcacttcccccccgcaatcgccgcctgccgccctggtatgatccactgaggcgggagggaggggggggcctgcctcagcctcgtc

SEQ ID NO: 2380 - DNA, 3074 bp, Homo sapiens
cggacgcgtgggggacgccatttccagcggttgctggttctgacgggttgtagtctgccaggacaatgagttatgactaccatcagaactggggccgtgatgggggtccccgcagctccggtgggggctatggaggggggccagcagggggtcatggaggtaaccgaggctccggaggaggcggcggcggcggagggggtggtcgaggcggcaggggccggcatcccgggcacctgaaaggccgcgaaatcggcatgtggtacgcgaaaaaacaggggcagaagaacaaggaagcggagaggcaagagagagctgtagtacacatggatgaacgacgagaagaacaaattgtacagttactgaattctgttcaagcgaagaatgataaagagtcagaagcacagatatcctggtttgctcctgaggatcatggatacggtactgaagtttctactaagaacacaccatgctcagagaacaaacttgacatccaggaaaagaagttgataaatcaagaaaaaaaaatgtttagaatcaggaacagatcatatattgaccgagattctgagtatctcttgcaagaaaatgaaccagatggaactttagaccaaaaattattggaagatttacaaaagaaaaaaaatgaccttcggtatattgaaatgcagcatttcagagaaaagctgccttcgtatggaatgcaaaaggaattggtaaatttaattgataaccatcaggtaacagtaataagtggtgaaactggttgtggcaaaaccactcaagttactcagttcattttggataactacattgaaagaggaaaaggatctgcttgcagaatagtttgtactcagccaagaagaattagtgccatttcagttgcggaaagagtagctgcagaaagggcagaatcttgtggcagtggtaatagtactggatatcaaattcgtctccagagtcggttgccaaggaaacagggttctatcttatactgtacaacaggaatcatccttcagtggctccagtcagacccgtatttgtccagtgttagtcatatcgtacttgatgaaatccatgaaagaaatctgcagtcagatgttttaatgactgttgttaaagaccttctcaattttcgatctgacttgaaagtaatattgatgagtgcaacattgaatgcagaaaagttttcagaatattttggtaactgtccaatgatacacatacctggttttacctttccggttgtggaatatcttttggaagatgtaattgaaaaaataaggtatgttccagaacaaaaagaacacagatgccagtttaagaggggtttcatgcaagggcatgtaaatagccaagaaaaagaagaaaaagaagcaatatataaagaacgttggccagattatgtaagggaactgcgaagaaggtattctgcaagtactgtagatgttatagaaatgatggaggatgataaagttgatctgaatttgattgttgccctcatccgatacattgttttggaagaagaggatggtgcgatactggtctttctgccaggctgggacaatatcagcactttacatgatctcttgatgtcacaagtaatgtttaaatcagataaatttttaattatacctttacattcactgatgcctacagttaaccagacacaggtgtttaaaagaacccctcctggtgttcggaaaatagtaattgctaccaacattgcggagactagcattaccatagatgatgtcgtttatgtgatagatggaggaaaaataaaagagacgcattttgatactcagaacaatatcagtacaatgtccgctgagtgggttagtaaagctaatgccaaacagagaaaaggtcgagctgggaagagttcaacctgggtcattgctattcatctgtattaatgggtcttaggaggcaagtcttctaggatggactattcaactgccagaaatttttgaggaactcctttggaagaactttgtttacaaataaaggttttaaggctaggtgggattgcttatttctgagtagattaatggrcccaccatcaaatgaggcagtgttactctccataaggcamctgatggagcttgaacgctttggataaacaagaagaattgacacctcttggagtccacttggcacgattacccgttgagccacatattggaaaaatgattctttttggagcactgttctgctgcttagacccagtactcactattgctgctagtctcagtttcaaagatccatttgtcattccactgggaaaagaaaagattgcagatgcaagaagaaaggaattggcaaaggatactagaagtgatcacttaacagttgtgaatgcgtttgagggctgggaagaggctaggcgacgtggtttcagatacgaaaaggactattgctgggaatattttctgtcttcaaacacactgcagatgctgcataacatgaaaggacagtttgctgagcatcttcttggagctggatttgtaagcagtagaaatcctaaagatccagaatctaatataaattcagataatgagaagataattaaagctgtcatctgtgctggtttatatcccaaagttgctaaaattcgactaaatttgggtaaaaaaagaaaaatggtaaaagtttacacaaaaaccgatggcctggttgctgttcatcctaaatctgttaatgtggagcaaacagactttcactacaactggcttatctatcacctaaagatgagaacaagcagtatatacttgtatgactgcacagaggtttccccatactgtctcttgttttttggaggtgacatttccatccagaaggataacgatcaggaaactattgctgtagatgagtggattgtatttcagtctccagcaagaattgcccatcttgttaagagagctgtagtacacatggatgaacgacgagaagaacaaattgtacagttactgaattctgttcaagcgaagaatgataaagagtcagaagcacagatatcctggtttgctcctgaggatcatgggtacgacaagaaatatttttttaaagaatag

SEQ ID NO: 2381 - DNA, 1152 bp, Homo sapiens
tttcaagtaacctgtggcattttattttattttggatcaggagatgaaggctgacaatgataaggtaccttatgttgaggtaaacgtagaaaacaaacagccccaggtgtggacctgactgtcctgctgaaccagactagagagtaatatgaggctttgccataacaaagccacagaaaggctaaggcctggtttaatgtaaggtaagcctatcaccgccaaaacaaaacaaaacaaaaaaatacccaatattaagcagaagtcatgaaaactagtataagtatttatatttttattccactctaacacctcagagtaaagaactgatgggcaggcatcggcttctgctgacaattgccaaccggcatgagattgctgagctgaggtggactctccagacactggaactggaactccaggcccaatggcctctggtaagaatgctgcaacgtgagacccttgagagagactgacttgttgaagatgaagagaaaaccaagagcctccagtccagttgttgaagagcaaccacgagccaacaccaaggagacaaggaagaagaagtccttctctcaaccgatgtccgcaagcacaaaagaagagtcccaagatgggcgaagaaagggaaaataactcaaggggagagccaggaagaaaaatgctccacaaaaatccatggctttaagaatacttgaggaagggagcaggccaacaccctctggccacagtgaccagctgaatgaggaactctaacagaatgagctgcagttggagcaacagaggggacatagctggaacaacagagcgaggggacacagccggagcaacagagtgggaggatgccaaccatttcaactctctccctgagcagcgagtaatttcagggcaagcccagagactaggatccatctgagaagtcttcagaggtctgacccagagaactcaacaacaggatacgtcccatggtgatgaaaataaaatgaatcttgtgttcaccgttgtattcctcacgacttaagttaaaaacctgatgaaaagtggttaatctccataatgggtgttagctccatcgttttccaacgttagagataaccgaatgtgacctcaccccgtttagttccggaggcggcggacgcgacggcggaagtttcg

SEQ ID NO: 2382 - DNA, 925 bp, Homo sapiens
tttcgtgggtactggggcgtgcgtgaggcgtttactgatgcttcctggtccggtggcctcggtcccggtaagccaggcatgaagatcacaaggcagaaacatgccaagaagcatcttggcttcttccgcaacaacttcggagtccgcgagccgtaccagatcctgctggacggcaccttctgtcaggcggcgctgcggggccgcatccagctgcgggagcagctgccccgctacctcatgggggagacgcagctgtgcaccacaagatgtgtgttaaaagagctagaaacattgggaaaggacttatatggggcaaaactgattgcacaaaaatgccaagttcgaaattgtcctcatttcaagaatgcagtgagtggatcagaatgtctgctttccatggttgaagagggaaatcctcatcattattttgtggcaacacaggatcagaatttgtctgtgaaagtaaaaaagaagcctggagttcctctcatgtttattattcagaacactatggttttggacaaaccttctcccaaaacaattgcctttgtaaaagcagtggagtcaggtcagcttgtctcagtgcatgagaaagaaagtatcaaacatctcaaagaggaacagggtttagtgaaaaacactgaacagaggtagaagaaaaaagcgcaagaaaataagtggtcccaatcctcttagttgtttgaagaaaaagaaaaaggcaccggacacacaatcatctgcttctgaaaagaaaagaaaaagaaaaagaattcggaacagatctaacccaaaagtactttctgagaagcagaatgcagaaggagaatgaatcctttggatactttcaaggacattcaaatgtgaaaatgaattttttacaactagaagtatttataataaaagaccaaacttatttttgtaaatg

SEQ ID NO: 2383 - DNA, 1495 bp, Homo sapiens
ggaattcgggggctggggcctggctggcctgcaaggtgaatgttatggggatgtagggcaaaggcatgctgggggcccagactctctgacctcgttgcttccctctccccacagcgggaatgcatatcagtccacgtgggccaagcgggagttcagattggcaatgcctgctgggagctcttctgcctggaacacggcatccaggcagacggcacttttgatgctcaagctagcaagatcaacgatgatgactccttcaccacctttttcagcgagactggcaatgggaagcatgtgccccgggccgtcatgatagatctggagcctactgtagtggatgaggttcgggcaggaacctaccgccagctcttccatccagagcagctgatcacaggaaaggaggatgcagccaacaactatgcccggggccactacacggtgggcaaggagagcattgacctggtgctggaccgcatacggaagctgacagatgcttgctctggcctgcagggcttcctgattttccacagttttggtgggggcactggctccggcttcacttctctgctgatggaacgcctctccctggattatggcaagaaatccaagctggagtttgccatctacccagccccccaggtctctactgcagtggtggagccctacaactccatcctgaccacccacaccacactggaacattcagattgtgctttcatggtggacaacgaagccatctatgacatctgccgcaggaaccttgacattgagcgccctacctataccaacctcaaccgcctcatcagtcagattgtgtcctcaatcactgcttctctccgctttgacggggccctcaatgtggacctcactgagttccagaccaacctggtgccctacccccgcatccacttcccgctggtcacctacgcgcccatcatctctgccgagaaagcctatcacgaacagctctctgtggccgagataaccagctcctgctttgagcccaacagccagatggtgaagtgcgacccgagacatggcaagtacatggcctgctgcatgctctaccggggcgacgtggtgcccaaggatgtgaatgtcgctattgctgccatcaagaccaagaggaccatccagtttgtagactggtgtcccacaggcttcaaggtgggcatcaactaccagcccccgaccgtggtccccgggggagacctggccaaggtgcagcgggccgtctgcatgctcagcaacaccacggccattgcggaggcctgggcccgcctcgaccacaagttcgacctcatgtacgccaagcgggcctttgtgcattggtatgtgggagaggggatggaagaaggagaattttcttgaaggccaggggaagacttagcttgccctggaagaaggattatgaagaagtggggactgattcgtttgaagaagaaaatgaaggggaggaattttaaatatataccttccccttgaaaaaaaaaat

SEQ ID NO: 2384 - DNA, 5378 bp, Homo sapiens
ttagcttgctcgaggaaactatggacgaagattcttcgttgagagagtatactgtaagcttggactctgacatggatgatgcatccaaatgtcttcaggagtatgatagtggaactggcaacaccagggaagctttgaggccttgtccaagaactgtaagcaccaaggctcagccaggcaggagtgcttcttctagctctggagataaaacgaccagctttgctgaacaaaaaatcaggaaactgaatcataccgatggagaaagtagtggaagcagttctcaaaaaactacaccagaaggctctgaacttaatattcctcatgcgggtgcttgggcacaaattccagaagaaacagggcttccacagggacgggacactacccagctgttggcctctgaaatggtgcatcttatgatgaaacctaaaagaaaagagggcgggctatataagcccagaaaaagaaaatggaagctgcttttaccaaacagagacagaaaatgggaaggacagcattccttactgtagtgaaaaagaaaggggatgggatatctcctctacgagaggaagcggcgggtgcagaagatgagaaagtatatactgatcgagcaaaagaaaaggaatcacaaaaaactgatggacaaaggagcaagtcactggcagatataaaagagagcatggagaatcctcaagccaaatggctaaagtctccaactacacctattgatcctgagaagcaggggaacctggcaagcccctcagaagaaactttaaatgaaggagagattttagaatataccaaatccattgaaaagttaaattcatccctgcattttctacaacaagaaatgcaacgcttgtcacttcagcaggagatgttaatgcagatgagagagcaacaatcttgggtgatttcacctccacaaccctctccacagaaacagattcgagattttaagccttctaagcaggcaggcctgtcatcagccattgcaccattctcctcagacttcccctcggtcctactcacccatcttccacaagtcttcttaacaggaaaagtgcatctttttctgttaaaagtcaaaggactcctaggccaaatgagttaaaaataacacctttgaatcgaaccttgacacctcctcggtctgtggatagccttcctcggttaaggaggttttcaccaagtcaagttcctattcaaactaggtcatttgtatgttttggggatgatggagaacctcagttaaaggaatccaaacctaaagaggaagttaaaaaggaggaattggaatccaaagggactttggaacagcgtggacataatccagaagaaaaggaaatcaaaccttttgagtcaacagtctctgaagtcctatcactgcctgtcacagagactgtatgtctgacaccaaatgaggaccaattgaatcaacccacagaaccccctcctaaacccgttttcccacccactgctccaaaaaatgttaatctgattgaagtttccctctcagatttgaaaccccctgaaaaggctgatgtacctgttgaaaaatatgatggagaaagtgataaagaacaatttgatgatgaccagaaagtatgctgtggattcttttttaaggatgatcaaaaagcagaaaatgatatggcaatgaaacgggcagctttgttggagaaaagattaagaagggaaaaggaaactcagctccggaaacaacagttggaagcagaaatggagcataagaaggaggaaacaaggcgtaaaactgaggaagaacgtcagaagaaagaagatgagagagcacgcagagaatttattaggcaagaatatatgaggcggaaacaactgaaactaatggaagatatggatacagtaattaaaccccgtcctcaagtagtaaaacaaaaaaaacagcgaccaaaatctattcacagagatcatattgaatcccccaaaacaccaataaagggtcctccagtctctagcctttctttggcatcgctgaacacgggtgataacgagagtgtacattcaggcaagaggacgccaagatcagagtctgtagaaggcttcttatctccaagtcgttgtggcagtcgaaatggagaaaaagactgggagaatgcatcaacaacttcttcagtggcttctggaacagaatatacaggaccaaagctctacaaagaacccagtgcaaaatccaataagcacataatacaaaatgctttagctcattgctgtttggctggaaaagtaaatgaaggtcagaagaaaaaaatactggaggaaatggagaaatcagatgccaacaacttcttaatcttgttccgggattcaggatgccagttcagatctttatacacttattgcccagaaactgaagaaatcaataaactgactgggataggccctaaatctatcactaaaaaaatgattgaaggactttacaaatataattctgacaggaaacagtttagccacatacccgctaaaactttatctgccagtgttgatgcaattaccattcatagccatttatggcagaccaaaagaccagtaacacccaaaaaacttttacccactaaggcatagaagttgggaaatacttgcttcagaacattcatggtaaatttgcacttcatctttcctgcctatagaaaatctttctaattgccaacaagacttttattaattaaaactggacattaagctctgttgtcatgaacaactggaatgtaaaccacagtattttggagtgcagaacattctcaacttaagtgataagtccaaatgatgaaggaaatgttttaattcacaaatggagatttgtatgtgttatcaggttcacctgcttgatattagatacattaaagcactggaattttcatgggatattagttggatttatcattgaaatatggttaagattacaaattatgtgttttatttgttgcttttttttaaccttttaatgtatattcttgtcttcagatggtttgctatttttctctcctgggggtttattctaagatacctttgtattttatttcatgtggagatcatgaaagtaggaaatatacctttagaagtaactcgcacctttcttatgatgttaagagaaacactagtgtttagttttacagtaaccctcatattttaatggtgttacagcatttgcaaaaattattctgctaagtatttacaactctatttattattcactcaagtattaacattctctattaaataagaggaggtgttgtaaagagctgctagtaggttcgctttaaaccacatgagcttaaccaagaatatgttatgagaagttgctgattaaatcagtgctgtttttacaccacttctggccaactcagaataatttagattgttcttttaacaaaaaaggctttctatctcttttaaagtaagtcactttataagttggcagaagtgaatgacactttgagagtagtctttcaatctgaagatgtaagacttcctgaaacaagttctcaagaagtctttacattatatttataactcatataaaaattatatttagaatttttaaacatgtacaaagggctacattttaattttaaaatagcttcacattattttacttatattgggtttttcttcattttaatccttttcaagtggaatggcttagattaagtatacacttgaaatctcctctacatgatctttgttctttaacagtgtataccagagggttagttggggaaaaacttcattctcaggaaaagacttgaatgattatgtgaccctgttatatttcagtgttgtgacaaatgtgtaaactagcgggggaagacagtattgtatcataaatgagatgcgtagtttgttttctttcatgggaagtagagataaaaatatatacatttctctaattgagttgtttagagaaagaactaatgtctcatatgatgtatttacttattttaaaaaaaagaataggaatgagatgtccctgagctgtacttttctattattataaggcctttaggcatcagtgcatctgggttatcaacattttctcaaatgctgtcaatattttactgtaatttatgttcttatatttatgtatatttgttaaaactgtaaaaaaatttcacagatttttttccaatacctgtgcaagatacatgtgtagctcaaaactatttgtgatctactgtttgcatgtaagagaccaggatatgtaactcttatattttaagtgtatacatattgtgtatataacatatggatattaaaaatggggaattgcacattttaccttttggacagtaatttctatcacagttagaaggaaatgatagtcaaatacacgtttagattaaaactagtttaaaaaattataaatgaatctaatcaaaatgtgaatagtagtcaaaaggataatttaataagcattttacgttactaaatttgttcatttcaatattaactaaatttccctcatcaaagcaatctttgtgatattacttcgctattaaataaagaaaattggatgcaagacaatggagaaactttaaaactaaacaggaccaccctttattcttaaatttgtgtgtgtccaacagttgaattgaatgtctataaggtctaaaggtagaatgtgaatattgccacagagttcattgctctcagtataagattttactttattaatgcagaaggaatatggatatatttctttaagtctgcagatttttttattatggtgcagcttttttttaattatgtttttaaaattatacagttgaaaaatatgccatttcataaagtctgaggattttcgtcaaccttactgaaacacactggtgctttcatcatcagaggtcaaattattatgataactattccattaagtttgccaaacatttgtcgtggttaccagtgcagcctgtcaaattctgctatttgacacagctttggaaagatttagttcttggtttttccgttttgtattagaatgactgttacagttttatttggctgtttaaagccaaattcagctatttaattatggtttcatggacactgttgagcaatgtacagtgtatggtgtgcttacctgtccactctagagcattgcttacaggttttttgttttttaagatgctgtgctgtaaaatactgtcatacttgctatttcctggtacagtgtagtttttcccctttcatttgaataaaagcatggcaccaaatgactccttttctgtttcttgaataaaatgtagtttttggtaaaattatttgaacttgagataactcatacagtttttctatcccctaacctatgtttaaatttaataacttgaatattcataacaggcaac

SEQ ID NO: 2385 - DNA, 1174 bp, Homo sapiens
tttttttttttttgcgtgaacattagttcttattgatagtccccatcacctccaaagcagtgggccccccgccctccctcctaccagcccctccccagcacccagcccctcagtgcagcgccacctcgcaggggtggacggtgggcagcacgggcagcctcgtaggcacggcggaactcctggaatcgtggggcacagcccagcccgggcctccccaaagcggctccagcccatgaagaggaaggtgcctgggcccgggtggacgccacagcgcagtggggtacgaatggaggtcagcccctggtccccggatcgccccgcctggaacagcggcggtgtctggcggaggacacgggcggccaccacagtgatgacagactcctgcagctccacgtcatgggtgaccccatggatgatcccgtgaattactgtggggaggcatgtggctgcggtaggcattcaggggaaggcaggctccaggctccccccatggcggggacactcaccgaagtcgctggtgcatgcggccaggagcagctcagcgtcgctgcagggcctgcaggcaaccgtctacgccgagaccgtgggcctgcgggggctatctcggggcgcccgtcctcgcgcagctcaaagcggaaggcggccacgcggcggctgatgtcctggtgcggcgtggcctgcaggaagagggcccggcgctcgcggggaccccagcgcacgcagcggccccctgccgggcccgggccctcggccagcagcagctccagggcgccccctgcgcgctccgcgaagacctgggcgcccgcgaagggccgcaccggccgcagacaggcgatgccgggccgcgctctgggatcggggccgcccagggtcaggcgcagcgccccagccgggtacagccactcaaccgcgccctccgcacaggccagggccagctgccccacgctgccgggctcctgggtgaggccgctgcccctcccagctgcagcgctcctcggagtagccggcgcgggcagccggggccaggaggccgcagcacagcgcgcagagcagcgccgcggccgggaaccccatggcacggcgggcggcgtccggggagtcggggctctcaccaccgctgccccggcggggcgcgggtccgggcggcggcgggagcagccgggggcgccggccg

SEQ ID NO: 2386 - DNA, 1634 bp, Homo sapiens
aaaggggggaccctaccctcagaacatgagggaataatatttacgtggctcacaaagaccagtgagtacatcatatgcatctctcacaactccccagaagagggcctccagcacgagtctaggctcagccttttctgtccctccgagaactctatgaattgctgccaagtgttttaattttcctcagaatttctttgtaatgttattgagggttggaggtccttttacaaattttggaaataagtaaatcaaatgagaagaccatgcttccaaacaatcattctgtttaacagatccccttgatttaatgcaattatgaatgcgttagtggtagtgtagtttaagatctttcccttgaatgtacaggctttaaagaaacgaacctaggagtgtatttcctatcaagcaaatgggttctaagactttacgctttacacatcattgattatagcgctgtgcttttcccgtgctaggcaatggatcacttggagtcctttattgctgaatgtgatcggagaactgagctcgccaagaagcggctggcagaaacacaggaggaaatcagtgcggaagtttctgcaaaggcagaaaaagtacatgagttaaatgaagaaataggaaaactccttgctaaagccgaacagctaggggctgaaggtaatgtggatgaatcccagaagattcttatggaagtggaaaaagttcgtgcgaagaaaaaagaagctgagaaaactgtcgctgaaaagcaggagaagagaaatcaggatcgcttgaggaggagagaggagagggaacgggaggagcgtctgagcaggaggtcgggatcaagaaccagagatcgcaggaggtcacgctcccgggatcggcgtcggaggcggtcaagatctacctcccgagagcgacggaaattgtcccggtcccggtcccgagatagacatcggcgccaccgcagccgttcccggagccacagccggggacatcgtcgggcttcccgggaccgaagtgcgaaatacaagttctccagagagcgggcatccagagaggagtcctgggagagcgggcggagcgagcgagggcccccggactggaggcttgagagctccaacgggaagatggcttcacggaggtcagaagagaaggaggccggcgagatctgaacccgtctcccgggtgctgtaaatagtctgataaacgttcacacagtctaaaattaccctttatatttgctgaatacaactcatcttttgtagtttaaaatttctattgttttggagctagctgtgagtttctagaagtgtacagagttgctcctgtgttcccgggtcatgttgagtaggaataaataaatctgatgctgcctcctgaggctgcggggggtttctgctgtcctctgcgtagaggcttttcactgtgaccctgtgccagtgccaccagcacctcacagaaaccgtgacttactcgtgggtcacgtcttgtcttctggcatccagtagatggcagggcacttcctgtcccctgcatctgactgacgggacccaggtgtgcatgggtgtttgtttgctcgctcccacacaaccttctgagtgtctgagctgcccatctcccatggggaaggagggaggggtccccattct

SEQ ID NO: 2387 - DNA, 1634 bp, Homo sapiens; identical to SEQ ID NO: 2386

SEQ ID NO: 2388 - DNA, 3679 bp, Homo sapiens
gctgtgtatatggccacatataaaaggtcttttaactttattaagctttgttttctcatctgtaaaatggaaaagggcctgctctgcatggttgcagagatgagtgagtgttagtgtgcttgacactcttcctctgaggaaatagcacccgtggttgccagtttgtggctactggagcctcacatggcatttggaggtgtggctcactaccccacccccgcctggggctccaggctaacccatgcaaaactgtatgtgctctctgaccctcagtgtgctccctctcggcccacagcccccggtccctgagaagcggccccctgaaatacagcatttccgcatgagtgatgatgtccactcactgggaaaggtgacctcagatctggccaaaaggaggaagctaacctcagtagggtggcctgtcggaggagttaggttctgcccggcgttcaggagaagtgaccctgacgaaaggggaccccgggtccctggaggagtgggagacggtggtgggtgatgacttcagtctctactatgattcctactctgtggatgagcgcgtggactccgacagcaagtctgaagttgaagctctaactgaacaactaagtgaagaggaggaggaggaagaggaggaagaagaagaagaggaagaggaggaggaagaggaagaagaagaggaagatgaggagtcagggaatcagtcagataggagtggttccagtggccggcgcaaggccaagaagaaatggcgaaaagacagcccatgggtgaagccgtctcggaaacggcgcaagcgggagcctccgcgggccaaggagccacgaggagtgaatggtgtgggctcctcaggccccagtgagtacatggaggtccctctggggtccctggagctgcccagcgaggggaccctctcccccaaccacgctggggtgtccaatgacacatcttcgctggagacagagcgagggtttgaggagttgcccctgtgcagctgccgcatggaggcacccaagattgaccgcatcagcgagagggcggggcacaagtgcatggccactgagagtgtggacggagagctgtcaggctgcaatgccgccatcctcaagcgggagaccatgaggccatccagccgtgtggccctgatggtgctctgtgagacccaccgcgcccgcatggtcaaacaccactgctgcccgggctgcggctacttctgcacggcgggcaccttcctggagtgccaccctgacttccgtgtggcccaccgcttccacaaggcctgtgtgtctcagctgaatgggatggtcttctgtccccactgtggggaggatgcttctgaagctcaagaggtgaccatcccccggggtgacggggtgaccccaccggccggcactgcagctcctgcacccccacccctgtcccaggatgtccccgggagagcagacacttctcagcccagtgcccggatgcgagggcatggggaaccccggcgcccgccctgcgatcccctggctgacaccattgacagctcagggccctccctgaccctgcccaatgggggctgcctttcagccgtggggctgccactggggccaggccgggaggccctggaaaaggccctggtcatccaggagtcagagaggcggaagaagctccgtttccaccctcggcagttgtacctgtccgtgaagcagggcgagctgcagaaggtgatcctgatgctgttggacaacctggaccccaacttccagagcgaccagcagagcaagcgcacgcccctgcatgcagccgcccagaagggctccgtggagatctgccatgtgctgctgcaggctggagccaacataaatgcagtggacaaacagcagcggacgccactgatggaggccgtggtgaacaaccacctggaggtagcccgttacatggtgcagcgtggtggctgtgtctatagcaaggaggaggacggttccacctgcctccaccacgcagccaaaatcgggaacttggagatggtcagcctgctgctgagcacaggacaggtggacgtcaacgcccaggacagtggggggtggacgcccatcatctgggctgcagagcacaagcacatcgaggtgatccgcatgctactgacgcggggcgccgacgtcaccctcactgacaacgaggagaacatctgcctgcactgggcctccttcacgggcagcgccgccatcgccgaagtccttctgaatgcgcgctgtgacctccatgctgtcaactaccatggggacacccccctgcacatcgcagctcgggagagctaccatgactgcgtgctgttattcctgtcacgtggggccaaccctgagctgcggaacaaagagggggacacagcatgggacctgactcccgagcgctccgacgtgtggtttgcgcttcaactcaaccgcaagctccgacttggggtgggaaatcgggccatccgcacagagaagatcatctgccgggacgtggctcggggctatgagaacgtgcccattccctgtgtcaacggtgtggatggggagccctgccctgaggattacaagtacatctcagagaactgcgagacgtccaccatgaacatcgatcgcaacatcacccacctgcagcactgcacgtgtgtggacgactgctctagctccaactgcctgtgcggccagctcagcatccggtgctggtatgacaaggatgggcgattgctccaggaatttaacaagattgagcctccgctgattttcgagtgtaaccaggcgtgctcatgctggagaaactgcaagaaccgggtcgtacagagtggcatcaaggtgcggctacagctctaccgaacagccaagatgggctggggggtccgcgccctgcagaccatcccacaggggaccttcatctgcgagtatgtcggggagctgatctctgatgctgaggctgatgtgagagaggatgattcttacctcttcgacttagacaacaaggatggagaggtgtactgcatagatgcccgttactatggcaacatcagccgcttcatcaaccacctgtgtgaccccaacatcattcccgtccgggtcttcatgctgcaccaagacctgcgatttccacgcatcgccttcttcagttcccgagacatccggactggggaggagctagggtttgactatggcgaccgcttctgggacatcaaaagcaaatatttcacctgccaatgtggctctgagaagtgcaagcactcagccgaagccattgccctggagcagagccgtctggcccgcctggacccacaccctgagctgctgcccgagctcggctccctgccccctgtcaacacatgagaacggaccacaccctctctccccagcatggatggccacagctcagccgcctcctctgccaccagctgctcgcagcccatgcctgggggtgctgccatcttctctccccaccaccctttcacacattcctgaccagagatcccagccaggccctggaggtctgacagcccctccctcccagagctggttcctccctgggagggcaacttcagggctggccaccccccgtgttccccatcctcagttgaagtttgatgaattgaagtcgggcctctatgccaactggttccttttgttctcaataaatgttgggtttggtaataaaaaaaaaa

SEQ ID NO: 2389 - DNA, 1950 bp, Homo sapiens
  misc_feature (1)...(1950): n = a,t,c or g
ccgggaggcgctgccgctctgggcagacggttccgggagccgcacggtcccctctccttccccatcctctcccctcccctctccgggttcccccacccacaggagccttgggccgaccactcccccgatggcctcagccacggaggaccccgttctggagcgttatttcaaaggccacaaagctgcgatcacctccttggacctcagccccaacggcaagcaacttgctactgcttcttgggatacctttctcatgctatggaatttcaagccacatgctagagcttacagatatgtgggtcacaaggatgttgtaaccagcgtgcagttttctccacatggaaacttattggcgtctgcctcacgagacagaaccgtgagactctggattcctgataagagaggaaaattctcagaatttaaagctcatacagctccagttcgaagtgtagacttttcacctgatggccagtttctagctacagcttctgaagacaaatccataaaagtatggagcatgtatcgccagcgcttcctgtattccttgtatcgacatacacactgggtacgctgtgcccaatttncacccgatggaagactaattgtgtcatgtagtgaggataaaactattaaaatttgggataccacaaataagcaatgtgttaataacttctcagattccgttggatttgcaaattttgtggactttaaccctagtggtacatgcatagcttcagcaggttctgatcaaactgtgaaagtctgggatgtaagagtgaacaaattactacagcattaccaagttcacagcggtggagttaattgcatatcattccatccttcgggtaactatctcatcacagcttcttcagatggtacccttaagattctggacctcttaaaaggaaggctcatctatacacttcaaggacatacgggacctgtctttactgtttcattttcaaaaggtggagagctatttgcatcaggaggtgcagacacacaggtcttattatggaggactaactttgatgaattgcattgtaaaggtcttaccaaaagaaatctcaaaagattacattttgattcaccaccacatcttcttgatatctacccaagaacaccacatccccatgaggaaaaagttgagactgtagaagatttttttcttcatcttttgagattaatccaaagcttgaggtaatcgatttgcagatctctactccccctgttatggatatcctttcttttgattctaccacaacaacagaaaccagtggtaggactctgccagacaagggtgaagaggcctgtggatatttcttgaacccttccttaatgtcaccagaatgtttgccaacaaccacgaaaaagaaaacagaagacatgagtgacctcccctgtgaaagtcaaaggagcatacctctcgctgtgactgatgctttagagcatattatggaacaactcaatgttttgacacagactgtttcaatcttggagcagcgactgactttgacagaggataagctgaaagactgccttgaaaatcagcaaaagcttttcagtgctgtccaacagaaaagctgaataaaaaattcattttcatttgttgggcagaggcccaataaatgaacaaatgtacatacactcaggaaggtagtacaagatactccatacaacacaaccatgtgctatttatcatggcatttcttaaaagggtgagcaacagaacaaaaggcagaaaaggcatacctaaggactaatttaaacacatatcaatgtgaaggactaatttaaattactatcatttatgattgcagtaataaagtgataagcattcaagcaactctgtattttccccatattaatttanatgtccattntcatttataggccanatcctgccaagaaaagaacccagatctctggatttcactgttaagtcattta

SEQ ID NO: 2390 - DNA, 875 bp, Homo sapiens
ctaatttttgttcttttagtagagatggggtttcaccatgtagtccaggctggtctcgaactcctgacctcaggtgatttgcccccaacttggcctcccaaagtgctaggattataggcatgagctactgcgcctggccagtagtgaactattttaaataatgttattggtgaacaccctttcatgtatacattttggcatacctgacgtatttttcttaacatgcctagaagcagaattacagagtcaaagagtatgtacttttgggggacttttggatacagagtgccagataaacccgcagtagtgttccagtttataatgcctatagccatgtgaaaataccaagatggtgacattttaatatctaaaatagacagtgccatcggatacagccattagttctaagttgaacttctgaattgcttttggttgccaacttcagtattatattcaaagattctagcatattacgaaaatatcctttgctgtttttcatctcttgatccttctaagataaattggtgtgtgatttgttgatagtatctttgtgtgaggattgtttttcaaaaatttaagcttgaggtgttttgttttgctttttaacaacttttgggtggctgtttttgccaacagtacaggatttgccttctttatattttggctaactggaagctaggaacagaagggtaattaggattggggcccgacccccccccagggatcttattttgtcttctgcaaggcccacctttcgcttcttaaccaaatgacaccttctggggtgtgggccatacgcttttcccgggagcgagaggggcctcgaaatcctttcccaaaggcctacaacccgggcgggaaggaggctcccctct

SEQ ID NO: 2391 - DNA, 1051 bp, Homo sapiens
ctgtgcctactcaacagattctagcttttcctgagcaaacaaacaccaaagactggacagtgacacctgagcacgtcttgcctgagtcccagagcttgttgacatttgaagaagtggccatgtatttttcccaggaagaatgggagttattggatcccactcagaaggccctctacaatgatgtaatgcaggaaaactatgagactgtcatctctctagcattgtttgtgctccccaaacctaaagtgatctcctgtctagagcaaggggaagagccatgggttcaagtatccccggagtttaaggatagtgccggaaaatctcctacagggttaaagctcaaaaacgacactgaaaatcatcagcctgtgtctctttctgacttagaaatacaagcatcagcaggcgtcatatcaaaaaaggccaaagtaaaagttccccagaaaacagcaggcaaagaaaatcattttgatatgcacagagtgggaaaatggcaccaagattttccagtgaagaaaagaaagaaactttcaacctggaaacaagagctgctcaaacttatggatcgtcacaagaaagattgtgcaagagagaagccttttaaatgtcaggaatgtgggaaaaccttcagagttagctcctgacctttattaagcaccaaagaattcacactgaagagaaaccctataaatgtcaacagtgtgataagaggtttagatggagttcagatcttaataagcacttaacaacacaccaaggaataaaaccatataaatgttcatggggggggaaaagcttcagtcaaaatacaaatttacatacacaccaaagaactcatacaggagaaaagcccttcacatgtcatgaatgtggaaaaaaattcagtcagaactcccaccttattaaacaccggagaacccacacaggtgagcagccatatacttgtagcatatgcaggagaaacttcagcaggcggtcaagccttcttagacaccagaaactccacctgtgaagagaagcttgtccagtgtcccatttctggaagacattc

SEQ ID NO: 2392 - DNA, 2524 bp, Homo sapiens
aatttccggttcgacgatcccgtcccctggcggagccggcgcgcccggggtgccgctccctgcctggcgcgctccgcacctggaggtgccttgcccctctcctgcccacctcggaatttccctgtggctcctttgatccttcgagtctccagctcctctcccttccacctgtttcccccaagaaaggcaggatcctggtccctgctacgtttctggggccatggctggtctgggccccggcgtaggcgattcagaggggggaccccggcccctgttttgcagaaagggggctctgaggcagaaggtggtccacgaagtcaagagccacaagttcaccgctcgcttcttcaagcagcccaccttctgcagccactgcaccgacttcatctggggtatcggaaagcagggcctgcaatgtcaagtctgcagctttgtggttcatcgacgatgccacgaatttgtgaccttcgagtgtccaggcgctgggaagggcccccagacggacgacccccggaacaaacacaagttccgcctgcatagctacagcagccccaccttctgcgaccactgtggctccctcctctacgggcttgtgcaccagggcatgaaatgctcctgctgcgagatgaacgtgcaccggcgctgtgtgcgtagcgtgccctccctgtgcggtgtggaccacaccgagcgccgcgggcgcctgcagctggagatccgggctcccacagcagatgagatccacgtaactgttggcgaggcccgtaacctaattcctatggaccccaatggtctctctgatccctatgtgaaactgaagctcatcccagaccctcggaacctgacgaaacagaagacccgaacggtgaaagccacgctaaaccctgtgtggaatgagacctttgtgttcaacctgaagccaggggatgtggagcgccggctcagcgtggaggtgtgggactgggaccggacctcccgcaacgacttcatgggggccatgtcctttggcgtctcggagctgctcaaggcgcccgtggatggctggtacaagttactgaaccaggaggagggcgagtattacaatgtgccggtggccgatgctgacaactgcagcctcctccagaagtttgaggcttgtaactaccccctggaattgtatgagcgggtgcggatgggcccctcttcctctcccatcccctccccttcccctagtcccaccgaccccaagcgctgcttcttcggggcgagtccaggacgcttgcacatctccgacttcagcttcctcatggttctaggaaaaggcagttttgggaaggtgatgctggccgagcgcaggggctctgatgagctctacgccatcaagatcttgaaaaaggacgtgatcgtccaggacgacgatgtggactgcacgctggtggagaaacgtgtgctggcgctggggggccggggtcctggcggccggccccacttcctcacccagctccactccaccttccagaccccggaccgcctgtatttcgtgatggagtacgtcaccgggggagacttgatgtaccacattcaacagctgggcaagtttaaggagccccatgcagcgttctacgcggcagaaatcgctatcggcctcttcttccttcacaatcagggcatcatctacagggacctgaagctggacaatgtgatgctggatgctgagggacacatcaagatcactgactttggcatgtgtaaggagaacgtcttccccgggacgacaacccgcaccttctgcgggaccccggactacatagccccggagatcattgcctaccagccctatgggaagtctgtcgattggtggtcctttggagttctgctgtatgagatgttggcaggacagcctcccttcgatggggaggacgaggaggagctgtttcaggccatcatggaacaaactgtcacctaccccaagtcgctttcccgggaagccgtggccatctgcaaggggttcctgaccaagcacccaggggaagcgcctggggcttcagggccttgatgggggaacctaaccatccgtgcacatgggttttttccgctgggatttgactgggagcggctggaacgattgggagatccccgcctccttttcaagaccccgcccgtgtggcccgcagcggcgaggaatttttgacaagttcttcacgcgggcggcgccagcgcatgacccctccagcccgcctagtcctggacagcatcgaccaggccgatttccagggcttcacctacgtgaaccccgacttcgtgcagccggatgcccgcagccccaccagcacagtgcatgtgcccgtcatgtaatctcaaccgccgccactaggtgtccccaacgtcccctccgccgtgccggcggcagccccacttcaccaccaacttcaccaccccctgtcccattgtagatcctgcaccccagcattccagctctgcccccgcgggttctagacgcccctcccaagcgaaaaagaacttctgatctccatacagcccatgtatt

SEQ ID NO: 2393 - DNA, 1651 bp, Homo sapiens
aaacgccgggcagttaattgaatttaggggccctaataaaaaagctattacgttgcaagcacgcgttagtaaacttggatcctttaaaacggccgccctttttttttttttttattattaaataaaatcattttatcatatggctttcaaaagacaatgagtgaaaacttaaggcaatacaataagtcatatttatgagtacgttcaagaattcacaaaaaagggtacaattctggcttctctttaatcattaaatttcagtttttacaaataattcaggttcaggttttgagggggaaacagttcttgtattattacatgctcatttttcttctgtaaatgactctattggctagatttacaaacattgtcacagaaacaaattttttaagccatagatcactgcatttatatttacaaaaaaagccataaacatgcatttctcctttattaggacttaaatagatgcttgaatattaaggcagtgatgattctaaaacataatgaaattctaagttaaggctttatgtttcttttgaaacccacactcataggcaactgtgaccaaaccaaactcttacctactaggttgagctcatctgcccgggatatgttatttatccattaccaacacttcttttgtgtcaaatgtatgggataggaattagtagcaaaaccatcaatttactttaatgaatcattggtccccttactaggttttgaggatttagctttcagtaatacaggcatgtgccacagaaaggagcatgtcgtgtgtgtgtgtgtgtgtgtgtgtgtgtgtgtgtcaatgtggagaacttacaggctgcactgattcctacttgactggaacttagccaacaattaagaatccaggatctcctaaatacagaaaatccccaaagcatacttgatcatgctcctacctcaaaacacacaaagcattcttgattattgaagcaataggtcttcaccttgttttctttgaagactggtattattcacttaagaaaaaaaaccaaaatgcagaataccatattttagatgaatctatcctataattgctagcctcaaggcacaagtaatatccttgctagatactttttcttattcaaagaaaagataaagaatggtgaatggaaggaaattcactttaaaataattgtagattgcactcctgccctatcaagcttagtagaagtgcaaagtattgaaacctaatgggggatgcccttttcccactttttttcttgtttaattttagagtgacaaaactcagatccagcttgtggatgcacttggggaaacagctcccagagccccccaactctcgccctactgtggagacccagaaaggatcttcataggacacaccccaagatgaagtcaataggcacgtttccataactccctgttcccaaggtttggataacctacgctcatttagcaggacccttcccctccggggttgttgctgggggccttttttttttttgagatagggtcttgccctgttacccaggttggagtacagtgccaagaccatggctcatggcagccccaatctcctcgagtgatcctctcacctcagccttccaagtagctgggatcacaggcgcatgcccctgtgcctgggtaattaaaaaaaaaa

SEQ ID NO: 2394 - DNA, 1366 bp, Homo sapiens
cgggttgtggtcaatatgttttttagaaataaagacggaaagctctcgcagtgcatagtatataaggacactgtcttgtgatacttgatgtatgtatgtatcgctcgcacctacctccacttactcacaaatacacaaacatacacaatgaattccacagatattggattgtgatgtaatctttatttcttactctgagctccagttagaaaagtttgacaatcattgttatagagctatgttcagaaagtggagactttctgactcactgtgagctctgctgtatctatgcgctccctggagagggagcaacttgctaaggtacagtcctggccattggcatggatatttattgttccacatgttgggaaaaccatgtgcaataaaaatcaaacatatgaaacaatggctgtcattgtaccacagtatacattgtatcttggtgaaggttcttaaattactccttggagtttcctaattcacttcaggaaggatttgttgtgttccgtctttatgctgtcacttgcaaacacttttgctttgctagttcttgtattagatcttcatatacttgcaaaaagaggtcctcttcagattttgttccatccaggtacacaacttcccatgtgatgtcctgcatttcttgtctgtactttagatacatgggccacacatggccatcaaagtatcccggagagtctggaggctgatagacccttgtactcctcctccttttacattcttcatatggaatagtcaggaaatagcttctattccatatagtgtcaaggggcttataattaaaaagaagaaaaccttcgatgattaaaatgggaatttcctcagcactttcctggtctgttgataccacagagtgtcttgcgctttccatccagcaggaaatggctgacatcattttttccatgttaagtgcttcaagcacatcgtactgcaaaaatccatttttatctgtctctatctcagactctggcttgaagaaatcatcctgagatatgacactgcaatttgggaggtgtttctgcaaattcttagccagtgttgttttgccactgtttgtcacaccactgattccaatgataaatgttttcataattagctttgaaaatcacagcttcctaatatttcctggcgccagttcgagtcctcccaaacacagcggcagaggcgacagccaagcgcgcgcctgtacccagtgcgccgctacccgcagctcgctccccgagaggcccacagcccctttccccacgctcctcctgggttagagggatgccaggtaggggcggtcaccagaggccccttttctctactctcggcgccgggttccagcccccgttggggcacgaaa

SEQ ID NO: 2395 - DNA, 1366 bp, Homo sapiens; identical to SEQ ID NO: 2394

SEQ ID NO: 2396 - DNA, 2303 bp, Homo sapiens
ttttttttttttcagtctgtcatttttattaagcctgcagagctgttttttttttctacacacgacaaatactttgatataatctaggataataaaatagttgaacaactttttaagatttatatttgtatagaaacaatctgtggaactcctcccctcaaaatgaaggtgtctaaaaacagtgattcatcagcattgctttaaataattgtttggttaaaagttgtggtttccattctcaaccgaaatgcgtctccatgcagttttccttgggtccaaagcttaaggccttgggaagggggccaagaaaaaaagaatggccactctcctttctgtccttcccttgtgtggaggacagtgattgaaacaggggagttaaaaagccaggaagaaaagaaatcaattgcacatctctagttcgcaagcgtcaaagtcacaacaagtctgtacacaacaactctctatctgtagatatgaaattccatcatgatagcacagcgcctgcttgcccctaaatgttcctttcttctgctaatcatgtcagttactatggatgggctgtggccataagttctccctcaagggctggtccttctgtcaccttgaagtgtcagcccctgaattatgccacttggatgctatgtcttgatacccaataaaggtctaccatcccctaagaaatcccttaccccaccctcaaacccccaaagtgcctaagagtgaagacgaagatgccatggagacggcgtcttcagtgaacacctccccaaagatgcccggggactcgggcctatatcatcccattgatcttagtccactcgtagatgtcctgttcgcacactatgtcagagttgatgaggaggtatctgtcacctacacagaaatgcttctgacaggcggcgcacttgaaacattccaggtgatacactttgtctttcacccgcattgtcatctcataggcacgaatccgcttgtcacaggatgcgcagagaccgtcttgcccaaaaagcctgagatagtctctccggcagagcttccggcccagtttgtagtagaggcgccgccccacctcacccagccggcagccacagaggtcgcagctcaggcagtcctcgtgccagtactggtcgatggccttcaggaagtagcggtccccgatgttctgctggcagccgccgcatgtcagcagggatggggggatctgcagcacctcatccactggttcctctgaagggtccaggctcttcctttcgatggccgaggacattggggagggaggcggggtgccgggcggcgggggcgctccctttgtggcgcggggctggccggctgccggggctcggaccccctcgggtgctcgggcgccgccgccgccgccgccgtcgccgccgctcctgcctccgcttgctcggcctccgccggcgagctcgcccctccgcgctcaaggacagtcaccgcgctcccttccatcccggtcccgccgccgccaccgcccggtccctctcgcgcgctgtcgccggctccgcgccgcccgcggggatggtgtgcgcccgcccggccgcccggagcccctggcacctttccggccccgggtcgcggcgccctgctcgccgccgagggcagagagggggcggcggcctaggggcggggaggggaccgtgcgtctctctccgggcttcctcctctctcgggaaggtctattttggctcaggcttccctctgtctctgtttcatttcctttttcctgcctctccactagctactgcaagttcaggttgaaaaatatcttcttttcagagcagttgttacagcagatgatgtaatcctggtggcttcccccatcagatctaggctgcctgccccacggataccttctgggctaattgcctgctttgcacctgttccttctcgggaggccctggcaccctagcacctggtgcctgtgccatctcccctctctgccaggacacccagaggcccttgtgaatagcaaagcccacttaacggctgagggcaggtgggggtatttccttctcaattctgctcaaggcccgttgctgttctttgaggatgttgcaaatccagggtttggagggctgggcctcttggtggcctggttgtctatctgatagggcggagccttcacccttgcagcgagctctctcacaccagatgtgctctgcgtggaatcctaggccatcaggggattccttagcaagccctgcaggacccaaatcctaactcagaccctcatcctcctactcagaatgtggagacttgtgatcctcagtttggacgaattc

SEQ ID NO: 2397 - DNA, 986 bp, Homo sapiens
  misc_feature (1)...(986): n = a,t,c or g
ttttttttttttgatctttacaaagataatctttattcataatcacaggccacaggggtgagacctgaggtttgggttctgtggtgaaggagaacccctgtcctcctgtcccttgccctgggcctctgctggctgaggagggacaaggtgagggggcccccatggtgctcagacaaccagagcctccctggcagggcaggagtgtgggtgccacagagacaagccccttgcagagctgacctggagcccaccatccccatagcctgtgtgagcatgaagcgaggacccccgggtgggctgtgccctgggcttgtcactgatgccagtggaggctggcacctgcccctctcggcacctgagacagtgagggaaggtagctgctgccgtgaagaacaaagatgctctgagcacacacttgctggggctgagctgaggggcacacggaggcaggccctgcctgtggtctggtcagctgtccctgccgccgctacttttctggtctggggctgtagccttggtcaggttcccagcttccctcttgcggacgctgagcaaagctctagaagctctccaggatcttgaggtaggtggcctccgtctccgcgatggtctggtagaacttactgcaagaggcaatcttgcgtgccaggttctcgttgacgcgggccagcttctcgttgacgcaggccagcttctctgtcagctgcctcacctcattctgcagccgctgtttcttgtcctcctcctgctggatctgccagcacagctcctcctgcttctggcatagctcctctatgcatttgaccagcttgttgtcgtagttctgcagcgccatgccctgctgggtcaacatctcctggggcccccaaaagtcaagctgtgactccacaaaaacaaagtgaacaccatctgtaggcaaaggtggctttcttaacttcagggacnccaatctcttcgaagtccncgncaattgcantgtactcaca

SEQ ID NO: 2398 - DNA, 1830 bp, Homo sapiens
  misc_feature (1)...(1830): n = a,t,c or g
ggaattcgcggcaagatggcggaccgtggcggcgtgggtgaagccgcagctgttggagcgtctcctgcatctgtccctggcctaaacccgacgctaggctggagggagcgactgcgggccgggctggcggggactggggcctcgttgtggttcgtggcggggctggggctgctttacgccctgaggatccctttgaggctgtgtgagaatttggcagcggtgactgtatttttaaattcattgacacccaaattctatgtggcacttacagggacctcttcattgatatcaggactaatatttatatttgaatggtggtacttccataagcatggcacatcttttattgagcaagtatctgtaagccatttgcaaccactgatgggaggaacagagagcagcatttcagaaccaggttctccttcgaggaacagagaaaatgaaaccagcagacagaatttgtcagaatgtaaggtatggagaaaccctctaaatcttttcagaggagcagaatataggagatacacttgggtgactggtaaagagccacttacatactatgacatgaacctgtcagctcaggaccatcagacctttttcacctgtgacacagattttttacgtccttcagacacagttatgcagaaggcttggagggaaagaaatcctccagctcgaatcaaagcagcctatcaagctttagaattaaacaatgactgtgccactgcatatgttctactggctgaggaagaagcaacaactattgtagatgctgaaaggttatttaaacaggcactcaaggcaggagaaacaatttataggcagtcacagcagtgccagcaccaaagtcctcagcatgaagctcaactgaggagagataccaatgtactggtatatattaattgaagattggcaatgtgtgcaagaaaattaggaagaataagagaagcagtaaaaataatgagagatttgatgaatgaatttcctcctcttaccatgttgaacatccatgaaaatctcttagaatcacttttagaattacaggcctatccagatgttcaggcagtcctagcaaaatatgatgatataagccttccaaagtcagcagcaatctgttacacagcagcactgttgaagacaaggactgtttcagaaaaattctctccagaaacagcctccacaagaggattaagcgcagcagaaattaatgccgtggatgcaattcatagagctgtggaatttaatcctcatgttccaaaatatttattagagatgaaaagtttaattttacctccagaacacattctgaaacggggtgatagtgaagcaattgcctatgctttctttcatcttcagcactggaaacgaatagaaggtgctcttaatctgttacagtgtacatgggaaggcagtaagtattcttttccaaaagtaacactaatctctctaactattcattgaattcacaggcagtctttttaaatgagattgtctgggtttccataaggatttgtcgttcagattggtttcaaatggaaattagtgatgagatatttggtttattggtagaaatgcataatgttatattgatcccacaaaagcagaatgagaaattgttatggtattctgccatatgttaatttaagttacatatttgtaaggaaagaaaatgaaaacttggccctttgacttacaactttttttgnnnnnnnnnngagacggagtctcactttgtcccccagagcaataaagtcagttggctttctctaaggnnnnnnnnnnntacaatatctttattcaaacaaaaataaaaaaaaagggggggctttt

SEQ ID NO: 2399 - DNA, 2895 bp, Homo sapiens
gacccacgcgtccgggggaagactgttaaccccatccacgccaccagaattagctctttcccttttggtttgcaagcactgcctgtaaagccctcgcatgagaggccagcctgctagggaaatccaggaatctgcaacaaaaacgatgacagtctgaaatactctctggtgccaacctccaaattctcgtctgtcacttcagacccccactagttgacagagcagcagaatttcaactccagtagacttgaatatgcctctgggcaaagaagcagagctaacgaggaaagggatttaaagagtttttcttgggtgtttgtcaaacttttattccctgtctgtgtgcagaggggattcaacttcaatttttctgcagtggctctgggtccagccccttacttaaagatctggaaagcatgaagactgggctttttttcctatgtctcttgggaactgcagctgcaatcccgacaaatgcaagattattatctgatcattccaaaccaactgctgaaacggtagcacccgacaacactgcaatccccagtttaagggctgaagctgaagaaaatgaaaaagaaacagcagtatccacagaagacgattcccaccataaggctgaaaaatcatcagtactaaagtcaaaagaggaaagccatgaacagtcagcagaacaggggcaagagttctaggccaagagctggggattgaaggattcaagagggacagtgatgggtcactttaagtgtggaatttgggagtatggcaccaacttgaagggtacattggacataaaagaagatatgagtgagcctcaggagaaaaaactctcagagaacactgattttttggctcctggtgttagttccttcacagattctaaccaacaagaaagtatcacaaagagagaggaaaaccaagaacaacctagaaattattcacatcatcagttgaacaggagcagtaaacatagccaaggcctaagggatcaaggaaaccaagagcaggatccaaatatttccaatggagaagaggaagaagaaaaagagccaggtgaagttggtacccacaatgataaccaagaaagaaagacagaaattgcccagggagcatgctaacagcaagcaggaggaagacaatacccaatctgatgatattttggaagagtctgatcaaccaactcaagtaagcaagatgcaggaggatgaatttgatcagggtaaccaagaacaagaagataactccaatgcagaaatggaagaggaaaatgcatcgaacgtcaataagcacattcaagaaactgaatggcagagtcaagagggtaaaactggcctagaagctatcagcaaccacaaagagacagaagaaaagactgtttctgaggctctgctcatggaacctactgatgatggtaataccacgcccagaaatcatggagttgatgatgatggcgatgatgatggcgatgatggcggcactgatggccccaggcacagtgcaaagtgatgactactttcatcccaagccaggccttttctgggaggccgagagagcttcattccattgcctattcaccttcaaaattgagggagcaaagagaaaaagtacatgaaaatgaaaatataggtaccactgagcctggagagcaccaagaggccaagaaagcagagaactcatcaaatgaggaggaaacgtcaagtgaaggcaacatgaggggtgcatgctgtggattcttgcatgagcttccagtgtaaaagagggcacatctgtaaggcagaccaacagggaaaaacctcacttgtgtcttgccaggatccagtgacttggtcctccaacaaaaccccttgatcaagtttgtggcactgacaatcagacctatgctagttcctgtcatctattcgctactaaatgcagactggaggggaccaaaaaggggcatcaactccagctggattattttggaagcctccaaatctattcctactttgtcgggactttgaagtgattcaagtttcctctacggatgagagactgggctcaagaatatcctcatgcagctttatgaagccaactctgaacacgctggttatctaaatgagaagccagagaaataaagtcaagaaaatttacctgggatgaaaagaggcttttggctggggaccatcccattgatcttctcttaagggactttaagaaaaactaccacatgtatgtgtatcctgtgcactggcagtttagtgaacttgaccaacaccctatggatagagtcttgacacattctgaacttgctcctctgcgagcatctctggtgcccatggaacactgcataacccgtttctttgaggagtgtgaccccaacaaggataagcacatcaccctgaaggagtggggccactgctttggaattaaagaagaggacatagatgaaaatctcttgttttgaacgaagattttaaagaactcaactttccagcatcctcctctgttctaaccacttcagaaatatatgcagctgtgatacttgtagatttatatttagcaaaatgttagcatgtatgacaagacaatgagagtaattgcttgacaacaacctatgcaccaggtatttaacattaactttggaaacaaaaatgtacaattaagtaaagtcaacatatgcaaaatactgtacattgtgaacagaagtttaattcatagtaatttcactctctgcattgacttatgagataattaatgattaaactattaatgataaaaataatgcatttgtattgttcataatatcatgtgcacttcaagaaaatggaatgctactcttttgtggtttacgtgtattattttcaatatcttaataccctaataaagagtccataaaaatccatctcaaaaaaaaaa

SEQ ID NO: 2400 - DNA, 3647 bp, Homo sapiens
tttttttgagacttgtgagtctccctctgttacccaggctggagtgcagtggcacgatctctgctcactgcaacctccatctcctgggttcaagagattctcacgcctcagcctcccaagtagctgggattaacaagcggccgccaaccacgcccggctaatttttgtattttagtagatgcggggttttgccatttttgccaggctggcctccaactcccgacctcaaaagatccgcccgtcttggcctcccaaagtgctgggattacaggcatgagccaccgtgcctggcctgcgagtttaattattttttcgggggtgggtgaacttctcgcagcggcccccttgtgggggtaacccggtggcgggtttcacttcggggtttggaggggaagttggagtctgtggggcgggtcccgcccggccccgaatgtcacggccgaggttctcggaagcagcagagtgaagttccttcctgccctgaccccaggtctatggcttaaaaatcagggtgcccaggctggggccgcgcagcccaggggccctctgtaaacatggcaggtgcagccagaaggggcttccgggaccccgggggacctgcggtgggcagggcagagggtcagggtgaccagagccatggagagggcaatgcccggaggacacgtagatatggggtgggggagttaggacccccaacatggagagagacaggggccaagaaagacagagaaaaggagacagagggagatctggagaatgggggagggaaggaaagagaaagagggtgagagaaccccaaacaagagccagagccggagaaatgaggacccctggatgtggctggtcttggtccgtggctcccgccgccgcagcctccggcgcagacgggcccaggggcggctctgcttggggcgggtcctcggtgctcagcgggcggcaggcggcgggccggggcccggggcgcgcactgggtgcgccagggtgacagtgagcgcgtcgttgtgctgcaccagcgaggcgtgctggtagtgcagcaccagctccttcagcgacccgtacaggttgtagggctccgcgaagccgaagccggtggccgtgcggtagatgacgcagtgcttggtgtcgccgtccactaccacggagcaggcgtagcagccccgctggctgctctcgcggatgaggaaggtgccatcccgcttgccgctcagcatctcctctgcctgcgtgcggttgatcttgcccacgtaccaagtgcgttcctcgtggtgcgggagatcgtcctcgtcctccatgagtgcgtactggtcctcagtctcatttttaatccccagccactcgttgattttcttctgccgggcgcctttctgggtgagccacacgaggtactggtctcggatcttgcgcagctgcatgaggtccggcttgaggcttgttcaatgcggcttgtcgaatctctcttgttgtccgaagccctgggcaccagcagctgctgctcccagcttcggtgcggctctcatggatctcgggcaatgcgggacttgagccgctcggagttcagcaggatcctttgcatctctttcgtcggttgccctcacgccggaagcgctccaggtattccttgctgcatttctcttgagtctggccctgctcttcaaagatcttgatagtctcattgaaggcctcaattgcagtacgcttcatctgcagctcctgggaggtccgtgtgtactcttcataaagctggtcatactcgcggctcttgtcctggtactgctggtgatagaccttaagctgggcgcccactgcctccacgctgtcctccttgacaatctggtcctgctggtatttggacacagggtagaggagccgtgtgtccagcttggcattgtactgggccagagactcgtggcggtagtgattgatgaggtccacaacggagcagaaggtgagtggctctgagaagccatagtgcccatctcggtggaagaccttgatcagcttattgttcccgcctttcctgagggtcagcgtgtactcgccctggatcttgctagaagcatctcggactaggaaggtgccatcgggagtgtcccggagtttctcgttcacctcctcccttgaaattgtccccccagtaccactcagcatcctagcagggagggtgggctccctccatttgggccagggactgtggaggccggctttggccttggggggtttaggcggcagcgctgggggcgcaacctcctgctcttccaagtgttcctgaagcagcttctccaccagcagcgccgggaagtcagggctgggctcactcccgtcgggagcgccccctggcggcggcgaggacggcggcggcggcgcgcgcagcagcagcggcccaaaggtggcgcccagggcccggaccgcgggacccagggccggggcgcggctggccacgcggcccaggtgctggagcaggaagcgcagcgtgagcgcgcggtgcagcggcagcgtcggtggctccagcgccggccccacgggccccgcggcctcccgcagggcccggcgcgcctcggccgaggcctcgggggtcacgagcggcgcgggcagtgccagcaggaagctcttaatgccgtcagccagggctgccgtgtcccactgatccacgtcgctcagggaccagtctgtacgcggtgcgggcagctccgggcggtagtgagattcgctgtccagccctgtcctttcaatggcctccacaagcttcaccagaagagggggagccacatcaggtggggagaactgctcgggcaagtcggggagtgtgaggcctggctcaggggccccatcacggggcctggcgggcagtgggcgggggccccgtgggcgagggccgggccgggccagggccacgggccccaggaactccacataggtgccagggaagtcacctcgctgccgtgtgcgctcgttgaggccgggcatccagcccacgctctgtgggcagcgctcgccaccctcggccacgcccagcgcctgcaaggccgcccggctcactaccagcacgtcgccgggcagcagctccaggtcctccggccgctcccggcggaacgggtacagagcgcggtactggaagccctcagggcccgccatggccgcgtgagtggggtggggtctggatggttaggtggctgcttggagccccactggccccattggttgaagcagggctgggagggtccgctgggttggcttggggtgctgggacctctatctccagcagtcacaggcgaccacaggggccgctcatgcctcgcttcaaattattccatgacccttacaagggccactcgtcactgggtccaccattcgtcagctggtgggagggagttggtggtgtggtgtcaggtcactgggccattgagtcctccatcagcaggtgaggctggggcaggccgctcacgccctcacacggagggccatgggcgcccaaggctggcggctctgctggctgcaccagacaagggagccaagggtgcaggctgccaccatgctcggccagctgaggacgccgacctggtcgcggccgccaccgccgccgcagccgccgtcacaccaagccaagcccgccccgtggctccaccgcggccaccgtcgccgcagccgcg

SEQ ID NO: 2401 - DNA, 2459 bp, Homo sapiens
ctactatcatggtacttagagattgtaggggctggataataaacaagggatgtaaacagctggaaagaactttgcttcaatcattacaacaaggaaactacaaactgctaccgtacaacaaggaaatggacaaactacaaaataatttttctaggacccttcagagaactgaggtcacagggcaaccaagtaatcttaaatctggggaaagaaagatgccagctgagagaaacaggactcaagctttacttacctgggatggactctgccagacaccatataagccactctacttctgcaggccccatcccttcccagaaagaagaggaaatgactgagtcccagggaacagtaacattcaaagatgtggctatcgacttcactcaggaggagtggaagagattggatcctgctcagagaaaactgtaccggaatgtgatgctataaaactataacaacttaatcacagtaggctatccgttcaccaaacctgatgtgattttcaaattggagcaagaagaaaaaccatgggtgatggaggaagaagtattaaggagacactggcaaggagaaatatggggagttgatgagcatcagaaaaaccaggacagacttttgagacaagttgaagttaaattccagaaaacactgactgaagaaaaaggcaatgaatgtcaaaagaaatttgcaaatgtatttcctctgaactctgattttttcccttccagacacaatctctatgagtatgacttatttggaaagtgtttagaacataattttgactgtcataataatgtgaaatgccttatgagaaaggagcattgtgaatataatgaacctgtgaaatcatatggtaatagctcatcccattttgtcattaccccctttaagtgtaatcattgtggaaaaggcttcaatcagactttggacctcatcagacatctgagaattcatactggagagaagccctatgaatgtagtaactgtagaaaagccttcagtcacaaggaaaaacttattaaacattataaaattcacagtagggagcagtcttacaaatgtaatgaatgtggtaaagctttcattaaaatgtcaaatctcattagacatcaaagaattcatactggagagaagccctatgcatgtaaggaatgtgagaagtccttcagccagaaatcaaatcttattgatcatgaaaaaattcatactggagagaaaccttatgaatgtaatgagtgtggaaaagcattcagccagaagcaaagcctcattgcacatcagaaagttcatactggggagaaaccttatgcatgtaatgaatgtggtaaagccttccctcgaattgcatcccttgctcttcatatgagaagtcatacaggagaaaaaccttataaatgtgataaatgtggtaaagccttctctcagttttccatgcttattatacatgttagaattcatacaggtgaaaaaccctatgaatgtaatgagtgtggaaaagccttctctcaaagctcagcccttactgtacatatgagaagtcacactggtgagaaaccctatgaatgtaaggaatgcagaaaagccttcagccacaagaaaaacttcattacacaccagaaaattcatactagagagaaaccttatgagtgtaatgaatgtgggaaagcttttatacagatgtcaaatcttgttagacaccagagaattcatactggggaaaaaccctatatatgtaaggaatgtgggaaagcctttagccagaaatcaaatctcattgctcatgaaaaaattcattctggagagaaaccctatgaatgcaatgaatgtggtaaagccttcagccaaaagcaaaacttcattacacatcaaaaagttcatactggagagaaaccttatgattgtaatgaatgtggcaaagccttctctcaaattgcatcccttacccttcatttgagaagtcatacaggggaaaagccttatgaatgtgataaatgtggtaaagccttctctcagtgctcactgcttaatttacatatgagaagtcacacaggtgagaagccctatgtatgtaatgaatgtgggaaagccttctctcaaagaactttccttattgtgcacatgagaggccatacaggtgaaaaaccctatgaatgtaatgagtgtggaaaagccttctctcaaagctcatcccttactatacatatacgaggacatacaggtgagaaaccctatgaatgtaaggaatgcagaaaagccttcagccacaagaaaaacttcattacacaccagaaaattcatactagagagaaccctttaagtgtaatcattgtggaaaaggcttcaatcagactttggacctcatcagacatctgagaattcatactggagagaagccctatgaatgtagtaactgtagaaaagccttcagtcacaaggaaaaacttattaaacattataaa

SEQ ID NO: 2402 - DNA, 1672 bp, Homo sapiens
tttcgtggggcggcgggagtgcgggtgggcgtttaaaggggccttcggcacccaggtcggttcgccgccgggactgctgacggggagggctaggtagccctgggagtcgggatctagaaggtagaggagaagcggggctgtctgacccccggaggtgacaaggggagaggggctgtgtgaataccctccatgggcagtaatgggatgactatccccagggagcattgcgaaggagagaggcggctgagggactgcactttctggggccccccgggagagtcagagggcagttaagagggatcacaggcccggcttggtactgtcactccccttcccactccctgctctcagcattctgtcacctccctaccccgtcgcggtgcccagccatggccagacctcccgtgcccggttcggtggttgtcccaaactggcacgagagtgccgagggcaaggagtacctggcttgcattctgcgcaagaaccgccggcgggtgtttgggctgcttgagcggccagtgctgctgccgcctgtgtccattgacactgccagctacaagatctttgtgtccgggaagagtggtgtgggcaagacggcgctggtggccaagctggctggcctggaggtgcctgtggtgcaccacgagaccaccggcatccagaccaccgtggtattttggccagccaagctgcaggccagcagccgtgtcgtcatgtttcgttttgagttctgggactgtggagagtctgcactcaaaaagttcgatcatatgctgctggcttgcatggagaacacagatgccttcctcttcctcttctccttcactgaccgtgcctcctttgaagacctccctggacagctggcccgcatagcaggtgaggcccctggtgtcgtcaggatggtcatcggctccaaatttgaccagtacatgcacacggacgtgcccgagcgggacctcacagccttccggcaggcctgggagctgcccctgctacgggtgaagagtgtgccggggcggcggctgggctgatgggcgcacactggacgggcgggctgggctggccgaccgttgcccacatacttcaatggccttgctgagcagctgtggcaccaggaccaggtggcggctggcctgcttcccaaccccccagagagtgctcctgaatgagtcacgagtggttgcctgtgatcccacccccaaccctcaggtctcgacatagggctggaggctggggcaggaacatggatcctatctggaggactggccagcatggcctgatcagggaggatgtggccagagaaggcccacccgcgagcagcgctttccttgcagaattcatggcagggaggtggggaccaaggccctgagctcgaacatctcccgtggcctttccccctttggcagcaccgatggaggatgactgggagagggggtgcctctcaagttacttcaatcaagaacctgtattggttgaggtgacaccatctgttgtaacagataaaccccgaaatcccagtgctgaactccagagacgtgttcgttctcacgtaggcctcagctcgggaggaggtgacagtgggcgtggggctctgctccaggcgctcctgcagagacccagccccagagaccctaccctgcccagttgccctagggtgtcagcacccagtcag

SEQ ID NO: 2403 - DNA, 2523 bp, Homo sapiens
cgatttcgtcggctggccggcagcagttactcggtgtttccggtgcgaggccagaggtggggaagccatcggacgtcggcggtgaggatcttctcctgacccagcatcgctcatcacaatgaagaaccaagacaaaaagaacggggctgccaaacaatccaatccaaaaagcagcccaggacaaccggaagcaggacccgagggagcccaggagcggcccagccaggcggctcctgcagtagaagcagaaggtcccggcagcagccaggctcctcggaagccggagggggctcaagccagaacggctcagtctggggcccttcgtgatgtctctgaggagctgagccgccaactggaagacatactgagcacatactgtgtggacaataaccaggggggccccggcgaggatggggcacagggtgagccggctgaacccgaagatgcagagaagtcccggacctatgtggcaaggaatggggagcctgaaccaactccagtagtcaatggagagaaggaaccctccaagggggatccaaacacagaagagatccggcagagtgacgaggtcggagaccgagaccatcgaaggccacaggagaagaaaaaagccaagggtttggggaaggagatcacgttgctgatgcagacattgaatactctgagtaccccagaggagaagctggctgctctgtgcaagaagtatgctgaactgctggaggagcaccggaattcacagaagcagatgaagctcctacagaaaaagcagagccagctggtgcaagagaaggaccacctgcgcggtgagcacagcaaggccgtcctggcccgcagcaagcttgagagcctatgccgtgagctgcagcggcacaaccgctccctcaaggaagaaggtgtgcagcgggcccgggaggaggaggagaagcgcaaggaggtgacctcgcacttccaggtgacactgaatgacattcagctgcagatggaacagcacaatgagcgcaactccaagctgcgccaagagaacatggagctggctgagaggctcaagaagctgattgagcagtatgagctgcgcgaggagcatatcgacaaagtcttcaaacacaaggacctacaacagcagctggtggatgccaagctccagcaggcccaggagatgctaaaggaggcagaagagcggcaccagcgggagaaggattttctcctgaaagaggcagtagagtcccagaggatgtgtgagctgatgaagcagcaagagacccacctgaagcaacagcttgccctatacacagagaagtttgaggagttccagaacacactttccaaaagcagcgaggtattcaccacattcaagcaggagatggaaaagatgactaagaagatcaagaagctggagaaagaaaccaccatgtaccggtcccggtgggagagcagcaacaaggccctgcttgagatggctgaggagaaaacagtccgggataaagaactggagggcctgcaggtaaaaatccaacggctggagaagctgtgccgggcactgcagacagagcgcaatgacctgaacaagagggtacaggacctgagtgctggtggccagggctccctcactgacagtggccctgagaggaggccagaggggcctggggctcaagcacccagctcccccagggtcacagaagcgccttgctacccaggagcaccgagcacagaagcatcaggccagactgggcctcaagagcccacctccgccagggcctagagagcctggtgttgggtcatgctgggaagggagcggcagcccagcaagggcttggcccataaaaggctaccatgctaagcagcccattgctgaagccaggatgttgtggcctggctggcatctggcacttgcaattttggattttgtgggtcagttttacgtacatagggcattttgcaaggccgtgcaaatgcatttatacctgtaagtgtgcagtgggcttgcattggggatgggggtgtgtacagatgaagtcagtggcttgtctgtgagctgaagagtcttgagaggggctgtcatctgtagctgccgtcgcagtgagttggcagaagtaacttaagcatttctctgtctggtgtgaggctcagacccctccctgcccttcagagatcaagacaagtaatacacccaggtcttgactgcatttgtcttgtgagcagggcttgcttggtcagctcaggccctcctagctgctctggaggctcctttgattctctagacctggaaaaggtgtccctaggcagagccctggcagggcgctcagagctggggatttcctgcctggaacaagggacctggagaatgtttttgcgtgggatgatgtgctggtcaggagccccttgggcatcgcttcccctgccctttggtagtgccaggaccaggccaatgatgcttctcagtagccttatcattcacaggtgcctctctagcctgcacaaatgattgacaagagatcacccaaaggattatttctgaaggtgttg

SEQ ID NO: 2404 - DNA, 3556 bp, Homo sapiens
cgacgatttcgtgtgggaccaacggacggacggacggacgcgcgcacctaccgaggcgcgggcgctgcagaggctcccagcccaagcctgagcctgagcccgccccgaggtccccgccccgcccgcctggctctctcgccgcggagccgccaagatgggggacaagaaagatgacaaggactcacccaagaagaacaagggcaaggagcgccgggacctggatgacctcaagaaggaggtggctatgacagagcacaagatgtcagtggaagaggtctgccggaaatacaacacagactgtgtgcagggtttgacccacagcaaagcccaggagatcctggcccgggatgggcctaacgcactcacgccaccgcctaccaccccagagtgggtcaagttttgccgacagctcttcgggggcttctccatcctgctgtggatcggggctatcctctgcttcctggcctacggtatccaggcgggcaccgaggacgacccctctggtgacaacctgtacctgggcatcgtgctggcggccgtggtgatcatcactggctgcttctcctactaccaggaggccaagagctccaagatcatggagtccttcaagaacatggtgccccagcaagccctggtgatccgggaaggtgagaagatgcaggtgaacgctgaggaggtggtggtcggggacctggtggagatcaagggtggagaccgagtgccagctgacctgcggatcatctcagcccacggctgcaaggtggacaactcctccctgactggcgaatccgagccccagactcgctctcccgactgcactcacgagaaaccctttgaagactcggaacatcaccttcttttccaacaactttgtagaaggcacggctcggggcgtggtggtggccacgggcgaccgcactgtcatgggccgtatcgccaccctggcatcagggctggaggtgggcaagacgcccatcgccatcgagattgagcacttcatccagctcatcaccggcgtggctgtcttcctgggtgtctccttcttcatcctctccctcattctcggatacacctggcttgaggctgtcatcttcctcatcggcatcatcgtggccaatgtcccagagggtctgctggccactgtcactgtgtgtctgacgctgaccgccaagcgcatggcccggaagaactgcctggtgaagaacctggaggctgtagaaaccctgggctccacgtccaccatctgctcagataagacagggaccctcactcagaaccgcatgacagtcgcccacatgtggtttgacaaccagatccacgaggctgacaccactgaggaccagtcagggacctcatttgacaagagttcgcacacctgggtggccctgttttgacatcgctggggttttgcaatcgccctgtcttcaagggtggtcaggacaacatccctgtgctcaagagggatgtggctggggatgcgtctgagtctgccctgctcaagtgcatcgagctgtcctctggctccgtgaagctgatgcgtgaacgcaacaagaaagtggctgagattcccttcaattccaccaacaaataccagctctccatccatgagaccgaggaccccaacgacaaccgatacctgctggtgatgaagggtgcccccgagcgcatcctggaccgctgctccaccatcctgctacagggcaaggagcagcctctggacgaggaaatgaaggaggccttccagaatgcctaccttgagctcggtggcctgggcgagcgcgtgcttggtttctgccattattacctgcccgaggagcagttccccaagggctttgccttcgactgtgatgacgtgaacttcaccacggacaacctctgctttgtgggcctcatgtccatgatcggcccaccccgggcagccgtccctgacgcggtgggcaagtgtcgcagcgcaggcatcaaggtcatcatggtcaccggcgatcaccccatcacggccaaggccattgccaagggtgtgggcatcatctttgagggcaacgagactgtggaggacatcgccgcccggctcaacattcccgtcagccaggttaacccccgggatgccaaggcctgcgtgatccacggcaccgacctcaaggacttcacctccgagcaaatcgacgagatcctgcagaatcacaccgagatcgtcttcgcccgcacatccccccagcagaagctcatcattgtggagggctgtcagagacagggtgcaattgtggctgtgaccggggatggtgtgaacgactcccccgctctgaagaaggccgacattggggtggccatgggcatcgctggctctgacgtctccaagcaggcagctgacatgatcctgctggacgacaactttgcctccatcgtcacaggggtggaggagggccgcctgatcttcgacaacctaaagaagtccattgcctacaccctgaccagcaatatcccggagatcacgcccttcctgctgttcatcatggccaacatcccgctgcccctgggcaccatcaccatcctctgcatcgatctgggcactgacatggtccctgccatctcactggcgtacgaggctgccgaaagcgacatcatgaagagacagcccaggaacccgcggacggacaaattggtcaatgagagactcatcagcatggcctacgggcagattggaatgatccaggctctcggtggcttcttctcttactttgtgatcctggcagaaaatggcttcttgcccggcaacctggtgggcatccggctgaactgggatgaccgcaccgtcaatgacctggaagacagttacgggcagcagtggacatacgagcagaggaaggtggtggagttcacctgccacacggccttctttgtgagcatcgttgtcgtccagtgggccgatctgatcatctgcaagacccggaggaactcggtcttccagcagggcatgaagaacaagatcctgatcttcgggctgtttgaggagacggccctggctgccttcctgtcctactgccccggcatggacgtggccctgcgcatgtaccctctcaagcccagctggtggttctgtgccttcccctacagtttcctcatcttcgtctacgacgaaatccgcaaactcatcctgcgcaggaacccagggggttgggtggagaaggaaacctactactgacctcagccccaccacatcgcccatctcttccccgtcccccaggcccaggaccgcccctgtcagtccccccaattttgtattctggggggaggagccctctcttcctgtggccccaccttggcccccaccccctccactatctcctgccgcccccactctggctggcttctctcccctgccccaaacctctctcctctctcttttctgtgtcagtttctctccctctcctcacccctctatccattcctcccgccccagccacctccctgggctcttttttactccccttcagccccccggctgatgccatctctggttctggacaattatcaaatatatcaggggggaaaaaaaaaa

SEQ ID NO: 2405 - DNA, 6762 bp, Homo sapiens
tttcgtccgggcttgaggttgaattaagaatagtcaggtggtgagtggaacgtctcttggggtgtcggaattcaaaacggacctggaggatgttgatctccaagaacatgccctggcggcggctgcagggcatttccttcgggatgtattcggctgaagagctcaagaaattaagtgttaaatccattacgaaccctcgatacctggacagcctggggaacccatcggcaaacggcctgtacgatttagctttgggccctgcagattccaaagaggtgtgctccacctgcgtgcaggacttcagcaactgttctgggcacctgggccacattgagctcccactcacagtgtataaccctctcctcttcgataagctgtacctgctgcttcggggctcttgtttaaactgccacatgctgacttgtccccgggccgtgattcacctcttactctgccagctgagggttctggaagtcggggccctacaagcagtctacgagcttgagagaattctgaacaggtttctggaagaaaatcccgatccctctgcctctgaaattcgggaggaattagaacaatacacaactgaaattgtgcagaacaacctcctggggtcccagggcgcacatgtaaagaacgtgtgtgagagcaagagcaagctcattgctctcttctggaaggcacatatgaatgctaagcgctgtccccactgcaagaccgggcgatccgttgtccgaaaggaacacaacagcaagttgactatcacgtttccagccatggtgcacaggacagctggccagaaggactctgagcccctgggaattgaggaagctcagataggaaaacgaggatacttaacacccaccagtgcccgcgaacacctttctgccctgtggaagaatgaaggattctttctgaactaccttttttcgggaatggatgatgatggtatggaatccagattcaatcccagtgtgttctttctagatttcttggtggtgccgccctcaaggtatcgcccagtcagtcgcctaggagaccagatgtttactaatggccagacggtgaacttgcaggctgtcatgaaggatgtagttctgattcgaaaacttctggcattgatggcccaagaacagaagttgccagaggaagtggccacacccactacagatgaggaaaaagactctttgattgctattgaccgatcctttttgagtacacttccaggccagtccctcatagacaaactttacaacatttggattcgccttcagagccacgtcaatattgtgtttgatagcgagatggacaaactaatgatggacaagtacccaggcattaggcagatcctggagaagaaagaaggcctgttccgaaaacacatgatgggaaagcgagtggactacgctgcgcgctcagtcatctgcccagacatgtacatcaacaccaacgaaattggaattcccatggtgtttgccacaaaactgacctacccacagccagttaccccatggaatgttcaggaacttaggcaagcggtcatcaacggccctaatgtgcacccaggagcctccatggtcatcaatgaggacggcagccgcacagccctgagcgctgtggacatgacccagcgagaggccgtggccaagcagcttctgaccccagccacgggggcacctaagccccaggggacaaaaattgtgtgccggcatgtgaagaatggggacattctgctactgaaccgacagcccacactgcacagaccctccatccaggcccaccgtgcccgcatcctgcctgaagagaaagtgctgcggctccactatgccaactgcaaggcctataatgccgactttgatggagacgagatgaatgcccatttcccccagagtgagctgggccgggccgaggcctacgtcctggcctgcactgatcagcagtaccttgttcccaaggatggccaaccattggcgggactgatccaggatcacatggtttcaggggcaagcatgactactcggggttgctttttcacccgggagcactatatggagctggtgtaccgaggactcacggacaaagtggggcgcgtgaagctcctttctccttccatcctgaagccctttccgctgtggacaggaaaacaggttgtgtcaacgctgctcataaatataatcccagaggaccacatcccactgaacttatctggaaaggcgaaaatcactgggaaagcctgggtgaaggaaactcctcgatccgttcctggctttaaccctgactcgatgtgcgagtcccaggtgatcatcagggaaggggagctgctctgcggagtgctggacaaggcgcactatgggagctccgcctacggcctggtccactgctgctatgagatctatggaggcgagaccagcggcaaggttctaacctgcctggcccgcctcttcaccgcctacctgcagctctacagaggcttcaccttgggcgtggaagacattttggtgaagccaaaggcagatgtcaagaggcaacgtatcattgaagaatccacccactgcgggccccaggctgtcagggctgcattaaacctgccagaagccgcatcatatgatgaggtccgaggaaaatggcaggatgcccatctgggcaaggaccagagggattttaacatgattgatctgaagttcaaggaggaagtgaaccattacagcaatgagattaacaaggcatgcatgccttttggcctacacagacagttcccagagaacacgctgcagctgatggtgcagtcgggagccaaaggttcaactgtgaacacgatgcagatctcgtgcctgctgggccagattgaactggaaggtcggagcaccccgctgatggcgtctggcaagtcactgccctgctttgagccttatgagttcacccccagggctggtggctttgtcactggcaggttcctcaccggcatcaaacctcctgagttcttcttccactgcatggcaggacgagagggcctggtggacactgctgtgaaaaccagccgctcaggctatctccaaaggtgcatcatcaagcacctagaggggctggtcgtgcagtatgatctcacggtccgtgacagtgacggcagtgtggtgcagttcctgtatggggaggatggcctggacatccccaagacacagttcctgcagcccaagcagttccccttcctggccagcaactacgaggtgataatgaaatcacagcatctccatgaagttttatccagagcagatcccaaaaaagctctccaccacttcagagctatcaaaaaatggcaaagcaagcaccccaacaccctgctgagaagaggcgccttcttgagttattcccagaaaattcaggaagctgtgaaagccctgaaacttgagagtgaaaaccgcaatggccgcagccctgggactcaggagatgctgaggatgtggtatgagttggatgaggaaagccgaaggaaataccagaagaaggcggccgcttgtcctgaccccagtctgtctgtctggcgtcctgacatctactttgcatcagtgtcagaaacatttgaaacaaaggttgatgactacagtcaagagtgggcagctcaaacagagaagagttatgagaaatcagagctttctctcgacaggttgaggaccttgctgcagctagaagtggcagcgctcactgtgtgagccgggcgaggctgtgggcctgctggctgcccagagcatcggagagccctccacccagatgaccctcaacaccttccactttgcaggcagaggcgagatgaacgtcaccctgggcattccaaggttgcgggagattctcatggtggccagcgccaacatcaagacacccatgatgagcgtgcccgtgctcaacaccaagaaagccctgaagagagtgaaaagcctgaagaagcaactcaccagggtgtgcttgggggaggtgttgcagaaaattgacgtccaggagtccttctgtatggaagaaaaacagaacaaattccaggtgtaccagctgcggtttcagttcctgccacatgcatattaccagcaggagaagtgcctgagacccgaggacatcctgcgcttcatggaaacaagattctttaaacttctgatggaatccatcaaaaagaagaataataaagcatcagctttcaggaacgtaaacactcgaagagctacacagcgggatctggacaacgctggggagttggggaggagtcggggagagcaggagggtgatgaggaagaggaggggcacattgtggatgctgaagctgaggagggagacgccgatgcctctgatgccaaacgcaaggagaagcaggaggaggaggttgattatgagagtgaggaagaggaggagagggagggcgaggagaacgacgatgaagacatgcaggaggaacgaaatccccacagggaaggtgctcgaaagacccaagagcaagatgaagaggtgggcttaggcactgaggaggacccgtcccttcccgccctcctgacgcagccccggaaacccacccacagccaggagccccaggggcccgaggccatggagcgccgggtccaggctgtgcgtgagatccacccgttcatagatgactaccagtacgacaccgaggagagcctgtggtgccaggtgacagtgaagctccctctgatgaagatcaactttgacatgagctccctggtagtatctttggcccatggtgccgtcatctatgcgaccaagggcatcactcggtgcctcctgaatgaaacaaccaacaataagaacgagaaggagcttgtgctaaacacagaaggaatcaacctcccagagctattcaagtatgcagaggtcctggatctgcgccgcctctactccaacgacatccacgccatagccaacacgtatggcattgaggccgcgctgcgggtgatcgagaaggagatcaaggatgtgtttgccgtgtatggcatcgcggtcgaccctcgccatctctccctggttgctgattatatgtgcttcgagggtgtttacaagccactgaatcgctttgggatccggtcaaactcttccccgctacagcagatgacatttgaaaccagcttccagtttctgaagcaagccaccatgctgggatcccacgatgagctgaggtctccttctgcctgccttgtggtcgggaaggtcgtcaggggcgggacaggcctgttcgagctcaagcagcctctgagatagcagctaccccggcaccatctgcccagctccaaggacccttggtgagggcgtggcccagcctgccttctgcatgagaggaccaggagactggaatccagggcagttccaagtgacagtacagagcacagcagcgaccttgggcctgaaagcagtgggcctctgagctgggccagcttcacctggaaagtgacagagttgctcatccttgcccctccctgtctctggatttttatcaaggtttaccaagtcttctgagtccccctgagatggctggggcttcacctgtgctgcaggaggcctctgtggcataacccctaaggagaagtcctgattcacgattcactgagaagaccaaggggaagccatgctttgctgctggggaccccaggcacctccagagtagggaagcggggttcttttgctgtgagtggccagggacaacagacaagattcctgggggctcccgatgagcaggaacgtggagcctgctgcccaaggcctgctccttccggctgctccagcccctgggggcagagtccacaaagagtccccatcaagacttcttccctgagtcaagtacagcgtagcatagtcctccacccacccaacctctctgcctggccagggtcctggccctgccactgtgtggcgaggtgtccttctagaccacatcagccccaaggctgggagcagtcgctccagggccgcagcagttcactcccacacatagaacccaggtcactgctggggcgattgaacaggttgcctggcttttctctgctgtcagtttggtgtggaggcctatgttctgccccatacaccccacaggccctgcttatgggaaggaacacaggcctccagcccagaggactgtgccgccctgttcttggccgtccacgtttcctctccctctagcaccagcaatacatttccctggcatggacagaaaagacagagaggacttatacaaaggttttgtaaaaccagaggctagcttctatctttgtctactgttatttcagctcagggcgggtaattaacatcattggaactagctattaggaaagaaaaaaaacttggttttttttacaacaattttttcccttggtttgcagtttctgcatttggatttgagaacccagggcggggattttcttggcacagtcaggtcttgggtccctcttcctgtgctttcttgtctgaggccttagggggaagagctcagcctctgcagcctcctccacctctgcccctggcctgcctctgctgtgacctccttccagagctagctgctggccctgtggccaggagaagcagaggggagaagcctttatgcagaagctgtgctagccttggtctggggtggggaggctgctgctgtgaccttaggggtagggttggggatcaagggaggctttgtcaagggagagtgaccatgttgctccctacatccatgcaataggacccagcctgcacctcctaggcctacactggggaaagcctgacaaa

SEQ ID NO: 2406 - DNA, 5995 bp, Homo sapiens
gatcctcccaccactggaaggcccccctgcccaggcatccccgagcagcaccatgcttggtgagggctcccagcctgattggccagggggcagccgctatgacttggacgagattgatgcctactggctggagctcatcaactcggagcttaaggagatggagaggccggagctggacgagctgacattagagcgtgtgctggaggagctggagaccctgtgccaccagaatatggccagggccattgagacgcaggaggggctgggcatcgagtacgacgaggatgttgtctgcgacgtgtgtcgctctcctgagggcgaggatggcaacgagatggtcttctgtgacaagtgcaacgtctgtgtgcatcaggcatgctacgggatcctcaaggtgcccacgggcagctggctgtgccggacgtgtgccctgggtgtccagccaaagtgcctgctctgccccaagcgaggaggagccttgaagcccactagaagtgggaccaagtgggtgcatgtcagctgtgccctatggattcctgaggtcagcatcggctgcccagagaagatggagcccatcaccaagatctcgcatatcccagccagccgctgggctctgtcctgcagcctctgcaaggaatgcacaggcacctgcatccagtgttccatgccttcctgcggtcacagcgttccatgtcacatgcgcctttgaccacggcctggaaatgcggactatattagcagacaacgatgaggtcaagttcaagtcattctgccaggagcacagtgacgggggcccacgtaatgagcccacatctgagcccacggaacccagccaggctggcgaggacctggaaaaggtgaccctgcgcaagcagcggctgcagcagctagaggaggacttctacgagctggtggagccggctgaggtggctgagcggctggacctggctgaggcactggtcgacttcatctaccagtactggaagctgaagaggaaagccaatgccaaccagccgctgctgacccccaagaccgacgaggtggacaacctggcccagcaggagcaggacgtcctctaccgccgcctgaagctcttcacccatctgcggcaggacctagagagggttagaaatctgtgctacatggtgacaaggcgcgagagaacgaaacacgccatctgcaaactccaggagcagatattccacctgcagatgaaacttattgaacaggatctgtgtcgagcaggcctgtccacctcattccccatcgatggcaccttcttcaacagctggctggcacagtcggtgcagatcacagcagagaacatggccatgagcgagtggccactgaacaatgggcaccgcgaggaccctgctccagggctgctgtcagaggaactgctgcaggacgaggagacactgctcagcttcatgcgggacccctcgctgcgacctggtgaccctgctaggaaggcccgaggccgcacccgcctgcctgccaagaagaaaccaccaccaccaccaccgcaggacgggcctggttcacggacgactccagacaaagcccccaagaagacctggggccaggatgcaggcagtggcaaggggggtcaagggccacctaccaggaagccaccacgtcggacatcttctcacttgccgtccagccctgcagccggggactgtcccatcctagccacccctgaaagccccccgccactggcccctgagaccccggacgaggcagcctcagtagctgctgactcagatgtccaagtgccctggccctgcagcaagccctaagcctttgggccggctccggccacccccgcgagagccaaggtaaaccccggagattgcccgggtgcccaggcctgatgctggggatggggaccacctttcagctgtggctgagaggcccaaggtcaagcctgcattttgacactgagactgatggcttacttctctgaatggggagatgagcaactcaagatgtaagaggccgaggacggtggggtgcagcggggtccccgggaggcaggggcaaaggagggtggtccgcatgggcgtactggcctcctaactcacccccttccctgtcccaggccctgccctggtccccccacaaggcctcagcccagtcacaactgccatttccagtctctgctgagtgtcccagaccctcgaggctgccactccgtcgtggttttatttttaatatagagagagttttgaattctacactgttgtctttcctctgtgctggcctaggacattaggattccttccacggctccggccgctaggaccctgccaggtcccgcgcaccatccctgccctgcccacgtggtattgctgggctcctggctagatgcaagcaaggtggacaagagctcaggactccagcccactgccactgggtgacacagactgtcgtttgggcattatttcatggcagatgggccagtccagggcctaccccgccttgcccccagatcccactggggtccatttggggggtcctgctacactccaccgatccccaaggaagtataataaacgatacccagccagagtctactcactgtcacaagcacaacgagtttatatgagaaagcactgagggggtgcagagggcccgctagttccaggggaactgaaagctgttcctgatcagcccgtatcatctgaggcctgcctgcccaccctgccaccctcccctcccttgctgctctgcccctgccagtgcccagcccagcggctctgggaaggggttcccagaatccctcctgagctgtgccatttactcaggggactcccaaacagccagctgccagtgcaggtggagggctgtaggggagggccagtgcccagacagggtcatggggctcagaccagcccactgtagagaatcactctgaggctccaacttccttccttccttcggggccagtctcggccgaagtctggtcacgctcagacagagctgaccagaccagaccgtttgccttttcaagtttcctagtcctgctacaagatgagcttcttccgtggtttccttttggaaactcctccttccaacaagcagtgggatcccggggcccagggcgggccggtgttggccgctggggctgttgtaagtcttgctggatgttcccctgttcctgagccttaacccctcgcacagccatcccccccccccgtcctgccatccccccccgccgtcctgccttccccaccccacccttaggtcccaggtagttgctctgaagagtttcagtagagtggccccagggtgatagctcagggaacaacaaaaaaggaattccgtgaaaacatttttttttctttgatgaattactcctgggtcacttccaccactggtaaagccagaacttctccaaaaagaaccttgcaaaaagtccagtgaatcagtcgaatcattctgtggatgccaaagaatattttgaccataatacagcacagcctggacctgacaacttgtcatttggacttttttttaaatggagttctttagcaacaaagtatagaaacatgttcattgcacacacccaaggagaagagctcaagcgcttggaagaggatgctttgctgctgctgaagtgtacctgggtgttagatttcagatcctgggctgagcccactgtgagctttcctaaactgtgagactcacagaggggaaagatactgacggtgaaaccagcatggaaaacgtctttaccatgtggttccctcctccccaaatacataaagcaaataagcaggatggggaacagcttgaccttcatccacccctaactccaaaactatcaaggtacgacagtggcattgtcatcgacactcaatttcatgtgaattttagcaaaacaggaaacaaagataatgactcagttcagaggatcggacaaatgtgtctagtccgggtggactcggagggagtggggtgggcttcaaggattctgggcgttgggatggcatgagctaccctgtagagtttagtctgcctgcccgccttggtagtagtgaccagtcagtgtcagcatcagtgtcccaaccccagtctctgtttactgcctttgaacagaacttcttccttccccatgctttgggtcacctcgggctgcaaccctgtctgtgccagattgcccggtctgaccctgcaggaagcaaagaggtgagcttaaagaacaaccaaactctgccaggggtcccagaaagcccagggtccagcagtctcagcacttggccccttgccccttcacaccatcctggggcaggggctgggcctccctggtggcaggggtgggtggagaattagggagagggtgcaacgagtctggccccttgcctcgggctggctggtgttcttccaagagcctctgctcacattgttggcctctggattctggcccttcttcattggctgttgctttggactggactgttgctgagcctgtgtcctgcagaacccagatgtctgttaggctggctggctgctgcgaggggaggggggtggcctttcatttggggtgccctttcactcccaggccaagccctggagcaatcttcttcaggcagctgtctccacctccaggatgtccagcaggctgcaaggagaaggatgccagccacccatcctcccccagttcccagcctttcccctgttggtcacagccgcttctgtctttttccggtctactgtccccagtgtagagggctttgctgtccctgagactgaggcaggttccttttccaggtcagaggtggaggtagatctttctctcaaccacatctgcctccacacacagctcctccgcagggaaggagaagctgctctgtaactcattctggctatcgtcccccttctcactgacctgaccgcccaccacctccttccccctcatcacatgacaaaggataatgtgcaagaaaagtatttttatgtatcataaatgtattttgaaacaaatgagaagaagaaaggtagaagggtttattttattaaatgagcctgacttagtgacagtgtgtgagcatttgcaatgtaagggcctcagcttccttggagaagccaccccaggtttccagacatagatgttgaattgtttgtggggggtgtgccaggccacgtctcgtgtgtccgtatgcaggcatgcctgtgtatactgtgtatgggcacactgtgggactagctgggacaattcctagagattcaactgcccaattctaaccaacattggcagcggctgaacttggcatttccttgctaactgccagatgtggccaacctttgtccatatgcaaaccactgaaaaatgatctggatttctatagcaaggcccttggggagggcactctcccatgcccttggcctcgctggccacattggccaatgagccagggctggagtctgagacctttggttgttctttaaggcacctcctgccactttctccctcagaggcacaaacactttgtgttccacgtcagtttgaggggacggtggggggatgatatgaatgtcacaggaggagacaccttctgtctttgtttcaaagaaagtgatgtgccatttgttaatatacaagagaaatattgaaaatatattgaaaagagcaattttaaattatttttggcttatgttgcaatatttattttcttgtattagaaaagattcctttgtagagaaaaaatgtatttttcattaacgcaaagacctatttctcctttttgtacattgtccatgtgcgcaacccttaacgagcaatagaatgtatggtcacctgggtgtggccagtgcccgctgtgccctgcatgattctgtgttgccgctgctgcatagttcccagccccatcctgtcctgctcactcatgggggcttccagaccccggccccaccagggcttgtgtcatagggagccctttgcactcctcgtgtgttggcaaacgcagttaataaagcaatgttttctgtg

SEQ ID NO: 2407 - DNA, 1662 bp, Homo sapiens
ctctttctggtgggcttcagtgtcttcaccatgaaatgagagggtcagatgtggccctttccagggtagactccgacccagcgctgtgctcctagtgggatggtggtgtcctttgccatgtgctgaaccagaacccttgtgcctgacagccagcctcttcttctgttctcaccccacaatcaaatatatccccttcattttcctcccatccacatgaaggaaggactcaacacagggcagaagaaaaccaacattgaattctcttccaaagcagcagagagttcagcagggaggcaaggagggggctgaggaacgtgcctcttcaggcaggaaactcacagatggcaatgaaggaggaggtgcaggagatgccattccagagcccgttgttcaggagaataacgcagtcctcccctgagccgtggtcatttggctcatccttcttccagttgctgtaggtcagcctcccgcccgtcaagtacatgaactggccttcagttgcctcatctgtgatgcccaggaaggcagtgtctttggccacatcctggatggccttattctcctcggcattcttgggggcagccactgtggcctggagcccagcacacagagccttcactttggagaaaggcatccgctcaccattggtcacgaaaagcttcttcccagacatttttccccaaggagaagggctacagcttcttcgtgtggtccagttctgatctcaggctctatagctttctctctaagttggccagcttagcctcagcaactgaattgtccccacgatctcctttttggcccctaggtcctggaattccagaagtccctgtgtttcctgggggccccatcttcccaggagggccctgcaaacctctgagcccttgacctgttgcaagacaaagggaagatgacccagtggctgtcactctttttttttttcccaaaagctcaatgctccattcctgttcacccccggcacagccaatgagccagtgatctgacccaaagaagaaagactctcctgcaacctagtggagggcctgcaccaaggccagctccccaaccaggcaggacacccctctgaagggacaaccacacacccccagttcctgtgtggaaatatgggatcccagagagtccacgaacagctttgttttggaggcaatggcattttacaggggttgttctgagtgtagcatgggtcctgatgaaaggggagcctccccaagtctgtgctttaaccctcgtgtggcaggctcaagcacagatttgcttgaacacctgccggaggtggagatttaggaagccacagaaacctgtcccagacctggctctcccttttcccccttgggtctatctcgcccatctctgcctggggtgccattggtgacggggatgccacaggtaatcatggagcaggtcttctgggtatctgcacaggcttttgttttggagcaggaagctgtcaccacagacaggagaaggacagggaatgatggaaacaggaacatggtccttaccttgaggtgaagaaagtgaaggaaggaatttcatcccatctcatttaaatagcatttgctacccactgtggtgtgctggaccctgtgctggggacagtggacacagaggggaccatcacaacccctggctctgaatgac

SEQ ID NO: 2408 - DNA, 2739 bp, Homo sapiens
  misc_feature (1)...(2739): n = a,t,c or g
caccgctccgtgaattcccgggtcgacgatttcgtgggtttaagggccaggaaaggaagcattcagggaatttaggtgtagccagaagaaaatcaggtcctggctccccagaagcaagagagttcaagtgaaggaaggaggaggttcctggatgtggatgtcatcatttctgggaacactcttaaatggagactcagatttcttagccaaaatttagggaggatccagaagaaaccaaagacgaagcatcccagttcttgggtatttcctgaaacagaagaaaatgacaaaggcccaggaatcactgaccctggaggatgtggctgtggacttcacctgggaggagtggcagttcctgagccctgctcagaaggacctgtaccgggatgtgatgttggagaactacagcaaccttgtgtcagtggggtatcaagccggcaaacctgatgccctcaccaagttggaacaaggagaaccactatggacactagaagatgaaatccacagtccagcccacccagaaattgagaaagctgatgatcatctgcagcagcccttgcaaaaccaaaaaatactgaagaggacgggacaacgctatgaacacggaagaactttgaaatcatatttaggtttaaccaaccagagcagaagatacaacagaaaggagcctgctgagtttaatggagatggagcttttctccatgataatcatgaacaaatgcctacggaaattgaattccctgaaagtagaaaacccatcagcaccaagtcacaattccttaaacatcagcaaacacacaacatagagaaagcccatgaatgcactgactgtgggaaagctttcctcaagaagtctcagctcactgagcataagagaattcatacaggaaagaaaccccacgtgtgtagcttgtgtgggaaagccttctacaagaagtacaggctcactgaacacgagagagctcacagaggagagaaaccccacgggtgtagcttgtgtgggaaagccttctacaagaggtacaggctcactgaacacgagagagctcacaaaggagagaaaccatacgggtgcagtgaatgtgggaaagccttccccaggaaatctgagcttactgaacatcaaaggattcacacgggaattaagccccatcaatgcagcgaatgtgggagagctttctccagaaaatcactactcgttgtacatcagcgaactcatacaggagagaagcctcatacatgcagtgaatgtggaaaaggcttcattcagaagggcaatctcaacatacatcaacgaactcacactggagagaaaccttatggatgcattgactgtggcaaggccttcagccagaagtcttgccttgtagcacatcagagatatcatacaggaaagactccctttgtatgtcctgaatgtgggcaaccctgttcacagaagtcaggactcattagacatcagaaaattcactcaggagagaaaccctataaatgcagtgactgtgggaaagccttccttacaaagacaatgctcattgtacatcacagaactcacacgggagagagaccctatggctgtgatgagtgtgagaaagcttacttctatatgtcttgccttgttaaacataagagaatacactcaagggagaaacggggggattcagtgaaggtggaaaatccttccacagcaagtcacagcttaagtcctagtgaacatgtgcaggggaaaagccctgttaatatggtaactgtggcaatggtggcagggcagtgtgagtttgcccacatcctgcattcatgataaacagtttgctgtttgatcatatagcctccagcggaatgctgagtttgtcatgtcccatgggcctttggctccctgcactaatatgtatagtagggtttacaagatatgaaatatattttacttttttatatcttataaacctcactacccctcccacaatattgtttttcatttactatcttgatcatagagtttggctggggaggggggcagttttagaggcttccacttggtgttcctcgagaatgatatctcttactccgggggccaaggtaggggttagcttttgttctctttgtagtttaaaatggatctcctgccctgttcaagttcccaaatctttttgtgtatacccatatgtacatgaaaatgatgttcatgctttttattattttacccttcattatttcattttttatagttctcatagctatgtctttcagttcactaatcttttttccacagtgtttaatctgtcattaatcccatccaaagtatgttttctctcagaaattgtaatttttaacctctaataatttgacatgggtttttccctgttatatctttcatatctttatttatcatgggtttacttttaacctatttatgctttcatatttaaagggggtgtttagtgggcaacatacagttgggccttccttttttatccagctaacaatctctgtctttttactggggtatttagatcatttacgttcaatgtattgatgtttttaggtttaaattactaacttactatttgttgtttattctatgtcttctttgttctccttttcttctttttctgctttcccttagagtagctgagtgtgtttatattacatattgtctcctttgttggcttattaactgtaaatccttggnaattggntccttgagattttatagcatacatcattgtnagggattgcata

SEQ ID NO: 2409 - DNA, 1623 bp, Homo sapiens
gggatctagcgaggatgccccctacaaattccccacatcacgtaggccaggagcctcagcggtgccccttcaggctcatctcggcaagacggtaccagcttgctcagaacaggggctggctattcatcatctcagagcatagagaccctctccttgccacccggcccttcccacctggttggtgacaaatcacaaggtggtagaagttgccagggacagataacatcggcagccagcgggaagaccagcaagtccgaaccgaaccatgttatcttcaagaagatctcccgggacaaatcggtgacccatctacctggggaacagagactacaatagaccatgtcaggccaagtccagcctgtggatggtgtcgtgttggttgatcctgatcttgtgaagggaaagaaagtgtatgtcactctgacctgcgccttccgctatggccaagaggacattgacgtgatcggcttgaccttccgcagggacctgtacttctcccgggtccaggtgtatcctcctgtgggggccgcgagcacccccacaaaactgcaagagagcctgcttaaaaagctggggagcaacacgtacccctttctcctgacgtttcctgactacttgccctgttcagtgatgttgcagccagctccacaagattcagggaagtcctgtggggttgactttgaggtcaaagcattcgccacagacagcaccgatgccgaagaggacaaaatccccaagaagagctccgtgcgattactgatccgcaaagtacagcatgccccacttgagatgggtccccagccccgagctgaggcggcctggcagttcttcatgttttgacaagcccctgcaccttgcggtctctctcaacaaaagagatctatttcccatggggagccccatccctgtgcccgtgtctgtcccccaataacacagagaagcccgtgaagaagattaaagcattccgtggaacaggtggccaatgtggttctctactcggagtgattatttacgtcaagcccgtggctatggaggaagcgcaagaaaaagtgccaccaaacagcacttggaccaaggcggttgacgctgcttgccttggttggttaacaatcgagaaaggagaggcattgccctggatgggaaaatcaagcacgaggacacaaaccttgcctccagcaccatcattaaggagggcatagaccggaaacgttcctgggaaatcctggtgtcttacccagatcaaaggtgaagctccacagtgtcaggctttcttgggagagcctcaccttcccagtgaagtcgcccaacttgaaggtcccaattccgcctcaatgcaccctcagccctgaggacccagcctaaggaaagttatcaggatgcaaatttagtttttggaggagtttgctcgcccataaatcttgaaagatgcaggagaagcttgaggaggggaagagagaccaagaatgacattgatgagtgaagatgtcggctcaggatgccggaaaatgacctgtagttaccagtgcaacgagcaaagccccacagtttagtcctttggagttatgctgcgtatgaaaggatgagtcttcttccgagaaataaagcttgtttgttctcccctgg

SEQ ID NO: 2410 - DNA, 2829 bp, Homo sapiens
cccacgcgtccgacgaccacgggccggaaggctgccaggcccagtgggcaagcgaagaaatgaaccaccgcaacgcgggcgcttcggggcggggccgagtgcgaacctgagccccaaatcccgacccaggcaggggcggggcccggagcggggccttggaggcccagcccgcgcggcgacgtctccgcgtggcgtcacggcaccgactgacggccacccaccatggccgcagaccagcgcccgaaggccgacacgctggccctgaggcaacggctcatcagctcttcctgcagactcttttttcccgaggatcctgttaagattgtccgggcccaagggcagtacatgtacgatgaacagggggcagaatacatcgattgcatcagcaatgtggcgcacgttgggcactgccaccctctcgtggtccaagcagcacatgagcagaaccaggtgctcaacaccaacagccggtacctgcatgacaacatcgtggactatgcgcagaggctgtcagagaccctgccggagcagctctgtgtgttctatttcctgaattctgggtcagaagccaatgacctggccctgaggctggctcgccactacacgggacaccaggacgtggtggtattagatcatgcgtatcacggccacctgagctccctgattgacatcagtccctacaagttccgcaacctggatggccagaaggagtgggtccacgtggcacctctcccagacacctaccggggcccctaccgggaggaccaccccaacccatgtggaggatggactggaaaaggcattcagttagaaacgtgtggtccaaggaagaaacaggcaaatctgcaggaggcagattgcagccttcttcgctgagtctctgcccagtgtgggagggcagatcattccccctgctggctacttctcccaagtggcagagcacatccgcaaggccggaggggtctttgttgcagatgagatccaggttggctttggccgggtaggcaagcacttctgggccttccagctccagggaaaagacttcgtccctgacatcgtcaccatgggcaagtccattggcaacggccaccctgttgcctgcgtggccgcaacccagcctgtggcgagggcatttgaagccaccggcgttgagtacttcaacacgtttgggggcagcccagtgtcctgcgctgtggggctggccgtcctgaatgtcttggagaaggagcagctccaggatcatgccaccagtgtaggcagcttcctgatgcagctcctcgggcagcaaaaaatcaaacatcccatcgtcggggatgtcaggggtgttgggctcttcattggtgtggatctgatcaaagatgaggccacaaggacaccagcaactgaagaggctgcctacttggtatcaaggctgaaggagaactacgttttgctgagcactgatggccctgggaggaacatcctgaagtttaagcccccaatgtgcttcagcctggacaatgcacggcaggtggtggcaaagctggatgccattctgactgacatggaagagaaggtgagaagttgtgaaacgctgaggctccagccctaagccagccctgctctgcctaagtgtactccagaagaaactcatctcatccaaatacacgctattgagaaggcgagcctgacctccctcttacagataaagtcagctttcagaggctcagggtgggggggcctgcccgaggccataatgctacccaccccctcctcctaaccactggtctgttggaataacccagatgtctgcatcccctcaagtcagtcaatttcctttctgtccactgggggtggaatggggtagggtgggatactttaaagtgctcctgcttaaataaattagaccagaccagtgtatttctaaagaaaatcctgacatgcacacccattaaaaatagtacattttacagtgtcccagtcatacttttaattggcaaattaaaataatgcaatctgatatattctatcctactaaattaaaaatactgaatataaccaactaaatatacttactcctaagactcactaccagtagtttcacttaaactctgccttagaggctcttcccacccatttcccattatggcacatagagaaaaaggcctctatcactgtccactggagtaataaccactgcttcccctaactgcctcaaagactgtcattttatagaaaatttaagactatcctaatccactctttccaaactcccagccaggatagagacttccaggagttccacctgtcccaccttatctggctgccaactcctgctcagaaacagaacctgccacaccctgccactgcaggccgcaacctcaactcccaactgccaacttgaagcctgaactaccctttccctgaccagagttcaggaggggaagagctacacctccctgcacatgaatccactcatttgaaagcacaactgaccctggatttaagctggccaggaccctgggagatctttggaaggatttttgcctgggtttagggttaacttaaagaggtgcccagaagaccaagtgaggcagttcatgcctgtaatcccaacactttacaaggccaaggcagaggatggcttgagcccaggcaacatggtgagaccaggctttaaaaaaacatatgagccaggcatggtggtacatgcctgtggtcccagctactcgagaggctgagatgggaggatccggtccgcccatgaggtcaaggttgcagtgagccatgattgtgttaccgcaccccagcctggacaacaaagcaagactctgtctcaaagcaaaaaaa

SEQ ID NO: 2411 - DNA, 1424 bp, Homo sapiens
tttcgtgacggtttcagcctccggtgcggctgcaatgctgagctcccgggccgaggcggcgatgacgcggccgacagggccatccagcgcttcctgcggaccggggcggccgtcagatataaagtcatgaagaactggggagttataggtggaattgctgctgctcttgcagcaggaatatatgttatttggggtcccattacagaaagaaagaagcgtagaaaagggcttgtgcctggccttgttaatttagggaacacctgcttcatgaactccctgctacaaggcctgtctgcctgtcctgctttcatcaggtggctggaagagttcacctcccagtactccagggatcagaaggagcccccctcacaccagtatttatccttaacactcttgcaccttctgaaagccttgtcctgccaagaagttactgatgatgaggtcttacatgcaagctgcttgttggatgtcttaagaatgtacagatggcagatctcatcatttgaagaacaggatgctcacgaattattccatgtcattacctcgtcattggaagatgagcgagaccgccagcctcgggtcacacatttgtttgatgtgcattccctggagcagcagtcagaaataactcccaaaacaaattacctgccgcacaagagggtcacctcaccccacatccaatcactggaagtctcaacatccttttcatggaagactcactagtaatatggtctgcaaacactgtgaacaccagagtcctgttcgatttgatacctttgatagcctttcactaagtattccagccgccacatggggtcacccattgaccctggaccactgccttcaccacttcatctcatcagaatcagtgcgggatgttgtgtgtgacaactgtacaaagattgaagccaagggaacgttgaacggggaaaaggtggaacaccagaggaccacttttgttaaacagttaaaactagggaagctccctcagtgtctctgcatccacctacagcggctgagctggtccagccacggcacgcctctgaagcggcatgagcacgtgcagttcaatgagttcctgatgatggacatttacaagtaccacctccttggacataaacctagtcaacacaaccctaaactgaacaagaacccagggcctacactggagctgcaggatgggccgggagcccccacaccaggtctgaatcagccaggggcccccaaaacacagatttttatgaatggcgcctgctccccatctttattgccaacgctgtcagcgccgatgcccttccctctcccagttgttcccgactacagctcctccacatacctcttccggctgatgggcagttgtcgtccaccatgggagacatggcactctgggacactttgttcatttaccgacggtccccaccttc

SEQ ID NO: 2412 - DNA, 1835 bp, Homo sapiens
tttcgtctgtaactgctcctcactgcgttacccagtaatgcgctgatcgggggagggggcgggggggccggggagcgagcgggagagcgagccgacttggaaatgtgaacgcaagaagcaggcttgatttttttttctccccccttctctctctctctctctctctctcttcctctctccctctttctcctctctcacccacactcacgcacacctccaaaccgcacacccagacgcacacgcataccccagcgcccggcagttatgtattctccgctctgtctcacccaggatgaatttcatcctttcatcgaagcacttctgccccacgtccgagcctttgcctacacatggttcaacctgcaggcccgaaaacgaaaatacttcaaaaaacatgaaaagcgtatgtcaaaagaagaagagagagccgtgaaggatgaattgctaagtgaaaaaccagaggtcaagcagaagtgggcatctcgacttctggcaaagttgcggaaagatatccgacccgaatatcgagaggattttgttcttacagttacagggaaaaaacctccatgttgtgttctttccaacccagaccagaaaggcaagatgcgaagaattgactgcctccgccaggcagataaagtctggaggttggaccttgttatggtgattttgtttaaaggtattccgctggaaagtactgatggcgagcgccttgtaaagtccccacaatgctctaatccagggctctgtgtccaaccccatcacataggggtttctgttaaggaactcgatttatatttggcatactttgtgcatgcagcagattcaagtcaatctgaaagtcccagccaggccaagtgacgctgacattaaggaccagccagaaaatgggacatttggggcttccagggacagttttgtcacattcaggtgttttttagtgtcacttgagcttagttaagagtgtcacagacacccattagctgcagggaactggcccaaatttttctctctcagatttggaaagttcttcatactacagcatgagtccaggagcaatgaggaggtctttacccagcacatcctctacgagctccacaaagcgcctcaagtctgtggaggatgaaatggacagtcctggtgaggagccattttatacaggccaagggcgctccccaggaagtggcagtcagtcaagtggatggcatgaagtggagccaggaatgccatctccaaccacactgaagaagtcggagaagtctggtttcagcagcccctccccttcacagacctcctccctggggaacggcgttcacacagcatcaccgacctgtcattacagggacccagagcaagttccacattgcaacaccatcgattctttcattttccccgacattcaccctttttccagcagcctgggccttacttctcacacccagccatccgctatcaccctcaggagacgctgaaagaatttgtccaacttgtctgccctgatgctggtcagcaggctggacagcccaatgggagcagccaaggcaaggtgcacaacccattccttcccaccccaatgttgccaccgccaccgccaccaccgatggccaggcctgtgcctctgccggtgccagacacaaagcctccaaccacgtcaacagaaggaggtgcagcctcccccacgtcaccaactaccaggtcgctggcaggactagaccacagcagcccttcctacatatggtccgccctagcctgtaaagctgatggcatgaaggtgcgggtggcagtgtgcttcccaccagcacctgtccccgaagaggaagagacagggtggggtg

SEQ ID NO: 2413 - DNA, 2276 bp, Homo sapiens
acgggcaccctcactgaggacggcttagacgtgatgggggtggtgcccctgaaggggcaggcattcctgcccctggtcccagagcctcgccgcctgcctgtggggcccctgctccgagcactggccacctgccatgccctcagccggctccaggacacccccgtgggcgaccccatggacttgaagatggtggagtctactggctgggtcctggaggaagagccggctgcagactcagcatttgggacccaggtcttggcagtgatgagacccccactttgggagccccagctgcaggcaatggaggagcccccggtgccagtcagcgtcctccaccgcttccccttctcttcggctctgcagcgcatgagtgtggtggtggcgtggccaggggccactcagcccgaggcctacgtcaaaggctccccggagctggtggcagggctctgcaaccccgagacagtgcccaccgacttcgcccagatgctgcagagctatacagctgctggctaccgtgtcgtggccctggccagcaagccactgccctctgtgcccagcctggaggcagcccagcaactgacgagggacactgtggaaggagacctgagcctcctggggctgctggtcatgaggaacctactgaagccgcagacaacgccagttatccaggctctgcgaaggacccgcatccgcgccgtcatggtgacaggggacaacctgcagacagcggtgactgtggcccggggctgtggcatggtggccccccaggagcatctgatcatcgtccacgccacccaccctgagcggggtcagcctgcctctctcgagttcctgccgatggagtcccccacagccgtgaatggcgttaaggatcctgaccaggctgcaagctacaccgtggagccagacccccgatccaggcacctggccctcagcgggcccacctttggtatcattgtgaagcacttccccaagctgctgcccaaggtcctggtccagggcactgtctttgcccgcatggcccctgagcagaagacagagctggtgtgcgagctacagaagcttcagtactgcgtgggcatgtgcggagacggtgccaatgactgtggggccctgaaggcggctgatgtcggcatctcgctgtcccaggcagaagcctcagtggtctcacccttcacctcgagcatggccagtattgagtgcgtgcccatggtcatcagggaggggcgctgttcccttgacacttcgttcagcgtcttcaagtacatggctctgtacagcctgacccagttcatctccgtcctgatcctctacacgatcaacaccaacctgggtgacctgcagttcctggccatcgacctggtcatcaccaccacagtggcagtgctcatgagccgcacggggccagcgctggtcctgggacgggtacggccaccgggggcgctgctcagcgtgcccgtgctcagcagcctgctgctgcagatggtcctggtgaccggcgtgcagctagggggctacttcctgaccctggcccagccatggttcgtgcctctgaacaggacagtggccgcaccagacaacctgcccaactacgagaacaccgtggtcttctctctgtccagcttccagtacctcatcctggctgcagccgtgtccaagggggcgcccttccggccggccgctcacaaacaatgtgcctttcctgttggcctcggcgctctagagctccgtcttggtggtccttgttctgtcccccggcctcctgcatgggccgctggcgttgaggaacatcactgacaccggcttcaagctgctgttggtgggtctggtcaccctcaacttcgtgggtggccttcatgctggagagcgtgctagaccagtgcctccccgcctgcctgcgccgcctccggcccaagcgggcctccaagaagcgcttcaagcagctggaacgagagctggccgagcagccctggccgccgctgcccgccggccccctgaggtagtgcaggcccacgggcaccccagacactggaactccctgcctctgagccaccaactggacccctctccagcaacaccaccgccaccacctcccacatccctgaggttggcgactgtctacactcctcccccgagaccacccccaccctggggaagcgttgactactgtcccctaccttggaccatcccgcgtaggggtggcagcccccagctcccctcagtgctgctgtcagtgtagcaaataaagtcatgatattttcctggcaaaaaaaaaa

SEQ ID NO: 2414 - DNA, 1515 bp, Homo sapiens
cgggggagggccccacagaggcgctgcaagaaatccagatcccaggcgacacctgctgccttgcctgctgcccccgcagaatccctgcatctggagccacccacctggaggaactcatcgggcttcctctgtagacgggaaaaaacaaacgcaccacaaaccgacaatcaaagccatggcggatgcggggccgccaccagttcatctccctggagccaggcggctccaggcctctctcacctttcttgtgtggaacgcaggcttgcaatgttctgagcccacctgtcctcgggctagtcccattttcaaaagttctgagtacgcaggtgagaagacacccccacaaaaccccaaaactagccttaggctgtttttccccaacacaacgcacctccacaccccacaccgccagcagcccacctgggtacccaaagtgagctgccagggggttccgaggaccctgcctggtgccttccagctcataaggagaggccaagagccatggggaggaagccacacggcccagcgctcagggcttgtcatccaagagtgagagaagtggggagagaggtgacggagggtggagtggtgtgtggcgtccaaataggctagccagagagagaggtgcttgtgggattctgctggctggagccaggaggtaagtgtgaacagggaggccaaagatgaaagttatctgaaagagcccgtaccccctataaacacggcagaggaatgtcttaagagccaccaacagtaattccctttccggatgttaacaggttatttgtatcttatgtggcgtcgtaaagcattctggagtggcacacaacgtcatccccttcccggtggtctgaagaggaggaggagaccagggaggggtccttggccagcccctggcggccaaggggtgggtccttctgctctatagaaggcaggaagcccgccagctaaccgcccgggtcagggggagcaggcctgatctctcccaagcctgtgaccgaggtcctgcctgatgtccaaggggcccctgtgccagtacccccacttcccacgccccccagccttcctcacctccagaatcagccgcccaggtgcagcactatctcctttctttttcttggaagccgtctcaggggcctgagtgacgggcctgaccgtccccgctaccgcctgctgccatgcgaccagatggctgacccggcccggcttctcagggcccagaccagcctggcctcgtgcccacctgcttcgctcccaacctcaccaccaggcaagggtttccagaaaaccgagacacgcaaacacccaccaccacgacaacaacacaaaccaaagtgcactgcgaaccgccctttggcctccttcttgtaggtgccttgaaacttcaatgttgagatgaatgtgattaactacttggtcctattttctgtttgtctattttcatagaaaatgtccaagtccacttgccttgttctttcttgaaataaatagaaagatttaactttaaaaaaaaaa

SEQ ID NO: 2415 - DNA, 2013 bp, Homo sapiens
atgcacgaatctgtccacgtgggtttcctgtccataccatccaaggagaaaggccttggcctcctccagctgggtctgctccttcctttgaaccccatcggtacctatgcccacacctttcagagctttcctgatcagtgtcaacatgctgctcttcctcttacaaaatgtaccatcaatacagcccaggcacatggctcccacaaagctagccacttatatagtatgggtcacatcaaaaatgactccagcacaatcattcatacagacttctctcacactaaacctttaaacaagcaaggttcagtagctacagaactctccatcatcatcatcatcatcatctggttgcttttggcaaggttcagtagctacagaactctccttcatcatcatcatcatctggttgcttttggcaagcaaggttcagtagctacagaactctcctcctcctcctcctcctcctcatcatcatcatcatctggttgctttcagcaaggttcagtagctacagaactctccatcatcatcatcatcatcatcatcatcatcatcatcatctggttgcttttggcaaggttcagtagctacagaactctcctcctcctcctcctcctcctcctcctcctcatcatcatcatcatcatctggttgcttttagcaaggttcagtagctacagaactctcctcctcctcctcctcctcctcatcatcatcatcatctggttgctttcagcaaggttcagtagctacagaactctccttcatcatcatcaacatcatcatctggttgcttttggcaagcaaggttcagtagctacagaactctcctcctcctcctcctcctcctcatcatcatcatcatctggttgctttcagcaaggttcagtagctacagaactctccatcatcatcatcatcatcatcatcatcatcatcatcatctggttgcttttggcaaggttcagtagctacagaactctccttcatcatcatcatcatcatcatctggttgcttttggcaagcaaggttcagtagctacagaactctccatcatcatcatcatcatcatcatcatcatcatcatcatctggttgcttttggcaaggttcagtagctacagaactctccttcatcatcatcatcatcatcatctggttgcttttggcaaggccctggcaagaattatttggctttaccgaaacacctattccataggtaaccaattccagtcaaaaatgccagagtattactcctcaacccaatgccctatctccttagtggattataaacttactacgacaacctgtcttctttggatccaatccccgcccaagtctgagtcttctctcccaggctacaagcccccaagtcctggcagctctatgcttgacagctcgctgacctccacctcatcagaccattgggtcgcccttctcgccgtcctccagccttcttcccgctcagacactcatccactgtccggggagcctcgacccctcctataccccctccccgatcccgcagtccccttctggaccttgcggacccctctcagcccccgtaccccctaccgcctcttcctcctccactcccacaactccgcccgagctccactgcgcctgtgcggccaacgaggccgcgcgcaggcgatcggggcagaagagcttccggttcctgctgtcaataagacgtggacctgcgagccggggcaaaagggcttccggtctgcgggaaactggaggctagcggtgggcgtggaccgtcgaggtgactggcggttgtcggatctgctgttgtttgctgaccaggcagccgtaggtaatgacggatgcccagaccctgtgggcggagtaaaggaatcatgcactgatacacgcacactcaccgaggggcgcgtccgtctgcgtgcccctcatctcgtagccgaaaggagcgcgttccggggcaggcctccgggtacttcccgcagaggaccgggctttatactctttgctccttttcctccccta

SEQ ID NO: 2416 - DNA, 1837 bp, Homo sapiens
ttttttttttttagcattcaataaatatttattataattaaaagaccgtagcaatacccccaccaccaagacccttcacccagaaatagagagattggaattgtaaacaccgtatccagttctgaccaccctgaaagccagggcatcatcgcgcccgttttgtcctaaatgaagggctcccggacaatgtcctcgaaagtggcagatgacctcatcttcccactgtccacagggcacagggcagaccggggtgctctatggggtccctgccgatgcctgggtcccaggggtgttccccaggtggtcaggcaaggacacgcggtcattctgcctcctgcgtcttgtcctcgggcgcctgggaccctctctggttccacaatgtgtttgtttcagccccagctggtaaccatctgtgcgtggtggataatgagggggttgccagcccttgggctctgaagggggtgcggttgaggccgtagggaaaggcttggggactgccgggaaaggcagtgactgtggaaaggctgctggctgtggggagggcggtgggggggtgccagcctgccatgcgtgcaggggtggcggctgcgggcaccccggccaagtgggaaagggtggcggggctcccaggggcacctggcccccaaagggcattcgagccccatagggcgccccagtcccaaatgacatgtggctcccaaaagccacctggagctgctccatctgtgcctggtaggacaagtagctctggaggtaggctgagtaggctgcgttcagtgccgccgcctgcatccgctcaccatccaggtgttggctctgttcccgcagggctcgggtgtcctgttccttcctccacatggcctttcgggcctgaagcctgtggggcttgaaggtgttggccaccttcctggcgaagatctgggagtgttcgtccagccgcaccagcccggagagcaggctggccgtgtcggagctgagccgggccggggagctctccatggggcaggaacggggatgacacagtcttgcgacccctgtcgctgtgaggttgctcatcatggcttggttcacctggtgcaggctcacggcgacagtcgaacgttggacggtgagaagtaggatgatgaaagctgagtggtctatggcgtcctgcaggcagctcagctccccgcgccccggcacctggaaatcctcgcagaaggtggccccgtcgggcacgccaagggcctcccagcttctccccgaaacccgcagggcgatgtgttcgtctgccctggcgtggaggatcacaaagttatagaatttctgttccgatgatgattccagggaggaagggaacagggaggagggggtcaggtgagctgaacaaggagtagatgaaggaggaggaggaggaggaggaggggatgtttctggggtggtaggagtaggtgggcacggcttggtatttggagaggtggtatcttctacagaaagttggagtggcgtctggtctttgacagagcaggggtttttgaccggctccagaataggcaaggggagagactgggggcctgcagacccctcggtgcactccactgggtagttggtgctggtttctggagctgcgggggtatcagggaggccagtggaggttgcatctggggccacttcgggaagcccaggaggtgggctgcttggcagctctggtgggctggcaatctcccccgatggcggccagctcatctcctcaggctcctggcagccaccggggacaggctcgggcaccaagctggcctgggggtcgtcacagagcttgctgggcccatgtgggctgcggtgcacgctgaggaagggg

SEQ ID NO: 2417 - DNA, 1468 bp, Homo sapiens
tcccgggtcgacgatttcgtgcgaaaagccgggactggacctagcggagttgtgcttgtcgccgaagcggggtgggcttgttcgttccgcgcagccgcagccagaaccgggtgacgcttatccccgctgtctttccagtccagggccgctgagagtgggggtggctgggagcagcgcagcctccggaggaggaggcggaggccgaggaccaggaatcaccttcaagcctatgtcgtgaggctttggcagaaattaagaaggaaatatctccattgttcattggcatggaaaaatgttcagtgggaggattagagttgactgaacagactcctgctttattagggaatatggccatggcaactagtctcatggacataggggattcatttggtcatccagcttgtcctttagtcagtagatctaggaactcaccagtggaagatgatgatgatgatgatgatgttgtgtttattgaatctatacaacctccttcaatttctgctccagcaatagctgatcaaagaaacttcatatttgcatcatcaaaaaatgaaaagcctcaaggaaattattctgtaattcctccttcttcaagagatttggcatctcagaaaggaaatataagtgagacaattgttattgatgatgaagaggacatagaaacaaatggaggagcagagaaaaagtcttcctgttttatcgaatggggacttcctggaactaaaaacaaaaccaacgatttggatttctccacttccagtctttcaagaagtaaggtaaatgcaggaatgggtaatagtggtatcactacagaattgactctgaaatacattattactaatgttacaaccttagaaacaggtataagctctgtgaatgctgggcaagatgtgaacataattattacatataaaacatcactatagaataccaacttgggagatgtcgctaaaggacttcagtcaagtaattttggtgttaatatacaaacgtacaccccatctttaactccacagaccaagactggagtaagaccttttaaccctggtagaatgaatgtggcaggagacttatttcagaatggagaatttgcaactcatcatagtcctgaagatgcatctacaaagaaggctaatgtcattcttccagtagaatcaagcaaatccttccaagaattttatagtacatcttgtttgtctccctgtgaaaacaactggaatcttaaaaaaggagtttttaataagtcaagatgtacaatttgtagtaaattagcagaggtctggatttttatacctaagttgttgtttaggctaacagtgataattttaacttttaagtgctattatgtactctttcatctacataatgcacgtgttctggatgtataacatgaagctgaaaggaagaataaggatatgttagaactatcttatgggatattttataaataaaattccatttgcatagc

SEQ ID NO: 2418 - DNA, 1468 bp, Homo sapiens; identical to SEQ ID NO: 2417

SEQ ID NO: 2419 - DNA, 3486 bp, Homo sapiens
ttcccaggtgcttgctgttaccaggccatatgggttattcacagattgaaatatcttagctgggcacggtggctcacccctataatcccagcactttgggagaccgaggcgggtggatcacctgaggtcaggagttcgagaccagcctggccaacatggtgaaaccctgtctctactaaaaaaatacaaataaattggctgggcatggtggtgggtgcctgtaatcccagctacttgggaggctgaggcaggagaatcgattaaacccaggaggcagaggttgcagtgagccgagatcacaccattgcactccagcctgggcgacagagtaaggctccatctcaaaaaaataaataaataaaagttaagattcaggctggtcacagtggctcacacctgtaatcccagtacttttggaggctgaggtgggtggatcacctgaggtcgggagtttgagaccagcctggccaacatggtgaaaccctgtgtctactaaaaatacaaaattagccgggcgtggtggcacatgtctgtaatcccagctacttgggaggctgaggcaggagaatcgcttgaacccgggaggcagaggttgcagtgagctgtgatcacgccattgcactccagctgagcgacagaatgagactcaccgggcgccggacttcgccatgagcgcggtgctgggtcaccagccgccgttcttccccgcgctgacgctgcctcccaacggcgcggcggcgctctcgctgccgggcgccctggccaagccgatcatggatcaattggtgggggcggccgagaccggcatcccgttctcctccctggggccccaggcgcatctgaggcctttgaagaccatggagcccgaagaagaggtggaggacgaccccaaggtgcacctggaggctaaagaactttgggatcagtttcacaagcggggcaccgagatggtcattaccaagtcgggaaggcgaatgtttcctccatttaaagtgagatgttctgggctggataaaaaagccaaatacattttattgatggacattatagctgctgatgactgtcgttataaatttcacaattctcggtggatggtggctggtaaggccgaccccgaaatgccaaagaggatgtacattcacccggacagccccgctactggggaacagtggatgtccaaagtcgtcactttccacaaactgaaactcaccaacaacatttcagacaaacatggatttactatattgaactccatgcacaaataccagccccggttccacattgtaagagccaatgacatcttgaaactcccttatagtacatttcggacatacttgttccccgaaactgaattcatcgctgtgactgcataccagaatgataagataacccagttaaaaatagacaacaacccttttgcaaaaggtttccgggacactggaaatggccgaagagaaaaaagaaaacagctcaccctgcagtccatgagggtgtttgatgaaagacacaaaaaggagaatgggacctctgatgagtcctccagtgaacaagcagctttcaactgcttcgccccaggcttcttctccagccgcctccactgtaaaggacatcgaacctcaaagattttatgtcccagccgagggtgaagagcgacgcccgaggccgaggagcaaagagggagcacggccccgaggcctgcgacgcgggccaagatctccccccacccacgtcggaggagccctgccgtgacaagggcagcccccgcggtcaaggctcaccttttcgctgctgagcggccccgggacagcgggcggctggacaaagcgtcgcccgactcacgccatagccccgccaccatctcgtccagcactcgcggcctgggcgcggaggagcgcaggagcccggttcgcgaggggcacagcgccggccaaggtggaagaggcgcgcgcgctcccgggcaaggaggccttcgcgccgctcacggtgcagacggacgcggccgccgcgcacctggcccagggccccctgcctggcctcggcttcgccccgggcctggcgggccaacagttcttcaacgggcacccgctcttcctgcaccccagccagtttgccatggggggcgccttctccagcatggcggccgctggcatgggtcccctcctggccacggtttctggggcctccaccggtgtctcgggcctggattccacggccatggcctctgccgctgcggcgcagggactgtccggggcgtccgcggccaccctgcccttccacctccagcagcacgtcctggcctctcagggcctggccatgtcccctttcggaagcctgttcccttacccctacacgtacatggccgcagcggcggccgcttctctgcggcagcctcagcttcggtgcaccgcaccccttcttaatctgaacaccatgcgcccgcggttgcgctacagcccctactccatcccggtgccggtcccggacggcagcagtctgctcaccaccgccctgccctccatggcggcggccgcggggcccctggacggcaaagccgccgccctggccgccagcccggcctcgggtggcagtggactcgggctctgaactcaacagccgctcctccagcgctctcctccagctccatgtccttgtcgcccaaactctgcgcggagaaagaggcggccaccagcgaactgcagagcatccagcggttggttagcggcttggaagccaagccggacaggtcccgcagcgcgtccccgtagacccgtcccagacacgtcttttcattccagtccagttcaggctgccgtgcactttgtcggatataaaataaaccacgggcccgccatggcgttagcccttccttttgcagttgcgtctgggaaggggccccggactccctcgagagaatgtgctagagacagcccctgtcttcttggcgtggtttatatgtccgggatctggatcagattctgggggctcagaaacgtcggttgcattgagctactgggggtaggagttccaacatttatgtccagagcaacttccagcaaggctggtctgggtctctgcccaccaggcggggaggtgttcaaagacatctccctcagtgcggatttatatatatatttttccttcactgtgtcaagtggaaacaaaaacaaaatctttcaaaaaaaaaatcgggacaagtgaacacattaacatgattctgtttgtgcagattaaaaactttatagggacttgcattatcggttctcaataaattactgagcagctttgtttggggagggaagtccctaccatccttgtttagtctatattaagaaaatctgtgtctttttaatattcttgtgatgttttcagagccgctgtaggtctcttcttgcatgtccacagtaatgtatttgtggtttttattttgaacgcttgcttttagagagaaaacaatatagccccctacccttttcccaatcctttgcg

SEQ ID NO: 2420 - DNA, 1885 bp, Homo sapiens
gggctttgataatgtgattattctttattcagaattgaaattttcataaggataatcaagtttttggcatacaaactgttattgtgatttaatgtaatttttttgagagagtcgtttgttattttttaagtaccacttttcctccaacaaggagtagtcatagcaattcagaaaagtagggaaggtgcaaggtgtgaggaatttccattctagcatgggttgtaactatcaaaattacaaaattgattttatactccacatgaaaaatgataataagtgaagaacaattttccagtaatttttcttagcaaaatagaaaacaaaataatcaataacagaaaattgtgaaaataaaaacccaatacacatgtagagaataaggatataggcactaaatataattctttaaagctgccagaacacataagggcagaagtgatgcagccatcaaagttggactgagtaaatccatcccctccacatgcaaggaaaggtttgtgatgcagagtcatttggccaggacagttggcagcagcatttgtaacctgtgaatgtctccatttttggcatttggtagcaattggctgaggcaaacccggcaaaatgttttccagctgctggaagactaactcttgcacatcctcaatgctgtgttccaagtatgtaactccaaatgggacagtggtgtgaatcacgagggaaggcccaatttctgatgactctatattgcgcttcttattatcaatggagacgaagcgtatgcagggattactggtgatgtactgcccagcccaagggacatcaatcttcgtaccagcttcataaaagaggcccagagcatatcgagaggagtagctcacagcctccagttgctgcctttggcattcactaattaaggtggtgatgtcaccttgaagctgcagaatctcaggaactggcattgtgagaacaataagatcaaactgctcaggggagcctgtttgtttggatacttcccatttgtcatctcttaggttgatctgtgtcacacgatgtctgaagtagacttctgcacctgattctttcaagtaatgcttaataattgaagaaattccttgaggtgccacaaagttacagtctccttctttcatcaccattccttcaataggcgagcttagaggcctcaaaacgccataggctaacagttcatcataaaaacgttggtgttttttggcataatgaggagtgcaggtgatgtactgagcacccaagtcagctgtgcactgaggattatgaggactgcaggctgtagtcattcttccccctgagtcctcagccttgtcccacacagcaaggtacaagggaccggacgtctgcctcctcagcagcgcagcgcacaagcttcctgtcatcccggcgcccacgatcagcacctgcgccatggcgagagggagcagcgatccgcgctgagtctctgcggcggggccgttcggcccgggctttctggaaaggcggccgaaccggcgctagcgctctttggttccgtgctccctgggccgacctgggccctgagctttcctccggccggcctgcagggggcggaaaggaggcggccggagctgagaggcccctccgtccttgaggagcaaacctggggctgcggagaaccggggctgtctgtcttctcgctttgggggccgggcgccctgcccctcgcccagaaaagcctggaaatggtgtgggctattgttgggagaacccgcctcgcaacagagctgacgttgaccacagcagagaagcagcttaacctatctactgcgataactctcatgcctgttgggatttttgctgttttactattctagatttgaaagtgggaagaagaatttaccagcgataccacggt

SEQ ID NO: 2421 - DNA, 1926 bp, Homo sapiens
ctaatgcatcattcaggactctttcccacagattagtgttgagattatcacacggcttacacagtagggaggaaatgcatagccaggactcttaccaagtccggtaaataaggaatacctagatactactgtttctgtcaatgccatagacacttagatgacccgttaattttacttcatcccaacaatgaccgtgcagaatctgcgtccctgacgcaaagcaggaagcaaatatttgggcaagaaaataaagtcagttacagatttcacaagtatcttgtacaccagtctgtaatttttaattagaattagctaaaagacattgtacctttcgcgtgtatgactgagcataacagtgcttaacagtgtctttattaagtgaatgcctgaaagtattcaacattaaattcaatttatttcacattaatgtttgcaaatacatcatcaattcttacatatttcaaatcaacttcaagtacagaaggcttcctctcaaataagtctcctgaggtgacataaagactgaaagaagcctatgacttgagtccaagtctcttaaccaacaatcaccatatcgtcactggtgaactcatacgtggggacttcaaggttgagaggagcaggacccaatctgatcctgccagatgcatcatagtgtgacccatggcaagggcagtaataaccaccaaaatctcctgcatttgcaatgggtacacagccaagatgagtgcaaacacctatcaggataacccattcaggtttctttactcgatctagatcatgctgtgggtccctcaactgtgataattcaactgcagcttcctgctcaatttccttctgggttctatgacgcacaaacaggggtttgcctctccatttgaaagccatgttcttgccttctggaatatcggataacttgatttcgattttcgccagggccaacacatcagcagaagcactcatgctggaaacgaactgggtgacggcattcttggcagcatatgcgacacccacagtagttactccagttaccaaataggagaaacctttcctagcctcgctgctttctcttgaagacttcgtactatctaaaacttcaaggcggcggtattcagagaagtcaggcaccttgatgtctgtgtgggaataacaaacagaagcagggacattgaggcccacggaggcgaccaaaggccggcgcacggcctggccgctcagcgactcccggctgaggaagggccgcttcaggtccaacacaggctgctccggggtggcgggcaccgtggcctgcattcaagtgcgtcagcgcgcccgccaccccgcgggacgtggccgacaggacgggcgcgaacggccgcgagcgggctgctaccgtcaacatggcgacagccgctccaaccgccaagccggtcacaggggacgaccttccaaccacggtgcaggcgcgaggaggcgcgggacgcgtgacgacagcgcgccgccggaaaggaaattctgcagtcctgcagggcggggcaaacctggagaggcgctgcgtcgggggacggggctacaagccgtcgctgggggcggggcttgcggcccacctgtaggtcccggtgccacctcgtcagtgtcccgagagatccccagaagaacgagagggctgaacaggggaccccactgacgtccggggggccgactttacgatcctttaggatgaagaaactaagactcagagaagacaaatgacatgcccaaagacacattgataagaacgcatctggtagtggtgttcgagtccagcgttgcagcagagagatgggtaactgtatggccgaacagctgtcctctcgtggaagaaggaggccaatgtccaggagtggcaggcatactggaacttggacttctgtaggccaacctgggttccacttggtagatgggggt

SEQ ID NO: 2422 - DNA, 2866 bp, Homo sapiens
tttcgtgcattcctgccgtcacctttgtcgctgcgagggcggcggttgggatctggcctttccagccccgagagggacctagtgcctctacccagatttctgtcgctctgtcacctgcgctatgccctgctttactcacaggagctgtagagaggaccccggtacatctgaaagccgggaaatggacccagtggcttttaaggatgtggctgtgaacttcacccaggaggagtgggctttgctggatatttcccagaagaatctctacagggaagtgatgctggaaactttctggaacctgacctctataggaaaaaagtggaaagaccagaacattgaatatgagtaccaaaaccccaggagaaacttcaggagtgtcacagaagagaaagtcaatgaaattaaagaagacagtcattgtggagaaacttttaccccagttccagatgacaggctgaacttccagaagaagaaagcttctcctgaagtaaaatcatgtgacagctttgtgtgtgaagttggcctaggtaactcatcttctaatatgaacatcagaggtgacactggacacaaggcatgtgaatgtcaggaatatggaccaaagccatggaagagtcaacaacctaaaaaagccttcagatatcacccctccttgagaacacaagaaagggatcacactggaaagaaaccctatgcttgtaaagaatgtggaaaaaacattatttaccattcaagcattcaaagacacatggtagtgcacagtggggatggaccttataaatgtaagttttgtgggaaagcattccattgtctcagtttatatcttatccatgaaagaactcacactggagagaaaccgtatgaatgtaaacaatgtggtaaatcttttagttattctgctacccatcgaatacatgaaagaactcacattggagaaaagccttatgaatgtcaggaatgtgggaaagcattccatagtcccagatcctgtcacagacatgaaaggagtcacatgggagagaaggcttatcaatgtaaggaatgtggaaaagcattcatgtgtccccgttatgttcgtagacatgaaaggacccactctaggaaaaaactttatgaatgtaagcagtgtgggaaagcattatcctctcttacaagttttcaaacacacataagaatgcactctggagaaagaccttatgaatgtaagacatgtgggaaaggcttttattctgccaagtcatttcaaagacatgaaaaaactcacagtggagagaaaccgtataaatgcaagcaatgtggtaaagccttcactcgttccggttcctttcgatatcatgaaaggactcacactggagagaaaccctatgagtgtaagcaatgtgggaaagccttcagatctgccccaaatcttcaatcgcatggtaggactcacactggagagaaaccgtatgaatgtaaggaatgtgggaaagctttcatatttgtgaataaccttcaaagtcatgaaaggacacaaacacacataagaatacactctggagaaagacgttataaatgtaagatatgtgggaaaggcttttattgtcccaaatcatttcaaagacatgaaaaaactcacactggagagaaactctatgaatgcaagcaacgttcagtagttccttcagtagttccagttccttttgatatcatgaaaggactcacactggagagaagccctataaatgcgagcaatgtgggaaagccttcagagctgtgtcaatcctttgaatgcatggtaggactcaccctgaagagaaaccctatgagtgtgagcaatgacggaaagccttcagatctgccccacacctttgaatacgtggtaggacacacaatggagagaaaccctatgcatgtaagaaatgtgggaaacccttcggatctgcccagaaccttcgaattcatgaaaggacacaaacacacataatgcactctgtagagagaccttataaatgtaagatatgtgggagaggcttttattctgccaagtcatttcaaacacatgaaaaatcttacactggagagaaaccctatgagtgtaagcaatgtgggaaagcctttgtttccttcacttcctttcgatatcatgaaaggactcacactggagagaacccctatgagtgtaagcaatttgggaaagccttcagatctgtcaaaaatcttcgatttcataaaaggacacacactggagagaaaccctgtgaatacatgaaaagactcacactggaaggaaacactatgaatgcaagcaatgtggcaaagctttcacttcttccagttcttttcaatatcatgaaagaattcacactggggagaaaccctatcagtgtaagcaatgtgcgaaagcctttatttcttccacttcttttcaatatcatgaaaggactcacatgggagagaaaccctatgagtgtatgccatgtgggaaagccttcatttcttctagttcccttcaatatcatgaaaggactcacactggagagaagccctatgaatataagcaatgtgggaaagccttcagatcagcctcgcaccttcaaatgcatggaaggactcacactggagaaaaaccctatgaatgtaagcagtatgggaaagcgttcagacctgacaagattctttgaatacagataatgaatgtaaacaattaactgtttataataactgtatactaacaaatgatattctttttaaataagaagctataatatcccattggtgtcatgtattagatcagccttatactgttaaattgttattatttggacattgtgagtcagtataaccatgtggataaaatgccagacatctttttattcgaaaaatt

SEQ ID NO: 2423 - DNA, 1425 bp, Homo sapiens
ttttttttttttggtaaagacttttaagagaaagaagtattttaaaaagtagcagtgctctgaggctcagggtgtaggatcgggggcacagcctggtcccgggaggccccttgtgcacaggtggtggcccagggccacagtgctcgctcttgggggacgcgcggccgggggacgcagcctgtgtccggcccggggctcccggcgggcttccggcggcagggacaatggcgaggccgctcaccacttgaggaagacccatcccggccagaacggtgtagcccaccaccagggaagaggacctttagcagacggtcactcttcttcctccagctccttggccaggattttccagggaaggtgatgaagagggaaaggtgccgcccgccaggcccttgcagcagcacggacgccacgctgcccggcacgccctgggccttctcaatgcccaggcccaggccgatgcccagggggatcatggggcttacggtgaccgccagcttggccgcgtcccgcaggggcatggcacttccggccatgctgatgcccagggccacgggcaccagtgtctcgtggacggccacccccacgaacaggctcaccactttctccccctcctcctgcaggcccagggccaggccctcaaagaccgagtgggccgacagcgcgaaggccaggctgagcaggcgcacggggctggcgcgcgagaggccctgcacgctcaggctggggccgtggccgtggggctccacgtacagcgcgtggccccgcgcgccccccatgaaggggctctcatactccgagtcgctgcccacgtccgatccggcgttgaaggtctccaggtcgatgaaggacggcattctcttgcgcaaaggtcaggatcagctgctccaggaagacggtcatgaagaagcccagcaggaggatggtttcggcccagcgggtaatcggtgctgatgtggccgaggctccaggaccttctggagcttttccctcaacagcgggcaagcagagctgttgaagcacgtggccagaaacacccctcctccaaaggtgttgcagagagagaggatctttttcgagcgatgggccttctcaaaatctgtctcgatgatcttcacggggagcagggagccgagcagcatgaagaagaacacgcccaccatgcacaggattttggccactagcaatttcaccatggtggcggcttgggctgctctggtcactgcagggccaaaccatctgtgggcgcacacccaagtcccacgatgtgctaccgagcccaaccacacagttggaggctcatgtctcagtccagcaactcccgggggcccctcgtccgccgactggcgccgctgcacgcccaacggccgcgcagtctcgaccccacagacgcggcccggagaggccccgctcggcgcggctggt

SEQ ID NO: 2424 - DNA, 6775 bp, Homo sapiens
ttgcacggatggtgtaaaatcagacccaggcagcctgggtcagtgcccatcattcagagtgaccctctgtcccctccatgcccagcggggccgatgggcagctaggaggcgagggaccgtctggctcaatcgagagccaaagagaaggagcttaattccgtcgcttctgagctgtctgcacggcaggaggagagtgaacattctcataaacatttaattgaactccgccgggaatttaagaaaaatgtacctgaggaaatcagagagatggtggctcctgtattaaaaagcttccaagccgaggtggtggcccttagtaagagaagtcaggaggcggaggctgcttttctgagtgtttacaagcaattaattgaagcaccagccctgtgggaactcaagctcaagtccaggcctgcccttggagactctcgggttcagcaaggacaacatgacccaaagacagacaaccagaatacacaacagaaagcaggcttcaaggaaggatggctggcagaggcctcagagagggaggcctttggacctggttttaaagaccccgtgcctgtgtttgaggcggcacgcagcctagacgacagactgcagccccccagctttgaccccagtgggcagccccggcgagacctccacacttcgtggaagaggaaccccgagctcctcagccccaaagcgctaaaggctacgcaggcagagctgctagagctgcggcggaagtacgacgaggaggcagcatccaaggcagatgaagtcggcctgatcatgaccaacctggagaaagctaatcagcgagctgaggctgcccagcgggaggtggaaagtctccgggaacagctggcctctgtcaacagctccatccgcctggcttgctgctctccccaggggcccagtggggataaggtgaacttcactctgtgctcgggccctcggctggaggccgcgctggcctccaaggacagggagatcctgcggctgctgaaggacgtgcagcacctccagagctcactgcaggagctggaggaggcatccgccaaccagatcgccgacctggagcggcagctcacggccaagtccgaggccatagaaaagctggaagagaagctccaggcccagtctgactatgaggaaattaaaacggagctgagcatcctgaaagccatgaagctggcctccagcacctgcagcctcccccagggcatggccaagcctgaagactcactgcttattgcaaaggaggccttcttccccacgcagaaattccttctggagaagcccagcctcctggccagccctgaggaagacccatcagaggacgattccatcaaggattcactgggcacggagcagtcctacccctcccctcagcagctcccacctccaccagggccagaagaccccctgtctcccagccccgggcagcccctgctgggccccagcttggggcctgacggcactcggactttctcgctgtcccccttccccagcctggcatcaggggagagactgatgatgcccccagccgccttcaagggagaggcgggcggcctgctggtgttccccccagccttctatggcgccaagccccccacagcccctgccaccccggcccctggccctgagccactgggcggtcctgagcccgcggatggtggtgggggcggagcggcggggcccggggcagaggaggagcagctggacacggcagagatcgccttccaggtgaaggagcagctgctgaaacacaacatcgggcagcgggtgtttgggcattacgtgctggggctgtcgcagggctcggtcagcgagatcctagcccggcccaagcccttggcgaaagcttcacggttaatagggcaaggagcccttcatcaagatgaagcagttcctgtcggatgagcagaatgtactggcgctcaggaccatccaagtgcggcagcgaggcagcatcaccccgagaatccgcacgcctgagacaggctcagacgacgccatcaagagcattctagagcaggccaagaaggagatcgagtcgcagaagggcggcgagcccaagacctcggtggccccgctgagcatcgccaacggcacgacccccgccagcacctcggaggacgccatcaagagcatcctggagcaggcacgccgtgagatgcaggcgcaacagcaggcgctgctggagatggaggtggcgcccaggggccgctcggtgcccccctcgcccccggagcggccatcactggccaccgcgagccagaacggggccccggccttggtgaagcaggaggagggcagcgggggccccgcgcaggcgccgctcccggtcctgtcccccgccgccttcgtgcagagcatcatccgcaaggtcaagtccgagatcggcgacgccggctacttcgaccaccactgggcctccgaccgcggcctgctcagccgcccctacgcctccgtgtcgccctcgctgtcctcctcctcctcctctggctactctggccagcccaacggccgcgcctggccccgcggggacgaggcccctgtgccccccgaggacgaggcggcggcaggggcggaggacgaaccccccaggacgggcgagctcaaggctgagggcgcgacggccgaggcgggcgcgcggctgccctactacccggcctacgtgccgcgcaccctgaagcccaccgtgccgccgctgacccccgagcagtacgagctgtacatgtaccgtgaggtagacacgctggagctcacccgccaggtcaaggagaagctggccaagaacggcatctgccagaggatcttcggggagaaggtgctgggcctgtcacagggcagcgtgagcgacatgctgtcccggccgaagccatggagcaagctgacgcagaaggggcgggagcccttcatccgcatgcagctgtggctctctgaccagctcggccaggcagtgggccagcagcctggtgcctcccaggccagtcccacagaaccaaggtcctcaccatccccaccccccagccccacagagcctgagaagagctcccaggagccgttgagcctgtccctggagagcagcaaggagaaccagcagccagagggccgctccagctcctcgttgagcgggaagatgtactcaggcagccaggccccagggggcatccaggagatcgtggccatgtcccccgagctggacacgtactccatcaccaagagggtgaaggaggtcctcacagacaacaatctagggcagcggctgtttggggaaagcatcctgggtctgacacagggctccgtgtctgacctgctgtcccggcccaaaccctggcacaagctgagcctgaaggggcgggagccttttgtccgcatgcagctgtggctcaatgacccccataacgtggagaagctgagggatatgaagaagctggagaagaaagcctacctgaaacgtcgctatggcctcatcagcaccggctcagacagtgagtccccggccacccgctcagagtgccccagcccctgcctgcagccccaggacctgagcctcctgcagatcaagaagccccgggtggtgctggcacccgaggagaaggaggcactgcggaaggcctatcagctggaaccctacccctcgcagcagaccatcgagctcctctccttccagctcaacctcaagaccaacaccgtcatcaactggttccacaactacaggtcccggatgcgccgggagatgttggtggaggggacccaggatgagccagaccttgatccaagcgggggtcctggaatcctaccgccaggccactcccacccagaccccaccccgcagagccctgactctgagactgaggaccagaagccaaccgtgaaggaactggagcttcaggagggccctgaggagaacagcacacccctgaccacccaggacaaggcccaagtgaggatcaagcaggaacagatggaggaggacgctgaggaagaggcaggcagccagccccaggactcaggggagctggacaaaggccaaggtccccccaaagaggagcatcccgaccctccgggtaatgatggactcccaaaagtggctcccgggcccctccttccaggtggatccaccccagactgtccctcacttcatccccaacaggagagtgaggccggggagcgacttcacccggaccctttaagttttaagtcagcctcagagtcctcacgctgcagcctggaggtgtcactgaactcgccctcggccgcctcctcaccaggcctcatgatgtctgtgtcacctgtcccctcctcctcagctcccatctccccatccccacctggcgccccccctgccaaagtgccgagtgccagccccactgctgacatggctggagccttgcaccccagtgccaaggtgaaccccaacttgcagcggcggcatgagaagatggccaatctgaacaacatcatttaccgactagagcgggctgccaatcgggaggaggccctggagtgggagttctgaaggcagggtgagggggcaagggacataccctggtaactaccttccttctcgcacttactctcctcaacaggatggggtaagggagggaggaactcaaccatcaaaatgtggacagcaatgttatgccgtttacgttttttgttgtaatcctagttctatgaagctgtgtgagcaggtgggtcaaatgccattgcctccacttttctgcacccccctgctcctcttcaccctgacccctctgcaggaggcagaagcaaaatggcaccacatattcacctgaaaactccaaactcttttagaaaaataaataaatatttatagacctcttttagatattttaataaaggatcctttggaatttatcccagctgatgctgttttgatattacagagagttataaaatcaggatgctgtcacaactgttgcgaagtatacactgaagttgtgtcgtttttgccactagatgagattaaaagaagacaattattcaaagccatcacaaaacactataagactgaccaaaatttagataacctttgaaccacgatttttttccacatctgtctgtgagacacagcgcaatgctactgcccttccagaaactgtgctaaaaagagaaagtccaaaagactctaaacaaaaacctcgacgccgttgaggatgtgtttcattctggtggtctgttttgcaagcttgataacagaatgtccgtgccattgtaaatgttgtagagatgtgggccgtggcccaaccgtcctatatgagatgtagcatggtacagaacaaactgcttacacaggtctcactagttagaaacctgtgggccatggaggtcagacatccatcttgtccatctataggcaagaagtgtttccagatcctttggaaaggtgggcatggggcaggtgcttggagagtggcgtttgagccagagcgaccccatttcccgtgtgaaccataggcacaacccaggaagtttccccacttgtaggagtgtgggtattccagagcaagactgtggccaccatcttcccctcttggtgttttccgaaagtgacagtgttggtcatcccatgaccactgaagcttagtaaccagcgccaaaaagtagattcatcaaactagagaccccagctccccttctcgccatcttctttctcaagttgaccgtggtgctgtttctggaaggcatctgcaactccaagtccatgcagaactctggaaggccaagttcatcgcagcatgttcaccatatcccagcctccaaatctatcctcctaccttccaacgcatgacctgttggggagcagagacttaacccccaactcagaggaacccttcctccagcgtctttggcatggtttctagggtgagagttcccaatttggatagaacggccaccatattggttactgaatctctctcccttgtttttattacgtttcctttttcaaactgtccatgggaaggctgaattgagtgactccccagaatgaagatgagaaggtgaatataatcaatgccaatgtaatgccagcgggtgagatggccgatggaggtttcaaagatgtagctagcattttgaaaccatatgggcaaaacccggcaaccagaaggggacagataaggaccgttccagaaatcccaactctcacacccagcccaggctgcagtctccacaccaaacagtcaacaaaacacaaaccctgaaggaaaaccttttccatacacccaggctatgcattgaagagttttccactgtatacatttttatccagatgaaggtatttttatattttgacaataggaaacagtgaccattttcagagtaatccaaatctggaaccaatgaaacatctttttagccaccaccaccctgttgccaattaagaccaacccgtggggggaccccacccactttttacctgttgaaaccccaacacaacgttgaaatcccaggcttataccgcagactcccgattccctagagaacctaaatttggcctttaagtgtgacgggatttgattaagcaccttagtatagtcttttgaacacggaaatccctgttgtacttaaagctagcggacccgtgaacaactttgtcaggttcacgtcctataacgggttaaaaaacacacacacacatacacaaaccgtttctatgagagattgatgaactttgtttaaaattttaaaaaaatggaacactgttctgtaaacgagtcgctaaatacagaattgtataataaaaaaaaaa

SEQ ID NO: 2425 - DNA, 2072 bp, Homo sapiens
tttcgtattttagcttctctgaggtgtgttcaccggatcagagatagcagagcgccgagttggggccacgaaggcgtgaggggagtcgtcgtccctcctgcacgaaagcgtctaagccttggcgacgccgccctgggggacccacgtcaggcctgggatagggaccgctgtccccgggtccctaccaatgtcgcccgtcgctcccggcccagctctacccgcagagtctgatggcagcggccactctgaggacgccaactcagggcactgtgacctttgaagatgtggccgtacacttctcctgggaggaatggggtctccttgatgaggctcaaagatgcctgtaccgtgatgtgatgctggagaacttggctcttttaacctctctagatgttcatcatcagaagcagcaccttggagaaaaacatttcataagcaatgtgggccgagccttgtttgtgaagacctgcacattccatgtgtcaggggagccttccacctgcagagaagttgggaaggacttcctggccaagttgggatttctccatcaacaggctgctcacactggggagcaatccaatagcaaaagcgacggtggggccatcagtcacagaggaaaaactcattacaactgtggagaacacacaaaagcattcagcggtaaacacacacttgttcagcagcagagaaccctcactacagaaagatgttacatatgcagtgaatgtgggaaatcctttagcaaaagctacagtctcaatgaccattggagacttcacactggagaaaagccttatgaatgtcgagagtgtgggaagtcctttaggcaaagctctagtctcattcaacaccggagaggtcacactgcagtacgacctcatgaatgtgatgaatgtggaaaattatttagcaacaagtctaacctcattaaacatcggagagttcacactggggaaaggccatatgagtgcagtgaatgtgggaaatcctttaaccaaaggtctgcactccttcaacatcggggagttcacactggggagaagccttatgagtgcacggaatgtgggaaatcctttagccataactccagccttattaaacatcagagaattcatagtggataaaaggccttatgagtgcacggaatgtgggaagtcatttagccaaaactctagcctcattgaacaccatagggttcacactggagaaaggccttataagtgcagcgaatgtggaaaatcctttaggcaaaggtctgcactccttcaacatcggggagttcccactggggagaggccttatgagtgcagtgaatgtgggaagttctttccctacagctccagtctcggaaaacaccagagagttcacactggatcaagaccctatgagtgcagtgaatgtgggaaatcctttactcaaaattccggcctcattaagcacaggagggttcacactggggagaagccttatgagtgcacggaatgaaagaaatcctttagccataactccagccttattaaacatcagagaattcatagtcgataaaagccttatgagtggcaaatgtggaaatctgttagcaccctggagaaagtccttgagtacacagtgaatgtcagaaagcttcagctgaaggccatatctcattgagtgccacacagttcacaagggaaagacacttttgatatgtagggatgtccagttgatataacagctctgaaggagatcccttatgagggtggcatcagcctgaattgaacatcctatatctgaacatctgcataaatccaggtatgtgtgaactgcattgcaccttttgccctgcccagggcccatgtcagatttatgtctctgctgatactatagtggaagccattttacctctaccgcctggcaggtgaccaccagtgtgcaccactcacccatcccagtgtattcaggtaagtgaaccttggtgttctgttcatgggaggaatttgtaaatagcccaagcatttattccgttttttttttttcctttctgatgagttaggccatggacctgacccagttttgccagaggaatctgctgg

SEQ ID NO: 2426 - DNA, 1005 bp, Homo sapiens
ggcggagcgtggtccgagggctccgtgctgcggtactcaggcccatcatgaggccctgaagatggagtggcagaacttcctgaacctgtgcatctgccaggagacccagctccagcacgtggaggactacagccggattctgtgtccatcttcctctcctcattgactctgcatgaaggggatttctggtggagtaagggtagcagctcttgccgcacgtgcagagagagaggaacttccagtgcccgctatggagccacagcccacagcatggggaagtccccatccagaggcagtgctgcagctagaggtagctccagagtcctccgggccctgcaccgatacagccaaagaccagcaaagcgacaagctgccagacctcatgccacctgctgtagccactgggctcagccctggagctgagagcatcgctggagatagacgtggcagagaagaggttgcgagcatggccccagccagcagctcccacgctgcccctagtcctgggcatggagcgagccttggtgtcagagaccagggtgtgcagtctgagctcctctaccttactaaagagaggcctcttttatttaccagagccacagccctgctgcctcaggaccttttcattctgccggtgctggggctgtctatctgcaagctggaggtgttgagagcaggaaaaggaggctgtgaggaagggttcgggcagctcctcctgctctcagaggkggscctccycctccaggcatggaggtctgtccactactgggcttctgggctatttgcccctgatttgctccctggtacgggctcttgttaacaggcaggcaaggggtgcggggaccaggcaagggcttcaaagggtacagtaccaaatcttccaaactcagcacttgtgccctggggtctccaaactgtcttctgccctaggatttattcatactgttaaattaccagtttatgcaaatgatatgtaaataaagctcaattttttgaaaaaaaaaa

SEQ ID NO: 2427 - DNA, 1039 bp, Homo sapiens
  misc_feature (1)...(1039): n = a,t,c or g
tttccccctccccgttttacgccgccaggatttatttgggtcctataaaaactattaccttgccgcccgcgtcgaaaactgatccctaaaacggcccgccttttttttttttttctgattgacaatgaagaatatttattgagggtttattgagtgcagggagaagggccttaatgccttgggggtgggaggagagaccccctcccccgggaatcctgcagctctagtcctcccgtggtggggggtggagggttgagaacctatgaacattctggtaggggccactgtcttctccaacggtgctcccttcatgcgtgaccctggcagctgtaagcttctgtgggaacttccactgctcaggcgtcaggctcagatagcctgctgggccgcgtacttgttgttgctttgtttgggagggtgtgggggtggtctccactccccgctttgacgggggctgctatctggctttccagggcnacttgtcacggctccccgggtaagaagtcacttaatgagacacaccagttgtggcccttgttgggcttgaaagctcctcagcaggaagcgcgggaaacagagttgaccgaagggggcaacctttgggctgaccttaggaccggtcagctttggtcccctccgccgaacatccaagtgggactactacggcctccatatgaacagcattattaatcagcctcgtgctcagtctggaggccatagattgtcaaggaggccgcgttgccagacttgtatgcagataatctctctgagatccctgagggccggttgttattcctgtaggataggagtttgggagggtggccctggtgctgctgcagccaaattactccttggtggccaacattgttgctgttcccagtgcaggtgagtgtggcggtcatgtctcaagtccttggacaccgagggtggctgagtcagccctgcctggaccactgacactgcagagtgagtgagaagaaacaggaggatcagagcccagggcatggtgctaattcccgcgggcttgctcaatgacgct

SEQ ID NO: 2428 - DNA, 2615 bp, Homo sapiens
tcccgggtcgacgatttcgtattttgaggaggtcggagcggaaggacgtcgtggagattgcttgcgctggggtgccacacttaggctgagctgcaggttttcgcacagtcgcgagttaacctctgcttgctccagaggcctcgtcctaatccacctcggctgacggcgcgggatccctggctccgcgagcctcagcctcaccatgtgtgtcaggagctgtttccagtccccccgtctccagtgggtgtggagaacagccttcctgaaacacacccagcgcaggcaccaggggtcccaccgatggacacaccttggaggcagcacctacagagcggtgattttcgacatgggcggagttctcattccttctccagggagagtcgctgcagaatgggaggtacagaatcgtatcccttctggaactatattaaaggccttgatggaaggtggtgaaaatgggccctggatgagatttatgagagcagaaataacagcagagggttttttacgagaatttgggagactttgctctgaaatgttaaagacctccgtgcctgtggactcatttttctctctgttgaccagtgagcgagtggcaaagcagttcccagtgatgactgaggccataactcaaattcgggcaaaaggtcttcagactgcagtcttgagcaataatttttatcttcccaaccagaaaagctttttgcccctggaccggaaacagtttgatgtgattgtggagtcctgcatggaagggatctgtaagccagaccctaggatctacaagctgtgcttggagcagctcggcctgcagccctctgagtccatctttcttgatgaccttggaacaaatctaaaagaagctgccagacttggtattcacaccattaaggttaatgacccagagactgcagtaaaggaattagaagctctcttgggttttacattgagagtaggtgttccaaacacccggcctgtgaaaaagacgatggaaattccgaaagattccttgcagaagtacctcaaagacttactgggtatccagaccacaggcccattggaactacttcagtttgatcacgggcagtcaaatccaacttactacatcaggctggctaatcgtgatctagttctgaggaagaagcccccagggacactccttccatctgcccatgccatagagagggagttcaggattatgaaagcccttgcaaatgctggagtacctgtccctaacgttcttgatctctgtgaagattcaagtgtcattggcacccccttctatgtgatggagtactgcccaggtctcatctacaaagacccttccctgccaggcttggagcccagccacagacgagccatatacactgccatgaacacagtcctgtgcaaaattcacagtgtggatctgcaggctgtgggacttgaagactatgggaagcaaggctcgacaacctgggtgtttcatccagaagagccagaggtgctttgctgttccttgactgggaactttcttacccttggggcgacccctttgctgatgttggctacagctgcctggctcattacctgccatccagttttcccgtgctgagaggtattaatgactgtgacttgacacagctgggaatccctgctgcagaggagtatttcaggatgtactgtctccaaatggggctccctcccactgagaactggaacttctatatggctttttcctttttccgtgtggctgcaatcctacagggagtctacaagcgatcactcacagggcaagcaagctccacatatgcggaacaaactggaaagctgaccgaatttgtgtctaacctggcgtgggatttcgcagtcaaagaagggttccgggttttcaaagagatgcccttcacaaatccgttaacaaggtcctaccacacgtgggccaggccccagtcccagtggtgccccacaggcagcaggagttatagctccgttccagaagcttccccagctcatacctcaaggggaggtctggttatctctccagagagcctctctccacctgtcagagagctgtatcaccggctgaagcacttcatggagcaacgtgtgtaccctgcagagccagagctgcagagtcaccaggcctcagcagccaggtggagcccctccccactgatcgaagacctcaaggtaaagcagccatggtgaggtggtaagaccccaataccatggcataccctccccgaccccaccgggctcacctgaaccatcccaggcagtgaagatacaggagctccgagttgaatgatctttgcttccatcgtctcagaaagagccagctcttcatgactcagtttccatctcttgctcttgctgtgcctgtgtcacaggcagatggctcaggtgtgactgcacagcccaggcagtggaatgcttggccttagaaagccagggcaggttaggcctatctgatgggtatttgaattatgtaaatttgaaacagtgctgtatcagctaataaatctctctctagagaacccgtaatatcacagctagagggccagatccactgtgagctgagtttctgtgttgtctcccagtgctgtcacttcagctgataaacagaaacaccc

SEQ ID NO: 2429 - DNA, 1774 bp, Homo sapiens
cccacgcgtccgcactgtggtcctgaactgaagagctgtgtttttcaggaagacttggccaggccgtgttccgtgtctctggattcaagtcccaggagtcctgaccagagagcaggcatcagtgtttttctgaccgaagttctcatttcctgacaatggaaatggaacaagaaaaaatgaccatgaataaggaattgagtccagacgcggctgcttactgctgctcggcctgccacggcgatgagacctggagttacaaccaccccatccggggccgggccaagtctcgcagcctgtctgcctcgcccgccctggggagcaccaaggagttcaggaggacacgctctcttcatgggccatgcccggtgaccacttttggaccaaaggcctgtgtgctgcagaacccccagaccatcatgcacattcaggaccccgcgagccagcggctgacgtggaacaagtccccaaagagcgtccttgtcatcaagaagatgagagatgccagcctactgcagccgttcaaggagctctgcacgcacctcatggaggagaacatgatcgtgtatgtggaaaagaaagtgctagaagaccctgccatcgccagcgatgaaagctttggggcagtgaagaagaaattctgtacctttcgagaagattatgatgacatttccaatcagatagacttcatcatctgcctggggggagacgggacgctgctgtacgcttcctcgcttttccagggcagcgtccctccggtcatggccttccacctgggctccctgggcttcctgaccccattcagctttgagaactttcagtcccaagttactcaggtgatagaggggaacgcagctgttgttcttccggaagtcgtctgaaggtcagggtggtgaaggagctccgggggaagaagacggccgtgcacaatgggctgggtgagaaaggctcgcaggctgcaggcctggacatggatgtcgggaagcaggccatgcagtaccaggtcctgaatgaggtggtgattgacagaggcccctcctcctacctgtccaatgtggatgtctacctggacggacacctcatcaccacggtgcagggcgacggtaaggcccgcagcacttgtcctgggggccctgagcgttcctcgggcgggagtgacgcctgcgcctgtccctgtcaggagtgatcgtgtccaccccgacgggcagcacggcgtatgcggccgcggccggggcctccatgatccaccccaacgtgccggccatcatgatcacgcccatctgcccccactcgctgtccttccggcccatcgtggtccccgcaggggtcgagctgaagatcatgctgtcacctgaagcaaggaacacagcatgggtgtcctttgatggacggaagagacaagagatccgccatggagacagcatcagcatcactacctcatgctacccgctcccctccatctgtgtgcgggaccccgtgagcgactggtttgagagcctcgcccagtgcctgcattggaacgtccggaagaagcaagcccacttcgaggaggaggaggaggaggaggaggagggctaggtcaagcccctatccaggcccgaatccttccgctgccctccaagcgccctctggggacagaccaatctgcgtgtgtctgtgaccgcctgtctcagtggcacggccacttcctttctgtagctgggttagagcctgggtctgccttttgtctcttccgtccatcaaaggacacccatgctgtgttccttgcttcaggtga

SEQ ID NO: 2430 - DNA, 3113 bp, Homo sapiens
tgagtcaatattttggtaggtcatagttaataaaaatgtaaattggataaactacatctattacaaccaacagcaacgagcttttcatgagttaaaagaaaaactcatgtcagccctagccctggggctacctgacctgacaaaaccctttacattctatgagtcagaaagagaaaaaatggcagttggagttttaacccagactgtggggccctggccaaggccagtggcctatctctcaaaacagctagacggggtttccaaaggctggcccccatgtctaagggccctggcagcaacagccctgttagcacaagaagcagataaactaacccttgggcaaaacctgaatataaaggccccccatgctgtggtaactttgatgaataccaaaggacatcattggctaacaaatgctagattaaccaagtaccaaagcttgccatgtgaaaatccccacataactattgaagtctgtaacaccctaaatcccaccaccctgctcccagtatcagagagcccgggcgagcataactgtgtagaggtgttggactcagtctattctagcagacctgaccttcgggaccagccatgggcatcatcagtagactgggagttatacatggacgggagcagcttcatcaactcacaaggagaaagatgtgcaggatatgcggtggtaactttggatgctgtcattaaagccaaactgtggctacagggcacttcagcccagaaggctgagctcattgctttaactcgggctgtagaactcagtgaagggcaagagtcacttgaagaattgttaggccggtacttctacgtctcacacttgccagcctttgccaaagcagtagcacaactgtgcattacatgccgacagcacaatgcgaggcaaagccccactgtttcgccccacatacaagcttatggagcagctccttttgaggatcttcaggtggatttcacagaaatgccaaaatgtggaggtaacaagtatttgctggttcttacgtgtacttactctgggtgggtggaggcttatccaacacgaactgaaaaggcctacgaagtaacccgtgtgcttctccgagatcttattcctaggtttggactgcccttacgaattggctcacataacgggccggtgtttgtggctgacttggactgtgtggaaatcaatgtggatactggtgtcatttgggccacttggataaaaaatgaaaaggatccagtgcagcttcagaaaggaaaaagtggcccttcctgtactaagggacaatgtaaccccttagagctagtaataaccaatccccttgatcctcgctggaaaaaaggggagcgtgtgaccttaggaatcaatggggctggactgaatccccgagtaaatatcttggttcgaggagaagtttacaaatgctctcttgagccagtgtttcaaactttctatgatgaactaaatgtgccaataacagaatttccaggaaaaacaagaaatttgtttttgcaattagccgagcatgtagcccagtctctcactgtcacttcatgttatgtatgtggaggaactgtaatagcagatcaatggccatgggaagcccgagaattagtacctacagacccagttcctgatgaattcccagctcaaaagaatcaccctgataatttctgggtcctaaaagcctcaatcattagacaatactatatagcaagagtggagaaggacttcacccttcctgtaggaagactacatggtggagttcaaaccacacagagaaaaatccattcagtaaatttccaaagttgcagaccgtttaggcccacccagaatcccaccgggactggacagcccccactgggctatactggatatgtggacatagagcctacactaagctgcctgacaagtagttgtgttattggcactattaaaccatctttcttcctactgtccataaaaacaggagaactcctgggcttccctgtctatgcttcccgtgaaaagcatagctataagaaattgaaacaatgataaatggccccctgagagaatcatacagtattatgggcctgctacttaggcacaagatggctcgtggggataccggatccccatttatatgatcaaccgaatcatacggttacaagctgtcttaaaaataatcactgcaaccggcagagccttgactattctggcccagcaagaaactcagatgagaaatgctatctatcaaaatagattagctctcgactacttgctagcagctgaaggagaggtctgtaggaaatttaaccttactaattgctgcctacacatagataaccaagggcaagtagttgaagacatagttagagatatgacaaaagtggcacatgtgcccgtgcaagtgtggcatggatttgatcctggggccatgtttagaaaatggttcccagcgctaggaggatttaaaactcttataataagagttataatagtaataggaacctacttactgctccctcgtttgctacctgtacttcttcaaatgataaaaagcttcatcgctaccttagtgtaccaaaatgcatcagcacaagtgtactatataaatcactattgatctgtctagcacgaagacatgggtagtaaacatgaaacaactcctgctattgagtgagagactcaaagtgggggaataagggaggagaccacccctcatattgtcttatgcccaatttctgcctccaaagaaagataaagtaaaaactagaaggcagaaatgaaatccacaagcagacagcccgggcgccacaccctgggactggtagttgaaaatcaatcccggacctaatcgggtatgttatctatagattacagacattgtatagaaaagcattgtgaaaatctcattcctgttttgttccaatctaattactggtgcgtgcagcccccagtcacgtacccacgtacctcctgcttgctcaatcgatcacgaccctctcacgcacacccccttagacttgtgagtccttaaaagggacaggaattgctcactcggggcgggggctcggctcttgagacaggagtcttgatgatgcctccggcctaataaaccccttccttctttaaa

SEQ ID NO: 2431 - DNA, 665 bp, Homo sapiens
ttttttttttttctttggagaaaagcttaaaactttattaagatattttaaagtaaaatatctaatataaaaacagtttgtgttgtttcagcttatcttcctttaaacctgtgatttcccttcacctgcttctggcattttaaagtgctctgcttttggtagaatcttccccttgacatcagtacccaccttcacaacccatcccccagtctttggtctgaccatagctccctggaaaatcggcttcccaggttcaggccacttgaaatctcaagctgcaaccctgaatcatcttctctcttctgatcaggtgtaggattccgacttttagtgggtggtttctcttctttaggctcttcatcagtgggttcaagcatagccccaatcagctcaggaggctgtaaacttcttcttggcctaggcctatatgttgatcttcctcgccaactcatatttcactatttcagttcctgggaggactggcctgcggacctataggctgcgtctcagtaggagagaaagagtccagacggctggaacgtgcccctcacactctcacagctccccagcggtcaccacgtgggcaaaggggtcgaagggaagatgcccagtgaacatgcacactgaggcaggtgtccaaggaacatgcacactgaagtcggtgc

SEQ ID NO: 2432 - DNA, 874 bp, Homo sapiens
ttttttttttttcaaagaatcaactttattgaacattcagggtcagtttctcttcttgctcttgcctgtgaccttggctggtgtgaggactggagctgctgcctggtacagggtggaggagatcttgttgatgtagtacagaccaaccatggagaagatgaagcaggtggtgacacagactcggtggatgaggccagatgcaaagagagccaacaggaggcacaggagaatctcagggaagatctttgcttggaatcctttgccaaagacaagattctccagattattgaaggcagtgagcgagaacacgaagagacccgaaccaagcaggccgccctggatggtgagccactcggtggaggccagctgacggctgtacatctgcatcccagcaaagagcagcagggacaggagggaggagagcgccagcgaggtgcccgtacccaccactggaggggatgggagaagggacggagagtcaggctccgccctccctccggcaagctacgggcagatcagccggtccggaagctcggtgggccgaccccctccaagaactcccgggactgcagccacacgccccaactccccacaccgcgcggcaacccctacgtattccccagccccggacaccccgaaccctcccgtccggtggaaatgcccgctcccggtggaacccaggacacgtcagctctgtcgggagaggacgaggaaagcttgtccacccaaaccccgaccccctctaggacttcctggggaccccaccggtcctgttacccatcatgccccgcccgtgagtccaaccggcgcctctggccaagaaaggcgagctgaaccgggtgcggttagctatgcgcatgcgtcagcgacgaaa

SEQ ID NO: 2433 - DNA, 1618 bp, Homo sapiens
tttccactggaggtgggctttattactgtcgccatgatgtgaaaagaggaagacagcacccattcccacgcctcctagacactgtgcaccaacaactgtctgctggggttagcacggagctgtccccacccccagggtcagagcacccacaggtgccgagctggcccaggagacccccacgctgctgacgctgtttgccttgtgtctgcacaggcctctactaaactctcccacacaattagtgtcttaaatatatgtacacgtatatattttgtcccaactgtgtcagttataaaatgaaaactgaccacttctccttacgttatcttcacagtagctgtgcagaagacaacaaatccagtgttgatagctcagggcaggctgcccaccccagcaaagggaagttcttcccccatgggacccactgggggacccagtgccgcggccacatctccgtgcttgggtggcagtgtagctgcccatctacggggtgccgggttggcttgggccttgccatgtgccagacgcatgcatacatacacacacacacacacacacacacacacaccccaaccgattatggagcacatcacaccgatcccttgcagaggtgggggctggggcccaggacaatcagaagcagggcccctcccccagctgtctcgagaccaaagccatccagggcctctgagccctggggcatcacccagaagcgctgggctcccaggctggcacccagcacaccaggagcccagggcgcgtgggagatgcgccagggacggtctttcactccagaccaggctgactaataaatatgacatccagtgttgtcaggagatgagaaaataacgtagacttggctggactctgttgtcaaggccattcccagtcacagaggaaacatcccaggtggtctccaggcgtccaggtggctctgcacctgccgacccccagaggccagtgaggttctggcagcaagatgtgctccattaggcaggcaaagcagggcgacctgaaccaacgacatgtgtgggggttgtggtctccacattctattcatgttcgaggagcgtcagtctcccaaggctgcggatggaggcccctagggtgctgcgactcccactcctcacctgcccctaaccctgccgccatggccactttcacccatgcctcgccgtggggaaaggaaggcccgcaaaccctgcccctggcggacagggcagcccttgcctctgctcagtcagtgcacggaaatgcccacagctccagggagaccccctagcaggcagagtgaccgtcaaggtaaggcccacggtggcccagcagcagcacacagctcagcggcccagaccccaccctgggggatgcccagaggcttcctagacctgcactcaggcagacaagcatgtggctgggcggccaccagcagacatctggccgcctcaggaggctcttcctggctctaaagagaatccagttccaaattcccactttctctgctcaaagttacagtgtggtcataattgcacgctctcatggacccacgtcccacccgagtgacaatgatgccacagccactcagcttctagctggctctactccgaattccaccagactg

SEQ ID NO: 2434 - DNA, 4176 bp, Homo sapiens
aaggtaagtataattttctgcttttattgaaaatttatatatgactcagtattgtaataaataaacataaccattttcacaaaaaatgacagtgctatgctaaagaagaaaatattaaatgggggatttacttgtagtggcaagacagactttttatcaatacagaataaatattaacagcatttcgtgagccaatggttgagacccaacaaaatgtagggaatcaagcatgatgtaagaaataattttccagagaaaaaaggatggtgtattctcggatgataagactgtctttgtaaactggggcatatcaattagtcccatcctcacagctcaccttcaaaccacagggcttgtttctggctatgttaaaaggaccctcctctgaggaaaagcagaggagaggaactcccattatccttacagtgaaacgcaaccactgcagaaaaactcccactgggtaaatagaacacagtttaataagtagattggatatgatctaactataaaatttaggtaacagagtaagtgttacatgtggcaggaccggaaaaaaatcatgacatttttcttatccccttgtacccctcccactgtcattatgctattaccaacaacaacaagaataatgtttcaaattttcctctcatcaaaaaatgagagaaaataacgagggaagtgtttttgttctttttcgaacagtttcttgaacacctccaataccaatcactcacaaggtgtctgtgcaaatctatttcacaggatttcaaggaaattgttaactcacaaaaaaatccttaaatgaagctattttggagttctgtatattatttggaaaggagggaggaaaagggtggtggtggtaaagtagaggtaaagtagtacaatccagccaaacaaaatgttaaaagttttaaatcaacaatgagtctgactttttctggtttgggaagcaagactctaaaatgttgggagagattctttctgatctgatggctactgaagaacacatttctcctctttcttggccatcttgcctttgttttgctccagagttcgctccaaatgctcatcttcttcttcggcctgcttctcctgcgcgtccaggtccctgacgagcgcatcgcgcttgttcaccagggccaccagctcatctagcagaagctgttcgcgtcgcttctgggcctcggtcttctgccagtcttcaatggctagcattgccctcaattcccggttcagcagctcataccgtcgttctaaatcatgttctttttccagaagagagagctgattcattctccttattaaggcatttttcttattaactaacataaaccattcctgcatcatagcttcttcttcttctgtgttccttcctgtgtccatgagatagcgaaggcgcttctccaccagcgcggcacgggtgtcaatttgcttttgctcattctctagtgctgccaattctcctactacatactgactgggagtctttgaaccctttattaagcacttcatcttctgatggcttcctctgagtttcagttatcgctgccttctcctcatttcctttctttgtatcttcctgtattgatctctgccttttcatctctggtctattctcaatatattggctgaaagactgaagttgagtttttctgactgtagaatctttgctgaacacaacaggatttctaaaacgttctgttgttttttgtaatcgttcagtccggagatcttctgtgccacttttcatgtcctgctctgagctctcagttacagctttctgggcagcactggagggtgaatttgccacctgtggctgaacttctaggagcttcttcagcttcaagtccaccaacttactgttttgttcgggagtatcaaggtcattttctaagttagtaagttcatctccacctcctacaacaaagccttcagggatctcctcgttagtatctatctcaatattatcattttcatctccagatgcctttgacctttctttcaacttttctgcagccatttcaccatagctgggaagttctgacatcttcactccagatcgagcttctgctattagctgacgagctctctctctcagctgccgacgtcgctcttcatcttgctgatcacttagctgcctgttgcagaatggggtggctgtgttggtattgtgcttattccccgcctttaaggctgcatctcttcttgcttgctcaagcagaactcttgctctttccttaagttcttcttgtctagataacaatcgatgctggactatttttgatgaatgatctgcatgatttaaagtggttctatcagcatctggatcagactccgtctgcctcagggaagcatgttttttcttagcaaggtctagatctctactatatgagtatccaagtttagaagtaggagataaacttgtttttttgataggagattctggatctgatctgcattctaaggatctggaattctctaatttttctttctccaagttactaccgatgtctagagtttgaagcttttgttcatctgtctcctcacaaataaagggtggagacatatccttcttcttatcactaacatataagtcactcaattctaaagtctcagctttcaatagtctctttttgcctaacaaaacctgtgcttgggttgaatctgtattggaacatattccagggtcatcagatcctgaagtccttccagagctctgctgagacttctggggttctgtgtcacttttagtcctgcgacagtaaggggaggctgtgcttggactaaggtgatcatcaggagtttgatgctcactttctgactctccaaccccgctatcatttacaaatacagagtcatcctgtgataagaagtctactgctccgctgataggctgttgtagttcaggctcccgcttcagatcactaagctctgcatagaatttttcttgatcaacagaactgtttgtatctgtttcatagtttccaactttatatgtgcttttactgctgttttcctctatctgaacgacatttagttcttggccactgaaatgtgcccttatttgatagagataagtcataacagtcagtttatcaggaattgctaataataccatatcagaaggttccaataatcgggaaattcctatgctggcaaatccatcgtatgcctttttgttgttctctttaatatcttgaggattcagagacttgtagtcaattaaatctggtctaaagtggtgtaatattgcacaaaaagataaaccatttctccacgatgtagtaaaattggtgatttttactcctcggtagttctttgtaacttctttacaccatacaagcaaagactgactagcatttggctttcgccccaaaacaggacttggtatagggcttggcttaggagaagtagagagatcttttcctgcagaaactgtgttttcatttaatactcctgtttttggtgagaggactggtggagccggggcctttcttttcactcgcctttcagtttctagttcttgaacaggatttaccaaattatttggaggaggagttgatttaggttcataaaaaggatttgattcatccaattcttcttcttcagttttagaactatcagcatagaggtacttgctcatatccacaggtcttatattttttctttttgtagactggggaggagaatcctttatggtcacaaatgcttctggctcatcgaatgggttcaaatactgtggagtctgcacctctttaaagggattatagctgttattataaaaagagtcttctgtttttctaggtgaagctgtttcagtgataggttcttctgagtcaggatctccaaatggatttaattctgcagcatcaggatcatcaaatggatttgaattcacggtggccaagtccttttctgcttcatccaaaaagttaagtttgttgataagctctgtaattttagctgccttttcttcttggttcactctgttctcatcatcatcttcattatcttcttcgaagtcatctaaattggccaatgtcagcctggcttcatactcatccaactaggccaacctttgcatgtcttcatctgtggcttttccttccctgtgaaaaatgcaagataatgaaaactgaagagcggcagatacaacttttttagataatggct

SEQ ID NO: 2435 - DNA, 4176 bp, Homo sapiens; identical to SEQ ID NO: 2434

SEQ ID NO: 2436 - DNA, 1391 bp, Homo sapiens
ggcacgaggagatgctgatcctacagcactcccgctgtgcctcagcagtgagctgggtgtaaaggcaggaggcttgctggggtctgacacttccctgccctcctccaggagggacacatctggggctctatgaggaggacagctttcatcctgggctctggacttctctcatttgtggccttctggaactcagtgacatggcatcttcagagattttggggtgcttctggctacttttggcaagcccagtgggagaggctgctgactacatttgaagggaaggagtggatcctcttctttataggtgccatccaagtgccttgtctcttcttctggagcttcaatgggcttctattggtggttgacacaacaggaaaacctaacttcatctctcgctaccgaattcaggtcggcaagaatgaacctgtggatcctgtgaaactgcgccagtctatccgcacagttcttttcaaccagtgcatgatatctttccccatgggtggtcttcctctatcccttcctcaaatggggggagagacccctgccgccgtgagctacccaccttttcactgggttcctcccgggagctgggcatctttacccttgacggagaaaaccttggtcctaactattcacaccggctccttcaccacccaacattctacaagaaaatccacaagaaacaccatgagtggacagctcccattggcgtgatctctctctatgcccaccctatagagcatgcagtctccaacatgctaccggtgatagtgggcccattagtaatgggctcccacttgtcctccatcaccatgtggttttccttggccctcatcatcaccaccatctcccactgtggctaccaccttcccttcctgccttcgcctgaattccacgactaccaccatctcaagttcaaccagtgctatggggtgctgggtgtgctggaccacctccatgggactgacaccatgttcaagcagaccaaggcctacgagagacatgtcctcctgctgggcttcaccccgctctctgagagcatcccagactccccaaagaggatggagtgagagacagcctaagtgtcatcctggctgtccctcagccatgggatgcagacacggcttcctgattgcacctaacaatttgcctccttcggccacacgccctaatgatggcaccaccagggtagagggaaggtcggcttcccggaaaagcagggccaaggatgaggctttcttcaaactactgcccttgatgtccctcaatgggatcaggagttagcttaagaaaaaggaaaacacagctccccagactggaggctggtcagagggaggagacccctggtcctctgctgtggaaggagaggggttcagccgtcgaaacgaaaa

SEQ ID NO: 2437 - DNA, 2162 bp, Homo sapiens
gctagagttagccggcccttgactgctgacaccgtgcgacggccggattcctggtcgacccagcgtcggggcggaaagtggtagcgattttcagcagagacgtagaaggcgccgggacccggaggaaccggaaaaaacagaactcagcgaaagagagctggcagtagcagtggcggtgtcccaggagaacgatgaggagaacgaagagcgctgggttggacctttacctgtggaggcaacactggccaagaagaggaaagtcttagagtttgaaagagtctatcttgataatctccccagtgcatccatgtatgagcgcagttacatgcatagagatgttatcacccatgtggtatgcaccaaaacagattttattattactgccagtcatgatggacatgtcaagttctggaaaaaaatagaagagggaattgaatttgttaaacattttcgtagtcacctgggagttattgagagtattgcagttagctctgagggagcattgttctgttctgtgggtgatgataaagcaatgaaggtgtttgatgtagtgaactttgacatgatcaacatgctgaaacttggctattttcctggacagtgtgagtggatctattgcccaggggatgcaatttcttcagttgctgcttccgaaaagagtacaggaaaaattttcatttatgatggccgaggagataaccagccacttcatatttttgacaaactccatacatcacctcttactcagatacggctaaacccagtttacaaagcagtagtgtcttctgacaaatctgggatgattgaatactggactgggcctcctcatgaatataaattccccaaaaatgtgaactgggaatataaaactgacactgatttatatgaatttgccaagtgtaaggcttatccaaccagcgtatgtttttcaccagatgggaagaaaatagctactattggttctgatagaaaagttagaattttcagatttgtaactggaaaactcatgagagtctttgatgaatcactaagcatgtttactgaactgcaacagatgaggcaacagttaccagacatggaatttggccgacgaatggctgtagaacgtgagttggagaaggttgatgctgtaagattaattaatatagtttttgatgaaactggacacttcgtgctgtatggaacaatgctgggcattaaagttataaatgtagagacaaaccggtgtgtgcggattttaggcaaacaagaaaatattagagtgatgcaattggctttgttccaggggatagccaaaaagcatcgtgctgcaactactatagaaatgaaagcttctgaaaatcctgttcttcagaatattcaagctgacccaacaatagtctgtacatcattcaaaaagaatagattttatatgtttaccaaacgagaaccagaagatacgaaaagtgcagattctgatcgagatgtttttaatgagaaaccttctaaagaagaagtcatggcagctactcaagctgaaggacctaaacgagtttcggacagtgccattatccacaccagcatgggagacattcacaccaaactttttcctgttgagtgccctaagacagtggaaaacttctgtgttcacagcagaaatggttattataatgggcatacatttcaccgtataattaagggctttatgattcagactggagatccaacaggtactggtatgggaggagaaagcatatggggaggagaatttgaagatgaatttcattcaacattacgacatgacaggccatacacactcagcatggctaacgcgggatcaaatactaatggatcccagtttttcataacggtagtaccaacgccttggcttgataataagcatacagtatttggacgagtgactaaaggaatggaagttgtacagaggatctccaactgtcaaagtcaatcccaaaacagataagccctatgaggatgtcagcatcataaatattactgtcaagtaaaataagatttgttttaatgtacttgcaaataaaaatacaatattaaacagattattttacattaggaagcttaggacttgctgaatatacagatcatgtttcaaagatacagtaatttttgtattttttattaaaggctattttttaaaaattaaa

SEQ ID NO: 2438 - DNA, 2485 bp, Homo sapiens
ttttttttttttcacagttctgacatttttattcactgatcataaatatagtctcatgagcattaaggtgatcatgaatgatgtactagcacctggaacatgaccatcatggagcactcactgattccccatcactggccaaagaagtcggggcatcttcctttcaccaagtgttcaactttggagggaccctccttctggtgcagcaattttattcttggcttgttctcaacaattaaaaaatcataaaagactgagtgtttgcaataaaatatcaaagaggataagaagattttctgttcttcttaaagtctaaagtaaaaaggggaggtagggaagaaggaaaggaaaggggaaagatgtcagggatctgccacgtttcttccttcctccagagcattttacaaaaacaaaaccggggaggtatttattaatgctgtttggagatgggttgcgtctctctgatgagccactcgagagcttcctggcggccctgtttctgcaattccttcccaatcacatccctgcaggtcaggtggtaattgttgagccagtcgcactctttgtctgtaagagaatccacatctatcattttggtctgaattggaaccaatgttagaggttcaaaggtcaggcttccccggttattaaaattatacttggtcttcacaggaaccacaaggacaacattctcaatgcgaattccaaaagccccatcttcatagtacccgggctcatcagtgacaatcatgcctgcctccaagggctcatcagagaatgttttgtaactgatgccgcaaggaccctcatggacattcaaaaaagacccaacaccatgtccagtcccgtgcaagtaatctaggcctgaatcccataaagctgaacgggcaaaggagtcaagaaggtgacctttggttccagtcgggaaaacggctgcactcacagctatgtggcccttgaggacatatgtgaagcattccttctcgtaggctgtaggggtcccaaaatgcattgtccgcgtcacatctgtggtgccatccttgtattgagcacccgagtcaataaggtacacctcatccagggacaaggtcctattcgtctcagggactggcgcgtagtgaatgatggcgccgttgggtcccgtactggaaattgttgggaagctcaggtccacaaagtctgcctgttgcctgcgaaactcctcagctttgtcagcagctgagatctctgtcacaccacctttgggaacctctttctccagccagttaaagagttcacagagagcaacagcatctttaatgtgagcccgcctcatgccttctgactcaagctgaattcttcacaagctttggcgatgcagatgggggtgtaaggcatacagcagcggtggtccttggggatggtctcgctcacagcatagctggccttgtcactgacccacaccttctcccttggggagaggtcagcacacagggccttgagctcgctcaggatggacttgtagggatgcacctggatcctgtattcggcttccagacccaagtcaagaagcaggtgctccttcacactgggggcgtctatgcggtcaccatcaatgaagagcatgatcgtctctagtcctatgattgcgtaggagaaaaatactggattgtgctccacatctgatcctcggagattaaatagccacgcaatctcatccaaggcagtgaccacaaaccacatgacgttcctctcagccattttcaaccgaaggtctgcaaccttgtccttccaggagatgcctgtgtaatccaggcccagtgtgaggagaggcttgcaagggcgctcaggacggtctgtccagattttgtcaacgaggttctccttgacaggaatgaggtgatggccggcacttctcagaactttggccattttcttccaataatctgtaggaatgatcaaggggtccacaccaaccctggatccttcaggaagcacactcaccagccagtcttcctgagttggtgtgtccttcagacccatcttcataagtgtccagttgctgtccatttgcttggcagcctggagaaagtagcgcccgtcagtccacatggctgcatgctcttctgtgatgatggctgtgcccgcagagccatcgaatccagagacaaaagcccgccgacagtcacatggagcaatatactcactctgatgagcatctcccgatgggatgatgtaggcctggatcggttcggtcacatactcagagttcctcatggcttgtctcagctgccgaagcagctctgaagtcacctttggaggcattctgccgtctgtttccacacctgtgtctcctgagtgtgtcacctcgttaggttcaattattcttaaatttctcagttgaaaatcctggtgattcacccttactcgcggtggctttttggaggctgccattcggcggtgacgtgccccagcccacgtcaggggagcgcagaccagcacgaaa

SEQ ID NO: 2439 - DNA, 5623 bp, Homo sapiens
ttttttgatatttaatgatgtagcttctaaatttggtagttctgtctttgagtgtgaacttaaaaattatgaagatgcggctgggcgcgggggctcacacctgtcatccaggcactttgggactacaggcatgagccactgcatctggcagcaacatatatttcaaaagagtagcctggccactaggatctacctacctacatttttggtgcaaactattactttggggacatctttcttttttccttttcttttttttttttttaatttacagatggggtcttgttatgtttcccaagaggctcaagtgcagtggctattcacaggcatgatcatagcacactatagccttgaactcctggcctcaagtgatcttcccacatagctgagacaacaggtacatgccactgtgcccagcaggacatttttcttaatagaaaactactatcgtgaagaattatgtttatctcttaactatgtctactcaactagtttcaacatagtagtgaaattaacagtatcacgaaaagcaatgttccatgttaatttccatgtcgaagcaatgttctttgacccaacatttggataaatctcattcttgatgctagctatttcttggggtatgggttgctttaatcaacctctgcaaaactccgatcttagtaattccaagtgaaagaaccttgctagttgttcttactctgtacagaaatatatcagtctggattgattggacttggagttctatcttgatatgacaattttttctggtaagaccttgctcagaaatatgacccatgttgtcaaattttcataaatatcttatttttagaaatcccatcactactttacattaggctttctctttcagtgttcacaggcatcagagctctggatgaaaaaggcagatcccaactcccacagcacgtctttaccgtttcccaacgatgctcaggcccaggccccggccagctttcttctgcagatccacagggaaaatctccaagttctcctcatcccggtagtgtgcctcatctctatacaccaccagccgcaccttctggggggtctgcctcagggctgtgatggcttcttcgtggctggagttcctcaggtcaaccccattaaccaagggtgtgtcttttcctcccacaatgctgagaccaagccctgaacgtctcttggatatttctataatcatttcctgtccagggacaatgggacacgttgcggggtccactgacagaggagcctggaaaccaccatagcctgtgaagtctgcatctgttgaatggtatgatgaagctggtgctaatggtatctcttgtgaactgaaggagacttttgttggatatttttgctgtttcatctggctgacagccagtttgaagctttcactttcaggcaattgtttaataccaaccttcgaggctgccatcgttcctcactactaataggttcggtgccgctctgatcctcaatagaagatggagaacttgatggcactggaaagggagtaacggccatctgattgactgcatcctcgtttctgatgaaaaccagcttgacttttgatggggcagtcttaataatggcagatgcgattttggtgacttcttccatacagaatctgattgtttatctctaagagttcatctccaatatgcattcgtccatctgcggcagcaggtccttccgggttaattcccaccacaaatatgctcatgcgtgatcggtctttattaccagcaaggctgagtccaagtccattcttatctttttcaagttcaataatgtgcagttctccaggcagatctgcatatctttgtctgattttttggtcggtaaaggcatcttcttcttcattttcatcactgtcatcagtcagagctttataaggaggaggaagtttcattggcggtggagcagttccttgcctcttttctttcttttcttgggtgtcctggttctggttaccggtgattttgttggccttgttatgtacgttaggaatgactcgtggagtggatgacaaactctgaacaatgaacaccacagggtttcctgcattcttaatggcctcaactgcttcgctgtgtgaggcattctgcaaatctactccagacacctcaagtattttatctccagttttaagtgcgttcgtcttccctgctggactgtcttctaaaacttgtttgatgaatatacctttaagctcctctccattctttagacgttttataacagtttgtccaccaacaatactgatcccaagagacacattgggttctctaaaaatctcaacaattctcggtggaccccagtggctaaaatttggagtttcttctccttcgccttcttctctctcaggtaactcacatgtatcagtggcatatctagaagacaacattcctgtgtatgctgaggccttggaaataactcgtgtcgcttggtgttgatataaaggcaaatcttcttgctccctcctttgagccacaacaggaaggtcaatgagcaagctaggaccttggacatcattcgggatcatgcctaaatccagactagtttttgctaatgaattaagattttccaggtcgtcaaatctgccttgttgactgtttccttcagttgatggtacagatggtagggactccatgacaaaattttctttcatcacattttcagggcaatagccatacggctgtgcctcctgggaatagacagtcctcccggttcttgcctcttgagactcggatggttcattatcatgcaaccactgtgtaccaaagtgaagttcattcacagagggcacaggagtggcctcttgaatgtgcgacaagggatacaactccatggatggtgagggatcttgatataactcatattcttcatcaacaagcatttctctttcttcatccatttcctgcaatctaggagtcagaaattcatgcatctcccaggcctccttgctttgctctatctctttttgttgggaatggaaagactttcccagatctagaaatggttcatccacaagttcttctttaaaatatggttcatctctaaatcccttgggtgcttcgagtattaaagatgaatttatatcatgaattgttcctgaaaattcagtcttgtcttcattactgcttgaatgtaaaatataacaactttcttcttcattatcttccaccaaaggcttacagatgccaaggtgtactaggcctggtggcacagctttcaatatttccacagcttcagcaagtgaggtgttgtccaaacagtattcattgactgagaccaggcggtctccaggtaatagtcccccacttctttctgctacaccatctgctaccagggagcggatcacaatcactgatcttgtaggatctaaagggtcctggtaatccaaaatgctgaatcccaaacctttacaatcttttactagttcaacaatcttgacttcaggggaccacagtgctaattccccatcatcatcttcttcagtattgacatccatattgtggtcaacctctgtctcaggaagagaggtttcagtgcgccttggttcatctacagaagcttcatcatcaaacaacctccgacagcaaaccaaagtaaaagggggtggcacttctttaagaaaggagactgcttctcggcgagattttccataaagctgcatgccattgacctcaagcagctcatcttctggctgtaggagacccaatgtatcaacaggaccaccagaaacaattgaagaaatataatggtgcccatcaaaggaatccacttccacaccaagcctcagagtgtgaataggcagcagctttgaatatttctgtaactcagcatcatctgcaatctgtgtgtccaaagtagcaaccattacttcataatcaggacccaacaggttttcccatctggatttcagctcattttctggagagtctgggactttttccaatttttctaaggcttgtatgttgtcattttttaaagtatcaattctttctttaatttcctcatcttcaccatccacattagtttcagtttccactgctccagttagaaagagagctggtggtttcagtggttctacaacagttcctctgtctgaaggtggttcaagtggagaagtagatgaggatgtcttccttcgaactagggttaggtgtaccacctgccctgcatttcgtaatacttcaacaacatcatggttggcaaaaccctgaatgttcacgccatcgacagcaactattttgtcattcacttgaatgtggccattgtggtacgcagcactgccaggtattatacttttcacataaatccctgaagcttcccctgtatgagatgttccaacatagccaacaattctaattccaagactctgcccatcttttctcacaagctcaacattataagtttcaaaaagagaactgtcagaaccagggcccttgctggctacagtaggcagggcaacaggtaaggctgcaggggcagggggggtgactgaaatgtcaccagctggatctctagcaacgagcatcctgactgaattcccacagttccttagaacttgtgcaacttgctcactggtcattccctgcacgtttgtgccaccaatcttcaagatgtggtcccctgtctggagtcttccatctcgatctgctaatcctccaggaactatagtcctcacaaccacgccacttgtttttcctccaactattccaaaacctagtccagagccatcattaatgagctcaacctcttcaacatggccccaacaaactgtttcaggcagagttgtatcatttaggctgctagaagtactgctttttgtgtggactggttccctggccacaatcagtctcaaagatccagtggtttgttgtaataatgcaattgcttgctgatgggaaatgttctgatccaatggcgtgtgattaatggccaatatttgatcattttcctttaatctttgatccctgtctgctacactccctggctggacatccttcacgaagatatcaacttttccgagattttgacttctgagggccaccacactgaatccaaggcctccagttgaaggccgttctatatctatatattcaatttgccggccctgagccatctgttgaatgactgagttaaagtcttcatttcccaacttcggggtccacggaaataacccagatacagtcgagttattagagggcctgtggacatttccattagtaatggaaccatctgtgaacactaacaaacctttcctagaaaaatcaaagttggctgaacaatctgagggtatatggttgagttgacccttcagttgcttgatggactgctgaagtgtgagtatctggttgaagagaggactctttagtgtctcataaaacatagataacttctcattctgcgacgtgtcacccttctcctgcaatttcattttcaggcgatcaagtacctgcagcacctgcagtttatctgtagcaggattttcaggcattttgaattattctcttcaatcactcttaaagacacctggtgcgctggaggagcaggtgggagcccgggtcgggcgggctcggtgtcggccctgcctcacctgggcggaagtgag

SEQ ID NO: 2440 - DNA, 2221 bp, Homo sapiens
cccccttttttttttttttaatataaacagacagtatccacatagtttatttctcacagttctcctgacaaatgaacatcattcaagaacatactgtatacacagataagaagaaacatacaaaatgttttaaatgatgcacaacaaaatccagcagtataaaagaatgcatgtgaacccttgctcactgtgcagactaaatttaatcacttgtttaaatagtaataaaaatacaatcttttatggatcttgtgcagactacaaaagagggaaattattaccatatatatgatttttatattaggcagttttctttgatgagttgtactgacaactccaaatacagaggcagaagggctgtgtattttaaagggaattaatgttgtgaattagaaactttaacacagttactaccactgggcacttttccccataggtttgtacacatcacatgatcatcttatataacattacatttaaaaaatatatctgagtgacaattttataacattcacacaccatgagctggttaaggaagcaatgccacagttgcctcctgtagtgcttcactgttggtaattaaggacaattcattgtggttaaaagaaattagatatcaatatgattaagcagctccaatttactaaaggccatcaatgaccaccactgggacagtgagttcttttaaagtgtatatcctagaagcaaaccccatcattggttaaaactttgtctaaagaagtcagtttctgtgctgaaaactattttcacaaaactgaaggctactaaactgttttaatataaatactttgtcttctcattatcatatttatgaccaagttctttgaaacctttggaatttactctctctttaatgtgtgctctcgttccatctcacccatttaagatcaccacctaaaacgcagtggtgaaaaattcaccagggaaacctttgctcaccaggaatgttcagctgctgaacagtgatctagagccacaacggtgcagagctgtacttgacgagaacactcaggaagctctcatgctgtgagtgtcatttctgggaaagcagagaatctttccaaactgtgctcataattaacaatgataccattgcctatgtgttgaagaggactagtaaatgatgttctcttccatgtcatctgtttgctggaaagtagtttgggtcaaggtaattgtaactggtgccctgagacacacagtagtctctgtctaagaatgtctctggacctataaataggttctaattggtgatctcccttgtgaatatcctgtttcatgtagacagtctgaaacaagaatccacagaaatcccaaagacatttcctggaggacaatcccctgcaatgcccaccgaacacccctggatgggttctatgccacagttatcacacttaaagcccacatgttgcacaaatccactttcagcttgcatatgctgaagtttctgcttctttaactttttaaactgtaatagttctttatattcaggtaaattcctatacatgataggaatactttcgtcatctgatgcatcttcaacagcagtgttcatgtggctatgaaaacaagatcggtcatcatcttcatccatatacactggcggttcatgtgaagtcatgaaagtgccaaggcttaaagagatgcttattaagagggtgctgtcgtctgcttgttgaagactttttggagtatatatataagtttggtgttctgcctggtactggaatgccagctttagttagctttatgaaatacttctgtactcggctggcaacctgttttgctgtcctgttgcccaattcatctgctatcttctgccagcgtcgagattctacttcttcaggagggtatttgatgagtagctgttccagctttttctgttcttcaacagtccacaactggttaaatgtttcaggtttggtatcatcacacaagcgtcctcttatcatctgaggacgactgcttgagccttctggaccatcactcaaaggcaacatagaatatgaaagggactctccatccttcttaggatctaaaggactttttggtctagcaggtaaacctttatcaaaaactagcttaactcttctagtatgtcttttacgatttttaaattctctttccaccctcccaaggctatgggtatattggtcccatacgaaatcaggcaattgaacaactctctcggacgcgtggg

SEQ ID NO: 2441 - DNA, 2221 bp, Homo sapiens; identical to SEQ ID NO: 2440

SEQ ID NO: 2442 - DNA, 1631 bp, Homo sapiens
cctgtttgttgtggtgcatgatgacccaaggtggggaacacccaggtactggctgggggcactatatcggaatcagcaaagctcacccactgcaccacctgggctgctgcctctggagtacttccccgcagctcctcattgctcacatagtaggcaatggcgttgctctcaaacacacagaatccatcatcaccctcaaatgctgggaccttgccggcaggaaatttgcggaatcaccatggcggctgggaccctgtacacgtatcctgaaaactggagggccttcaaggctctcatcgctgctcagtacagcggggctcaggtccgcgtgctctccgcaccaccccacttccattttggccaaaccaaccgcacccctgaatttctccgcaaatttcctgccggcaaggtcccagcatttgagggtgatgatggattctgtgtgtttgagagcaacgccattgcctactatgtgagcaatgaggagctgcggggaagtactccagaggcagcagcccaggtggtgcagtgggtgagctttgctgattccgatatagtgcccccagccagtacctgggtgttccccaccttgggcatcatgcaccacaacaaacaggccactgagaatgcaaaggaggaagtgaggcgaattctggggctgctggatgcttacttgaagacgaggacttttctggtgggcgaacgagtgacattggctgacatcacagttgtctgcaccctgttgtggctctataagcaggttctagagccttctttccgccaggcctttcccaataccaaccgctggttcctcacctgcattaaccagccccagttccgggctggtctttggggaagtgaaactgtgtgagaagatggcccagttttgatgctaaaaagtttgcagagacccaacctaaaaaggacacaccacggaaagagaagggttcacgggaagagaagcagaagccccaggctgagcggaaggaggagaaaaaggcggctgcccctgctcctgaggaggagatggatgaatgtgagcaggcgctggctgctgagcccaaggccaaggaccccttcgctcacctgcccaagagtacctttgtgttggatgaatttaagcgcaagtactccaatgaggacacactctctgtggcactgccatatttctgggagcactttgataaggacggctggtccctgtggtactcagagtatcgcttccctgaagaactcactcagaccttcatgagctgcaatctcatcactggaatgttccagcgactggacaagctgaggaagaatgccttcgccagtgtcatcctttttggaaccaacaatagcagctccatttctggagtctgggtcttccgaggccaggagcttgcctttccgctgagtccagattggcaggtggactacgagtcatacacatggcggaaactggatcctggcagcgaggagacccagacgctggttcgagagtacttttcctgggagggggccttccagcatgtgggcaaagccttcaatcagggcaagatcttcaagtgaacatctcttgccatcacctagctgcctgcacctgcccttcagggagatgggggtcattaaaggaaacctgaacattg

SEQ ID NO: 2443 - DNA, 754 bp, Homo sapiens
ttttttttttttgcaattttataactttatttgatctgacgatcagcgattagttctcatccacattgactgtctgtagatttttgaaagtggtaacaggtacataggtaaccaaagtatatagcttatttggggaatcttcatcctcattacgttttctggacagccgcacacggattcggtatggcacattccttattcctttggcccaaacagctttgttgagcctggtgtcaatgcgcacatctggagttcccatctccttcatggcaaatttccgaatctctttgagtgcccgaggtgcacgcttcttgaagcccactccatggatgcgcttgagaatgttgatggggtattctcggggttaccacttcgttgatggccagaaacggcccttttttcttctcgccaacccttctttggcgggagccattctgcagcgtccaagttggaaagccccttctgtcgtcttctcgcagccgtacccttctgtcgtcttctcgcagccgtgcccttctgtcgtcttctcgcagccgtacccttctgtcgtcttctcgcagccgtacccttctgtcgtcttctcgcagccgtacccttctgtcgtcttctcgcagccgtacccttctgtcgtcttctcgcagccgtacccttctgtcgtcttctcgcagccgtacccttctgtcgtcttctcgcagccgtacccttctgtcgtcttctcgcagccgtacccttctgtcgtcttctcgcagcagta

SEQ ID NO: 2444 - DNA, 2291 bp, Homo sapiens
tgactgcccctttctctttctttctcagaaatgcctctaccgctgctgccgatggacctgaagggagagcccggcccccctgggaagcccgggccctggggtccccctggcccccctggcttcccaggaaaaccaggccatggaaagccaggactccatgggcagcctggccctgctgggccccctggcttctcccggatgggcaaggctggtcccccagggctccctggcaacgtcgggccaccagggcagccggggcttcggggggagccaggaatacgaggggaccagggcctccggggacccccaggaccccctggcctcccgggcccctcaggcattactatccctggaaaaccaggtgcccaaggggtgccagggcccccaggattccagggggaaccagggccccagggggagcctgggcccccaggtgatcgaggcctcaagggggataatggagtgggccagcccgggctgcctggggccccagggcaggggggtgcccccggcccccccggcctccctggtccagctggcttaggcaaacctggtttggatgggcttcctggggccccaggagacaagggtgagtctgggcctcctggagttccaggccccaggggggagccaggagctgtgggcccaaaaggacctcctggagtagacggtgtgggagtcccaggggcagcagggttgccaggaccacagggcccatcaggggccaaaggggagccaggaacccggggcccccctgggctgataggccccactggctatgggatgccaggactgccaggccccaagggggacaggggcccagctggggtcccaggactcttgggggacaggggtgagccaggggaggatggggagccaggggagcagggcccacagggtcttgggggtccccctgggcttcctgggtctgcagggcttcctggcagacgtgggccccctgggcctaagggtgaggcagggcctggaggacccccaggagtgcctggcattcgaggtgaccaggggcctagtgggctggctgggaaaccaggggtcccaggtgagaggggacttcctggggcccatggaccccctggaccaactgggcccaagggtgagccgggtttcacgggtcgccctggaggaccaggggtggcaggagccctggggcagaaaggtgacttggggctccctgggcagcctggcctgaggggtccctcaggaatcccaggactccagggtccagctggccctattggcccccaaggcctgccgggcctgaagggggaaccaggcctgccagggccccctggagaggggagagcaggggaacctggcacggctgggcccacgggggcccccaggggtccctggctcccctggaatcacggggcctccggggcctcccgggaccccctggtgcccctggggccttcgatgagactggcatcgcaggcttgcacctgcccaacggcggtgtggagggtgccgtgctgggcaaggggggcaagccacagtttgggctgggcgagctgtctgcccatgccacaccggccttcactgcggtgctcacctcgcccttacccgcctcgggcatgcccgtgaaatttgaccggactctctacaatggccacagcggctacaacccagccactggcatcttcacctgccctgtgggcggcgtctactactttgcttaccatgtgcacgtcaagggcaccaacgtgtgggtggccctgtacaagaacaacgtgccggccacctatacctacgatgagtacaagaagggctacctggaccaggcatctggtggggccgtgctccagctgcggcccaacgaccaggtctgggtgcagatgccgtcggaccaggccaacggcctctactccacggagtacatccactcctccttttcaggattcttgctctgccccacataacccgcggggggtgtcctgctgccctggcctcctcccctttagtggtagagcgaccttttcaattacaaagaacctcctggaaaaaaaaacaaaagctgaacagaggcggccgtggccttggcccgaggagactaacttgctttctccctgcatgcaggctgagattgtttctggaaggggctggcctgagtttctttcccccaaatgtctgtgcagtgtcagggctgcaccccataggccctgaggcacacagcccagccccttgtgagtcctggcctctgctgggccctgaaggagctgagagggagctcaactccccaccccgccacgtggggagaccgcccttccccc

SEQ ID NO: 2445 - DNA, 1121 bp, Homo sapiens
ggaattcaatgctgcacaagctctgagccctcctggggctgcgaagttcctctgatgggaggtgtgtggtggccatcccatccctgtgtaagacctggggaaaccactcttcaaggttcaggaggagggagggcggcccccgacccttaaccagagcgaggttgttgctttgtgtccacagggaccaggagcgaaccatgatgccaggtaggaggggctgactgggccctgcgagcgcgtgcctttcctgctgggcagaggccctccacatggggccacgcgggccgggcacaggagggcagtcagatgggcagggcctgagagcctccctcctctccctaggtccctaatcatggactccccaagagctggcacccaccagggccccctcgatgcagagacagaggtcggtgctgaccgctgcacgtcgactgcctaccaggagcagaggccccaggtggagcaagttggcaaacaggctcctctctccccagggctgccggcaatgggggggcctggccccggcccctgtgaggaccccgcgggtgctgggggagcaggtgcagggggctccgagcccctggtgactgtcaccgtgcagtgcgccttcacagtggccctgagggcacgaagaggagccgacctgtccagcctgcgggcactgctgggccaagccctccctcaccagggcccagcttgggcaactcagttacctagccccaggtgaggacgggcactgggtccccatccccgaggaggagtcgctgcagagggcctggcaggacgcagctgcctgccccagggggctgcagctgcagtgcaggggagccgggggtcggccggtcctctaccaggtggtggcccagcacagctactccgcccaggggccagaggacctgggcttccgacagggggacacggtggacgtcctgtgtgaagtggaccaggcatggctggagggccactgtgacggccgcatcggcatcttccccaagtgcttcgtggtccccgccggccctcggatgtcaggagcccccggccgcctgccccgatcccagcagggagatcagccctaatgatgctgtgtccatgatgcttttaataaaaacaacccccactgc

SEQ ID NO: 2446 - DNA, 3386 bp, Homo sapiens
  misc_feature (1)...(3386): n = a,t,c or g
tttgttatacaacttagtatcttattgcctaaaaaaaaatttcttatcattgtttcaaaaaagcaaaatcatggaaaatttttgttgtccaggcaaataaaaggtcattttaatttagctgcaatttcagtgttcctcactaggtggcatttaaatgtcgcctgatgtcattaagcaccatccaaaaagtctgcttcataatctattttcaagacttggtgattctgaaagttttggtttttgtgactttgtttctcaggaaaaaaaatattcctacttaaattttaagtctataattcaatttaaatatgtgtgtgtctcatccaggataggataggttgtcttctattttccattttacctatttactttttttgtaagaaaagagaaaaatgaattctaaagatgttccccatgggttttgattgtgtctaagctatgatgaccttcatataatcagcataaacataaaacaaattttttacttaacatgagtgcactttactaatcctcatgggcacagtggctcacgcctgtaatcccagcacttggggaggacaatgtgggtggatcacgaggtcaggagttcgagaacagcctggccaacatggcaacaccccatctctacaaaaaaatacaagaatcagctgggcgtggtgatgtgttcctgtaatctcagctactcgggaggcagaggcaggaggattgcttgaacccgggaggcagaggttgtagttagccgagatctcgccactgcactccagtctggacgacagagtgagactcagtctcaaataaataaataaatacataaatataaggaaaaaaataaagctgctttctcctcttcctcctctttggtctcatctggctctgctccaggcatctgccacaaagtgggtgcttacacctgctgcttttgctgggaagctcttgagtgtgttcaggcaacctctgagctctctgtggaggagcctggtcccgctgttctgctggctgagggcaaccttctggctgctagctaccaagaggagaaagcagcagctggtcctgagagggccagatgagaccaaagaggaggaagaggaccctcctctgcccaccaccccaaccagcgtgaactatcacttcactcgccagtgcaactacaaatgcggcttctgtttccacacagccaaaacatcctttgtgctgccccttgaggaagcaaagagaggattgcttttgcttaagggaggctggtattggagaagatcaacttttcaggtgggagagccatttcttcaagaccggggagaatacctgggcaagttggtgaggttctgcaaagtagagttgcggctgcccagcgtgagcattcgtgagcaatggaagcctgatccgggagaggtggttccagaattatgggtgagtatttggacattctcgctatctcctgtgacagctttgacgaggaagtcaattgtccttattggccgtggcaatgagaaagaagaaccatgtggaaaaccttcaaaagctgatggaggtggtgtagggattatagagtccctttcaagataaattctgtcattaatccgtttcaacgtggaagaggacatgacggaacagatcaaagcactaaaccctgtccgctggaaagtgttccagtgcctcttaattgaaggtgagaattgtggagaagatgctcctnagagaagcagaaagatttgttattggtgatgaagaatttgaaagattcttggagcgccacaaagaagtgtcctgcttggtgcctgaatctaaccagaagatgaaagactcctaccttattctggatgaatatatgcgctttctgaactgtagaaagggacggaaggacccttccaagtccatcctggatgttggtgtagaagaagctataaaattcagtggatttgatgaaaagatgtttctgaagcgaggaggaaaatacatatggagtaaggctgatctgaagctggattggtagagcggaaagtggaacgagacttcaacacaccagtgggaaaactcctagagtaactgccattgtctgcaatactatcccgttggtatttcccagtggctgaaaacctgattttctgctgcacgtggcatctgattacctgtggtcactgaacacacgaataacttggatagcaaatcctgagacaatggaaaaccattaactttacttcattggcttataaccttgttgttattgaaacagcacttctgtttttgagtttgttttagctaaaaagaaggaatacacacaggaataatgaccccaaaaatgcttagataaggcccctatacacaggacctgacatttagctcaatgatgcgtttgtaagaaataagctctagtgatatctgtgggggcaatatttaatttggatttgattttttaaaacaatgtttactgcgatttctatatttccattttgaaactatttcttgttccaggtttgttcatttgacagagtcagtattttttgccaaatatccagataaccagttttcacatctgagacattacaaagtatctgcctcaattatttctgctggttataatgcttttttttttttttgcttttatgccattgcagtcttgtactttttactgtgatgtacagaaatagtcaacaggatgtttccaaggacatatggatatggtaatcctaccaattttcaagaagtctctagaaagagataacacatggaaagacggcgtggtgcagcccagcccacggtgcctgttccatgaatgctggctacctatgtgtgtggtacctgttgtgtccctttctcttcaaagatccctgagcaaaacaaagatacgctttccatttgatgatggagttgacatggaggcagtgcttgcattgctttgttcgcctatcatctggccacatgaggctgtcaagcaaaagaataggagtgtagttgagtagctggttggccctacatttctgagaagtgacgggcacactgggttggcataagatatcctaaaatccacgctggaaccttgggcaaggaagaatgtgagcaagagtagagagagtgcctggatttcatgtcagtgaagccatgtcaccatatcatatttttgaatgaactctgagtcagttgaaatagggtaccatctaggtcagtttaagaagagtcagctcagagaaagcaaagcataagggaaaatgtcacgtaaactagaatcagggaacaaaatcctctccttgtggaaatatcccatgcagtttgttgatacaacttagtatcttattgcctaaaaaaaaatttcttatcattgtttcaaaaaagcaaaatcatggaaaatttttgttgtccaggcaaataaaaggtcattttaatttagctgc

SEQ ID NO: 2447 - DNA, 5718 bp, Homo sapiens
ttttttttttttactaatatagagattttatttaaactgtattgaatttttacagcacattgcatgtttgtcacaacgcaactgcacagtttggatttttggccacatcatgtcacttacacccacaacagctttgaaaggagtatttgatgaacacatctgagccaaaagcccagagtctctctccaaggccatgcagtttgttcactgatgggacagtccctcaaaacagcccacgctaagtagacagatacagtctccccaaatgttaccaatcttactccccttgaaaacaggcagagtgaagtgcaatgaaagacaagttaattaaaaagccactcacaactggcagtaaattttaatgattgataaaatggctttaaaataattttatggtatcagaaacaaggaacagcttgttactttttcaatgatctcaggaattttgcagacacaaaatctccattattcagctccatttaaatgaaaaaaaaagttccgctaggctgacctaaatatgccaaaactttttaggttacatctatggcaagtacaaaagaaccacagatgcgtctctgtaggactgaaaaggtcaggacaaataatgattcttgttctaaatgcagatcctagttattttggaatgaaatgctgttttctagaaagcaacatgaaagtagcagtaagaaagatgactaccatcatttcaaaacaggataagcctaaatataatttaccatttatatgtcaacaaattaaggaaaactgtataaagtcctagtggtttcattataggccaaggagactgtatctgtcccacccacagtacatggctatatcactgtatcttttggttaagtgccactggtacatattaagatgaaaaaaaacaaaaacaaaaacaaaaaaacaaaataaaattttttaaaaaccaacaacgtttggtccaaatggacacatgttctttcccaattttggtatcaaggctttattctcttctgtttgggttccattgttaagtgcacagaaatagacagcagcatttgtactgaaaccctcacataccaaacagcatatgctaggaggtaaaaaccaaacgctaaattctaccctcaaggtgtcaagtgttcaggataagaagcaatgtgacccagaggaggcatcagccaagggaaagacaacatgggggaaatgggcaatggaacaacaacaacgaaaacctttgttttattttcatgccaggagaggatcaaggtgtagctcctgtgttagcaccaggacaactaggaaaagtcaggtgcaaagagtagggcacaatcagcagatatttcacaaggataatttttgcttttcccttctcattcttcacagtgcataactcaagagctgccactgtgtaacagagacgactgccttcacagctcaaaataactcaatgtttgccaggaccgaacatcagcagagttttcctctgctcccaaaaatgtctcactccctagaactgttcccctaaactgaatattcaccaatgctggctgatgagccaactgaaaaatacattgaaacctccacttgctgagccagtcttcaaaccaaactccacagaaagacagtactaatgcaactagaaggagtgcctctaaaggctgagccttcatgcagacacagagcacagaggtacaggatatagttcatctcaaataggacaggaattcctaccttgtatactataatctgcttttgtcaaggtggaggagagatgggtctggttatcacttggagtttggttatacatatgcctttctattgctgtttggggcactttgcaccaggcaacatctacgcaatcatcatcttgtgacctccaggagaaagaggctggagtcaccaactcaacattaagcttccagaccctgggtctgggttaggaccattaccccaaggtgagggtatcaccagtagaggacctcctgctaaattgcaattcctctgctccagtttcatgataccaaggaggatttctcaagatggtatctctgagctctgtgatttcatgagccacaccaaggaaccttccaaactacaactgaagaagatcctcccttcaaacctgctaaaattggacaggtttctccccggcattcaactggaagctgtagcaatgggtttcttcagctgttggctcatgagttccctggcacgagagacttgaatgtgttcgtaacatgagttacagacgagaactgggtcatagagttgctgatcaggaatgggcagcttcaggtggcagcatccagcacaaaatacattcccacaatttctgcaatggtgtcttcgtttggccaaccagaattcacagtcacagttatagcagtgtgatgccatatggtctggaacccagcgagtcacctcagtctctttcttatcaacaggttcccagcttgcttctgaaaggcagtcttcactgtgatcagagccaaaatcctcagtatcactgccatctgactccttcaaacatgtaaaatcatcctcatagtccatggggggctctgctggaggggcacagcagtgacggatgtccagcctcatctgaagctcacgcacctgtcgacgtagctgctccacctcttgtttgtaccctgcttcgatttgccgtaacctatgctggatcacatccgtgggaaaggggagtccatcatcatccaaatacagaggaggcactggagaagggcagttcagtggaacgggctttgtgctagagacttgctttggatgactggacaaccacatctggttctttcctcctgggccagtacaatgtccattggaatgactagaacagacaggtgacttcacaccttctctctgagcccactggcccccaaagcagggccctgtggcccgcatctgcttactgtttggcctcttgctacaacagccataggaaagcagccgccgaggggtggcctccccacttgggaatgaagtcaccatcccttggaagctgtcccagttggaccctagaaaagagaactcactgatctggctctgagaaattggcttccggaccaattccaatggcattttcccaaagcgaggattttccaataactgcccattcctattatttcctcttttaccaatgtcttcctccccatgggtcagatccggcacagaactcagttgttcctggtgggagatacttgccacagaccctgagggatcttggttgaggaaagtcagtgcttgggtctagaggagtttggcaggcagcactcggtgggttgcaaacggtgctgaggctgtgatcaagaacacacttggagggcacacctagcatggagtctggctgggcctgttggggcgtacctgtaggagagttctgggaagactcaggaaaattacaaactccatcacacttgttagaaatgaccttggagagtgcactgacagcttctgtttcaggacaatgttcaggtggctcccctatgccatctaaagtcctacccagctcatcctgggcagaagggtctggagctggtcccttagtctcttctaggactttgatctcaggatcagaggtgttgctcttcatttcccgaggcactgcggtattaagcagtttgtaacttggagaacagcttttgtgactcttgaaaggtttattgctcaagtagtctttctggctgctgggcagaggaggaggaagacccacttctcctacagtttgctgaggccctcctaccccagagtccacaaagcttgtctctgatccctcaggattgctgtgccagggctccaggcctaccctgacctcctgacagtggttattcaggttagggtcactggatgtacgagtcagggggctgcttgtgtcacaggcagaaagaagatcatccatggatctggttttaggtaatctgtccagagagcggccagagaactcctggctctgggccactggggaaaggtaaagatccatgttttcttccccaagtgtgcatggagatgatgctggcagataaacagctgtccagaggtgcagggcccggacatgacaaacaggatgcaggaccatgtctgagctgggtgtgtagaggaagttatgaaagtttttattgccagctcgaaggagcgcccacacagagcaggtcccgctttgtagatgttgcgcttctctcgctacacaggggttgttggccaggaaggtgccgtagaggcaggagtatgtgtgttgcaccagttttaccaggaatgcttcattaaattcaaacaggcaggggaactgcttaagcaactgatgaacagaatcaagccactggaggaacacagggcattgttcgttttggtcctccacattctcttggtggccacagcgatctccaaacttgtgcccaaaatccagccagtcagactccactaacacttggaagccctccaacgtcctgtaatatgggtccagtaatattttggccagggctacgatctgcggtgtgcggtcccagccatctgagcagtgtaccagcacaggccggccttcccggtctactgtattagccaccagcacagctgcttttagcatcaccgacaagtgctgcagccatttggtactctccagtgccgacaaccagttgctaggatccggcatctggctacacacagcccggaggtactgaaagctgttccggatggcatggatgttggccattcccatgaacacgacctcacagttgggatagtactcttcacattcacagcctccacccttggcccggttggccactgctgccgtgtaggatcgcgcatccaggatcagcagcttttgaggagctgctgtgctctccactccagagcacgcagtcagagaagaatcaaagtcagcatcacacgcctcgctggtatcattattcccggtgctgagggagcccccagtggcccttgtccccgggtccagggcacaggctttagcaatggacgtgaccaggtactcatcatcagcattgcgccagccccaccagctgatctctggctggctgcagcgggcgatggcagccccattgcgcaagtgtctatacacaaccacgggaatccgcttccaggagcggaaggaagccacgttctccagctctttgtcagtgatccacacaggaaccagcagcttctgggggtaactggggcacaatttgtagttgctgttgatgtgtgagactctccagacgttctgcaggtcaaagcccatccttgcaagctccgcctcctgtcgacaacgtatgtgctcacctggctgacataggtgagtgtgctggtcctcctcggtcagccccaggcaccaggcatggtaggcaaaggcaaagaggtcttcaggcttggcaggtcttgctgtggctcggcttagccgtgagagccactcttggcactgcttaaaagtggagaagtggcacctgccaggcaagaagccacaggcctaggtgaggcaaagtgcagttgtgccatggggctatcagggccaaaaacacagccacaggaaggctgtgaggagagaaggctgcaaagcaagaggtaaagcagtggggacccagggtggggggacgagggacactggccaacacccaacagaagttgtctcttgtgataattctcttcccaagaactcctgtgtttgaggcatacttatcctctcgaatggggcgctactgtttctcgtatcaaatctaaatg

SEQ ID NO: 2448 - DNA, 1873 bp, Homo sapiens
gaaaaacaactattggtttttcttgggatgactgaatgacctttttctcttcagttgctgattttatagggctagatcccagaattgctgcatggcttatagatcctagtgatgccacaccctcttttgaagatttagtagaaaaatactgtgaaaaatccattacagttaaagtgaacagcacatatggaaattcctcaagaaatattgtgaatcagaatgtacgtgagaacctgaagacactctacagacttacaatggacctttgctctaaactgaaggattatggtttatggcaactatttcgtactttggagcttcctctgataccaattttggcagtgatggaaagccatgccattcaggtgaacaaagaggagatggagaagacgtcagcacttcttggggctcgtctcaaggaattggagcaagaagctcattttgttgcaggagaacggtttcttataacgagcaataaccagcttcgagagatcctctttggcaagttaaagctgcacctgctgagtcaaaggaacagtctccccagaacggggttgcagaaatacccgtctacagtgtcagaagcattaaatgctctgcgagaccttcatccattacccaagataattttggaatacaggcaggttcacaagatcaagtcaacctttgtagatggattactagcttgcatgaaaaagggctccatttcctctacatggaatcagactggaactgtgactggaagactttcagccaagcatcctaatatccaaggtatctccaagcacccaattcagattactacacctaagaattttaaaggtaaagaagacaagattctcacgatctccccgagggccatgtttgtttcatccaaaggccacacctttctagcagcagacttttcacagattgaattgcgcattcttacacatttatctggagatccggaacttctgaagttattccaggaatctgaaagagatgatgtattttctactctgacttcacagtggaaggatgtgcccgtggaacaggtgacacacgcagacagagagcaaaccaagaaggtggtgtacgcggtggtctatggagcagggaaggagcggctggctgcttgccttggagttcctattcaggaagctgcccagtttttggagagttttttgcagaagtacaagaaaatcaaggacttcgcccgagcagctattgcccagtgtcaccagacaggctgtgtggtgtccatcatgggcagaaggagacccctgccaaggattcacgctcatgaccagcaactccgggcacaagcagagcgacaggcagtgaacttcgtggtgcaaggctccgctgctgacctctgcaagctggccatgatccatgtcttcactgcagtggctgcttcccacaccttgacggccaggctggtggcccagatccatgatgagctgctgtttgaagtggaagatccgcagatcccggagtgtgcagctctcgtcaggaggaccatggagtccttggaacaggtacccctcaaggtgagcctgagtgccggccgctcatggggacacctggtgccactgcaggaggcctggggccctccgccaggcccatgtcgcactgagtctcccagcaacagcctggctgcccctgggtcccctgccagcacccagcccccacccctgcatttttcgccttcattttgtctgtagccccaggcaacagtgggaggagagaactggtttccagcagtccattgtgtggccttccccaaggtcaccagctctgtacgccccaggacgcattaaccctttggggctggggtggcccgccatcccctggagtaaatgcctgtgcaaagccctcaaaaaaaaaa

SEQ ID NO: 2449 - DNA, 1600 bp, Homo sapiens
ttaaagaaaatactttattatgtcatgaaaaaaaaggcctcaaccaactagattcatacttgatttgaaaaaaaaatggaaaatttattaattagacagtatgtgggcatcctgttccacatgggaatgagaagatgctataggttctctaagtattgcacagtctgaaaaaataacaaaaaaagggaaggggaggaaaaaaaaaaatcacatgatattgggaaccatctcacattatgaataatctaccaagaaacatttaaaaaagaaaaccctttgtttctacagtagctttaagtttatagttcttggaatgactgtattccattgaagacatctcagtaacaggaagctgttttagcaatcccatgtgcaaatattaataaaaaatatataaaataatgcaattcatctcttgccttcaccccggcaatcatgacatttctgagaactgttttgcttgaaaatgggttaagctgtaagttttgcctgaagctccatctctgcagcccgtttgagtgcaacatccactagaagctgaaatccactgaagtcctggttgaggtccggtggagtagggggaggagtgttgaaaagaccactctgtgtattcgtacttggtccagatttacaagtgtcctctgggtacatgagagaagagtctcttaagtttacttgtcgctatctgctgaatattctgtgttttgcccacaaccgaccgactggcaggagagagaaagggacaatctttcaatggcagtcacagtggtatggcagatcactgatggacgagccaaaactgatcccggggattggcgggcttagcagacaggggcctcccctagggttgggtttggccccgcgcgtaaaagaatgaaatggggtctcctctagagctggcatgaagtttttgatgcccatcacggactccacagagctcgtttcagaaatcttggccccacggcgggaaattgtgaactgatttggatctttgccatcctttctcagcatgtcagggaggagcctgcggcgggcgttgatgaaccagttacagacctgtagcgtagacaggtgtgtttgctgggacagcaacgctttttcttgctctgaaggataggcattgtaacggtgctcatacagccaatcccgaagaatctgcacagactccttgggtaggttgccccttctccttctcttgcctgagccagcggatgaagaaaggtccaagggaatgtccatgctgtcctcatcctcagtctcactgccagatgctgcaacaatacctttcttgcctttcattctggatctcccctcccagcgcgaggcaaggcgggggtctggaggggccaggagcggggacacaggggataagcgaacgtctccttcacagccgactctcccgtaacttgtaggacgtgctccagccgttattgctaaacaggacgctctgatcccaggcgcccgctccttgggtggaattcaagtgacacttgggcttcctcccgccgggatcttctggcagccggccgggggctctccctcgcccaactctctcccctcccctctccgctcctttgttccctgctcctgctcggcgcac

SEQ ID NO: 2450 - DNA, 1919 bp, Homo sapiens
cttccagaaacattcccaccccctccatacagccagctttgagtcactggctgctggctggccagtcacacagcaccatggacatgcagaggtaccagtgggcacttggtgtgtgctgcccagatgaggacacagagttagtcagaagattctcgggcaaatggatccaaaacagtcctggaatgcaaatgtgaagtatttccacagccgtggcaggaacacataactggcactatttataagcgataaaagggttatttcatgcatcctctttaagctgcaaatgcttcatttacaaaagaaaaaaacctgtccttttcattcatgagactggcttaaggatcaaatgagatctgtttttaatataaagatgttttcttaaaatctctgtatgaaattatctccggagagatagattcaccatgtttgccctgagatttagaggcctctgccttccactccacaccctgtttgtgaaggcccaagtcactcactatggcaaagaagtcattccctctaggttaggtgttaaaaaccaggttatgggtcttcctgggcatgggtggataatccacacgtggataatcaagagtcggactatatggggttcctccctccccctccccttccaccaggggatccctggacagagggccacagcgagactcttcagcggatgtagatcatgtcggagatggctccaggcaagtgggtcatgatctgcattcgcagccaccagtagtagtccatggggtggtagcgggtgtagggggtggtggcggtcagggcgtgtgtgacagcatcgatgacaggggacgtgtctgtggagccactgctgcagtaggtctccatcttggcgatcttttcatcaaagtacttcttgccgtagtccttgcgcacgacctcaggcagctcctcccacatcttcttggcgatggcctgaatgctctcagggctgtaaaggctggtggcagcgatgaagttgccgggctccaccacgctgaccttcacgcccagggggtacatctcatagcgcaggcagtccgagaaagcctctaccccgaacttggtgatgcagtacggggagcgggccgggttggccatgcggcccagcatgctgctgatattgacgacgcggcctttggcccttcggatgagggggagaaaggatttcgtcatccgcactgtgccccaaaggttcacttctgccacctgcttgtaggtctccaggctggtgaactccacctccccgaacgttgagatgccggcattgttaacgaggccccacatgcctttctcagggtccttcaggctcgagcggacaatctccaccactttctccacctcttcgctgctgcagacattgagctggacggttctcaatcggtcactgtttaggctgtccagctccttgaccccatcatggcctttgtccttcatcaagcagccagcaaacacaaggaagccttttgaatgcagatgcttggccaatgagaacccaaatccagagtcacagcctgtgaccaggacagctttgctgccaaccggctccgccgcactggcataagtccgacggccaatcgggataaaggaagtagaaccaagcaatagtgggcgtcttgctccattttctctatcacaggcacttagggtttttcctgggagccgtgacaggggtctggagaggcgggtggccagcatggtagcaacgggtgttagaatggcccagttcctcccggtggttccaaaaccaaatgggcagggggctccgctgcagagggctcgccgaggctctcgccttcacccggcgccgcgcaggtgcccgctctcctgcggggagagccgagggggggcgctgccgcagggtctttctggaagcccctccaccagcactcctgcggcctgcggcctccgccacc

SEQ ID NO: 2451 - DNA, 5126 bp, Homo sapiens
cagcatttgtgttcttgtctatcgtcttcttgcctggccggaatacaaactcgggccaatcagagggggctacgggacccgtgcggggcgtcgcgctgggggcggggcctgcgggggctgaagagcgagccgggcgggcgggccgcacgtgtcgggctggggctgaggctgaggctgaggttgaggcggcggcggcggcggccgggtgcccgggacagcgacgcagcgcgccggcggccgcgacagggccagcgagagccccgcagctctgccgcagctgccgcctcgccgcggccgggccggagtagcactgttgcgggagcgcggccttacgaggcggccggagcggtgggcacagctcggcgcggagcgtcctgtcaggcggcggccgagggcgtcgcggactctccccgcgatgatgccgatgatattaactgttttcttgagcaacaatgaacagattttaacagaagttcctataacaccggaaacaacctgtcgagatgttgtagaattttgcatggaacctggagaaggcagctgccatttaactgaagtgtggaggggaaatgaacgtcccataccctttgatcatatgatgtacgaacatcttcagaaatggggtccacggagggaagaagtgaaattttttcttcgacacgaggactccccaactgagaacagtgaacaaggtggccgtcagacccaagagcaacgaactcagagaaatgtaataaatgtacctggagaaaaacgtactgaaaatggggttgggaatccacgtgttgaacttaccctctcagagctccaagatatggcagctaggcaacagcagcagattgaaaatcagcagcagatgttggttgccaaggaacagcgtttacattttctaaagcaacaggagcgccgtcagcagcagtctatttctgaaaatgaaaagcttcagaaattgaaagaacgagttgaagcccaggagaacaagctgaagaaaattcgtgcaatgagaggacaagtcgactacagcaaaatcatgaacggcaatctgtctgctgaaatagaaaggttcagtgccatgttccaggaaaagaagcaggaagtacagactgcaattttaagggttgatcagcttagtcagcaattggaagatttaaagaaaggaaaactgaatgggttccagtcttacaatggcaaattgacgggaccagcggcggtggagttaaaaagactgtaccaagaactacagattcgtaaccaacttaaccaggaacaaaattcaaaacttcagcagcagaaggaactcttaaataagcgcaacatggaggtggccatgatggacaagcgaatcagtgaactgcgtgaacgtctctatgggaaaaaaattcaggcatgtgaaaaagtttttctgaaccgtgtgaatggcacgtcatcaccacagtcccctctgagcacatcgggcagggtcgctgctgtggggccttatatccaggttcccagtgccggaagctttcctgtgctgggggaccctataaagccccagtctctcagtattgcctcaaatgctgctcatggaagatccaaatccgctaatgatggaaactggccaacattaaaacagaattctagctcttccgtgaaaccagtgcaggtggccggtgcagactggaaggatccgagcgtggaggggtctgtcaagcagggcactgtctccagccagcctgtgcccttctcagcactgggacccacggagaagccgggcatcgagattggtaaagtgccacctcccatcccgggtgtaggcaagcagctgcctccaagctatgggacatacccaagtcctacacctctgggtcctgggtcgacaagctccctggaaaggaggaaggaaggcagcttgcccaggcccagtgcaggcctgccaagtcgacagaggcccaccctgctgcccgccacaggcagcaccccccagccaggctcctcacaacagattcagcagaggatttccgtaccgccaagtcccacgtacccgccagcgggaccacctgcatttccagctggggacagcaagcctgaactcccactgacagtggccattaggcctttcctggctgataaagggtcaaggccacagtctcccaggaaaggaccccagacagtgaattcaagttccatatactccatgtacctccagcaagccacaccacctaagaattaccagccggcagcacacagcgccttaaataagtcagttaaagcagtgtatggtaagcccgttttaccttcgggttcaacctctccatcgccgctgccgtttcttcacgggtcactgtccacgggcacaccacagcctcagccaccttcagaaagtactgagaaagagcctgagcaggatggccccgccgcccccgcagatggcagcaccgtggagagcctgccacggccactcagccccaccaagctcacgcccatcgtgcattcgccactgcgctaccagagtgatgcagacctggaggccctccgcaggaagctggccaacgcgccccggcccctgaaaaagcgcagctccatcacagagcccgagggccccggcgggcccaacatccagaagctgctgtaccagcgcttcaacaccctggccggtggcatggagggcacccctttctaccagcccagcccctcccaggacttcatggtcaccttggccgatgtggacaatggaaacaccaatgccaatggaaacctggaagagctcccccctgcccagcccacagccccactccccgctgagcctgccccgtcatcagatgccaatgataatgagttaccttcccccgaaccagaggagctcatctgtccccaaaccacccaccaaactgccgagccggcagaggacaataacaacaacgtggccacggtccccaccacggagcagatcccgagtcctgtggctgaggccccatctccaggggaagagcaggtccctccagcacctcttccccctgccagccaccctcctgccacctccacgaacaagcggaccaacttgaagaagcccaactcggagcggacggggcacgggctgagagtccggtttaaccccctggcactgctcctagacgcgtctctggaaggagagttcgatctggtgcagaggatcatctatgaggtggaagatcccagcaagcccaacgacgaagggatcaccccactgcacaacgccgtctgcgccggccaccatcacatcgtgaagttcctgctggattttggtgtcaacgtgaatgctgctgatagtgatggatggacgccgctgcactgcgctgcctcttgtaacagcgttcacctctgcaaacagctggtggagagtggtgccgccatttttgcctcaaccataagcgacattgaaactgctgcagacaagtgtgaggagatggaggaaggctacatccagtgctcccagtttctatatggggtgcaggaaaagctgggtgtgatgaacaaaggtgtggcgtatgctctgtgggactacgaggcccagaacagtgacgagctgtccttccacgaaggggacgccctcaccatcctgaggcgcaaggacgaaaagcgagactgaggtggtggtgggctcgccttggagaccgggagggctatgtgcccaaaaacctgctggggctgtatccacggattcaaacccccgacagcgaacactcgcctgaacttccttttggagcaccgcatggtcttgccagctaccaggagccacttaagagattattgtgctgttttccaggaaagctgcagctagaaaatggtcttaatggtgctcactttagcagacagcgtccacaatgtgaatcctacagtttccaggtgaggccctttctccagtttgcccattaactgggagaggtactttcgcctccaaggactgaattttgccaattactataaatccaaataaatacccactttcaaaacacccacccctcttgccattaagaagtcccataacccccggttggttgccagtgaagacagaagctcttactgacttggccccgaggcattcaccccctccagcagtgaacactgtccgccgctgtgaggcctgctcccctgcgaccgctctgccccccgtcaccgaatcggacactcatcctttctcacacttcccacacatgatccttcttcccttcatcaccaaaggaggcctctgtatgggaaacatgttccagtgttggtggcccagtgtgtatgcctcccagtacccactctgctcggccgccttgggggttccgcttcctgttccagttcacctaaaggctgattgtgcaggcccagcactgtggctggactgccgcgccacgggcaccaggacccctaagaccaagtgacaactgggagagcctcagcatatactcttctcctccgatctcacagcctgtcatgctgctcagtgtggttctcacccctgcaagctcaaattcagttccctgaatggagtcaggtgctggaggccgtggcagcggagggtggttggggttggggctgggggtggactggtgtgagggcagaccagggccaggtagacggggctgtttggtgcctgaaggatggcagacgcctggtgtcaggaggggccgccaccaaggagcagcagctggggcagaggagctggggtcaggggccacccctctctgccgatctccctgcctgggctggctgtgaggcccacctttgtcccaggcccagcctcaaggcaaggagggcgcttcactgaggtgtgaattgtacgtacaggctttttatataccaaaagtattttttgactagaccattcaaagctacccgaactatgttggaaattttttttttctcattaaaatacaggcccttaggctctatttttcatgtatgagtcgtgtgtaatttatgtaaaaatgtgtgtacagactcactgatgcagcactgtagcccatcaccttggagcactgactgtacatagtgtggtgaagaaaagtgaacgcccttgtagagcagcccgaccacaggagcatggccgctgccagcccagacgctgctgacgctgtgtaaatgtgcacaataaacccgtctcaccccgaaaaaaaaaa

SEQ ID NO: 2452 - DNA, 3381 bp, Homo sapiens
ccgggtcgacccacgcgtccgaaaaaatgaaaacaggcaggtctgcacttgttgtaactgacacaggagatatgtcagtattgaattctcccagacatcagagctgtataatgcatgttgatatggattgcttctttgtatcagtgggtatacgaaatagaccagatctcaaaggaaaaccagtggctgttacaagtaacagaggcacaggaagggcacctttacgtcctggcgctaacccccagctggagtggcagtattaccagaataaaatcctgaaaggcaaagcagatataccagattcatcattgtgggagaatccagattctgcgcaagcaaatggaattgattctgttttgtcaagggctgaaattgcatcttgtagttatgaggccaggcaacttggcattaagaacggaatgttttttgggcatgctaaacaactatgtcctaatcttcaagctgttccatacgattttcatgcatataaggaagtcgcacaaacattgtatgaaacattggcaagcctacactcataacattgaagctgtcagttgtgatgaagcgctggtagacattaccgaaatccttgcagagaccaaacttactcctgatgaatttgcaaatgctgttcgtatggaaatcaaagaccagacgaaatgtgctgcctctgttggaattggttctaatattctcctggctagaatggcaactagaaaagcaaaaccagatgggcagtaccacctaaaaccagaagaagtagatgattttatcagaggccagctagtgaccaatctaccaggagttggacattcaatggaatctaagttggcatctttgggaattaaaacttgtggagacttgcagtatatgaccatggcaaaactccaaaaagaatttggtcccaaaacaggtcagatgctttataggttctgccgtggcttggatgatagaccagttcgaactgaaaaggaaagaaaatctgtttcagctgagatcaactatggaataaggtttactcagccaaaagaggcagaagcttttcttctgagtctttcagaagaaattcaaagaagactagaagccactggcatgaagggtaaacgtctaactctcaaaatcatggtacgaaagcctggggctcctgtagaaactgcaaaatttggaggccatggaatttgtgataacattgccaggactgtaactcttgaccaggcaacagataatgcaaaaataattggaaaggcgatgctaaacatgtttcatacaatgaaactaaatatatcagatatgagaggggttgggattcacgtgaatcagttggttccaactaatctgaacccttccacatgtcccagtcgcccatcagttcagtcaagccactttcctagtgggtcatactctgtccgtgatgtcttccaagttcagaaagctaagaaatccaccgaagaggagcacaaagaagtatttcgggctgctgtggatctggaaatatcatctgcttctagaacttgcactttcttgccaccttttcctgcacatctgccgaccagtcctgatactaacaaggctgagtcttcagggaaatggaatggtctacatactcctgtcagtgtgcagtcgagacttaacctgagtatagaggtcccgtcaccttcccagctggatcagtctgttttagaagcacttccacctgatctccgggaacaagtagagcaagtctgtgctgtccagcaagcagagtcacatggcgacaaaaagaaagaaccagtaaatggctgtaatacaggaattttgccacaaccagttgggacagtcttgttgcaaataccagaacctcaagaatcgaacagtgacgcaggaataaatttaatagcccttccagcattttcacaggtggaccctgaggtatttgctgcccttcctgctgaacttcagagggagctgaaagcagcgtatgatcaaagacaaaggcagggcgagaacagcactcaccagcagtcagccagcgcatctgtgccaaagaatcctttacttcatctaaaggcagcagtgaaagaaaagaaaagaaacaagaagaaaaaaaccattggttcaccaaaaaggattcagagtcctttgaataacaagctgcttaacagtcctgcaaaaactctgccaggggcctgtggcagtccccagaagttaattgatgggtttctaaaacatgaaggacctcctgcagagaaacccctggaagaactctctgcttctacttcaggtgtgccaggcctttctagtttgcagtctgacccagctggctgtgtgagacctccagcacccaatctagctggagctgttgaattcaatgatgtgaagaccttgctcagagaatggataactacaatttcagatccaatggaagaagacattctccaagttgtgaaatactgtactgatctaatagaagaaaaagatttggaaaaactggatctagttataaaatacatgaaaaggctgatgcagcaatcggtggaatcggtttggaatatggcatttgactttattcttgacaatgtccaggtggttttacaacaaacttatggaagcacattaaaagttacataaatattaccagagagcctgatgctctctgatagctgtgccataagtgcttgtgaggtatttgcaaagtgcatgatagtaatgctcggagtttttataattttaaatttcttttaaagcaagtgttttgtacatttcttttcaaaaagtgccaaatttgtcagtattgcatgtaaataattgtgttaattattttactgtagcatagattctatttacaaaatgtttgtttataaagttttatggatttttacagtgaagtgtttacagttgtttaataaagaactgtatgtatattttgtacaggctcctttttgtgaatccttaaaaactcaactctaggaagcaactactgtttattatactaaaaggctgaaaaacctccaggccagactgctaagctctgaaattcctgagaggtctcagaccgggattctacttgttccaagaaagggtaaagcttctaaaccatcttattcttgtctccaagcatgaacacaggagcatgttaagaaaatctttactacttcttccatgcggagaaatctacatattttgaattagaaacaccctcacacccacttgaagatttttttcctgggaacattatgtcccgtagatcagaggtggtgttgtctttttgcttctactggccattgagaaactttgatgataaaaaagaacggtatagatttttcaaacgtatataaaatatttttatgttatatgttatgccataactttaaaataaaaatagtttaaaattcaaaaaaaaaa

SEQ ID NO: 2453 - DNA, 4809 bp, Homo sapiens
tttcgtcgtcagagcatcatcaacgacctaaagtctcctcagactgttgaaggcccagtggggcagctctggggctgcatctgagccagtggtgcttggcgaagagggctgtggattccccagcaccaatgaataccctgatctggaagaggagagagcaacctatccacaggaagaggaccgttttctcactcctggcagggcccagctgctttggtctccctggagccccctggatcaggaggaggcttgtgcctccaggcagctgcactctctggcctcgttcagcactgtcacagccagaaggaacccccttcacaatccctgggggatggagttggcagcgtctgaaaacacagactccccctccccccggcccctcaggccgggggtgaccttgccccctggagccctcaccatgaataccaaggacaccaccgaggttgctgaaaacagccaccacctgaagatctttctccccaagaagctgctggagtgtcttcctcgctgcccgctgctgcctccagagaggctacggtggaatacaaatgaggagattgcatcctacctgatcacctttgagaagcatgatgagtggctgtcttgtgccccaaagacaaggcctcagaatggctccatcatcctctacaatcgcaagaaggtgaaatatcggaaggatggttacctctggaagaagcggaaggatgggaagaccacccgagaggaccacatgaagctgaaggtccagggcatggagtgtctctatggctgctacgttcactcttccatcgtccccacattccatcggcgctgctactggctgctccagaaccctgacatcgtccttgtgcactacctgaacgtcccagccctggaggactgtggaaagggctgcagccccatcttttgttccatcagcagcgaccgtcgagagtggctgaagtggtcccgggaggagttgttgggacagctgaagcccatgtttcatggcatcaagtggagctgcgggaatggaacagaagagttctctgtagaacacctggtgcagcagattttggacacccacccaaccaagcctgctccccgaacccacgcctgtctctgcagtggggggcttggttctgggagccttacccacaaatgcagcagcacgaaacaccgcatcatctctcccaaagtggagccccgagctttaaccctgacctctatcccccaccctcaccccccagagcctcctccactgatagccccacttcccccagagctccccaaggcacacacctccccatcttcttcctcttcttcctcctcatcaggttttgcagagcccctagaaatcagacctagccctcccacttctcgagggggttcttcaagaggaggcactgctatcctcctcctgacaggactggagcagcgggctggaggcttgacgcccaccaggcacttggctccacaggctgatcctaggccttccatgagtttggcagtggttgtaggcactgagccttctgccccaccagctcctcccagtcctgcctttgaccctgatcgttttctcaacagcccccagaggggccagacatatggaggggggcagggagtaagcccagacttccccgaggcagaggccgctcataccccctgttctgccctagagcctgctgctgccctggagccccaggcagctgctcggggtcccccaccacagtcagtagcaggtgggagaagaggaaactgcttcttcatccaagatgatgacagtggggaggagctcaagggtcacggggctgccccacccataccttcaccccctccctcacccccaccctcacctgcccccttggagccgtcaagcagggtaggaagaggagaggccttgtttggaggacctgttggggccagtgaactggagcccttcagtctttcatcattcccagaccttatgggagaactcatcagtgacgaagctccaagcatccctgctccaaccccccagctgtctcctgctcttagcaccatcacagacttctccccagagtggtcctacccagagggtggggtcaaggtgctcatcacaggtccttggaccgaagccgccgagcattactcctgtgtctttgatcacatcgcagtgccagcctcacttgtccagcctggtgtcttacgctgctactgtcccgcccatgaggtagggctggtgtctttgcaggtggcagggcgggaggggcccctttctgcttctgtgctctttgagtatcgagcccgccgattcctgtctctgcctagtactcaacttgactggctgtcactggacgacaaccagttccggatgtccatactagagcgactggagcagatggagaagcggatggcagagatcgcagcagctgggcaggtgccttgccagggtcctgatgctcctccagttcaggatgaaggccaggggcctgggttcgaagcacgggtagtggtcttggtagaaagcatgatcccacgctccacctggaagggtcctgaacgtctggcccatggaagccccttccggggcatgagccttctgcacctggctgctgcccagggctatgcccgcctcatcgagaccctgagccagtggcggagtgtggagactggaagcttggacttagagcaggaggttgacccgctcaacgtggatcatttctcttgcacccctctgatgtgggcttgtgccctgggacacctggaagctgctgtgctccttttccgttggaaccgacaggcactgagcattcccgactctctgggccgtctgccattgtctgtggctcattcccggggtcatgtgcgccttgcccgctgccttgaggaactacagagacaggagccttcggtggagcccccatttgccctatcgccaccctcctccagcccagacactggtctgagcagcgtctcctcgccctcggagctgtcggatggcaccttttccgtcacgtcagcctattctagtgccccagatggcagtcccccccctgcacctctgccagcctctgagatgactatggaggacatggccccaggccagctttcctctggtgtcccagaagcccccctactcctcatggactatgaggctaccaactccaaggggcccctctcctcccttcctgccctcccaccagcttcagatgatggggctgctccggaggacgctgacagcccacaggctgtggatgtgatcccggtggacatgatctcactagccaagcagatcatcgaagccacaccggagcggattaaacgagaggacttcgtggggctgcccgaggctggagcctcaatgcgggagcggacaggggctgtggggctcagtgagaccatgtcctggctggccagctacctgggagaatgtggaccatttccccagctcaacccctcccagcgaacttgccctttgagcggaggtcgcctgggcttgtcccttacagcaccctcctgggcagagtttctctcttgcattccaccagtgggcaagattggaaagttgatttttgccttgttgacattattcagattcaagagcagcgggaactgtatgaggctgcccgagtcatccagacggccttccgaaagtacaagggccggcggctgaaggagcagcaggaggtagcagcagctgtaatccagcgctgttaccggaagtacaagcagctgacctggattgcacttaagtttgcactctataagaagatgacccaggcggccatcctgatccagagcaagttccgaagctactatgaacagaagcgatttcagcagagccgccgagcggctgtgctcatccagcagcactaccgctcctaccgccgcaggcccggccctccccaccggacttcggccaccctgcctgcccgcaacaaaggctcctttctcaccaagaagcaggaccaggcagcccggaagatcatgagattcctgcggcgctgccgacacaggatgagggaactgaagcagaaccaggagctggaagggcttccccagccgggactggccacatgacctggccaccgcctttctcaccaccctgggggcgcctcgtgcagtcttaacagggagagggctttctggggcagggggagcccctgtcggcagctttcctgttcacctttgttggagccctctgtaggcctcctccctcctccccacgccttgctcccacacccctctcctcgtccctcctggtcgtgccccgtctcttttggtcctggctccagaaaacccgcgccccacatacctgcatcttccgctgtgacctccggagccctgcctgcccctgctccccagctcctcctgcctgcacccgactcggccccctcctgacttgccttatttatttgttcgacgcgtctctgaatgtatccgcctcggttcccaccactgccttcgctgcgcacgcccctcgtgtttcagggctgaccgtgtccccacccgactccgcatgtttgcgtctgtttcctccctctctggccctgtcttaccccatcacccgactctggccactgacctcagggccgaaggggaggtggtgtacataggaacgcgttgcggagtccgccccgtcccccgaggggaggggtcttgtacatactgtaacatacagagtatagtgaagaatctatttaaggcgccgcggggagggctgcacggccgggcttgtggttctctagcgcggcgggggcctcctgccggctccacgggcactttctacttgtgcatgggcttggtttatacgaattgccattaaacatcgctgcaccaaaaaaaaaa

SEQ ID NO: 2454 - DNA, 3120 bp, Homo sapiens
ggttgaaaggctgcatgtactcagaagatttgcaagcaacactccaattcttgtcatagagctcgcagacttctcacttatcggcttttttccttccttattttttaagaattattcttattttcccctctctttttctgctctctcctctctcagtctctccttttctatctgcctcttcatttttctcctagtctgttttttttttcccggctctgcacctggattgtatcttcagcaaacaatcgggcactttgagaactaactggagacagtcttgtagggaagatctgtatggaattatctgcttttatggtgaacttggcatttgtgaatgggaatcttgttcacaatattaattgctagcaaaaacaagaaaaagaacacaggagtaaaacgtggatttttctgaatacgcattgtgatgaccagcaattaccttaccgactaatatccagaggagaataatttggaagactgttgtggggaacagcctttaagagctggaagatgaaagctccgattccacacttgattctcttatacgctacttttactcagagtttgaaggttgtgaccaaaagaggctccgccgatggatgcactgactggtctatcgatatcaagaaatatcaagttttggtgggagagcctgttcgaatcaaatgtgcactcttttatggttatatcagaacaaattactcccttgcccaaagtgctggactcagtttgatgtggtacaaaagttctggtcctggagactttgaagagccaatagcctttgacggaagtagaatgagcaaagaagaagactccatttggttccggccaacattgctacaggacagtggtctctacgcctgtgtcatcagaaactccacttactgtatgaaagtatccatctcactgacagtgggtgaaaatgacactggactctgctataattccaagatgaagtattttgaaaaagctgaacttagcaaaagcaaggaaatttcatgccgtgacatagaggattttctactgccaaccagagaacctgaaatcctttggtacaaggaatgcaggacaaaaacatggaggccaagtattgtattcaaaagagatactctgcttataagagaagtcagagaagatgacattggaaattatacctgtgaattaaaatatggaggctttgttgtgagaagaactactgaattaactgttacagcccctctgactgataagccacccaagcttttgtatcctatggaaagtaaactgacaattcaggagacccagctgggtgactctgctaatctaacctgcagagctttctttgggtacagcggagatgtcagtcctttaatttactggatgaaaggagaaaaatttattgaagatctggatgaaaatcgagtttgggaaagtgacattataaattcttaaggagcatcttggggaacaggaagtttccatctcattaattgtggactctgtggaagaaggtgacttgggaaattactcctgttatgttgaaaatggaaatggacgtcgacacgccagcgttctccttcataaacgagagctaatgtacacagtggaacttgctggaggccttggtgctatactcttgctgcttgtatgtttggtgaccatctacaagtgttacaagatagaaatcatgctcttctacaggaatcattttggagctgaagagctcgatggagacaataaagattatgatgcatacttatcatacaccaaagtggatcctgaccagtggaatcaagagactggggaagaagaacgttttgcccttgaaatcctacctgatatgcttgaaaagcattatggatataagttgtttataccagatagagatttaatcccaactggaacatacattgaagatgtggcaagatgtgtagatcaaagcaagcggctgattattgtcatgaccccaaattacgtagttagaaggggctggagcatctttgagctggaaaccagacttcgaaatatgcttgtgactggagaaattaaagtgattctaattgaatgcagtgaactgagaggaattatgaactaccaggaggtggaggccctgaagcacaccatcaagctcctgacggtcattaaatggcatggaccaaaatgcaacaagttgaactccaagttctggaaacgtttacagtatgaaatgccttttaagaggatagaacccattacacatgagcaggctttagatgtcagtgagcaagggccttttggggagctgcagactgtctcggccatttccatggccgcggccacctccacagctctagccactgcccatccagatctccgttctacctttcacaacacgtaccattcacaaatgcgtcagaaacactactaccgaagctatgagtacgacgtacctcctaccggcaccctgcctcttacctccataggcaatcagcatacctactgtaacatccctatgacactcatcaacgggcagcggccacagacaaaatcgagcagggagcagaatccagatgaggcccacacaaacagtgccatcctgccgctgttgccaagggagaccagtatatccagtgtgatatggtgacagaaaagcaagggacatcccgtccctgggaggttgagtggaatctgcagtccagtgcctggaactaaatcctcgactgctgctgttaaaaaacatgcattagaatctctagaacacgaggaaaaacagggtcttgtacatatgttttttggaatttctttgtagcatcagtgtcctcctgttttaccatgtcttttaccattacattttttgactttgttttatatgtcgttggaatttgtaaatttacattttttttaaagaagagactgatgtgtagatagaaaaccctttttttgcttcattagtttagttttagaatgggtttttattttatttccttttttaaaattttactttgcttttaacatttccttggggtgcttggacaaatctatccgatgggacaaggagcaccggattctttctcgggttctgcctagcatcaactgggccacgtcggccttcagagaacagtgcaacaaatgccagcattgccattcgggggaaaaaaaaaa

SEQ ID NO: 2455 - DNA, 2285 bp, Homo sapiens
actttctgctgtcactagcataacagaaaagacgaatggcttttgttttaaactgagggcacttttacaaaagtcatctttccatttatttttctttcagaaaaaagaatttgggttttgagcttttttaaaaaaaaaaagacaaacactttccttgactttgagaaataatttaagtcaaagaatctgctctatgctaaccaagagatagagcacagcaaagatctgccagccccaggcctttacctaggggcctggaaattcaagtattcttattgggggaggccatttgtttctgattagaagctgtctaaacctcctactcctcaactcaaaggaaaacacagagcataccatggccaagaaagttgcagtgattggagctggtgtgagtggcctctcctccatcaaatgctgtgtggatgaggacctggagcccacctgctttgagagaagtgatgacattgggggattatggaagtttactgaacgtggttcatctctatcagtcatgatctggccattagctttgtctctgctcagacatggtggcttttgttacagtgacttccctttccacgaagattatcctaatttcatgaaccatgaaaaattttgggactatctccaagaatttgctgagcactttgacctcctgaaatacattcagtttaagaccactgtgtgcggcataacgaagcgtccagacttctccgaaactggtcagtgggatgttgtcacagagacagagggcaagcaaaatagagctgtctttgatgctgttatggtttgcactggacatttcctgaatccccatttacctttggaagcctttcctggaattcataagtttaaaggtcagatcctgcatagtcaagagtacaagatcccagaaggctttcagggcaaacgcgtcttggtgattggtcttgggaacactggaggagacattgctgtggaactcagtcgaacggcagctcaggtacttctcagtactagaactggtacctgggttcttgggcgctcttcagattggggctatccttataatatgatggttacaagaagatgctgtagttttattgcacaagttctgccttcacgttttctaaactggattcaagaaaggaagttgaataagagatttaatcatgaggattatggattaagtattaccaaagggaaaaaagcaaaattcattgtgaatgatgagctgccaaactgtatcctctgtggggcaatcactatgaaaaccagcgtgattgaatttacagaaacctctgctgtctttgaagatgggacagtggaagaaaacattgatgttgtgatcttcactacaggatatacattttcttttccattttttgaagaacctcttaaaagcctctgtacaaagaagatatttctatacaagcaagtctttcccttaaacctagagagagcgacattagccatcatcggccttatcggccttaaaggatccatcttatcaggcacagagctccaagcacgatgggtcacaagagtattcaaaggactctgtaagagacctgcatcccaaaaattgatgatggaggctactgaaaaggaacagctcattaaaaggggagtgtttaaagacaccagcaaagacaaatttgactacattgcctacatggatgatatcgctgcctgcataggcacaaagcccagcatcccacttctgttcctcaaggatcccagactagcttgggaagttttctttggaccatgtactccttatcagtaccgccctcatgggccctggaaaatgggatggagccagaaatgccatcctgacccagtgggacagaacattgaaacctttaaaaactcgaattgtccctgattcctccaaggcctggccttccatgttcacattatttaaaagcctggggggcacctgtcctacttgcctctcttctacttatctgtaaaatcttcacttttcttgaaattggtgagagataaactacaggacagaatgtccccttacctagtaagtctttggcgaggatgaacctgattggttacaaggggtacacccaagtcatgctaattctatctcccaagtatcttgtgcatccctcctctgctctccatcataactgctattagccaaattcaggcccagtcatctcctatctgaattattgtattatcttcttctttgttttcagtaccctctttcttgccaccctttccaatgcatcttctaccctgctacctcagtgattattctaaaataaatatatatgatatggttt

SEQ ID NO: 2456 - DNA, 7564 bp, Homo sapiens
ataatgccctgcgggagctcgagactgttaaggggatgttggacacatcctaatgaacctgttagtgacctctcttactttgactgcattgagagtgtgatggaaaactccaaggttctgggtgaatcgatggcagggatttcacagaatgccaagaccggagacctccctgcctttggggaatgtgtggggattgcatccaaggctctctgtgggctgacagaggctgcagcccaggctgcatacttggttggcatctttgatccaaacagccaggcaggccaccagggcctggtggaccccatccagtttgccagggctaaccaggccatccagatggcatgccagaacttggtggaccctggcagcagcccatcacaggtcctgtcagccgccacaattgttgccaagcacacgtcagccttgtgtaatgcctgccgcatcgcctcatccaagacggccaacccagtagccaagaggcacttcgtccagtcggccaaggaagtcgccaacagcactgccaacctggtgaagaccatcaaggccctggatggggatttctctgaagacaaccgcaataagtgtcgcatcgccaccgcacccttgattgaagctgtggagaacctgacagcgttcgcctcaaaccctgagtttgtcagcattcctgcccagatcagctccgagggttcccaggcacaggaaccaatcctggtctcagccaagcccatgctggagagttcatcgtacctcattcgcactgcacgctctctggccatcaaccccaaagacccacccacctggtctgtactggctggacattcccatacagtgtccgactccatcaagagtctcatcacttctatcagggacaaggcccctggacagagggagtgtgattactccatcgatggcatcaaccggtgcatccgggacatcgagcaggcctcgctggccgccgtcagccagagcctggccacgagggacgacatctctgtggaggccctgcaggagcagctgacttcggtggtccaggaaatcggacaccttatcgatcccatcgccacagcggctcggggagaagcagctcagctgggacataaggggacacaactggcaagctattttgagcccttgatcttagccgcagttggtgtggcctccaagattcttgatcatcagcagcagatgacggtgctggaccagaccaagactctcgcagagtctgccttgcagatgttgtatgcagccaaagaaggtggcggaaaccccaaggcacaacacacccatgacgccatcacagaggccgcccagttgatgaaggaagccgtggatgacatcatggtgacgctgaacgaagctgccagtgaagtggggctggttgggggcatggtggacgccattgcagaagccatgagcaagctggatgaaggcactcctccagaaccaaagggaacatttgtcgactatcagacgactgtggttaaatactccaaagccattgcggtgacagctcaggaaatgatgactaagtcggttactaacccggaggagttgggaggactggcttcacaaatgaccagtgactatgggcacctggctttccagggccagatggcagcagccacggcggaaccagaggagatcggattccagattcgcactcgtgtgcaggacctgggccacggctgtatcttcctggtgcagaaggcagggggccctccaggtctgccccacagacagctacaccaagagggagctgatcgaatgcgcccgtgccgtcacggaaaaggtctccttggtgctctcggctctccaggccgggaacaaaggaacccaggcatgcattacagccgccaccgctgtgtctgggatcattgccgacctggacaccaccattatgtttgcaacagcggggacgctgaatgcagagaacagtgagaccttcgcagaccacagggagaacattctcaagacggccaaggccttggtagaagacacgaaactacttgtgtcaggagctgcgtccactcctgacaagctggcccaggcggcccagtcctcagcagccaccatcacccagctcgcagaagtggtcaagctgggggcagccagcctgggctccgacgaccccgagacccaggtggttttgatcaatgccatcaaagatgtggccaaggccctttctgatctcatcagtgctaccaagggagctgccagcaagccagtggacgacccttccatgtaccagctcaagggggctgccaaggtgatggtgaccaatgtcacctcgctcctcaagactgtaaaggcagtggaggatgaggccacccggggcaccagggcgcttgaggccacaattgaatgcataaagcaggagcttacggtgttccagtcaaaagacgtacctgaaaagacatcatcacctgaagaatccataaggatgacgaaaggcatcaccatggcaacagccaaagccgtggcagctgggaactcatgtagacaggaggacgtgattgctactgccaacctgagccggaaagccgtgtcagatatgttgacggcttgcaagcaagcatccttccaccccgatgtcagtgacgaggtgagaaccagagccttgcgtttcgggacggagtgcacccttggctacttggacctcctggagcacgtcttggtgattcttcagaaaccaaccccagaactcaagcagcagctggccgctttctccaagcgagtcgccggcgctgtgacagagctcatccaggcggcggaagccatgaaaggaacagagtgggtggatccagaagacccaactgtcattgcagaaacagagttactgggggctgcagcatccatcgaagctgctgctaagaagttagagcaactgaagccaagagcaaaaccaaaacaagcggatgagaccctggactttgaggaacagatcttggaagctgctaaatccattgctgctgccacaagcgccctggtcaaatcggcctcagcagcccagagggagctggtggcccaaggaaaggtgggctccatccctgccaatgctgcagacgacggacagtggtcacaggggctgatttctgctgcccggatggtggcggctgcgaccagcagtctctgtgaggcggccaatgcctccgttcagggacacgccagcgaggagaagctcatctcatctgccaagcaggtcgccgcttccacggctcagctgctggtggcctgcaaggtgaaggccgaccaggattcagaggccatgaggcggctacaggcggcaggaaatgctgtgaaaagagcctcagacaatcttgtccgtgcagcccagaaggcagcatttggcaaagctgatgacgacgatgttgtagtgaaaaccaagtttgtggggggcattgctcagatcatcgccgcccaggaagaaatgctaaagaaagagcgagaactggaagaagcaaggaaaaaactggcccaaatccgccagcagcagtataagtttttacccaccgagctgagggaagatgagggctaaaggtgcgagcccagatggcgagccccaggggatggccctggctgaactggacagacagtgttcctgagaggctgggcacttagctggaaaccgcccacctccctcccgggtgagcctggagccctgcgtgcttgttctcacatctctgtcccgtcggcactggctgcatgatcgtgatgtcacacggtacaatgtcctacccacaactcctctgccgcctcccctcatgcctcaccgtgtctcaggagagaggggtgcacgtttcatggactgttaccaacaaagaaaagtcagtattatgttgttctcagacactttggcttttgttggtccttctcttaggcctgctcctggacctctttatgatattgtgatagggaaaaaaatcattgacgtcatagaatattcttcttcctctcaggagaagacggaagctggagttggacatggttcataaaagccagaaacacaaacccgtgtggactccgggagggtgactcaggtcctccttccatgtcttgagcactggctcacccagggggtgaaaaattcccgcccctgtttgcacgctttcttgcctccgtgtgtaagctccttgtacaacccagacccatcttgtattttgtggcccagaaaactgaacgattattttgttcctccgtagtccaaagggcagagttgcggaaggccgtcggggcttggtgagcaggggctgtaatacagtctgtggggctccttaccctgcagaggctgtttcagctcacacagagttcatccacacaaacccacggctcccagttgacagtcagtggaatgctcgtctccttagcgtccagggtggggattctgctggaataaagagcttcctcagtgactcatcctttaggtcccacgctggtttctgtgccttcagaatggtcacaagcccggattggaaaggatctgcttacaaacctgtcccctgtcctccaacccaaaacgccttttttttctgtcttaatatccagaaaatctaaatgcatcctaaaatcaattgtgaaccctttaacaaggatagtttttacttattatcacataagacataagatgttttcattttctggatgtcacacttccagaatttcatatttttcccctcttttctttccccttttcagagccctcccataggaagggaagggcttgaatttacccttaatctgcacctttagccaaggcagtgcatggaagatgaatggctcgtggggccagaatctaatgccagggagcaggagtgtttgaaagaattcatagtggggaaggtaaaagttaatggaagtacatgattttcaaaactggtaacagttaaaggcactcaccctccgcctctctctctctctctctctctggggggctatcatgtcttggactccatccacactatagtttcaaagttccactgacgggggaaagttggtgctttggtcctccgaagatgtcacctttcgaccttgcccgatcttgtttcaccagactctagcccatgtcatggttttaaaatacataaacttctgacagcttcccatatttataagttacttataagtgctgcacgtattagaatttttttttttcagaccagtaaagttagaaaaaagacgctgtaaaggaaaagcaagtgagagtatgtgtaggacactgacagtgtgtgggcaccagttctgaagaggaggggagctgctggagccctagcctgttggggaaaagctggcacactcttggctcgccctctttgagtggagctgatccaacacctcatgcctgccttggccggacactgagaggaggggcacacgtgcttccagagacactcaggagtcagaccccaatgctcagagtcacaatgtgttcatggcctcctgtaacaggactctggggatcccctctgtggcccagcccaccccaccctctgctcttctatgctgtgcccagggcagctgccctcttctgcctgtgccccatcccatcctgaaaacccaggaccaaggcaggggcaggcagccagttcttccaccttgcctcagagtcatttaaaacctttactgcatttgataccagaaaagcctccagagacaaaccaaatgcaaaggcctttcctttataactctaaagaacaggcatcgaaagtttatttttgtaggagctatataaatactcacctttctggagtcgtccagtgctgggagctttggggagattggttctcagttatcacctggtatggtcccagtttctcatctgtcctttcctcatccaccctgcacatgtgtatgtgaacggcttcgtggccggtgtggtggtttctcatttcataagatagttgaagggccatgccttgtctggatgttatttaataggcactactgcggtgtcctcagatggtactgagggggccttctggtccttcaaaggaaaataacacaggcatgagttcatttgggagtgtgaactttcagaacacctaataagagagtggtgtcagagtaaaaacggccccaggtctggagcatagaagtgtatctctgtgaagagagagccggtgtgttgacatgtggttcttctcacacccctctactcctcgagggctttgaatccttgggctgatttttgtgccagaaattgctgttcccgatggccaaaaggggaacctgaactggatttcagaactgcccagtgatttgaaaatttagattttacttgggcctttcaggagtctttagatagggatgctgaggtcatatttagttcaatgaacagcccttgtttaagttttgccagtgtccagccagctgtggccctggccatctgtgcaggcaggttcctcaattcctggttggccctgcagtcggtcaacacagtccctccaggtcggctgcagaggcagctgcccagcctgcagtctatgcacgggccttaagaaatgagctgcctgtagcctcacggcatatgcttttatcagggaaaacccttcgagcttcttctgattctcacctgcttgctttctggctgtcttagtcagtgtgtttacaggcaactaaagcctgttcctaatttatcaaaaaattataaccaaaattcaccatagcctaagagagtaaaccccacctccaaagtgatgccaaggccaaaacctcatcaaggaaccagacacaggtcaaaagtggtgagcaagccatggtctctgctcctggggaactcacacgctgacccccgaggagccttggtttcctccctggcagatagtccccagaatcttctctcccagctttgaggttctgggctctggaaaggcctctgggatgctggccttaagatctcagcacagactatcagcatgttccattctcagattcctggaggaaaggtaccctctgttgaccaaggggctggctgcttctgagacttaccaacccaagaaatttggagacattcccctcaggctaaaaggcagcggtccccagagttcagaaagcaaaagatcttgacaactgtgccagtagtggctctggtcctatctctccacagtgctggcctctgctggggaaggcatctttcccaaaggtatccccaagtaccatgttgaaaatgtcctcagtctgttgctccatctttctgagcctctgcttggtatgtcatgtttatggtcactacggatgagtgtgtgcagagtttgggttgattcttttaaatgctacaaacaagagctatttcttttcaataaaaaaggtttggattcggcctcttcctctgagcccacctcccagccctccagggagcatcagtgtacctgagtcactttgtctgcatctcttcatcccacaaaacacgaggctgggtctcattcagcggcctctcaccaaccttcaagatccagaagaaaacaggaacgttcagctctgccctgtgtcgtatctaatcacatacattaatttatctaaccacataagttatttttttttatttgcccagaaataaacctttaaaggaacg

SEQ ID NO: 2457 - DNA, 1715 bp, Homo sapiens
cgaattcggcacgaggaggagttggcgtccggggagcaagggccatggccaccgtgcaggagaaggctgctgcgctgaacctctcggctctccacagccccgcgcacaggcctccgggtttcagtgtagctcagaagccatttggagccacgtatgtatggagcagcatcataaacactcttcaaacacaagtggaagtgaaaaaacgaaggcaccgtttaaaacgacataatgactgctttgttggttcagaagctgtggatgtcattttttctcacctaattcagaataagtattttggtgatgtagatattcctcgagccaaagtggtgagagtgtgtcaagcgcttatggactacaaagtatttgaagcagttccaaccaaagtctttggaaaagacaaaaaacctacatttgaagatagtagttgcagcctttatagattcaccacaatacctaaccaagacagtcagttaggcaaagagaacaaactatattcacctgccaggtatgcagatgcattatttaagtcatccgatatcagatcagccagtttagaggacctgtgggaaaatctgagtttaaagcctgccaactcccctcatgtaaatatctctacaaccttgtctccacaagttattaatgaagtgtggcaagaagaaacaattgggcgtctactacaacttgtagaccttccacttcttgactccttactgaaacagcaagaggctgtacctaaaattcctcaacctaagaggcagtccaccatggtcaacagcagtaactatctggatcgagggattctcaaggcttatagtgactctcaggaagatgagtggctctcggcagcaattgactgtttagaataccttccagaccaaatggtggtggaaataagcagaagctttcctgagcaaccagaccgaacagacttagtgaaagaacttctgtttgatgccattggcagatattacagtagtagggaacctctgttaaatcacttatctgatgttcataatggaattgcagaactcttagtgaatgggaagacggaaatagctttagaagctacccagctccttctaaagcttttagatttccaaaatagagaagaatttagaagactactgtatttcatggctgttgcagcaaatccttctgagtttaaattacagaaagaaagtgacaaccgaatggttgtgaaaaggatattctcaaaagctattgttgacaataaaaatttatccaaaggcaaaacagatcttctggtactctttttaaatggatcatcagaaagatgtttttaagattcctggaactctcacataaaattgtaagtggttaagccttatggccatacagaacggaagagatccaaatagagatgcaggatatatctattgccagagaattgatcaacgtgactattccaacattacagagaagacaaccatagatgagctgttgtatctactaaaaactcttgatgaggattcaaaactttctgccaaagagaagaaaaaatttgctaggtcaattctataagtgtcacccagacatctttattgagcattttggagactgagtttttaatatctgtatataagttgtgtattttaagaataaattatgtatcctaaatatccaatcacatttgtaagcgtggaagctctaaatttgaaactgtactcccataaaaatttttttgtataaaa

SEQ ID NO: 2458 - DNA, 1103 bp, Homo sapiens
ctgagcagtgggctgcttaggaagagaaggtcagagttcgcgggggcagaggcattcttgccgctggcccagtcactatgtagtggaggggcagacaccctcccgcaaattctggaaggttcttagtctcgactagggcagtagccccaggactcctagtcgccggcttcaggtcactgccggctgaacggagctgccgtcgccatgtttggctgcttggtggcggggaggctggtgcaaacagctgcacagcaagtggcagaggataaatttgtttttgacttacctgattatgaaagtatcaaccatgttgtggtttttatgctgggaacaatcccatttcctgagggaatgggaggatctgtctacttttcttatcctgattcaaatggaatgccagtatggcaactcctaggatttgtcacgaatgggaagccaagtgccatcttcaaaatttcaggtcttaaatctggagaaggaagccaacatccttttggagccatgaatattgtccgaactccatctgttgctcagattggaatttcagtggaattattagacagtatggctcagcagactcctgtaggtaatgctgctgtatcctcagttgactcattcactcagttcacacaaaagatgttggacaatttctacaattttgcttcatcatttgctgtctctcaggcccagatgacacccaagcccatctgaaatgttcattccggcaaatgtggttctgaaatggtatgaaaactttcaaagacggactagcacagaaccctctcttttggaaaacataatttggattaaaataaatttttaatggattctgaaatttgtcatgttttgaagataactgactccatctaaaagtatgaggtcaaaggatcacgaaacctaagtttaaaaactgcttagagactgaagcttaattaaaaatctttattaaaaattaaaaacattgaaaaatgaaaatatgttcatcattaaagacttttttccccttaagcttaaaataccattcaaaggcaagacattttgttttggctatgattcattttttttacttaaaaataaaacctataccaaacagtaaaaaaaat

SEQ ID NO: 2459 - DNA, 1493 bp, Homo sapiens
tttcgtggcacgtgaggaggaggtggcttgaggcaaccatggcgggaggaatgaaagtggcggtctcgccggcagttggtcccgggccctggggctcgggagtcgggggcggtgggacagtgcggctactcttgatcctctccggctgcttggtctacggcacagctgaaactgatgtaaatgtggtcatgcttcaggaatcccaagtttgtgaaaagcgtgccagccaacaattctgttacacaaatgtgcttatcccacaatggcatgatatatggacacggatacagatccgagtaaatagttccagattggttcgagtcacccaggtggagaatgaggagaaactgaaggagctagagcagtttagtatctggaactttttttcctcctttttaaaagagaaattgaatgacacctatgttaacgtgggtctatacagcacaaaaacctgcctcaaagttgagattatagagaaggacaccaagtacagtgtcattgtgatccggagatttgatcccaaactctttcttgttttccttcttggacttatgctatttttttgtggagacttgctgagcagaagtcaaattttctactactctactgggatgactgtgggaattgtggcctctctggctaatcatcatttttatactatctaagtttatgcctaagaaaagtcccatttacgtcatcctggtgggaggctggtctttttctctgtacctcattcaactagtttttaaaaatttacaagagatctggaggtgttactggcagtatcttttaagttatgtcctcacagttggattcatgagttttgcagtatgttacaagtatgggcccttggagaatgaacgaagtatcaacctgctgacctggaccttgcagctgatgggcctgtgtttcatgtattctggcatccagataccacatattgcccttgccattatcatcattgctctttgtactaagaacctggaacaccctattcagtggctgtacatcacctgcagaaaggtgtgtaagggagcagaaaagcctgttccccctcgtctcctgacagaagaagaatatcggatacaaggagaggtagaaacccgaaaggctttagaggagctccgagaattttgtaacagtccagactgctctgcttggaagactgtttctcgaatccagtctccaaaaagatttgctgactttgtggaaggctcttcccacctcacgccaaatgaagtttctgtccatgagcaggagtatggattagggagcattattgcccaggatgaaatctatgaggaagcatcctctgaggaggaggactcatattctcggtgtcctgctatcacacagaacaactttctaacctaggtagtggtcagttatctttacgtggactggcttggtgccttggtccatgttgcatgtgttgtgcaattgctttcaaccctttgaaacagagtgagatagacagggtattgaagctcatg

SEQ ID NO: 2460 - DNA, 2148 bp, Homo sapiens
tttcgtgtaaggcagatgcccacgtgatcctggcctgcagttgggtggctgcggtgagatacctgggttcctgaagggcgggtggttaggtcgtaactactgcccccgccggctgagtctccgagcggccgggctcggaagccacgagccagctgaggcgttctccgcttagtgcctacggcatgggtcagctctttctgccacctccgccttcgcggtcctcacctctttgcgggtgaagttacctttgggtttccagaccttgggggcctgaggcccaaactcgggacgaacccctaacccacctctcttttcctgtcattctccaactcttactttgtaccacggaatcacttggccttaaagctagccagctcggccgtgccttgaggccaggttcgagagataaaggtaaccgtggggaaagcggccccccagtggacaaaggcggaggcaagaatagagcaggcctgagggccataggcgatgagaataggcagttgaggggtgaaaaagaaaacaaacaaacaacaacaacaaaccctgaagagtactgaagatttagaagggactggaaaggacttgttgcgcaatggaagaatctgactctgagaaaacgacggagaaagaaaatctggggccgagaatggatccaccactaggggaacccgggaggatcgcttgggtgggtgctaccaaatacagccatgaaaaaaaaggtgctgttgatgggtaaaagtgggtctggtaagaccagcatgaggtctattatctttgcaaattatattgccagagacacacgtcgccttggcgcaacaatactagaccgtatacatagtcttcaaattaatagcagtttgagcacctactctctcgtagactctgttggaaatacaaagacatttgatgtagaacattctcatgttcgatttctgggaaacctggtattgaacctgtgggattgtggtgggcaagacaccttcatggaaaattatttcactagccaacgggacaacatcttccgaaatgtggaggttctgatttatgtctttgatgtggagagccgcgaactggaaaaggacatgcactattaccaatcatgcctggaggccattctgcagaattctccagatgccaaaatattttgcttggtacacaaaatggatctggtacaggaggatcaacgggacctgatttttaaagagcgagaagaagatttgaggcgtttgtctcgcccattggaatgttcttgtttccgaacatctatctgggatgaaaccctctataaggcttggtccagcatagtttatcagctgattcccaatgttcagcagctggaaatgaacctaaggaattttgctgaaattatcgaagctgatgaagtacttctttttgagagagctacttttctggtaatttctcactatcagtgtaaagagcagcgtgatgcccatagatttgagaaaataagcaacattattaagcagttcaagctgagctgcagcaagctggctgcctctttccagagtatggaagtcaggaactctaacttcgctgctttcattgacatctttacatccaacacttatgtgatggttgtgatgtctgatccgtccattccttctgcagctactctgatcaacatccgcaatgccaggaaacactttgaaaagctggaaagagtggatggaccaaagcagtgtcttctcatgcgctaaacattgatgaatattgtttcacacaaaaattaaaagtttcctaattaatgttgtattcatatatgtaggctctgaaatgttgtgatgcttattgcttctgtatttcttctctactccctagtcttaatgtttaaccttgaatgctattaacttaaatagccattgaggagttagaagatgaattgttcatgaagtcggtgttacataaaagtaggtgatatgtaagttttctgataacaaggttctaatagtgtttaaatgtactggtaacctggttccaatagttgtgtttgcccaagcctttctcggcatcatcttgtattccttatcagatagtaagtaacctgtaagtttggagtattactgttttctcagcatgcattaaaaatattccttaacttcaattgtaaataaacttttggtgttaggg

SEQ ID NO: 2461 - DNA, 2148 bp, Homo sapiens; identical to SEQ ID NO: 2460

SEQ ID NO: 2462 - DNA, 2148 bp, Homo sapiens; identical to SEQ ID NO: 2460

SEQ ID NO: 2463 - DNA, 7816 bp, Homo sapiens
gtattgttaggccccttatgggacaagctctcaactgctgatcacccagtgattgtcaccatggccagcaagaggaaatccaccacaccatgcatgatcccagtgaagactgtggtgttgcaagatgccagcatggaggcccagcccgctgagaccttgcctgaaggaccccagcaggatctgcccccagaagcatctgctgccagcagtgaggcagcacagaaccccagcagtactgatggctctacactggccaatgggcatcggagcactttagatggctatttatattcctgtaaatactgcgatttcagatcccatgacatgacccaatttgtgggacatatgaactcagagcacacagactttaataaagacccaacctttgtatgcagtgggtgcagttttctggcaaaaacccctgaggggctttccttgcacaatgccacatgtcactccggggaagccagctttgtgtggaacgtggccaagccagacaatcatgtggttgtggagcagagcatccctgagagcaccagcactcctgacctagcgggtgagcccagtgctgaaggggctgatggacaggcagaaatcatcattaccaaaactccaatcatgaagataatgaaaggcaaagctgaagccaaaaaaattcatacactcaaggagaatgtccctagccagcctgtgggtgaggccttaccaaagctgtcgactggagaaatggaggtgagagagggggaccattccttcatcaatggggcagttccagtcagacaggcatctgccagctctgcaaaaaacccccatgccgccaacgggcccctgataggaacagtgccagttttgccagctggcatagcacagttcctctccctccagcagcagcccccagtgcatgcccaacaccatgtccaccagccactgcccacggccaaggcccttcccaaagtgatgatccccctgagcagcattccaacgtacagtgcagccatggactctaacagcttcctgaagaactccttccacaagttcccctaccccaccaaagccgagctctgctatttgactgtggtgaccaagtatccagaagaacagctcaagatctggttcacagcccaaaggctgaagcaggggatcagctggtcccctgaggagattgaggatgcccggaaaaagatgttcaatacagtcatccagtctgtgcctcagcccacaattacggttctaaataccccactcgtcgccagtgctggcaatgtccagcatctcatccaggccgctcttccaggtcacgttgtggggcagccagagggtacaggagggggacttctggtcactcagccattgatggccaatgggttgcaagcaacaagttcccctctccccctcacggtgacatccgtccccaagcagccaggtgtggcacccattaacactgtgtgttcaaatacaacgtcagctgtgaaggtggtcaatgcggcccagtcgctcctcacggcctgccccagcataacctcccaagccttccttgatgctagcatctacaaaaataagaaatctcatgaacagctgtcagctctgaaagggagcttctgtcggaaccagttcccagggcagagcgaagttgaacatctcacaaaagtgacgggcctcagtaccagagaggtgcggaaatggttcagtgatcgtagataccactgccggaacttgaagggctccagagcgatgatacctggagatcacaggtccatcatcattgactctgtgccagaggtgtccttctccccatcgtccaaggtccctgaggtaacctgcattccgacaacagccacactagcaacccacccttctgccaaacgacaatcttggcaccagactcctgacttcacaccaaccaaatacaaggagagagcccctgagcagctcagagccctggagagcagttttgcacaaaaccctcttcctcttgatgaggaactggaccgcctgagaagtgaaaccaaaatgacccgacgagaaattgatagctggttttcagagagacggaaaaaagtgaatgctgaggagaccaagaaggctgaggagaatgcctctcaggaggaagaggaggctgctgaggatgagggtggagaagaggatttggccagtgagctaagggtctctggtgaaaatggctctctggaaatgcccagcagccatatcttggcagagcgcaaagtcagccccattaaaatcaacctgaagaacctgagggtcactgaagccaatggcaggaacgagattccagggctgggtgcctgtgaccctgaggatgatgagtcaaacaaactggcagagcagctcccaggcaaagtgagctgcaaaaagactgcccagcagcggcacttgctgcggcagctctttgtccagacacagtggccaagcaaccaggactatgactccatcatggcccagacgggtctgccacggccagaggtggtgcgctggtttggagatagcaggtacgcactgaagaacggccaactcaaatggtacgaagactataagcgaggcaacttcccaccagggctactggtcattgcccctggcaaccgggagctcctgcaggactattacatgacacacaagatgctgtatgaagaggacctgcagaacctctgtgacaagacccagatgagctcccagcaggtcaagcagtggtttgctgagaaaatgggggaggagaccagagccgtggcagacacaggcagtgaggaccagggccctggtactggtgagctcacagcagttcacaaagggatgggtgacacctattcagaggtgtctgagaacagtgagtcgtgggagccccgtgtccctgaggccagctcagagccctttgaccacatcgagtccccaggctggacgtcagctcgaaacagactgaatttgatctgattaatgtgaaggactggccagtctgggaaaccgcctgccacgtggaagagccaaacccgactctctgctgccacatgccgttcccatgcccggctgctgggcacctgggagagcttccagaatcctcgcagacagcccagagcctgccgctaccctcggcctgcccaccaccaagcaagcagcaagcaagatggggttctcatcagttcttcctcccacaatgtaggacctttcctttaccttccaatggataaaatagttcagagttcatagtcatattcatagacacagaatcaagcttttaacatatacatccacctctatatgttaaataaaacatcagattatcaacactgtcattacgtagaaactttggttagccaagcagtgcattgtcagttacgtcatctctaaaaatgacctgtgtctgttctctggggattgctgggtcacaggtgcccctcaccttccacagtcaggcagggaagttataggcacaaagctacgtctggaacccctttgtgccccctttgtgttcctcaaggaagcagtacctttgaagagatctctgctgcattaagtgatgaccggctacgtttcatgtcaggcttgctttgccttgtgggctactcagtgcagaacctgctgtaaccctcagttcaaaaaatggactggcaatgtgattagcgttggatgctttaccattctctttagttgttaccgtaattctgctttttcatgggagtttgaatcatggaccataacttttcagttatcagatcaactaaagaaacatttgttgttaagcctaatgtgctgacctatgtgcctgcattttttttttaatctagacatgtttggagtgagagaaagatggaaaaaagacatggggtagggacgtaagtggaaatctatagccacagcctgaagctttgaccactgcggttttcagagccctttctccacactcatttcagagcctcctatggtttgggaaggaataacacactggcccattagtaagggtgaaggctggagggatttgttgacttcttggaattatcagaggtagggtggtctttagcacaaagacttgcatgcagagatccctggcagaacacccagagtgcccgtggctcccaccccagggtctggccggtgtgctggatgcatgcccaagggtgctgggcatcactggtccttgtgaggatgcttttaaagttttatatttatgtccccaaacttggaaacaagaactctactttagcctaaccctcatgtccttttttgaattgagaaaattacaggaaatggtgcctttgaaaattagaaaacttgcttacagagctgttctaaatggtaaatcctcaatttccccaagaccggttgctctgagagtagctggtaaagaggggcgaactaaagacctgtccacctgtagctccgctcatttcttagaaaccacctgcttcccagagtgccaagccacaagtaccaggcttcgtgggcacagacacctcctgggctgggcagagtgacagtgctagaagaccccagagagagggcaagggctttgggcaagaagcactggtggtgttttagggaccgtccttctcccctacccagggaactggacctggcagggcaccgtgctcatgtggctccaaggacaagcatggcggtggccccttctgccttccaggagaggtcttgcttttgaaaccaaaatcatgttcttctaaagtgtcatcttctgccctccctgtcccaatagggaccacatcttatttgtctcaaacagggacttgtgagtacttggcaagttttgcagcctatttttgtattcttaatttggggagtaaagatgtttggtctcaaaaacctttgaggaattgccaagaatggcgagtgattgctttccttcagagaacagacacttggaatttctccttttagtgtttatatacgtgcagattaatttatatatatatatatacacacacacatatacagtataaatactcatttgattctcgtaaaacgcgcatctggcgtgtgcagttgagaaacttggtggcacatgggtgttgggggagtagcctgtgttggagggacaccagtgcactaggcagctggggcggcccaggctgaagccatctccgggtgtctgagaaaccacccagtgcctcacctccagatcctgctggcatcacctccagagccctgcatgcactggctgaagagttggtctgtggagaggattttcttggttacttgtattcacggttaatttacaacccaaacagcaaaacacagttggtggacaagttcatgcaggacctacagtgacccagccatgggcactagctcatctttcaggtggaaaagtacagtgctgcctgccctggtatgtttttcttatagatgttagccctgcccaacagccagggctacactacaaaaggcaagaatgcccatgtaaggagcccagcagtctggacagatccttcttcctctgctgttggatgagagtgagtgagtatggtctggaccttatccttgaaagatgatcaaaagcgatgatgagggaggcagtcatcacgcaggtgcttaaagggacattgtaggaggtactcaagggtttgggggcaaaaccctgaatccagccagtcgtgcacagagacacacccacactagcccagtggcagtgggggatgtgggatggcagcagccaggtatgtagccctgtcacaggacagctcactgtggttttgcacactgcctaagggttaaattgtgttgttgccttcagtagaaggcatttgtgggctgcagagttgagagttgggtgaggttagtctctcctgaagaaaaagcctataaaaagtggctaatcttatcccttttctctgtatgcagttggactcgtcagagatagtaaaatcatcttttagtgtttttttgttgctgatgtcttgtacccatttgttttttacatggggttgtagatcgagttctcaaaggtgaaaccagatgatcattctgataaaggaaatttaaatttgatacatatgctttgtatattttgattacttgttttcgtttttgactataaaggagctttttttcttgctcagagtttacctgggagatttcaccagtttgactcaccatttgcagatgtgcttttgtattaaatttaaattttcacatatcacatccattctcaaggtagttatatgctggagaagaaaaatcctctagacacatgaaggcccacatagtcaagtcttccagggcaaagccagcagcccacccaggtcaggtagccagcagggctcagttcccctcactccagacacggaccctcctcttcagggtctcttgacccagcttccttctctccttttacctgagagcacagacctctctcagccagcctgcccagaccacggggggctactcccatgtagtttggggagcacttgatctcagaaaagctccattgtctgagcaaatgggcagttgtggagctcaagcctttctcctgtgctcaagtcccttccccaagcaaggcttcaacctcatctacccaccatgtagttttctctggccatttaagtggggcggcagggacatggttgggccatgccacaccagggctggtgaggcaaccagttttgattttgacagagtggctggaggaaaagtggcaatcaaggtgctgcttggtttgctctgagtgcaaatggaaccaacaggtttctgctgcaatctgtgtgttcccagtgccaggtcacaccaggaggggtggggcagggctaaccaagtggtctctgaactcaccgagcgtctgcacttggttgtgaagttaatgggagtacagagagcgtctggccttggagaggggttgagagcctcctttttggttcttcattcctgagctcttgcctgcccacaaatctgacctctttgaatggggacgcagtccttcaacagagaagtttctatggcaaagaagtttctatttagctctagatccagcagagtcatccattctaactgccctgaagtctagagcaggggagggaacccagaggctggggatgagactaggcagaccctggttaccatatggacaaggacaggggaaagcacccccttcctcaatttctgaaagttctatctttgggttcgcaggactttgaggatgataaagaacatataggtactagcttgttgttgctggtccaaagcttccacagccctgagaatttggctttcgtggctgctctggcagctgagcgaagggaggaaggcagccgctctggtggggactctaggcaccttccctgctgtccacttggataggcggtgagccccagggtactgagaggagcctgagcatttacctgccattagtgcctcttccttcaggagactggcttgaaacgtgtgttcatgtgcgcgtgcacacacacacatgagcacctgtatgtgttaatgaatagtttttcttggttaatgctttttaacttctgttcctttccgtaagtggatgattcaaaattaacgtgacttggctgggcgcagtggctcacacctgtaatcccagcactttgggaggccaagggaggcggatcacctgaggtcaggagttcgagacccacctgatcggcatggtgaaaccccgtttctactaaaaatacaaaaattagccgggcgtggtggtgcgcgcctgtaatcccagctactcaggaggctgaggaaggagaatcacttgaacccgggaggtggaggttgcagtgagctgagatcgtgcccctgcactccagcctgggcgacagagcgaaactccgtctcaaaaaaaaaa

SEQ ID NO: 2464 - DNA, 4593 bp, Homo sapiens
  misc_feature (1)...(4593): n = a,t,c or g
tttcgtggccagggccgagaagggcttcaggacgcgggaggcgcacttgcttcaagtcgcgggcgtgggaacggggttgcaaaacggggcctctttatccgggcttgcttccggcgtcatggctcaaagggccttcccgaatccttatgctgattataacaaatccctggccgaaggctactttgatgctgccgggaggctgactcctgagttctcacaacgcttgaccaataagattcgggagcttcttcagcaaatggagagaggcctgaaatcagcagaccctcgggatggcaccggttacactggctgggcaggtattgctgtgctttacttacatctttatgatgtatttggggaccctgcctacctacagttagcacatggctatgtaaagcaaagtctgaactgcttaaccaagcgctccatcaccttcctttgtggggatgcaggccccctggcagtggccgctgtgctatatcacaagatgaacaatgagaagcaggcagaagattgcatcacacggctaattcacctaaataagattgatcctcatgctccaaatgaaatgctctatgggcgaataggctacatctatgctcttctttttgtcaataagaactttggagtggaaaagattcctcaaagccatattcagcagatttgtgaaacaattttaacctctggagaaaacctagctaggaagagaaacttcacggcaaagtctccactgatgtatgaatggtaccaggaatattatgtaggggctgctcatggcctggctggaatttattactacctgatgcagcccagccttcaagtgagccaagggaagttacatagtttggtcaagcccagtgtagactacgtctgccagctgaaattcccttctggcaattaccctccatgtataggtgataatcgagatctgcttgtccattggtgccatggcgcccctggggtaatctacatgctcatccaggcctataaggtattcagaagagggaaaagtatctctgtggatgcctatcagtgtgctgatgtgatctggcaatatgggttgctgaagaagggatatgggctgtgccanaggttctgcagggaatgcctatgccttcctgacactctacaacctcacacaggacatgaagtacctgtatagggcctgtaagtttgctgaatggtgcttagagtatggagaacatggatgcagaacaccagacacccctttctctctctttgaaggaatggctggaacaatatatttcctgggctgacctgctattccccacaaaagccagggttccctgcatttgaactctgaaaggataacatgcccacctgcaaactcactgccatgaccctttctgtatattcaaaccccaagcctaagtgccttccgttgctttcccaaggaaacaaagagtcaaactgtggacttgattttgttagcttttttcagaatttatctttcattcagttcccttccattatcatttacttttacttagaagtatccaaggaagtcttttaactttaatttccatttcttcctaaagggagagtgagtgatatgtacagtgttttgagattgtatacatatattccagaacttggaggaaatcttatttaagtttatgaatataaccatctgttactgttctaaaaatgtttaaaagaaactcaatacagataaagataaatatgtgactattattgggtattacacttcacttctctttaatatttttcctccaactggagggcagacaatttttctgacttgcttttctctaggtggttcattttgaaaggggacagaaatataactaaatgcttccaggagaaaaattccaagagttacaatctggacttggtacctaaatatcattttttaaattcttgatgcctatttggactagaggtaaacatactttcagattggcctgtttttgtcggtaaggcatacagccttcagaagccaacatttttaatcaaaaacttataaaacatgatgatcattgtgaaaattctgagttgaaggatagtttaagataagctaacaataacagtctgtgttttctataaaataatctgagttttttggaactctttatttaaatatgtgtgtttttcagtattcaaataagatcaggaagccaattttctatgtatgaatatgctttaacctaggatttcagtccactctgactgactttctaaactttaacttgggtttttacagtgactatgcattagtgctgactctttggtataagccccataaaaaatttccctccctatcaatttatctgaactttggtcttttcacttaaattgtacagtattcctacttcctgtttaaaacggggagatgaggaaagggaatactatcctaaccaataacttgaacaaaaacactaaaactaaggcatttaattaggaaatgctttttattgaggaggtattatccagagttcatgcttagaacaaatgcatctttgcgtatcctagacttaacaattcatcagtttctgagaccacagaatcaggttttccgtagtagataaagactctctggtgcttcaaattctgttcaagtgttttgactcatcagcttctactctttctattactgcctttgcctggcttgttttgtctctttgcaactgattttgcaaaaaaaaattgtagctttaaaataacagggtctaagtattttaaatgtgcctatttcacagctctcttggtcacaaaaacatgctatttttattggaacttcaaaccaaatccccactgaggtgtgtactgggttcctgcagggtaggcaggtctcctattatctcctgtttagcaccaaaagagctaatattattggaaactgaccttttaaaggccactggcagtcggatttaaaaagcagcccactgctcagtttccaggatcagcttcctccttctgtcacttgtgtaagttggcactaccttgtgcctctcagattgctgaagtgctgctggtaagcatgtgcatgctctgcctttcttgtgaaagttttcaatcagcgatatcagcacttacagtaagaagtaaaagtagtgcacagcaaagctaatttgcctttgcctggggtgttcagcttgaaagaataaagctcatttggtttagttaaatgtcttactctactgtgcctatgcttttagctgcgttactaagcaagggaaaaataacagtttctctgagccagagaagacttgatcacagttctccaagcatcgtgatagcaatgcttaaccccaggaagatttcaaggcagggagaagaacatttcaaataagattcttgttaacccatttatgcctagtgttccattattggaatgctaagcttgtgggagtcatttacatcctactgctcaaagtcattgccaaggtctgatttttcacacaaaaaattgcaacccccagcataaatgggttagctactgtcatcagttagcaaattcatccacacaaacacaattagagtttggtttttttttaagcttttcaaaacttactaaactggcacaattttatatgtatgctatttgttgtatttatgcttaagagcaaaaaagttttgatgggattttaaattcaggcaaagcctacaacgctgagacaatcccctaacaacatggtagtaactaaagaaacttttatactaggcttcttagttttaaaaggaagtggcatcattgtttcagttctagtttgtatttttctctcagatatttttcttctttaaaaatctttcccagaagttggttcctagaaaactcaataccatcatctcttatctctatacagggactaggtaataaaaccttcaaaggttgtcaaaggtcatcaagcagtgttcatttatcctgtcacatgtttctgtttctatagtaatttagaaattgcaaatagttaacttttcatcatgtaaaaagttaacattatcctatttccatagataccatggacggcggtgtggcctgagttgtcagtctttaatcctgagtcatgtggctctcttttcatctttgatgtcagttccaattatttggcatcaaaaaccttcatggtaggtagagttttaggtaaaagtggatctagggttactttctttattaacatttcctaaataactgaattgagagacatactctgctactatgtcctcaggttaatttttgtctgatcttacgatgccctgccttttactagctactttagaaatagaaaatgtgaagagtgactatttacatgtatactcctttggctgctagaactcatctgtagtcctttattatttacactgaattccaatttcatttctgcttccgctaagtaagagcacctcattcctgtgttttctctactattgagctgtagacgaactgtttctctaattataaagcaaactgtttgggatattcagggaaactaccccaatgttatgttgtcatttaatgggaaaggctgggatcatatgtatttctatgttctgtaaagtatttgacttactagttctcaataaaattttattaggactataaaaaaaaaa

SEQ ID NO: 2465 - DNA, 3132 bp, Homo sapiens
ggagccgccatgtaaccggcgccgcccggagcccgagccgcgcgggccccagcgacccgcccgccatgggggacgaggacgacgatgagagctgcgccgtggagctgcggatcacagaagccaacctgaccgggcacgaggagaaggtgagcgtggagaacttcgagctgctcaaggtgctgggcacgggagcctacggcaaggtgttcctggtgcggaaggcgggcgggcacgacgcggggaagctgtacgccatgaaggtgctgcgcaaggcggcgctggtgcagcgcgccaagacgcaggagcacacgcgcaccgagcgctcggtgctggagctggtgcgccaggcgcccttcctggtcacgctgcactacgctttccagacggatgccaagctgcacctcatcctggactatgtgagcggcggggagatgttcacccacctctaccagcgccagtacttcaaggaggctgaggtgcgcgtgtatgggggtgagatcgtgctggccctggaacacctgcacaagctcggcatcatttaccgagacctgaaactggagaatgtgctgctggactccgagggccacattgtcctcacggacttcgggctgagcaaggagttcctgacggaggagaaagagcggaccttctccttctgtggcaccatcgagtacatggcccccgaaatcatccgtagcaagacggggcatggcaaggctgtggactggtggagcctgggcatcttgctcttcgagctgctgacgggggcctcgcccttcaccctggagggcgagaggaacacgcaggctgaggtgtctcgacggatcctgaagtgctcccctcccttcccccctcggatcgggcccgtggcgcaggacctgctgcagcggctgctttgtaaggatcctaagaagcgattgggcgcggggccccagggggcacaagaagtccggaaccatcccttcttccagggcctcgattgggtggctctggctgccaggaagattccagccccattccggccccaaatccgctcagagctggatgtgggcaaactttgcggaggaattcactcggctggagcctgtctactcaccccctggacagacccccacctggggacccccgaatctttcagggatactcctttgtggcaccctccattctctttgaccacaacaacgcggtgatgaccgatgggctggaagcgcctggtgctggagaccggccaggtcgggcagcggtggccaggagcgctatgatgcaggactcgcccttcttccagcagtacgagctggacctgcgggagcctgcgctgggccagggcagcttttctgtgtgtcgccgctgccgccagcgccagagcggccaggagttcgcagtcaagatcctcagtcgcaggctggaggcgaacacgcagcgcgaagtggctgccctgcgcctgtgccagtcacaccccaacgtggtgaatctgcacgaggtgcatcacgaccagctgcacacgtacctggtcctggagctgctgcggggcggggagctgctggagcacatccgcaagaagcggcacttcagcgagtcggaagcaagccagatcctgcgcagcctcgtgtcggccgtgagcttcatgcacgaggaggcgggcgtggtgcaccgcgacctcaagccggagaacatcctgtacgccgacgacacgcccggggccccggtgaaaatcatcgacttcgggtctcgccgcggttgcggccgcagagtcccggggtgcccatgcagacgccctcattcacgctgcagtacgctgcccccgagctgctggcgcagcagggctacgacgagtcctgcgacctctggagcctgggcgtcattctgtaccatgatgctgtcggggcaggctcccttccagggggcctctggccagggcgggcagagccaggcggccgagatcatgtgcaaaatccgcgaggggcgcttctcccttgacggggaggcctggcagggtgtatccgaggaagccaaggagctggtccgagggctcctgaccgtggaccccgccaagcggctgaaactcgagggactgcggggcagctcgtggctgcaggacggcagcgcgcgctcctcgcccccgctccggacgcccgacgtgctcgagtcctctgggcccgcagtgcgctcgggtctcaacgccaccttcatggcattcaaccggggcaagcgggagggcttcttcctgaagagcgtggagaatgcacccctggccaagcggcggaagcagaagctgcggagcgccaccgcctcccgccggggctcccctgcaccagccaacccgggccgagcccccgtcgcctccaaaggggccccccgccgagccaacggccccctgcccccctcctaatccccaccactgtgacccccttccctcataggggctgtgacctgggagcccggctcactcccggaggcctctgcctgcggctgaccagaatccccaagggactgtcctttcctctcctaccccaccccactcccagacagagcagaagtatttttataagcagagaattttttatgtcttaccagatagagttgcagggaagggggggcctgctggggagtggggtttggggggccctctcccaggacactgcctcttctgggcagaaggcccctccagggggactgctccaacaggaaagagcccctcccccacttctaagcactgagttaggagtgctaactcctaaactgggaccccctaccctgttctcccctgaggccccgttcctgggaggggcacccctcaactgtcactttatggactgtctgtgcaattacgtccaccaaagacccgtgttgggggtactgaaggagaggccctgggggaccctctgaagcatttctgcctcactttatgtcatctgcttctcccctgttggggctaaggaaggagataggtggctcctaaaagaggaggccatcttctcacccaccccttcctctttggcacagctactcctggctgggggtggggccttgggggtctgggctgggcatccatggtcactgcctcagcccagccaggctgtgcctttgactttaaaataaaagtccacccagtgctgtgtgtggcaaaaaaaa

SEQ ID NO: 2466 - DNA, 2550 bp, Homo sapiens
tgcccgcctgctgaattcggcacgaggacacgctgaacagaattcacctcacgtccagtatgagatgggagtatgaacaaacagtcatgcagagtgatgagtgcaaacatggactataaagcggccatagagaatgaactgtgtttgtgtttagagaagacacactccccacccctgaacaggcttcttaaaagtactagaaaggaacagaaatgaataaaagtcgctggcagagtagaagacgacatgggagaagaagccaccagcagaacccttggttcagactccgtgattctgaagacaggtctgactcccgggcagcacagcccgctcacgattccggccacggtgatgacgagtctccgtcaacctcgtctggcacagctgggacctcctctgtgccagagctacctgggttttactttgaccctgaaaagaaacgctacttccgcttgctccctggacataacaactgcaaccccctgacgaaagagagcatccggcagaaggagatggagagcaagagactgcggctgctccaggaagaagacagacggaaaaagattgccaggatgggatttaatgcatcttccatgctacgaaaaagccagctgggttttctcaacgtcaccaattactgccatttagcccacgagctgcgtctcagctgcatggagaggaaaaaggtccagattcgaagcatggatccctccgccttggcaagcgaccgatttaacctcatactggcagataccaacagtgaccggctcttcacagtgaacgatgttacagttggaggctccaagtatggtatcatcaacctgcaaagtctgaagacccctacgctcaaggtgttcatgcacgaaaacctctacttcaccaaccggaaggtgagattcggtgtgctgggcctcgctgaatcacttggattcccacattctgctatgcctcatgggactcgcagagactccaggctgtgccaccctgctcccagcatcactgttcgtcaatagtcacccagcaggaatagaccggcctgggcatgctctgcagtttccggatccctggtgcctggtcctgtgcctggtccctgaatatccaagcaaataactgcttcagtacaggcttgtctcggcgggtcctgttgaccaacgtggtgacgggacaccggcagtcctttgggaccaacagtgatgtcttggcccagcagtttgctctcatggctcctctgctgtttaatggctgccgctctggggaaatctttgccattgatctgcgttgtggaaatcaaggcaagggatggaaggccacccgcctgtttcatgattcagcagtgacctctgtgcggatcctccaagatgagcaatacctgatggcttcagacatggctggaaagatcaagctgtgggacctgaggaccacgaagtgcgtaaggcagtacgaaggccacgtgaatgagtacgcctacctgcccctgcatgtgcacgaggaagaaggaatcctggtggcagtgggccaggactgctacacgagaatctggagcctccacgatgcccgcctactgagaaccataccctccccgtaccctgcctccaaggccgacattcccagtgtggccttctcgtcgcggctggggggctcccggggcgcgccggggctgctcatggctgtcgggcaggacctttactgttactcctacagctaattctgcagggcacagcccagagccatgtggatttgacttacgggagtaaagcgtaactttttactgcatctaatgagggtgttttaagtgacactcagtgtacacagatcccatcctctggctgctaggagagaagtgctgaatgttccgtgtggagatgctcaggaaagttatttgagttaaattgctggctgagagagcttggaagtccttttcataaaaggtacctctttccttttcttattgaattcttagaacttagttaaccctccctgccttttcttaacaaaaaggacttttctaaggactgaagattggcaaaaacgaaaagcttcttcctccaagagcccattgaagaagcccagtgatgagacggtgagatggtttgagtcctcggtgcctgggtagcaggaagaaagacctgcatcctgcatctgtacttggggaagccagcggagaggacggggaggttacttctctaagtttctgcagaaatattgaaggctggagtttggaatccttaaacttggccttctcaaactcagcagcagatctccgggattctgctgttattatccaaaggcggtggaagggaaagatggatcttcttacatgctagaagttttaaacggtccttaacatgcctttgttcaagcaccttccagaatgtaaggttcagcagctctggtttctattacggtgacttgaatgtcagattcaagggcccggcgtcaaaggaaattggttttgactttttgtaatctaggagcgacagttcgtgagatgtttattcagtgttaaagagcctgtttttctaccaaacaataaaaccaagagaagaaaaa

SEQ ID NO: 2467 - DNA, 6346 bp, Homo sapiens
gtctcctctggatcttaactactgagcgcaatgctgagccatggagccgggttggccttgtggatcacactgagcctgctgcagactggactggcggagccagagagatgtaacttcaccctggcggagtccaaggcctccagccattctgtgtctatccagtggagaattttgggctcaccctgtaactttagcctcatctatagcagtgacaccctgggggccgcgttgtgccctacctttcggatagacaacaccacatacggatgtaaccttcaagatttacaagcaggaaccatctataacttcaagattatttctctggatgaagagagaactgtggtcttgcaaacagatcctttacctcctgctaggtttggagtcagtaaagagaagacgacttcaaccggcttgcatgtttggtggactccttcttccggaaaagtcacctcatatgaggtgcaattatttgatgaaaataaccaaaagatacagggggttcaaattcaagaaagtacttcatggaatgaatacacttttttcaatctcactgctggtagtaaatacaatattgccatcacagctgtttctggaggaaaacgttctttttcagtttataccaatggatcaacagtgccatctccagtgaaagatattggtatttccacaaaagccaattctctcctgatttcctggtcccatggttctgggaatgtggaacgataccggctgatgctaatggataaagggatcctagttcatggcggtgttgtggacaaacatgctacttcctatgcttttcacgggctgtcccctggctacctctacaacctcactgttatgactgaggctgcagggctgcaaaactacaggtggaaactagtcaggacagcccccatggaagtctcaaatctgaaggtgacaaatgatggcagtttgacctctctaaaagtcaaatggcaaagacctcctgggaaatgtggattcttacaatatcaccctgtctcacaaagggaccatcaaggaatccagagtattagcaccttggattacttgaaactcactttaaagagttagtccccggtcgactttattcaagttacttgttcagctgtgtctctgggtgaactgtctgctcagaagatgggcagtgggcagaacatttccagacaaagttgcaaacctggaggcaaacaataatggcaggatgaggtctcttgtagtgagctggtcgccccctgctggagactgggagcagtatcggatcctactcttcaatgattctgtggtgctgctcaacatcactgtgggaaaggaagaaacacagtatgtcatggatggcacggggctcgtaccgggaagacagtatgaggtggaagtcattgttgagagtggaaatttgaagaattctgagcgttgccaaggcaggacagtccccctggctgtcctccagcttcgtgtcaaacatgccaatgaaacctcactgagtatcatgtggcagacccctgtagcagaatgggagaaatacatcatttccctagctgacagagacctcttactgatccacaagtcactctccaaagatgccaaagaattcacttttactgacctggtgcctggacgaaaatacatggctacagtcaccagtattagtggagacttaaaaaattcctcttcagtaaaaggaagaacagtgcctgcccaagtgactgacttgcatgtggccaaccaaggaatgaccagtagtctgtttactaactggacccaggcacaaggagacgtagaattttaccaagtcttactgatccatgaaaatgtggtcattaaaaatgaaagcatctccagtgagaccagcagatacagcttccactctctcaagtccggcagcctgtactccgtggtggtaacaacagtgagtggagggatctcttcccgacaagtggttgtggagggaagaacagtcccttccagtgtgagtggagtaacggtgaacaattccggtcgtaatgactacctcagcgtttcctggctgctggcgcccggagatgtggataactatgaggtaacattgtctcatgacggcaaggtggttcagtcccttgtcattgccaagtctgtcagagaatgttccttcagctccctcaccccaggccgcctctacaccgtgaccataactacaaggagtggcaagtatgaaaatcactccttcagccaagagcggacagtgcctgacaaagtccagggagtcagtgttagcaactcagccaggagtgactatttaagggtatcctgggtgcatgccactggagactttgatcactatgaagtcaccattaaaaacaaaaacaacttcattcaaactaaaagcattcccaagtcagaaaacgaatgtgtatttgttcagctagtccctggacggttgtacagtgtcactgttactacaaaaagtggacaatatgaagccaatgaacaagggaatgggagaacaattccagagcctgttaaggatctaacattgcgcaacaggagcactgaggacttgcatgtgacttggtcaggagctaatggggatgtcgaccaatatgagatccagctgctcttcaatgacatgaaagtatttcctccttttcaccttgtaaataccgcaaccgagtatcgatttacttccctaacaccaggccgccaatacaaaattcttgtcttgacgattagcggggatgtacagcagtcagccttcattgagggcttcacagttcctagtgctgtcaaaaatattcacatttctcccaatggagcaacagatagcctgacggtgaactggactcctggtgggggagacgttgattcctacacggtgtcggcattcaggcacagtcaaaaggttgactctcagactattcccaagcacgtctttgagcacacgttccacagactggaggccggggagcagtaccagatcatgattgcctcagtcagcgggtccctgaagaatcagataaatgtggttgggcggacagttccagcatctgtccaaggagtaattgcagacaatgcatacagcagttattccttaatagtaagttggcaaaaagctgctggtgtggcagaaagatatgatatcctgcttctaactgaaaatggaatccttctgcgcaacacatcagagccagccaccactaagcaacacaaatttgaagatctaacaccaggcaagaaatacaagatacagatcctaactgtcagtggaggcctctttagcaaggaagcccagactgaaggccgaacagtcccagcagctgtcaccgacctgaggatcacagagaactccaccaggcacctgtccttccgctggaccgcctcagagggggagctcagctggtacaacatctttttgtacaacccagatgggaatctccaggagagagctcaagttgacccactagtccagagcttctctttccagaacttgctacaaggcagaatgtacaagatggtgattgtaactcacagtggggagctgtctaatgagtctttcatatttggtagaacagtcccagcctctgtgagtcatctcagggggtccaatcggaacacgacagacagcctttggttcaactggagtccagcctctggggactttgacttttatgagctgattctctataatcccaatggcacaaagaaggaaaactggaaagacaaggacctgacggagtggcggtttcaaggccttgttcctggaaggaagtacgtgctgtgggtggtaactcacagtggagatctcagcaataaagtcacagcggagagcagaacagctccaagtcctcccagtcttatgtcatttgctgacattgcaaacacatccttggccatcacgtggaaagggcccccagactggacagactacaacgactttgagctgcagtggttgcccagagatgcacttactgtcttcaacccctacaacaacagaaaatcagaaggacgcattgtgtatggtcttcgtccagggagatcctatcaattcaacgtcaagactgtcagtggtgattcctggaaaacttacagcaaaccaatttttggatctgtgaggacaaagcctgacaagatacaaaacctgcattgccggcctcagaactccacggccattgcctgttcttggatccctcctgattctgactttgatggttatagtattgaatgccggaaaatggacacccaagaagttgagttttccagaaagctggagaaagaaaaatctctgctcaacatcatgatgctagtgccccataagaggtacctggtgtccatcaaagtgcagtcggccggcatgaccagcgaggtggttgaagacagcactatcacaatgatagaccgcccccctcctccacccccacacattcgtgtgaatgaaaaggatgtgctaattagcaagtcttccatcaactttactgtcaactgcagctggttcagcgacaccaatggagctgtgaaatacttcacagtggtggtgagagaggctgatggcagtgatgagctgaagccagaacagcagcaccctctcccttcctacctggagtacaggcacaatgcctccattcgggtgtatcagactaattattttgccagcaaatgtgccgaaaatcctaacagcaactccaagagttttaacattaagcttggagcagagatggagagcctaggtggaaaatgcgatcccactcagcaaaaattctgtgatggaccactgaagccacacactgcctacagaatcagcattcgagcttttacacagctctttgatgaggacctgaaggaattcacaaagccactctattcagacacatttttttctttacccatcactactgaatcagagcccttgtttggagctattgaaggtgtgagtgctggtctgtttttaattggcatgctagtggctgttgttgccttattgatctgcagacagaaagtgagccatggtcgagaaagaccctctgcccgtctgagcattcgtagggatcgaccattatctgtccacttaaacctgggccagaaaggtaaccggaaaacttcttgtccaataaaaataaatcagtttgaagggcatttcatgaagctacaggctgactccaactaccttctatccaaggaatacgaggagttaaaagacgtgggccgaaaccagtcatgtgacattgcactcttgccggagaatagagggaaaaatcgatacaacaatatattgccctatgatgccacgcgagtgaagctctccaatgtagatgatgatccttgctctgactacatcaatgccagctacatccctggcaacaacttcagaagagaatacattgtcactcagggaccgcttcctggcaccaaggatgacttctggaaaatggtgtgggaacaaaacgttcacaacatcgtcatggtgacccagtgtgttgagaagggccgagtaaagtgtgaccattactggccagcggaccaggattccctctactatggggacctcatcctgcagatgctctcagagtccgtcctgcctgagtggaccatccgggagtttaagatatgcggtgaggaacagcttgatgcacacagactcatccgccactttcactatacggtgtggccagaccatggagtcccagaaaccacccagtctctgatccagtttgtgagaactgtcagggactacatcaacagaagcccgggtgctgggcccactgtggtgcactgcagtgctggtgtgggtaggactggaacctttattgcattggaccgaatcctccagcagttagactccaaagactctgtggacatttatggagcagttgcacgacctaagacttcacagggttcacatggtccagactgagtgtcagtatgtctacctacatcagtgtgtaagagatgtcctcagagcaagaaagctacggagtgaacaagaaaaccccttgtttccaatctatgaaaatgtgaatccagagtatcacagagatccagtctattcaaggcattgagaatgtacctgaagagctcctggataaaaattattcactgtgtgatttgtttttaaaaacttgcttcatgccctacagaggtgccagctatttctgttgatactatgtataatttattaatctggagaatgtttaaaattttatataatttaaaggtaacagatattattgtacatagttgtattttgtagtttcttctgtaaatatgtatttttcataatgtttaatattaagctttatataatactatttttccacactaaagtgttcatgacttgttctacataaaactaattcaacctgtaaaaaaaaaa

SEQ ID NO: 2468 - DNA, 1976 bp, Homo sapiens
tacggctgcgagaagacgacagaagggggtgtgcaaaatcagagaggggtgcaagatcctgatttttcaggagttcaagcgacaatggcagcccaatacggcagtatgagcttcaaccccagcacaccaggggccagttatgggcctggaaggcaagagcccagaaattcccaattgagaattgtgttagtgggtaaaaccggagcaggaaaaagtgcaacaggaaacagcatccttggccggaaagtgtttcattctggcactgcagcaaaatccattaccaagaagtgtgagaaacgcagcagctcatggaaggaaacagaacttgtcgtagttgacacaccaggcattttcgacacagaggtgcccaatgctgaaacgtccaaggagattattcgctgcattcttctgacctccccagggcctcatgctctgcttctggtggttccactgggccgttacactgaggaagagcacaaagccacagagaagatcctgaaaatgtttggagagagggctagaagtttcatgattctcatattcacccggaaagatgacttaggtgacaccaatttgcatgactacttaagggaagctccagaagacattcaagacttgatggacattttcggtgaccgctactgtgcgttaaacaacaaggcaacaggcgctgagcaggaggcccagagggcacagttgctgggcctgatccagcgcgtggtgagggagaacaaggaaggctgctacactaataggatgtaccaaagggcggaggaggagatccagaagcaaacacaagcaatgcaagaactccacagagtggagctggagagagagaaagcgcggataagagaggagtatgaagagaaaatcagaaagctggaagataaagtggagcaggaaaagagaaagaagcaaatggagaagaaactagcagaacaggaggctcactatgctgtaaggcagcaaagggcaagaacggaagtggagagtaaggatgggatacttgaattaatcatgacagcgttacagattgcttcctttattttgttacgtctgttcgcggaagattaaacttaatgaaaatctgtttgtattttctgcatattctctggcaaccttgccccatacttacttatttagcatagtcgagtgctctagtttctgtctctcaggcactcgtaactaaggaccaccattggccattggtagatgtttgattgacttaacaagagagggacaaattttcaatttgtgaaactccaaagcagaaagtattggtgcttgctaccttgtgaattcttccttagacatgcagagaaaatgtatgcaagagaccaaaaagatggctccaagctatgtcatgttacctgtaataaaatcttttcttctagattctttctatgttggcagataatctccccttgtagcttccactcacttattcttgcattcagagtcacaatgatcatcttacccatgtggtttttgagaaagaaagatcaattctttgtttgcagtaggtaatcttagagatggagatgattgtagaattattcctagatgagtgtcaatttatttaattccattgtcatataaggagtcaaattgtttcttatcatttgttcattgaagaacagagacctgtctggaaaatcgatctctacaaattcaattaaataatgatccccaaatgctgaaaaagtgaaatacagcaattcaacagataatagagcaatgtttagtatattcagctgtatctgtagaaactctttgacgaacctcaatttaaccaatttgatgaatacccagttctcttcttttctagagaaagatagttgcaacctcacctccctcactcaacactttgaatacttattgtttggcaggtcatccacacacttctgcccccactgcattgaattttttgcttatgttgtttataataaaacttttcaattatctcaaaaaaaaaa

SEQ ID NO: 2469 - DNA, 2829 bp, Homo sapiens
  misc_feature (1)...(2829): n = a,t,c or g
ttttgagtttaaccccaaaatgtatttgtccttagaaaagaggtccacatactcactgtgtctactctacagaatttgtccattttattacaccacgtgtcaattcaagtttatctggtcactgcaaaaactcgtggctaatatgtgtaatacaacacaggaggaggtattgctcagttcaactactcttatttacttaaaaaaaatacagaaatgtttttgtccacttgaactgtagtccagacataaaagttacatgaaagttttagaaaatggagttattttatttggttgccacagtaccccttgaagccagttacttaaaatgctgaagttgtacatatttccattggtcaggagcagcattggtgaagcttaaacttctctctcgaaagtaatctttttttacttttttgtttgtttgtttgttttgttttgtttttagcacaactgcagtctttcgctttttttttttttgttcatttttggagtaggtttccttggtggtttttaggacatatttgttggtaaacctataacagttgcttttactttcagtgatgtacttttttcttttcctgcttcccagagatttatcagaggaggataaagctcacctaatgcaaaggttggtttctgtaagtaattcctcacatagctgtgtccaccatcacagttcatttctggagagaggcagctgataagacatatcacaccaataatccccagaaggcctccaagacaggccataagtgttgtggtattattcttttcatactctttttgatcagggtgcaaacctttggtggtgacatttacacatttttttctgtttttctgatagatggtgggaatatcaatacaaattttatactcagttgatggattcagatgagtaagattatataccttgacatcagatggtattcgagcactttgcgcagcatgagaattttcagtcttgacaaaggctgtccatttaacactagatttgagaattttagaacttgctttccaggacaccaaaactgaattggcctgaatatctcttattttaatattcaaagagccattgttatcttgtggaaaagatccatccactttgatcataacagacttcaagtcagcgccaactaggttagttgctatacaagtatataaacccccttctttgggagttacgccatttatatctagtgttccctcagaatggacatagaacttgtctgtcaggggtattaggcaagagtttttgaccagaaggtgttatccagtagatttcaggctgtggttcatgcagtagctctacagtgaaaggaaacatagctcccagcttctacatttagattagaaggaaagctctcaggagctataagagggagacaaatttccatcatgtccctgaaatgcacttgccgaacattctgaccttggaattcaggtgggtccacgcaaaacagtgaatctggctccatgaatcgaatgttggttttgttcatgttcatccaacggatgacacagtcacacctgatggggttactgtgtatgctgatttccttgaggtttggcagagactcaatggtaccatggtacagggcactgagagcattgctgttcagcatgagtgattccagcttggggagtctgaaaaatgcattggggtgaatgtaagacaatctagggttgttagtagcttctatttttcttaaatctggcaggttatccacagcaagactatcgatggaaatcagctcaggcatattatttatccccaactcttttaagtgtagcatattgctaaaatcaccccttcgtattctattaataggatttttatttagatccaaaaatttgagatttacaactttttgaagagcaacatggggtactttaataagcctgttatcgtaaaaagagatgctttctaagttttccagtccaaccaaggcgttatctggtatttctgtgaggtttataccagctataaccaggctgcgaagattgataagaggcttaaagttcatgtctttgattctgataattggattttccccaatcatcagaatctctagatttggaagagcatcaaaccacttactgttgatcatctgcaatctatttgaattgagatgaagtcgaagaagattatgtaggccaataaaggctccaggtgaaattgtagaaagcaagttgtgattaatatagagttcttgtaagttgctcagttcggacagacatttttcaggcagttcagtaagtttgttttcctctaggtacacagaaaggagctgaggcatcttttttccattaatattggtgactgaagataaattgttttgagataaatccaggccagtaaggtttactggaaagtctgtggagtattcaatttttgcaatattgttagtctgtaggagaagaatctgtgtgttagctggcaatctggctgggaaagttaaaagacctaaatcattacaatccactgtagatgcttccatataaatggatctgggtgtaaaccaaggcctgatttcacacgtacataaccgtggacaatccacttttttatctacagcttgtactagtgtagtgatagctaggccaagtagcacatgaattcggagtggcatgtccttcatcttagctttcttcttcagaaatgtaatgggcccttaaggattccacagtcagtgctagtaagttcaataggagctgattgataaggaagatgcttgcatttgtcaaatgatgaatgccatagaaccacaaagtttttcttnactgaaataagtgccagtgccacanttgcattgtccaaaaatgtcatgc

SEQ ID NO: 2470 - DNA, 1973 bp, Homo sapiens
ttttttttttttttaagacaagccaaattttctttatttatttcccacctggaaaatccagaatcaaactttatttagatgttaggcttgctctgatacagaccttcaaaaaaacaaatcactggagcttctcatgtcagcagaatctggtttaaagaattccttgaacctatcagcagcaggatgtaaacattcacaagaatgctgtcacttctggctgctgtgggcagacatattctttttcaaagacatagttgaagagctagccttaaaatttgtgagaggttgcaagcctgcaaacaactttttttctagttcttcttggatcttaagaagaattctctcctgttctaaggcttctatatactttgagtagcaccaggttggctgtcggccatatggttggaggcctaggaaggaatcactgagtaaagcagttttgatagcaggcactgaagtatttgcatattgtttgattccatcctttccagatttttcgtcgttcgtaggactgccaatttttttttctgcttattatattcttgtcttctctctaaaacactcataatattttcatctgttaaattcttcctaaactcacagaactgaggccagaatttaaacataacccccaaaaatgtcatctgtgcctctctaaatacatatggtcctaactccttccggtgttcaataatcttctgggcttgctctactggaatgtcaatttgtaaagctggtggaatactggaattaataaagcagttgataatagttgtaatcttcttctggatgacagactcatcacaatgagaatggcacaagtccttatatttttgtacttcttgccaaaagagtaaaccattttccaataaatctccttttagagccacaaaacgttgaaattgtcttgaagtaactggattcaataatgctttgcgaaaagcaatgattttacaagatgaagagatccacttactctccacaggcttccagaccccgattttcttttcagccttctgtagtaagagctcttctgctatgtctttcatctgtacctttatcttctgacgtgctgcaaactgttcacttgcaagaaacaatggcagccatacattttctagcctattttgcacatgcttctggatttcaactagaacaggtgcatcaagctgctcatgaagaatcttcccccagccaccacttaaatgcattacctggttctgctgatacagagaagctggactgttgggtccaaagaaatattttttattaaggtatttgtttttaatgtatatagattttgccttcctttgatttcgatctctgtaagttattctccggaactgctcaatgtctgtccagcacataagatccatgcttgaagaatgagtctcaagaaactgacggaaatgttcaaactccagtttgttgttaagcagatcactaaacttaaaatgcttgtattctgcaggaacattatcccaatattctgttcgtttagagacgttagagagtgataaaatgccagttccaatttcacaagtggtgtcctcagctttcttggaaaatgtctctttatgcaaagcctgtagctttctgaagtatgtggagtctaactgtcgagtttcttccaccagctccacctttttataagcaatttggtccgattttaccatctttgtccatggctcaagaaggaggagaaggatatattcctctgctgtgtcaaaaaggtcttcaaatggtggctgtattttcatataaatttcttttttcttttcctgttggagtccaatgtcaagagtggcagaaggagcaacgtatgtggcaaaaagatacctttctcaatcacatcatccttagaagaacctggatacaaaagctcccgcttccaaggcttatgagttaatgtttttacttcaggtgatttatgggagatttaggaggttggataagctaattctatagtgcac

SEQ ID NO: 2471 - DNA, 4037 bp, Homo sapiens
agcgagtggggatttttctggatatgggcatgcagaacgtttccttttttgatgctgaaggtggttcccatgtctatacattcaggagtgtctctgctgaggagccactgcacttgttttttgctcctccaagtccacctaatggtgataagagtgtcttgagtatctgtcctgtgataaacccgggcactactgatgctccagtccatcctggggaggccaaataagcccccactgctcaggccatgatgagcttcggcggcgcggacgcgctgctgggcgccccgttcgcgccgctgcatggcggcggcagcctccactacgcgctagcccgaaagggtggcgcaggcgggacgcgctccgccgctggctcctccagcggcttccactcgtggacacggacgtccgtgagctccgtgtccgcctcgcccagccgcttccgtggcgcaggcgccgcctcaagcaccgactcgctggacacgctgagcaacgggccggagggctgcatggtggcggtggccacctcacgcagtgagaaggagcagctgcaggcgctgaacgaccgcttcgccgggtacatcgacaaggtgcggcagctggaggcgcacaaccgcagcctggagggcgaggctgcggcgctgcggcagcagcaggcgggccgctccgctatgggcgagctgtacgagcgcgaggtccgcgagatgcgcggcgcggtgctgcgcctgggcgcggcgcgcggtcagctacgcctggagcaggagcacctgctcgaggacatcgcgcacgtgcgccagcgcctagacgacgaggcccggcagcgagaggaggccgaggcggcggcccgcgcgctggcgcgcttcgcgcaggaggccgaggcggcgcgcgtggacctgcagaagaaggcgcaggcgctgcaggaggagtgcggctacctgcggcgccaccaccaggaagaggtgggcgagctgctcggccagatccagggctccggcgccgcgcaggcgcagatgcaggccgagacgcgcgacgccctgaagtgcgacgtgacgtcggcgctgcgcgagattcgcgcgcagcttgaaggccacgcggtgcagagcacgctgcagtccgaggagtggttccgagtgaggctggaccgactgtcggaggcagccaaggtgaacacagacgctatgcgctcagcgcaggaggagataactgagtaccggcgtcagctgcaggccaggaccacagagctggaggcactgaaaagcaccaaggactcactggagaggcagcgctctgagctggaggaccgtcatcaggccgacattgcctcctaccaggaagccattcagcagctggacgctgagctgaggaacaccaagtgggagatggccgcccagctgcgagaataccaggacctgctcaatgtcaagatggctctggatatagagatagccgcttacagaaaactcctggaaggtgaagagtgtcggattggctttggcccaattcctttctcgcttccagaaggactccccaaaattccctctgtgtccactcacataaaggtgaaaagcgaagagaagatcaaagtggtggagaagtctgagaaagaaactgtgattgtggaggaacagacagaggagacccaagtgactgaagaagtgactgaagaagaggataaagaggccaaagaggaggagggcaaggaggaagaagggggtgaagaagaggaggcagaagggggagaagaagaaacaaagtctcccccagcagaagaggctgcatccccagagaaggaagccaagtcaccagtaaaggaagaggcaaagtcaccggctgaggccaagtccccagagaaggaggaagcaaaatccccagccgaagtcaagtcccctgagaaggccaagtctccagcaaaggaagaggcaaagtcaccgcctgagggccaagtccccagagaaggatggaaagcaaaatttccaagctgaggtcaagtcccccgagaaggccaagtccccagcaaaggaagaggcaaagtcaccggctgaggccaagtctccagagaaggccaagtccccagtgaaggaagaagcaaagtcaccggctgaggccaagtccccagtgaaggaagaagcaaaatctccagctgaggtcaagtccccggaaaaggccaagtctccaacgaaggaggaaagcaaagtcccctgagaaggccaagtcccctgagaaggccaagtccccagagaaggaagaggccaagtcccctgagaaggccaagtccccagtgaaggcagaagcaaagtcccctgagaaggccaagtccccagtgaaggcagaagcaaagtcccctgagaaggccaagtccccagtgaaggaagaagcaaagtcccctgagaaggccaagtccccagtgaaggaagaagcaaagtcccctgagaaggccaagtccccagtgaaggaagaagcaaagacccccgagaaggccaagtccccagtgaaggaagaagccaagtccccagagaaggccaagtccccagagaaggccaagactcttgatgtgaagtctccagaagccaagactccagcgaaggaggaagcaaggtcccctgcagacaaattccctgaaaaggccaaaagccctgtcaaggaggaggtcaagtccccagagaaggcgaaatctcccctgaaggaggatgccaaggcccctgagaaggagatcccaaaaaaggaagaggtgaagtccccagtgaaggaggaggagaagccccaggaggtgaaagtcaaagagcccccaaagaaggcagaggaagagaaagcccctgccacaccaaaaacagaggagaagaaggacagcaagaaagaggaggcacccaagaaggaggctccaaagcccaaggtggaggagaagaaggaacctgctgtcgaaaagcccaaagaatccaaagttgaagccaagaaggaagaggctgaagataagaaaaaagtccccaccccagagaaggaggctcctgccaaggtggaggtgaaggaagacgctaaacccaaagaaaagacagaggtggccaagaaggaaccagatgatgccaaggccaaggaacccagcaaaccagcagagaagaaggaggcagcaccggagaaaaaagacaccaaggaggagaaggccaagaagcctgaggagaaacccaagacagaggccaaagccaaggaagatgacaagaccctctcaaaagagcctagcaagcctaaggcagaaaaggctgaaaaatcctccagcacagaccaaaaagacagcaagcctccagagaaggccacagaagacaaggccgccaaggggaagtaaggcagggagaaaggaacatccggaacagccaaagaaactcagaagagtcccggagctcaaggatcagagtaacacaattttcactttttctgtctttatgtaagaagaaactgcttagatgacggggcctccttcttcaaacaggaatttctgttagcaatatgttagcaagagagggcactcccaggcccctgcccccatgccctccccaggcgatggacaattatgatagcttatgtagctgaatgtgatacatgccgaatgccacacgtaaacacttgactataaaaactgcccccctcctttccaaataagtgcatttattgcctctatgtgcaactgacagatgaccgcaataatgaatgagcagttagaaatacattatgcttgagatgtcttaacctattcccaaatgccttctgttttccaaaggagtggtcaagcccttgcccagagctctctattctggaagagcggtccaggtggggccggggactggccactgaattatgccagggcgcactttccactggagttcactttcaattgcttctgtgcaataaaaccaagtgcttataaaatgaaaaaaaaaaaaaagggggcggccgttttaaaggatccaattttacgtccgcgggctggcaaggtaatattttttttatggggccccctaaattcatttccctggccggggtttaacaacggg

SEQ ID NO: 2472 - DNA, 2959 bp, Homo sapiens
cacaaaacttgcctgtgatgtgtgggtgtgcgctgtgcacatgtccaagggagatagaggagatagtttgttctttgaaccacaccatgtgcgttaagaatcttctgctctctaattacacctgtggtggttgcatgggtgttctcggggtgacagcagtcaagtgtttcactcaggaagaaagctgtggaagcataggtagctggggtgctctctccctcacacaggtggagagaggattgttgatcttttattaatatctctcgttcattccagggcatgcttccaaatctgctccgatgaatggccactgctttgcagaaaatggtccatctcaaaagtccagcttgccccctcttcttattcccccaagtgaaaacttgggaccacatgaagaggatcaagttgtatgtggttttaagaaactcacagtgaatggggtttgtgcttccacccctccactgacacccataaaaaactccccttcccttttcccctgtgcccctctttgtgaacggggttctaggcctcttccaccgttgccaatctctgaagccctctctctggatgacacagactgtgaggtggaattcctaactagctcagatacagacttccttttagaagactctacactttctgatttcaaatatgatgttcctgggcaggcgaagcttccgtgggtgtggacaaatcaactatgcatattttgataccccagctgtttctgcagcagatctcagctatgtgtctgaccaaaatgggaggtgtcccagatccaaatcctcctccacctcagacccaccgaagattaagaaggtctcattcgggaccagctggctcctttaacaagccagccataaggatatccaactgttgtatacacagagcttctcctaactccgatgaagacaaacctgaggttccccccagagttcccatacctcctagaccagtaaagccagattatagaagatggtcagcagaagttacttcgagcacctatagtgatgaagacaggcctcccaaagtaccgccaagagaacctttgtcaccgagtaactcgcgcacaccgagtcccaaaagccttccgtcttacctcaatggggtcatgcccccgacacagagctttgcccctgatcccaagtatgtcagcagcaaagcactgcaaagacagaacagcgaaggatctgccagtaaggttccttgcattctgcccattattgaaaatgggaagaaggttagttcaacacattattacctactacctgaacgaccaccatacctggacaaatatgaaaaattttttagggaagcaaaaaaaaaaaatggaggcgcccaaatccagccattacctgctgactgcggtatatcttcagccacagaaaagccagactcaaaaacaaaaatggatctgggtggccacgtgaagcgtaaacatttatcctatgtggggactccttaaaccttggggtcatggttcagcagaggttacataggagcaaatggttctcaattttccagtttgattgaagtgcagagaaaaatcccttagattgcaaaataaaatagttgaactctctgtcttcatgtggaaggtttagagcagttgtgagatgctgttatgctgagaaaccctgactttgttagtgttggaaaaaagtcttacaagtctataatttaaagatgtgatggtggggaggggaggatggggaagctttttatatatgcatacattacatacctatatataaacttgtggtataaccatagaccatagctgcaggttaaccaattagttactatcgtagagtaatatatattcagaataataaactcaagctggagaaatgagtcctgatagactgaaaattgagcaaatggaagaagatacagtattgtttagatcagaatcattaaaaaatatttttgtttagtaagtttgaagatttctggcttttaggccttttctattttgttccatttatttttgcaggcaatcttttccatggagggcagggtatccattctttaccatgggtgtacctgcttaggttaaaaatcataccaaggcctcatacttccaggtttcatgttgcgtcttgttgagggagggagagcaggttacttggcaaccatattgtcacctgtacctgtcacacatcttgaaaaataaaacgataatagaactagtgactaattttcccttacagttcctgcttggtcccacccactgaagtagctcatcgtagtgcgggccgtattagaggcagtggggtacgttagactcagatggaaaagtattctaggtgccagtgttaggatgtcagttttacaaaataatgaagcaattagctatgtgattgagagttattgtttggggatgtgtgttgtggttttgcttttttttttagactgtattaataaacatacaacacaagctggccttgtgttgctggttcctattcagtatttcctggggattgtttgctttttaagtaaaacacttctgacccatagctcagtatgtctgaattccagaggtcacatcagcatctttctgctttgaaaactctcacagctgtggctgcttcacttagatgcagtgagacacatagttggtgttccgattttcacatccttccatgtatttatcttgaagagataagcacagaagagaaggtgctcactaacagaggtacattactgcaatgttctcttaacagttaaacaagctgtttacagtttaaactgctgaatattatttgagctatttaaagcttattatattttagtatgaactaaatgaaggttaaaacatgcttaagaaaaatgcactgatttctgcattatgtgtacagtattggacaaaggattttattcattttgttgcattattttggatattgtcttttcattttaataaagttatcatacttatttatgattaaaaaaaaaa

SEQ ID NO: 2473 - DNA, 5332 bp, Homo sapiens
cttcattctctcatccagctcctcggcctcatcggaacatttccaccaccattactcctttggaaactggtggcccggttccttcaaggggcacaggatgtctttgcctttttatcagaggtgccaccagcactatgatctcagctaccgcaacaaggacgtgcgcagcaccgtgagtcactaccagcgggagaagaaacgctccgccgtctacacccagggctccacggcctacagcagccgctcctccgccgcgcaccgccgggagtccgaggccttccgtcgggcgtccgcctcctcctcccagcagcaggcctcgcagcacgccctgagctctgaagtcagtcggaaggcagcctcagcctacgattatggctcctcccatggacttacagattccagtctgctgttagatgattattcatccaagttgagccccaaaccaaagagagccaagcacagcctactgtctggagaagagaaagaaaatttgcccagtgactacatggtacccattttctcaggacgtcaaaagcatgtcagtggaattactgatacggaagaagaaagaattaaggaagctgctgcttatatagcccagaggaatcttcttgctagtgaggaaggaatcacaacacctaaacagtccacggcatccaagcagaccacggcatctaagcagtccacggcatccaagcagtccacagcatccaagcagtccacggcatccaggcagtccacggcatccaggcagtctgtggtttccaaacaggccacatccgctcttcaacaggaagaaacttctgaaaagaagtcaaggaaagttgtgattcgaggaaaggcagaacgcctgtccctgaggaaaacattagaagaaaccgagacatatcatgccaagctgaatgaagaccatcttctccatgctcctgagtttatcattaaacctcgctcccacacggtttgggagaaggagaatgtaaaattgcattgctccatagcaggatggccagaacctcgtgtcacgtggtataaaaaccaggtgccaataaatgtccatgcaaaccctggaaagtatattattgagagtcgatatggaatgcacactctggagattaatgcatgtgattttgaagatacagctcagtaccgggcctcggcgatgaatgttaaaggagagctttcggcatatgcttcagttgtggtaaaaaggtataagggagagtttgatgagactcgcttccatgctggggcttccaccatgcccctcagctttggtgtgaccccatatggttatgcatcccggtttgagatccactttgatgacaaatttgatgtgtcttttgggagagagggagagacaatgagtctaggctgtcgtgttgtcatcactcctgaaattaaacatttccagccagagatccagtggtacagaaacggagtacctctttctccatcaaaatgggtgcaaacactttggagtggagagcgggcaacgctgacattttcccatctcaacaaagaagatgaaggcctctatacaatccgtgtacggatgggagaatattatgaacaatatagtgcttatgtctttgttcgagatgctgatgcagagattgaaggagccccagctgctcccttggatgtgaagtgcttggaggccaacaaagattatatcatcatctcctggaaacagccagctgtcgatggagggagtcctattctcggatattttattgataagtgtgaggtgggcacagatagctggtcgcagtgcaatgacacacctgtgaagtttgctcgttttcctgtcactggattgatcgaaggtcgttcctatatcttccgagttcgagctgtgaataaaatgggaataggtttcccatctcgagtttccgagcccgtggctgctctggatccggctgagaaagctagacttaaaagtcgcccctcagcaccctggactggacagatcattgttactgaagaggaaccttcagagggtattgtgcctggccccccgacagacctctctgtcactgaggccacccggagctatgtggtgctcagctggaagccccctggccagcgtggtcatgagggcattatgtactttgtggaaaagtgtgaggcaggaacagaaaactggcagcgagtgaacacggagctccctgtgaagtctccccgctttgctctgtttgacttggccgaggggaaatcctactgtttccgtgtccgctgttctaattctgcaggagttggtgagccctcagaggcaacggaggtgactgtggtaggggacaaacttgatatccccaaggctcctggcaaaatcatcccaagcagaaacacagacacctcagtggtagtttcgtgggaggagtccaaagatgccaaagagctggtcgggtactacatagaggcaaacgttgctggctctggcaagtgggagccctgtaacaacaaccccgtgaaaactcaccgattcacttgtcatggattagtgactggtcagagttatattttccgggtcagagcagtcaatgcagctggacttagtgaatattcccaggattcagaagctattgaagtcaaagctgctattgcaccaccatctccaccctgtgatatcacctgtcttgaaagttttcgtgactcaatggttcttggatggaagcaaccagataagattggaggggcagaaattactggctattatgtgaactatcgcgaggtcattgatggggtaccaggaaaatggagagaagccaatgtcaaggctgtcagtgaggaggcatacaagattagcaacttgaaggaaaacatggtgtatcagttccaagtggcagccatgaacatggctgggctgggcgcgccctccgcagtaagcgaatgcttcaaatgtgaagagtggaccatcgccgtcccaggaccaccgcacagtctcaagtgtagtgaagtcaggaaagactcactggttctccagtggaagccgccagtccactccgggcggactccggtcactggttacttcgtggacttgaaggaggccaaggccaaagaagaccagtggcgagggctcaatgaggcggctattaaaaacgtatacctgaaggttcgaggcctcaaggagggcgtcagctacgtgttccgtgttcgagccataaaccaggcgggagttgggaagccatctgaccttgctggccctgttgtggcagagacccgtccaggaaccaaagaggttgttgtaaatgtggatgatgatggagtcatttcattgaacttcgagtgtgataagatgactccaaagtccgagttctcctggtccaaagattatgtatccactgaggactctccacgattggaagtcgaaagcaagggcaacaagacgaaaatgaccttcaaagaccttgggatggatgacttgggtatttactcttgcgatgtaacagacactgatggaatagcatcaagctacttaatagatgaggaagaattgaaacgtttacttgctctcagccatgaacacaagttcccaactgtcccagttaaatcagagttggcagttgaaattttggagaaaggccaggtccggtttttggatgcaggctgagaaactgtctggcaatgccaaagtcaactacatatttaacgagaagggaatttttgaaggcccgaaatataaaatgcatattgaccgaaacactggcatcatcgaaatgttcatggaaaagctacaggatgaggatgagggaacgtacactttccagcttcaagatggaaaagcaactaaccattctactgttgttctcgttggagatgttttcaaaaagctccagaaagaagctgaattccagcggcaagaatggatcaggaaacaaggtcctcactttgttgagtatttgagctgggaagtgactggtgaatgtaatgtactattgaaatgcaaggtggcaaatattaagaaggagactcatattgtgtggtacaaagatgagagggagatatcagtggatgaaaagcatgactttaaggatggtatatgtaccctgcttataacagagttttccaagaaagatgctgggatttatgaagttatcctgaaagatgaccgaggaaaagataagagcagactgaagcttgtggatgaagcctttaaggaactgatgatggaagtatgcaaaaaaatagctttgtctgctacagacctgaaaatccagagcacagccgagggcatccaactgtactcttttgtaacttactatgtggaggatttgaaagttaactggtcccacaatgggtccgccattaggtactcagacagagttaagaccggggtcactggagagcagatctggctacaaatcaacgagcccaccccgaatgacaaagggaagtatgtcatggagctctttgatggcaaaactggacatcagaagacagtggatctctctggacaagcatacgatgaggcttatgctgaattccagaggttgaaacaagctgccattgccgagaaaaatcgtgcccgggtgttgggaggtctcccagacgtggtcaccatccaggaggggaaggcccttaatctcacttgcaacgtgtggggagacccgcctccggaggtgtcgtggttgaagaacgagaaggccctggcctcagacgaccactgcaacctcaagttcgaggctgggaggaccgcgtacttcaccatcaacggcgtgagcaccgctgactcgggcaaatacgggctggttgtgaagaacaagtatggctcggagaccagcgacttcaccgtcagcgtgttcatcccagaggaggaggcgaggatggccgccttggagtccctgaaaggcggcaagaaggccaagtgaccggaggtgcgaggagagccagccggcctgtgtgacttgggtgtgaatggtttgggttaaggatgagacgtcttcatgctttctcctccctattattttctggcttgaggggaaaataatgtcaggtctttcactcatataaaaaagcaccaactaatgacactttaattgtttttctttatctacaaaattatgtgttaagaaaataccattcatagcatgaagattaggaaacagttttaaggagaagacttgaatgaagttggagggacattgaatgatggtcagagggcagacgaatgtgtcgtggggcgaattgggatttgctgcagctgtgaagccatggccgtgtctcgtgtgttgttacagaggtgatgtgcttttcgacgggcgcctcgtggcttggaacctcctctgtatgaataaacagttttcacgtctgtcctcttccccgaaaaaaaaaa

SEQ ID NO: 2474 - DNA, 3963 bp, Homo sapiens
ttttttttttttacgctgcaaacattttaatgattattgttgagcatacattttggaaattttttacttcaaacggcaacaagttaaataaatgtttataatatacaaagaaaatacaaccgaaagtaaaactcgctgtaagtgtgccttgcacttagaccaggttttccccccttaatacatctttatttttgagctgcaaacacacttaagactttgatcttcatagtatggcatttaggaaataaaaatatactcccaccttaaagaaataaaaagtttggtgcatgattatatgccaaacaaagagagaacactagaatactcttgatagtgcaggcatcattaaaaaggaaaagaaaaagcttgagatgctcattaattctctatgttttaaggaagcaggatttttgaccaagtagcttaaaagccagcaaaacagggatcagtgacagcaactgtagtgtatggagtatgaaatgacaaactttacacaaatacactgttagaaatttaccagtgaacactgaagatctgagaagctgctctttggaacagtcaagtgggaccaccttattccagtcacataagcccttgtaaagtaacacagtgttctgtgctatatacttgctggctgggtagttacaggatttgttttgtcattagcagctaaaaaacttattccacatgttcttaaagccttaatggtggaaaaaaaggcaagtgtcattagcatggtggatcatatacttctctgcacacaaacacaagaggcttcactagtatttttaaagtctctgatgtctcccattgcacttcaaagctcaattgagatgaaagcctttctccattgtagcagctagcaggcgctctctcatgatctcctcggaagaatattcaggcaacttaaggtaatgcacacatgtattgactgatggatagcttgcatcagtagcatcaaccttgcgtacaaccgtgagcctgggatgcaggttagccagtccacctgggggtagagttgaacaaccagtggtaaactgcaagaatgctttcctttcatcagaagacatgccacataaaaccctcacaaacctcaggaaaccagggctgtcacgtgtataacccagcttaggttcagtgtaattgataatatcctctgctgcccaggatggtgactggtttccacaaagaatcatttggacttcttcatggctgaaggaacttaatttctccattggaaaaactttattaaacccatctctaaaggcttccatttgtttctgaatacccgtatgcatacaaaagtcaaacatcaaatccacatattcttctgcattatccattgttatcatctcatcttcaccacttggcttgagatccacagctgtaaaaccatatattcttgaggaagggcaaaactggaaatttaaacctaaatcctctatgctaagtggaggcccagaacctgatggattcttcagcactagttcctgtaattttgtgttcttctcatcttcagaaagacctttgttgcttaaaatttggcgcctcttgatagcaaggtctttaatttcttttaaaaatctggctctgtgtgggtttactaattcaaagtcttcccaagtcaaaattccattaaaccaagctgggggttttggtttagggggatcaagaataaattctgattttgaatcctcttcaaagcttcctaccgagagtgaatcatgaccttcttctgtagaagcttcagactgactttcagtacagtgtaagtctctatcacctcgtgactcataaatcagtttactcatattgcttttaatgtcacccatacacataagtttaaaaaaaggtttagaaataggtaagtccacaagtctattgtcttgaatgcatttggccaagaaaattccaaggaaatgaaacagtttcgtgatcctttcaagctcatcactatcctgtggaaatggtgctgtgaacagtccacatgacctctgcacataatatccaggaggtttcaatccacctccaagatcaacgtgacgagattcatcatctggaaaattatcatcacaaagccaagctcccaagtcagttctctggaattctgctgccaccagagcataaaactctaatgtgggtcccaagccagttccttcttctcctaaaaattcaacctcaagaactgatttccgatctgcatgtatttgcatgacattctcagcccattccatcagtgactcgccacgtggaacttttactctttcatgcttgagacgaccaactcgaaactctccagggtcatctcgcctaacactgcttgtggttctcgttcgttccacagtggcttcacgtcggttctgtaaccatactattgctcttgaggcgccaaatgctgtacatgtgaaataaagctgtctagtttcaaatggtattagaaaaggacatttgctggttaattgttcacaccagtctggcagagccccacttgccagtgccaatggttcctcaatctgctgtaatatttttgttgtaattttttgctagtgaattcatctggtggaaaagtaaactgaggctgttcatcaccatcttcctgggatattcttgaataagggtcacttgcaactatatatagaatacgcagaagctgaaggacatcttctactccacaagagttctgtccattgcctgctttggcctgaggttgttcttttgttaaattaagaatatcactactttgaagagtagaaatggccccctggtttaacccagacttttgttccatgctcaccccaaatcccaatatgcagctatgagctgagaacaatttctgtttttcctaatacttttattagtgccagttaatttccagtggcgcaggaaagcagcgtctgcattcttctgcaggtaggttatcaagtcattctttggtaattcatcagtgccaaggtactgctccacatgctctatagaccagcaacccatttttccattttccttttctttatcagaatccttcatttctctgtacatgattgtgtatgtgggctcccaaatacgcctaagtttatctgatttcacattgccattacaggacaattgaagcaatttttgtacatagtaaaagatggttgatctgaaattggtgagtggtaattcaacttcacgagtcgttccaagacctgttactttcaaagtgagagctaatcgaggtgacggagtacattcgacttcttccaagagctctgaatgaggggtccctgggggtggtatttctagatcagttgtctgctggacattagtacgaccaggtctaggatcaaaagcaggaaccaatgcagaaaactgtctctttagcacataatcatcatcccatgttctccggcgtcctcctttagtttcgtactcttcttcttcctgctccccaataggtcggctccctgctccagcaggtacctgtggtagctgcgaggtaacagcatgatgcgttacatcagagcgggagccagctcgacgttgcagggatgggcgtctcagaatcataacctcctcgtattcttggtcctcctgattgtcatcttcattctcatcatcttcttcatctggctcaggtaagtcctcatcatcatcgagctcagccaatagagtactggcacggcagctatcaaggaaatcatataaggaatattctgcttcctgacctgtgtcactctcactggaagttgatgtgaggctggtggttaaagtgttacttaaagattgaccaactgataaaactgttgttgctgtagctacattgctgctgctagtaacactggatgttgacatagtcactgttgatgtagtaccaggtgtggtcaaattagggaaactctgagcacccataagaggagaagttgctgtgctcatcacattcctccccaaagtattagtgttgttatcactgctgcttcggcttag

SEQ ID NO: 2475 - DNA, 1415 bp, Homo sapiens
cgccttgcagcgccctgcaagaattcggcacgagccgtgttgtacggcggcttctcgcgcagctgatgacctggaagtgatgcctaaagctgtggaccgcgtgggctcgcctccctgggactaggtttcagcggccgctgcgatgaccaaaataaaggcagatcccgacgggcccgaggctcaggcggaggcgtgttccggggagcgcacctaccaggagctgctggtcaaccagaaccccatcgcgcagcccctggcttctcgccgcctcacgcggaagctctacaaatgcatcaagaaagcggtgaagcagaagcagattcggcgcggggtgaaagaggttcagaaatttgtcaacaaaggagaaaaagggatcatggttttggcaggagacacactgcccattgaggtatactgccatctcccagtcatgtgtgaggaccgaaatttgccctatgtctatatcccctctaagacggacctgggtgcagccgcaggctccaagcgccccacctgtgtgataatggtcaagccccatgaggagtaccaggaggcttacgatgagtgcctggaggaggtgcagtccctgcccctacccctatgaggggctccggtagcacctgggcacctgccgctggaagctattgggctggcagcaggacgactggctgtcctcctgcccacccacactgacggcatcttcccagttccccaaggcacgccttcttcccaggcagctctaacagccctttcatgaaggtaatgctagtcttctgtccatcagtgccatttcctgtagaactaaaggctgttccaagaatgtggggtggggaaagtaaatgctaagactaaaatgtggtgagtctgtgggtgttttcttaagcagcagctgctggttgggccagcgagttggtgggcgggaagagtgaagcagtcttcctcagcagagagcccaaaggactcagagggttctgtgctgatgctcagctgcccagggctgggtgctttggctcaagctgagaactgatcctgctgctatcccagcattttcaactccctcttccagggtagatgggggctgtgaggtaaggcagggggcccagacccacttcatggaagcctaaagcccccacatcaggaacacccccattcctaacttaacccaggagccttaaatgccactgtgaagcttatggaagcaatttacccacccacacagcacattttaaataggaatatgaagctaaaatgcattcccccgagctctcttgcttaacataatggccctagtaacccaatcccttcaagtattttagacttggggccccttcctgctgtcagaggcccagcacaggactcagtatacataacagccaagttcaggcaccctggaataaactggaaatagcacgaaa

SEQ ID NO: 2476 - DNA, 2945 bp, Homo sapiens
cgacccacgcgtgcgcctctttgtgtgctttggaaagccgcggagctggtggtggctacagttggtgttgggggcttaggcgagggacgttaccgggaagttgcaggcgggaggactcttccccatccagtcacctgacaggtcacaaacatgtcagacaaaagtgaattaaaggctgagttggaacgtaagaagcagcgactggcccaaatcagagaggaaaagaagagaaaagaagaagaaaggaaaaaaaaagaaacagaccagaagaaggaagctgttgctcctgtgcaagaagaatcagatcttgaaaaaaaaaggagagaagctgaagcattgcttcaaagcatggggctaactccagaatcccccattgtccctcctcctatgtctccatcctccaaatctgtgagcactccaagtgaagctggaagccaagactctggagatggcgccgtgggatctagacgaggacctattaaacttggaatggctaaaatcacgcaagtcgactttcctcctcgagaaattgtcacgtatacaaaggaaactcagactccagttatggctcaacccaaagaagatgaagaggaagatgatgatgtagtggctcctaaaccacctattgaacctgaagaagagaaaactttaaagaaagatgaggaaaatgaatagtaaagctccccctcatgagctgactgaagaagaaaagcaacaaatcttgcactctgaggaatttttaagtttctttgaccattctacaagaattgtagaaagagctctttctgagcagattaacatcttctttgactatagtgggagagattttggaatgacaaagaaggagagattcaagcaggtgctaaactgtcattaaatcgacaattttttggacgaacgtttggtccaaagcatccgggtgggttagttgtttggattggtcatctcagtatcccggagttactcgtggcttcctataacaacaatgaagatgcccctcatgagcctgatggtgtggcccttgtatggaatatgaaatacaaaaaaactaccccagagtatgtgtttcactgccagtcagctgtgatgtctgccacatttgcaaaatttcatccaaatcttgttgttggtggtacatattcaggccaaattgtgctttgggataaccgtagcaataaaagaactccagtgcaaagaactccactgtcagcagctgcacacacacaccctgtatattgtgtaaatgttgttggaacacaaaatgctcacaatctgattagcatctctactgatggaaaaatttgttcatggagtctggacatgctttcccatccacaggatagcatggagttggttcataaacagtcaaaagcagtagctgtgacatctatgtccttccctgttggagacgtcaacaactttgttgttgggagtgaagaaggttctgtgtacacagcatgccgccatggcagcaaagctggaatcagtgagatgtttgaggggcatcaaggaccaatcactggcatccattgtcatgcagctgttggagcagtagacttctcacatctttatgtcacttcatcgtttgactggacagtaaagctttggacaactaagaataacaagcctttgtattcatttgaagataacgcaggctatgtttatgatgttatgtggtcacctacccacccagccctgtttgcctgtgtggatggcatggggagattggatttgtggaatctcaataatgacacagaggtaccaactgccagcatttctgtggagggtaatcctgctcttaatcgtgtgagatggacccattctggcagagagattgctgtgggtgattctgaaggacagattgttatatacgatgtgggagagcagattgctgttccccgcaatgatgaatgggcacggtttggccgaacacttgcagaaattaatgcaaaccgagctgatgcagaggaggaagcagctacccgaatacctgcttagttcctgaaaaggggagtgtaactagtggatttgggaaaggttcttaagtagatcctgagactatttgcatgcttctgtctaaatgataattaaaaggaaatttcatggattaaaccatgggtttaatgcagcaaggaaacttacaatgtccctttatatataacatgcatcttgttttggatttgtgtcattttttaatatagctgattgacttcacagaaagcagcttttttgaattctaatacataggtgtatatttggtattagttattttgagttcttttcaacttataacactgtatacagttatttctaaagcacagatgaaataagttctgcatatttttaaataatcacagttccctgttatacagataatgttctcactacccataatatgtaggaacattgtttctccttagccgtagtatgcatacacctatccatgttcattctgacatcctttgttgtctttataattcatgtggtagttacctataaataaaaacaaatatgcgttaacttttcaaattttcatttttactccttacaacttgaatttttccatcttttataaaatatattttttccatatctttctttaagctcctgctgtgagcagccatctcaaatcctatagagctgtgtaccctaaatataccatgtggtatatactatagatctcccagtgcattatgaattgatgtctagataatctgttggtgaaaaagtttcccctaggttaacttttgctttactactttatattctttccatctaagacatatttcctttaaaggataaatagaaagctgcctataattttcactgattaagaactatgtatgtgacctcactgagagtaaaatctttgagagaaattgatttcatgatttcagtagccataaaggcaaagtgctcaaatggacccatactttggcattaaa

SEQ ID NO: 2477 - DNA, 2945 bp, Homo sapiens; identical to SEQ ID NO: 2476

SEQ ID NO: 2478 - DNA, 6976 bp, Homo sapiens
gaccgctccggaattctctcgttcgacccacgcgtccgcccacgcgtccgtcgcacgcgtcttgaggaaccgggagatcgcacagctcaagaaggagcagcggcgacaggagtttcagatccgagctctggagtcccagaagcggcagcaggagatggtcctgaggaggaagacccaggaggtttctgcactgaggcgcctggccaagcccatgtctgagcgggtggcagggcgtgcaggactaaagccacccatgctggactctggggctgaggtgtcggccagcactacctcatctgaggctgaatcaggggcccgctctgtctccagcatcgtgcgccagtggaaccgcaaaatcaaccacttcttgggggaccatcctgcgcccactgtcaatggcacccgtcctgcccgaaagaagttccagaagaagggggccagccagagcttcagtaaggcggcaaggctcaagtggcagtccctggagcgacggatcattgacatcgtcatgcagagaatgaccattgtcaacctggaggctgacatggagcggctcatcaagaaaagggaggagctgttcctcctgcaggaggcactgcggaggaagcgggagcggctgcaggctgagagccccgaggaagagaaggggctgcaggagctggctgaggagatcgaggtgctggcagccaacattgactacatcaatgacggcatcaccgactgccaggccaccatcgtgcagctggaggagaccaaggaggagctggactccacagacacatccgtggtcatcagctcctgctccctggctgaagcccgcctcctgctagacaacttcctcaaggcatccattgacaaggggctgcaagtggcacaaaaggaagcccagatccggctgttggagggccgactgaggcagacggatatggcaggctcctcccagaaccatctgctcctggacgccctgcgtgagaaggctgaagctcaccccgagctgcaggccctcatctacaatgtgcagcaggagaatggctacgccagcacagatgaggagatctcagagttctctgagggcagcttctcccagtcattcaccatgaaaggctccaccagccatgacgatttcaagttcaagagcgagcccaaactgtctgcccaaatgaaagctgtgtcggctgagtgcctgggccccccactggatatctccaccaagaacatcaccaagtccctggcctccctcgttgagatcaaagaggacggagtgggcttctctgtccgagacccctattaccgggacagggtctcgcgcaccgtcagtctgcctacccggggcagcactttccctaggcaatctcgagccacagagacgtccccgctgacgagaaggaagtcctacgaccgagggcagcccattaggtccacagatgtgggattcacacccccatcatcccctcccactcggccccgcaatgaccgcaatgtcttctctcgtctcaccagtaatcagagccaggggtcagcgctggacaagtctgatgacagcgactcctctttgttcggaggtcctgaggggcatcatctccccggttggaggagccaagggtgcacggacggccccactgcagtgtgtctccatggccgaaggccacaccaagcccatcctctgcctggatgccacagatgagttgctattcacagggtccaaagaccgaagctgcaagatgtggaacttggttacgggacaggagatcgcagctctaaagggccaccccaacaacgtggtctccatcaagtactgcagccactcggggcttgtgttctccgtgtccacctcctacatcaaggtgtgggacatccgggactcagccaagtgcattcggactctcacgtcctcgggccaggtgatctcaggggatgcctgtgccgccacatccacccgtgccatcaccagtgctcagggcgagcatcagatcaaccagatcgccctcagcccttcgggcaccatgctgtacgccgcctcgggcaatgccgtccgcatctgggagcttagcaggttccagcctgtcggcaagctgactggccacatcggccctgtgatgtgcctgacggtcacccagacggccagccagcatgacctcgtggtgactggctccaaggaccactacgttaagatgttcgagctgggcgagtgtgtgacgggcaccatcggccccactcacaacttcgagcccccgcactacgatggcatcgagtgtctcgccatccagggagacatcctgttcagtggctcccgagataacggcatcaagaagtgggacctagaccagcaggagctcatccagcaaatccccaatgcgcacaaggactgggtgtgcgccctggccttcatcccgggccgccccatgctgctcagcgcctgccgtgcgggtgtcatcaaggtctggaacgtggacaacttcacacccatcggtgagatcaagggccacgacagtcccatcaatgccatctgcaccaatgccaagcatatcttcacagcctccagtggctgccgggtaaaggtgtggaattacgtccctggactcaccccctgccttcctcgccgagtcctggccataaagggccgcgccaccaccctgccctgaccctccccaactctccctgtctcctctttcattcttcccctctttccttttccctctctttccccacttcgatctgagctgcttcttaacgtgacctgacggtgaagtttctggagtgtccggcggttaccccacagcggcccaccctaggagtgaggtcagagggatgcccccggaccctcgaccccagcagcctggacaccatggaagggaagctgtgacccggccgatggggccagctgctctggggacagagggcgtggccccctctcctgccctcctccctctcccttggccttcccacaggacactgttccctcatccctcccctgcctctcaggagcctctgggtgagagagaggctggggaggaaattaagctgtgaagccaaagggcattatcccttcttgttcccctcctggcagtcgtggccacattgtctcctgctgaaccggctctgcccctttctcaggcctttggcccagtggtggagccctgtggggaggtgcagcagcctggccccatcccacccttccgaggagctggcctccccgcttttcccagcccagcctctagagccactgcacctgcctctgagcccaaaaagataagtcctcaggtagctaaggaaaccaggtgtggccggctgggccttgcagctaacccttaaccctttggcaacccgcagatagccccaactggccccaacagttccctggggtcccttttggatggggccaaggtggagctgctagaaagattcctttggggagatggtcagaaatacttcagttatttattattttgttatttttattttttgctgttgcctcctggaaacggacttgaagtttcttcccctatattctttccctcagctcttgggggccagaaatcccaaagggagtccgctgccccggccctccagggccgcctcctctgtttgctttgcagaggagggaactgctccttcgactctgcagctcaggcctgtccccgacacagcccccagggagtcttctagctacccctggcctctaggccgcctgacgctcagtgccttcctccgttccggggcctggcacccgtgccgggcagccttacaccagccatgcccgcggcaccacatgtgtcttctcactcgcgaggtcttgtgcccagcgcccccgggaaggcgggggcgctcaccccacagcccaggccccggggttctgccccacagtcctgcgtgggccacgtaggaagcagcgtgggggctgtgtctgctgggaggtggcttggatggggaggacagcccggcacctggacccccgcccctccccagccctgcagtcccccactgggccggggagtctctccagcttctctctctctggttattcaggagacacattttcggccttaaaactggcatggagcgcaggccctcccttgcagaaaattatcaaggaagagggagttggcagagtttctctgccccggggctggggacgcggagctccggggaaattgttaaatcagtgttctggcgccccctgttgggggaactctggaattacaggagtgggccttgggggggactgagctccatccctctcccccgccccacccccacccaaagttgcccaccctgtttttccgttgcatcgctggtcttgtgcttcccgcttcagtctgggagccaagagccagccccacctcccttcagaggacgcagtgacttttggactttccagaggtggttctgtgtttctgcccttggctcctctccgtcttgggctggggcacttggagccctctccatgtggcgcccagtgttggggggaggcaggctccagtggaggctgagtgaggcctggtcccttccccgtgccctcctcggagctgccacagaggctaagacggctgtcctgctggtgctggccctgctggatgtggtattgaagtctggggcagctgatagcaggaaggagacccccttggatgctggtctcctgggacctgaacagtctgtcagcaatggctggaaatccttcttcctctggccaccccgggggtgccgggcaacccccttagctctaagatgtggccacaaatctcttcccactcctccccgccaacctgaacagaaagttttgaccttgcaacctgtaagaaagaatccgtccgcatgactgtttacaagcgatagaaacacgtaagactctgtccccttgagctcccacccccgggccggggatgccccacctggggtgactgcactgtagctgcaaggcgtgttcttgcacgaagtgtgatcttatggccctgcgagaggtgctcatcatcatgcccattttctgctgtttctgatgggtcagctacctcacggcggggccagctctgctgtcctggcaagtgtcattgactctctaaacttgaagtccttcaggagccctgagcccaacatccatgagacaccccgagttgtgcttcatgagagttggattctctgcccactctttcagggatgtccaaggtccatgttagggggcaggcccccagctccactcactgcacaagcaccctaaatgttggaagcacaaaatggttgtgatttgagcacaatggcagggtcctgcaggcagacttgacaggcccaggcccgggaggatccccccacgttggctctgtccaaagtgagattgggggtgcctgtgtctgggacagggggctgcccttgctcagaccaggccttggctcatggcttgtcctaattctgggactcgtcatcttacttcttgcccttctgtgcccatcttaagactggaggctgagccttgtcaggcccagccacatctttacgccatgggaccaggagtaaagcgctctctaaaccccgcaccccaaatctctaaacgcctgagttcaggctgagtcctagccctagtgagcctgaagagcttggactgattcccagtctcctgggtcaagccccactttgtgctttcgaagcttatgagcgggttccctggatagaaggagtcttccatccccactgcccttgggcctcttcagcatagtcctgtgccagggccctgtcctcactatcagtcagttcagtttcagtatttgctttcacgtgagtggcggactcttctgaagcagccagaactctcaaaggcagcgcatggagttgccttgcgagatttccaaggaaggaggaaagattaacaggcggagcctggcacacccaagcctttgaggtggtcagagtgccaccttcagccccttgggaagggacagcggtgggtctgggagtggcctcaccctggattcagcctaggaatctcttcaccctcagctgtccagccctgctgcctgtctggggatgtgtggcctgggcagagggcagtttaaagcacaaaaccacatggggaaaacacaaggttgcggggactttctcatgtgcctgatgtggtggagggagacaccagcaggtggctgcagtgacgttagggaacataacacttctttgccctgctagctctcagctctggggggcatcccccgatgtggtctgggctgggagcaggcatatcccctggttgttgcctgtgcctggtctgttcaccatcgtgtttgtgtgggcagagcctgccctgcaggagcagtgactttcttcccactgtgtgtcccggacctgtggtatgtgtccctttgccatcccaaacaggcaactgcttgctgctctccttgcttggcatagcctcctggtcagtggccaatgccccacaggccttcctgggcctggccctcctctcctgactcccagatccttccctgccctcttgtgtgcaaggacagattttgcagggaaagttctgtttcttctttgatacctttgttctgtcacctgccccatccccagcactccatggatcttgaagcccctatcacactcctagttccagtccctgtgaaacccatgtccctgaagggccctgccagggaaagtaggaaaatagaaactccctcccacaaagagcccgaggatccagagaagacccctgagatgaaattcagggccctgccctgccccacccaactcttttcctagcaatccatgtccctgccccaggctgcaggccttgcattaggctcctgctgtcctgccatgtatgtgactagtcatcaaggtgtatatatgttttgtacctctgccgatgggctgtacatagtgtatgaaagttatttaagaccccatgttgtacatttctgttcctagattggatgtgtgtgttctaagaagttgtcataaataaaacctgaatgccccaatgtcaaaaaaaaaa

SEQ ID NO: 2479 - DNA, 3841 bp, Homo sapiens
cggacggcaagcggcgggagattttcaaaatgggagcccagaggcaccgcccaggcctcggaaggtgtcagggagaactttccgtggtttcagcgtcgtcgcctggagcggcggtttagagagccgagcctgatgggcgccaaggccggctggctgcttggagcgctgcctcgaagggactgcgtgaaggaagctaatccggagaacccaggccagagcctggaaatatggcgacctgcatcggggagaagatcgaggattttaaagttggaaatctgcttggtaaaggatcatttgctggtgtctacagagctgagtccattcacactggtttggaagttgcaatcaaaatgatagataagaaagccatgtacaaagcaggaatggtacagagagtccaaaatgaggtgaaaatacattgccaattgaaacatccttctatcttggagctttataactattttgaagatagcaattatgtgtatctggtattagaaatgtgccataatggagaaatgaacaggtatctaaagaatagagtgaaacccttctcagaaaatgaagctcgacacttcatgcaccagatcatcacagggatgttgtatcttcattctcatggtatactacaccgggacctcacactttctaacctcctactgactcgtaatatgaacatcaagattgctgattttgggctggcaactcaactgaaaatgccacatgaaaagcactatacattatgtggaactcctaactacatttcaccagaaattgccactcgaagtgcacatggccttgaatctgatgtttggtccctgggctgtatgttttatacattacttatcgggagaccacccttcgacactgacacagtcaagaacacattaaataaagtagtattggcagattatgaaatgccaacttttttgtcaatagaggccaaggaccttattcaccagttacttcgtagaaatccagcagatcgtttaagtctgtcttcagtattggaccatccttttatgtcccgaaattcttcaacaaaaagtaaagatttaggaactgtggaagactcaattgatagtgggcatgccacaatttctactgcaattacagcttcttccagtaccagtataagtggtagtttatttgacaaaagaagacttttgattggtcagccactcccaaataaaatgactgtatttccaaagaataaaagttcaactgatttttcttcttcaggagatggaaacagtttttatactcagtggggaaatcaagaaaccagtaatagtggaaggggaagagtaattcaagatgcagaagaaaggccacattctcgataccttcgtagagcttattcctctgatagatctggcacttctaatagtcagtctcaagcaaaaacatatacaatggaacgatgtcactcagcagaaatgctttcagtgtccaaaagatcaggaggaggtgaaaatgaagagaggtactcacccacagacaacaatgccaacatttttaacttctttaaagaaaagacatccagtagttctggatcttttgaaagacctgataacaatcaagcactctccaatcatctttgtccaggaaaaactccttttccatttgcagacccgacacctcagactgaaaccgtacaacagtggtttgggaatctgcaaataaatgctcatttaagaaaaactactgaatatgacagcatcagcccaaaccgggacttccagggccatccagatttgcagaaggacacatcaaaaaatgcctggactgatacaaaagtcaaaaagaactctgatgcttctgataatgcacattctgtaaaacagcaaaataccatgaaatatatgactgcacttcacagtaaacctgagataatccaacaagaatgtgtttttggctcagatcctctttctgaacagagcaagactaggggtatggagccaccatggggttatcagaatcgtacattaagaagcattacatctccgttggttgctcacaggttaaaaccaatcagacagaaaaccaaaaaggctgtggtgagcatacttgattcagaggaggtgtgtgtggagcttgtaaaggagtatgcatctcaagaatatgtgaaagaagttcttcagatatctagtgatggaaatacgatcactatttattatccaaatggtgggtagaggttttcctcttgctggatagaccaccctcacctacttgacaacatcagtagggtacagcttttgacaatttaccagaaaaatactggcgaaaatatcaatatgcttccaggtttgtacagcttgtaagatctaaatctcccaaaatcacttattttacaagatatgctaaatgcattttgatggagaattctcctggtgctgattttgaggtttggttttatgatggggtaaaaatacacaaaacagaagatttcattcaggtgattgaaaagacagggaagtcttacactttaaaaagtgaaagtgaagttaatagcttgaaagaggagataaaaatgtatatggaccatgctaatgagggtcatcgtatttgtttagcactggaatccataatttcagaagaggaaaggaaaactaggagtgctccctttttcccaataatcataggaagaaaacctggtagtactagttcacctaaggccttatcacctcctccttctgtggattcaaattacccaacgagagatagagcatctttcaacagaatggtcatgcatagtgctgcttctccaacacaggcaccaatccttaatccctctatggttacaaatgaaggacttggtcttacaactacagcttctggaacagacatctcttctaatagtctaaaagattgtcttcctaaatcagcacaacttttgaaatctgtttttgtgaaaaatgttggttgggctacacaagttaactagtggagctgtgtgggttcagtttaatgatgggtcccagttggttgtgcaggcaggagtgtcttctatcagttatacctcaccaaatggtcaaaacaactagggtatggagaaaatgaaaaattaccagactacatcaaacagaaattacagtgtctgtcttccatccttttgatgttttctaatccgactcctaattttcattgattaaaactcctttcagacatataagtttaataaataacttttttgttgactttcaagtaaagtgattttttttaattttaacataaagtcttcagaaagcctttctatggaaaggaattttaacctataatgtaaagggatgtattctgaggggaacaaggcaggaatggaaacttgaggtcacttactaaatatagtggatataaaatagaacaccctgactttgctcttagaccataacccccgaacttactatgttcatatatttgtattgaacaattcttttaaaagcaaaaatgtaaatgatgtgtagtttatttgtgcttttattgttttccctgcgtctcagacatgttgagaatcatggacaaaacctgctggaattttggaatttttgaagatgtaaataatgtgtatttatgttataagtaacatatgtaaacatgtatatttgttttatatttatttttgtaacaccagtgtctgatgaaacatttttgcaaatgcattttataaaaaaataaatatagtgataagttacattatcttttgattcatttaattaaatacttatttttaaataacttaccagtaaactcactttttaaattttgttgcctgttgaggagccaattaaattttaaatattaattttgcaaatgttaaatacattgtttctctattatctgaaaa

SEQ ID NO: 2480 - DNA, 433 bp, Homo sapiens
  misc_feature (1)...(433): n = a,t,c or g
ttcttgaccataggccgtgaggaccgtttccggaacatcacttggccctcgctctcactcgcggtcgcctggccgttgtcattgtttctccgctgtcactttttcaagccccaggctggctgcttcagaagcccctgaccccatggaggagtgggacgtgccacagatgaagaaagaggtggagagcctcaagtaccagctggccttccagcgggagatggcgtccaagaccatccccgagctgctgaagtggatcgaggacgggatccccaaggaccccttcctgaaccccgacctgatgaagaacaacccatgggtgggaaaagggcaaatgcaccatcctgtgagccccgcacccggcccctctcacaccatcctgtgagaccacgcccggtcccacttccaccatctttgttaagantgtgcccagccc

SEQ ID NO: 2481 - DNA, 5537 bp, Homo sapiens
ttttttttttttaaaagaagtagacttttcttgagactttcgtacaaggcaatggacagataaccttaacctcccagagaaaacacacattggccacagaaaaaggcgcttctccggtatacctgccatagttatcagcaactttgaaatggcttctcagactctcacggggttggcttgttgtgtttgcttttgcaaataactcaggcttaagtcctgctactttcagagcctaggggacgcttaaggactaccatcagtttaacacagtggcacttggagcacatgctacttatggtggtgaggaggggtgctggtgtgaagggtctgaacgccttgctttccctctgcagtggtgtgaacaacccaaagggcactacactgggaaaggatgcttgctcagtgtccctgggaggacattttaatccgcaggttggcaggaaccagtgcccctgtggccgcccaactctccataatagaatccttggtcatccatgggccacgtaaaccatgaccacgtctcctgccctcagcgccagcctgcccttcccctggccccccatttgcccatccccaggatcatagtccagagctgctatcatgatctttggagtccacagtgggagtctcttggagttcccctggagcaccagggaggaaccctgggggatggtgagcccctgaaagtcctcgaggtgggccacagaaggcaggtgcccttgggccggagaacgccacctcctatcagtctgctctgtccccacctccatctcagccactaggcgcccggggatattgcccacttgcctgttgcactcgctgaggtagaaatcatgggtgtcctgagagccccacactcttagcaactgccttttctggaagaccagctcctcctctgcagccttgaggttggcagacatcaccagggggttgtaatcagagagggccacaaagaccctggctggagtgttggcccccgtccccagctgttgggggccacccctgggcatcttgatgactttggcggatggagctggacacagtgccgagctgggctcatggagctggcaccctctcttcacccccagagcttgtccttgcctgctgtggggctcaggctccctcctctcctctcgcctctctgtgccccacagatccaagcacagtgcctcctgctcctccttcaaaacgttatggaagtcagatgcatactgttggctggcacccagctggggaggtgtgaacccttgggcatcttgcttttgccgaagtaccctctcaagggcagccttttcctgacacggttctttcctgggcccacactcggtgcgtagatggatgaatcctggagcagggcttttgctggtgcccatgtgctggtagcaattttccttctccccagtctggtcactgactgaaggtggcctgtggttctggggactcttctgaaagagcaggtcctttctacagccctcccaggcctctgcaagctcctgggcttggctgccagcccctgaactcggacattctccttctgagcccaggttggacactggggattgcctccttgggggttcttcaaagaatgcttctaggaacttggcctggggctccccgcagcttccagggttgtgggggctggccttggcactcggaggagccagtgacagcttctgggggcagacggggaaggtgactctgtaggtggatgggtcgccacaagtgtagctaaagggtggagtctctggccatcggtgacacatgaagaagtcctcggggatctgagcaggcactgaatccagggactcaccacagagtgacatggttctcactgagaccttctgccacgtgaggggcacctgtagctgggagaattccaatagggtgctcccagcagtggcatcggcgacctcacaaaccttaagcccatctgcatacacagcataaccggtgacctggactccattggaggacccagctgagtcaatggtcacagggagccagctgaccaccaggacacctggcgaggcatggcgctccaccagcacatccagcggtgggtagggaggtcctgccaagagtgtgtcgaaggtgacggtggaggacatagttccccaatacacctgcagcaagtcccgtggcagccgcacctccacccgcgcccggtagtgcgtgccggggcacaggccctggaaggtgtagcagctcacgcccgctggggtcagggcatgctctcggtcatcaagatataccacatgggggtggcggtggctgctgtagacccaggtgatgttggctgatgtggctgtgacattctgcaggtgtagctgcatgggagccatacggagcacccctttggtccccagaaggggtctggagaggccctgcttccccatgctctgcagcaagcccagctggcaggcttccgtcttggtatccaggatctctgttgctacttctgtcttggagcccaccctgaccatctggcacagccctctgtccaccactccctgggctttcccagataataagctgtcttcctccagagcttcatcctgccccgctgggagttgactggggccaagatcaggggatttggcaggcaggcagcctgggatgtagctgtccggaatctgctccacgaagttggagggcaccagcccccgccggccatcctcaagctccccctcatagaagccatcctcatccatgtccccgaagatatatatgtagtccccagctgtgaggggcagctcaccctcagggtgatcattgggcccctcaaatgggttgtagttatactgagccatgaagatcttgagcttgggggcagcaggagccgccgagccccccatttccagggccagggacacgctgtcaggctccaggtcatccacctcactggctgtgtccctgtccagagtaggggaggacggcacggtggcccacatcgacccctcagaggaggagtttgactgggagctggttttcttggacagaggttggctggcagggactgtctctgaaacttgggggacactggctgactccccaagggcaactgggctctcctcgagggaggcttcccttttctcctgtatgtctctgttgggctgtgacactgcgtagtcttcagcccgtgcgtggaacttgggccttctgctacctttaacttgggactccggcatttgactggtctcccagggctgttcaggagggtgaccaggccgacactggagcgcctgtatctccttccaggaaggatggaggtcacacagggccttctgcgggtcgcgttgcagctgctgctgcctgtcctgcccgcgcgccgcctgctgcaacagctgttcggcgatcaagccggaggcatcgcgctcttgacacgcgcggcccaggtggccgcgcacttcgctattctcagcctccaccttccgcacccagtcggtcttggcctgcagccgcccattctcctccgccagccaggcgtttttgagcagcgccgcctgcagctgtgtctcggcctcctcgccacgtcgccgcgccggggccgcctgcgcgcccagctcctggcactcgcgccgccgctggtccagctcgcgctccagcgccagcatctgccgtcgcacctcctcgcaggttgcgctctggccgcccgcctcgggccaagcgccaccgttgccctgctgaagcatcaactgcctctgcaggcgcagcacttcccgctgggactcgcgctgcaggcggtctaagtctctgacgttgagccactgggtgcaggggccgccccttccagtatgcaggtcgctgcagggacccgaggcgacacgcgcctgcaggaggtggcactcctgccgcagctcttcgatctgcttgtccttggccagcggcgcgctcgcctgctccgacaggtcccgagcgcgctggcgggcaaagacttggcacagctccaggccggcgcaactctcgccgggtataggcgcgctcacggcccggaggttggtctcctgcagctcgcgggcgcggtcagctaggcgccgcgcgagcccggtcagctccgcgcgctttaccttgagccgcttcaccttctcgtctgcctggtaggggcagcctgcacgccgcagctgcttattctcctcttgcagggtataacagcggcgcgccagcacccacaacgccttggccagcagccagttcagctttatcagctcgtggtggcccaggcccgggggtgagggagtcaggacttcgcagggctggctctcagagccttctcctccccgcgggttgctgagtttcctgtgggctgacggtggtggtggcggcgggagtggcgatggtggcggcgagagcctccgggagccaggggtggaggtgtctggtgaggagggccgctcctcggatttggaggccttggggaggctccgggtgctgtcaagcgagcgggaacacgcaggtgcgaagcaatcaagggagctggcgtgcgtggagagcaggccgtctggggagctggagcacgcagaggacaccaggcctagcgagcgggagcgcacaccgacttcagcactcaggctgtctagagatccgagttggcaggcgggtttgggggcgtggcaagagccgctggaggtctggggcagcggttcttccaaggaatgcacagcttgggggtccggtgatcccgacaaagccgggtgcccgcggaagtgcgccaggatgtacttgaggaagagctggcgctccacctccagcgccgcctgcagatagcggatgcgcgccgcctgctcgccgtcagtctgccagcgaagctgcgccaacacttcctgcaggcgacagcggcactgcgccgcggaaacctcggacgcccccgggcggctacagtggccgcggttcaccagctcctcggccagctggcgctgcagctcccgggcttggcgcaccacgccatcgcgctcccggtgcagcagctgctgcagctgccgctgctcggcctccttccagcgcagcagctgccggatctcggcctcgcgttcccgctgcatctcctcttgcagctgccgcaactcccggctgcgctgtgcctcccacttggagcgcagacggtcagccagctgccgccgctcccgctcggcctcctcacgcagctggcgctcccgggcagcgaagcgccgccgttccgcccgccagcctgcccgctccgcctccagctccgcccgtagcttctccagctcccgcctctggttctccagcactgccgccgccgggctggagcagcccggcttcttgggcgacgcgcccaaggggctgggcgagtccttggccattgcggccgcggcccggctggtctccagacttcgcctggcaggcctcagctcgccaacggccgccgccgaccgcccggcgcgccccttccggcgccccctgggggtctccgcgtgccccttccgcctcttggcatgttcccccgcctcctgccgcggatgtctggcccaggcgcctctccaccaagctcctaccctctcccggtccagctttctcac

SEQ ID NO: 2482 - DNA, 1111 bp, Homo sapiens
atgtccaagccccccgacctcctgctgcggctgctccggggcgccccaaggcagcgggtctgcaccctgttcatcatcggcttcaagttcacgtttttcgtctccatcatgatctactggcacgttgtgggagagcccaaggagaaagggcagctctataacctgccagcagagatcccctgccccaccttgacaccccccaccccaccctcccacggccccactccaggcaacatcttcttcctggagacttcagaccggaccaaccccaacttcctgttcatgtgctcggtggagtcggccgccagaactcaccccgaatcccacgtgctggtcctgatgaaagggcttccgggtggcaacgcctctctgccccggcacctgggcatctcacttctgagctgcttcccgaatgtccagatgctcccgctggacctgcgggagctgttccgggacacacccctggccgactggtacgcggccgtgcaggggcgctgggagccctacctgctgcccgtgctctccgacgcctccaggatcgcactcatgtggaagttcggcggcatctacctggacacggacttcattgttctcaagaacctgcggaacctgaccaacgtgctgggcacccagtcccgctacgtcctcaacggcgcgttcctggccttcgagcgccggcacgagttcatggcgctgtgcatgcgggacttcgtggaccactacaacggctggatctggggtcaccagggcccgcagctgctcacgcgggtcttcaagaagtggtgttccatccgcagcctggccgagagccgcgcctgccgcggcgtcaccaccctgccccctgaggccttctaccccatcccctggcaggactggaagaagtactttgaggacatcaacccggaggagctgccgcggctgctcagtgccacctatgctgtccacgtgtggaacaagaagagccagggcacgcggttcgaggccacatccagggcactgctggcccagctgcatgcccgctactgccccacgacgcacgaggccatgaaaatgtacttgtgaagggccccgccggtcacctccccaacctgctcctgatggggcactgggc

SEQ ID NO: 2483 - DNA, 4420 bp, Homo sapiens
atggcaaaggtcattctgaagcagagtaaacaatgcaagaatctgcttacctgcaaagtggcccaggtctgccccgtatgtggctgtcttcattgttatttctggtggctctcaggtcttgagtcaagacgtcccagctctccactcatcgatattaaacccatcgagtttggcgttctcagcgccaagaaggagcccatccaaccttcggtgctcagacggacctataaccccgacgactatttcaggaagttcgaaccccacctgtactccctcgactccaacagcgacgatgtggactctctgacagacgaggagatcctgtccaagtaccagctgggcatgctgcacttcagcactcagtacgacctgctgcacaaccacctcaccgtgcgcgtgatcgaggccagggacctgccacctcccatctcccacgatggctcgcgccaggacatggcgcactccaacccctacgtcaagatctgtctcctgccagaccagaagaactcaaagcagaccggggtcaaacgcaagacccagaagcccgtgtttgaggagcgctacaccttcgagatccccttcctggaggcccagaggaggaccctgctcctgaccgtggtggattttgataagttctcccgccactgtgtcattgggaaagtttctgtgcctttgtgtgaagttgacctggtcaagggcgggcactggtggaaggcgcatgattcccagttctcagcaccaggcttgcccgccgatcaacaatttttcgccgatctgttcagcggcctggtgcttaacccgcaactactggggcgcgtctggtttgccagccagcctgcctcgttgccggtgggcagtttatgtattgattttccccgtctggatatcgtgctgcgcggcgaatacggcaatctgctggaagcaaagcagcaacgtttggtggaaggagaaatgctgtttattccggcgcgcgcggctaatttaccggtcaacaacaaaccggtgatgctgttaagcctggtgttcgctccgacctggcttgggttatcgttttacgatagccgcaccacgtcgttgttgcatcctgctcgccagatccagcttcccaagcttgcaacgcggtgaaggtgaagcgatgctttccggccctcaccctttttagccgttcgccgttggagcaaaatatcattcagccgctggtgttaagtttgctgcatctttgcggtagcgtggtgaatatgccgccgggcaattcgcagccgcgcggcgattttctctatcacagcatttgtacctgggttcaggataattatgcccagccgctcacccgcgagagcgtggcgcagttttttaatatcacgcccaatcatctgtcaaaactgtttgctcagcatggaacgatgcgttttatcgagtatgtgcgttgggtgcgaatggcgaaggcgaggatgattttgcagaaatatcatctgtcaattcatgaagtggcacagcgttgcggttttccggatagcgactatttttgtcgcgttttccggcgtcagtttggcatggattatgtcgatatcctgcaaattcatcgctgggattacaacacgccgatcgaagagacgctggaagccctcaacgacgtggtaaaagccgggaaagcgcgttatatcggcgcgtcatcaatgcacgcttcgcagtttgctcaggcactggaactccaaaaacagcacggctgggcgcagtttgtcagtatgcaggatcactacaatctgatttatcgtgaagaagagcgcgagatgctaccactgtgttatcaggagggcgtggcggtaattccatggagcccgctggcaaggggccgtctgacgcgtccgtggggagaaactaccgcacgactggtgtctgatgaggtggggaaaaatctctataaagaaagcgatgaaaatgacgcgcagatcgcagagcggttaacaggcgtcagtgaagaactgggggcgacacgagcacaagttgcgctggcctggttgttgagtaaaccgggcattgccgcaccgattatcggaacttcgcgcgaagaacagcttgatgagctattgaacgcggtggatatcactttgaagccggaacagattgccgaactggaaacgccgtataaaccgcatcctgtcgtaggatttaaataagagtccaggcctgatgagacgtgacaagcgtcacatcaggcatcgggtgcacaactcggacagaataccaagcgcccagtgatgtccgataaaatacaggatgcgtgcgaaaatcaccccggcgacagatatcgtcgatcatgatccccatgccgccatgcacattgcgatcaaaccagcggatcggccacggcttccacatatccagaatacggaaaatcacaaacccggcggcaacccactgccagtcattggtcggcagcgccatgagcgtgatccacataccaataaattcgtcccagacaatgctgccatgatcgtgcacacccatgtctttcgccgtttgatgacaaagatagacgccgatacagatccccagcatcaccaccagcgagtagagctgccagggcaaaaaggtcatcagataccagaacggaatcgctgccagcgagcccatcgtgccggggatcatctagagtgcgactcgtattcaccgccttgcaatataggataccgaatcatggcacaagtcattaatacccacagcctctcgttgatcactcaaaataatatcaacaagaaccagtctgcgctgtcgagttctatcgagcgtctgtcttctggcttgcgtattaacagcgcgaaggatgacgcagcgggtcaggcgattgctacccgtttcacctctaacattaaaggcctgactcaggcggcccgtaacgccaacgacggtatctccgttgcgcagaccaccgaaggcgcgctgtccgaaatcaacaacaacttacagcgtgtgcgtgaactgacggtacaggccactaccggtactaactctgagtctgatctgtcttctatccaggacgaaattaaatcccgtctggatgaaattgaccgcgtatctggtcagacccagttcaacggcgtgaacgtgctggcaaaaaatggctccatgaaaatccaggttggcgcaaatgataaccagactatcactatcgatctgaagcagattgatgctaaaactcttggccttgatggttttagcgttaaaaataacgatacagttaccactagtgctccagtaactgcttttggtgctaccaccacaaacaatattaaacttcctaatgctgttggtttgaaccttcctcctctgccatgtgggatgtttcaggactcagtgacctttgaggatgtggctgtgaacttcacccaggaggagtgggctttgctgggtccttcccagaagaatctctacagagatgtgatgtgggaaaccttcaggaacctgatgtctgtagaagtcatatggtagagagagtctgaaggtaaggaagatggtcaatgtgaagagatcttcagccttgttccaaatggtatagtgaagacgacttttactggagtcaaatcatgtgaaagcagtgtgtgtgaagaaggcaatatggatcattcatctcttaattgctgcatcagagctgacactggacacaaatcagatgagtgtcagcaacatagaagccacataagcagtgtgtgaaaaccttcagctattgccactcctttcaaacacatgaaaggcctcacactggaaagaaactccatgtaagaaatgtggaaaaaccttcatttctgttcaaaccttttgaagatacatggtaatgcacagtgaagatgaaccttataaatgtaagttttgtgggaaggcctttgataatctacatttatatcttacacatgaaagaactcacactggagagaaaccctatgaatgtaataaatgtgggaaagccttcagttgttccagttccattcgaaaacatgcaagaattcacactggagagaaaccctatatatgtaaacaatgtggcaaagcctttagatattccagttctattcgaaatcatgaaaacactcacactggtgaaaaaccctgtgaatgtaagcaatgtgggaaagcctttagttattccagttactttcgaatacatgaaagaattcacactggagagcaggcctacatccagatcacgtatgtggaaccgtactttgatacctacgagctcaaggaccgggtgacctactttgaccgcaactatgggcttcgcacattcctgttctgcacgccgttcacgccggatgggcgcgcacacggggagctgcccgagcaacacaagcgtaagacgctggtcagcaccgaccacgccttcccctacatcaagactcgcatccgtgtgtgccaccgggaggag

SEQ ID NO: 2484 - DNA, 4841 bp, Homo sapiens
gagaatcagagagagagagagagtctgtgtctctgggaaagaagaacatctctgcttcacagtgatttgcgctgggggagaggcatcaattggcttcggacccaagggggagacgagaccaggtcaccccggttaagaccaagtgagcgttgcccctccctctcccaactctctacccgggaatgtctcggcgaaagcagcggaaaccccaacagttaatctcggactgcgaaggtcccagcgcgtctgagaacggtgatgctagcgaggaggatcacccccaagtctgtgccaagtgctgcgcacaattcactgacccaactgaattcctcgcccaccagaacgcatgttctactgaccctcctgtaatggtgataattgggggccaggagaaccccaacaactcttcggcctcctctgaaccccggcctgagggtcacaataatcctcaggtcatggacacagagcatagcaaccccccagattctgggtcctccgtgcccacggatcccacctggggcccagagaggagaggagaggagtcttcagggcatttcctggtcgctgccacaggtacagcggctgggggaggcgggggcctgatcttggccagtcccaagctgggagcaaccccattacctccagaatcgacccctgcaccccctcctcctccaccaccccctccgcccccaggggtaggcagtggccacttgaatatccccctgatcttggaagagctacgggtgctgcagcagcggcagatccatcagatgcagatgactgagcaaatctgcaggcaggtgctgttgcttggctccttaggccagacggtgggtgcccctgccagtccctcagagctacctgggacagggactgcctcttccaccaagcccctactacccctcttcagccccatcaagcctgtccaaaccagcaagacactggcatcttcctcctcctcctcctcttcctcttcaggggcagaaacgcccaagcaggccttcttccacctttaccacccactggggtcacagcatcctttctctgctggaggggttgggcgaagccacaaacccacccctgccccttccccagccttgccaggcagcacagatcagctgattgcctcgcctcatctggcattcccaagcaccacgggactactggcagcacagtgtcttggggcagcccgaggccttgaggccactgcctccccagggctcctgaagccaaagaatggaagtggtgagctgagctacggagaagtgatgggtcccttggagaagcctggtggaaggcacaaatgccgcttctgtgccaaagtatttggcagtgacagtgccctgcagatccaccttcgttcccacacgggtgagaggccctataagtgcaatgtctgtggaaaccgttttaccacccgtggcaacctcaaagtgcatttccaccggcatcgtgagaagtacccacatgtgcagatgaacccacacccagtaccagagcacctagactatgtcattaccagcagtggcttgccttatggtatgtccgtgccaccagagaaggccgaggaggaggcagccactccaggtggaggggttgagcgcaagcctctggtggcctccacaacagcactcagtgccacagagagcctgactctgctctccaccagtgcaggcacagccacggctccaggactccctgctttcaataagtttgtgctcatgaaagcagtggaacccaagaataaagctgatgaaaacacccccccagggagtgagggctcagccatcagtggagtggcagaaagtagcacggcaactcgcatgcaactaagtaagttggtgacttcactaccaagctgggcactgcttaccaaccacttcaagtccactggcagcttcccgcttcccctatgtgctagagcccttgggggcctcaccctctgagacatcaaagctgcagcaactggtagaaaagattgaccggcaaggagctgtggcggtgacctcagctgcctcaggagcccccaccacctctgcccctgcaccttcatcctcagcctcttctggacctaaccagtgtgtcatctgtctccgagtgcttagctgtcctcgggccctacgccttcattatggccaacatggaggtgagaggcccttcaaatgcaaagtgtgtggcagagccttctccaccaggggtaatctgcgtgcacatttcgtgggccacaaggccagtccagctgcccgggcacagaattcctgccccatctgccagaagaagttcaccaatgctgtcactctgcagcagcatgtccggatgcacctggggggccagatccccaacggtggtactgcactccctgaaggtggaggagctgctcaggagaatggctccgagcaatctacagtctccggggcagggagtttcccccagcagcagtcccagcagccatcaccggaagaggagttgtctgaggaggaggaagaggaggatgaggaagaagaggaagatgtgactgatgaagattccctggcagggagaggctcagagagtggaggtgagaaggcaatatcagtgagaggtgattcagaagaggcatctggggcagaggaggaggtggggacagtggcggcagcagccacagctgggaaggagatggacagtaatgagaaaactactcaacagtcttctttgccaccaccaccaccacctgacagcctggatcagcctcagccaatggagcagggaagcagtggtgttttaggaggcaaggaagaggggggcaaaccggagagaagctcaagtccggcatcagcactcaccccagaaggggaagccaccagcgtgaccttggtagaggagctgagcctgcaggaggcaatgagaaaggagccaggagagagcagcagcagaaaggcctgcgaagtgtgtggccaggcctttccctcccaggcagctctgggaggagcattcagaagacccaccccaaggaggggccgctctttcacttgtgttttctgcaggcagggctttcttgagcgggctaccctcaagaagcatatgctcctggcacaccaccaggtacagccctttgccccccatggccctcagaatattgctgctctttctctagtccctggctgttcgccttccatcacctccacagggctctccccctttccccgaaaagatgaccccacgatcccatgagcctgtttttctgtacctgctgctctttgtcccacagagcagaaacagcttcacaaaaggacctcccagagttatgagccctgattttgtctttttctctaagttcttaacatgttatgtccctagtggcttttctgtagtccctgagcttggaaattactgtgcttacaaggggatggccccctaaggaatttttcttccctcctcattctttgtacctgaggaacatagattctctgcagctttctcaaggggaaccctctccagcttccctggtgtgacccttcttccccctcctctctcctctccctttccctttggtaggtgcacctgagcacctacatttggcattgcagcctagccaaaaagggctggcagctgtctctggagggcccagtgccactcctctggggtgacctttctgctcagctggtgggtatgggtcccctatctttctagaaccagtatgtggcattcctgtcaaatggcctgcccatgaagccctggaattccagctccacctccactaccactccaagcctggccccaccagtgctgtttggcctaggaactgtggctgggaaggtgcctccaacaatgggatccagggaagccaaggagaagacagcccccctcctatttcagcctcctgcacccaaggcagtgcctgagaagcccatcatagacaagaagtagcaaactgtacattccttcttcctccccctgctccagaaggtgccggtactgaagatgctccagtaattggtgacccaaccctaggaagtagggagaaatgaaggaagggcataggaaaattttcccagtaaatcccctgatggtcacattaaggtaaaggttttggctggtcagtgtgccaagacctctccagcttctcattcatgatgacctctcaaagttgggaaacaagctgatttcttgccaagaggtctcccaggagatatttgggaaatgtgaagttcgtatctttaaggagcatttttggtcagcatggttgatgaactaatgatgagagagttaaggaatgttgctagaacatagggcttgctggtacctatgtgactaagaaagggacatgatgtaagggaaaaggcctcaaattcttgtgaatgtggacattctcgttaatattcttttgggctaatagtgacatagtgtgcagaggtgtaccagggatcatgggggatttcctagcactagtatgcttctagttttagataactccctcctttattccctggccccttgtattttccttatcttcctctttcaagacccctacccattttgcctatccgtaggctggggcttgtgtctttgtcattgtctggttcttaagagtcccagactttgggagaccagctccaggtggcgtcctccctgcctctccgtcttgtaatgagttgtagtatttactcttaacataggatcatttggaacaggagttctgaggaggagagagtgagggttttgctattgactgacttgaacgatggcttctcctcaagctgtaggctccagagcttcctaacctagtaaaatgtcaagaacaggacgggagatattagtgtctttccctctatcattaaaagtgttttaaccaagaaaaaaag

SEQ ID NO: 2485 - DNA, 6413 bp, Homo sapiens
acaacttgagaccattatcctttgcattgtttttaggagacccaaacatggcaaacctggaagaaagcttcccccgaggaggtacaagaaagatccacaaaccagagaaagctttccagcagtcagttgaacaagacaacttatttgatatttctactgaagagggatccaccaaaagaaaaaagagccagaaggggccagcaaaaacaaaaaagttgaaaatcgaaaagagagaaagcagcaagtccgcaagagagaagtttgaaatccttagtgttgagtccctgtgtgagggaatgcgtattttgggttgcgtgaaagaggtgaatgaactggaactggtgattagtctccccaatggcctccagggctttgtgcaagtcactgaaatctgtgatgcctacaccaaaaagctgaatgagcaggtgacacaagaacaacctctgaaggacctacttcacttgcctgaacttttctcacctggaatgctggtaagatgtgtggtgagcagtctgggcatcacagacaggggcaagaagagtgtcaagctgtctctgaaccccaaaaatgtcaacagagtgctgagtgctgaggccctgaagcctggcatgctacttacaggtaccgtatccagcctggaagaccatggctacctagtggacattggtgttgatgggaccagagcttttctgccactgctgaaagcccaggagtacatcagacagaagaacaaaggtgctaaactaaaggtgggtcagtacctgaactgcattgttgaaaaggtgaaaggcaacggaggagttgttagtctgtctgttggtcactcagaggtttctacggccattgctactgaacagcagagctggaaccttaataacttgctaccaggactggtggtcaaagctcaggtacagaaggtgactccatttggccttacgctaaacttcctcacattcttcacgggcgtggttgactttatgcacctggatcccaagaaagctggaacatatttctcaaatcaggcagtgagggcctgcatcctttgcgtccatcctcgaaccagagttgtgcacctgagcctgcgccccatcttcctacagcctggacgcccactcacccgactctcttgccagaaccttggagcagtgctggatgatgttcctgtccagggttttttcaaaaaggctggggccacctttaggctgaaggatggggttctggcctatgcccggctcagccatctctctgattctaagaacgtcttcaatcctgaggccttcaagccagggaacactcacaagtgtagaattattgactacagccaaatggatgaactggccttgctctctctacgaacgtctattattgaagctcagtaccttagatatcatgacatcgaacctggggcagtggtaaagggcacagtgctaaccataaagtcatatgggatgctggtgaaggtgggcgagcagatgaggggcctggtacctcccatgcacctggctgacatcctgatgaagaatccggagaagaagtaccacatcggggatgaggtcaagtgccgggttttgctttgtgaccctgaagccaagaagctgatgatgaccctgaaaaaaaccctgattgagtccaaactacctgtcattacctgctatgccgatgccaagcctggtctgcagacacatggcttcatcatcagggtcaaggactatggctgcattgtgaagttctacaacaatgtgcagggactggtgcccaagcatgagctcagtactgagtatatccctgacccggagagagttttttacactggccaggtggtgaaggttgtcgtattgaactgtgagccatccaaagagaggatgctcttatccttcaagctgtcgagtgatccagagccaaagaaagagcctgcaggacacagtcagaagaaaggaaaagccattaacattgggcagttggtagatgtgaaggttttagagaagaccaaagatgggctggaggtggctgtcctgccccacaacatccgtgctttcctccccacatctcatctgtcggaccacgttgccaacggcccattgttacatcattggctccaggcaggtgacatccttcaccgagtcctgtgtctgagccagagcgaggggcgtgttcttctttgcaggaagccagccttggtctccacagtagaaggtggccaggatcccaagaacttctcagaaatccatcctggaatgctgctcattggttttgtgaagagcatcaaggactatggcgtgttcatccagctcccctcaggtcttagcggactggccccaaaagctatcatgagtgacaaatttgtgacctccacaagtgaccactttgttgagggccagacagtagcggcaaaggtgaccaatgtggatgaggagaagcagcggatgctgctgtcactgcggctgtcggactgtggtctgggggacttggctatcaccagcctcctcctcctgaatcagtgcctggaggagctgcagggcgtgcgcagccttatgagcaaccgagactctgtgttgatccagacgctggccgagatgaccccaggaatgttccttgacctagtggtgcaggaggtgttggaagatggctctgtggtattcagtgggggtccagtgcccgacctggtcctgaaagccagcagataccatcgcgcagggcaggaggtggaatctgggcagaaaaagaaggttgttatcttaaatgttgatcttttgaagttggaagtgcacgtttcccttcaccagggacttggtggaatagaaaagctagaaagctgaggaaaggcagcgaacaccaggcgattgtgcagcacttggagaagtcctttgccattgcctccttggtagagacgggccacctggcagctttctccctgacctctcacctcaacgacaccttccgctttgactcagagaaattgcaggtgggacagggtgtctccctaaccctcaagaccacagaaccaggagtgactggccttcttttggctgtggaggggccggctgccaagaggaccatgaggccgacccagaaggactctgagacagttgatgaggatgaagaagtggatccagctctgactgtagggaccataaagaagcacaccctctccatcggggacatggtcacagggactgtcaagtccattaagcctacccatgtggttgtgactctggaagatggcattattggctgtatccatgcctcccacattctagatgatgttccagagggcacctctcctactaccaagctgaaggttgggaagacggtcactgcccgagtgattggcgggcgagacatgaagacattcaagtatctcccaataagtcaccccagattcgttcgaaccatcccggagctgagtgttcggccaagtgagctggaggatggccacactgctcttaacactcactctgttagccccatggagaagattaaacagtaccaggccggccagactgttacttgcttcttaaagaaatacaatgtggtgaagaaatggcttgaggtggagattgccccagacatccgggggagaattcccttattgctcacttctctgagcttcaaggttctgaagcatccagataagaagttccgggttggccaggccctgagggccaccgttgttggcccagattcctccaagaccttcttatgtctgtccctcacaggtcctcacaagcttgaggaaggggaagtggccatgggccgagtggtgaaggtgactcccaacgaggggctgaccgtctccttcccctttgggaagataggaacagtcagtatatttcacatgagtgactcctactccgagacgcccctggaagacttcgtcccccagaaggttgtcagatgttacatcctgtccactgcagacaacgtattgactttgtcgctgcgatcatccagaacaaacccggagacgaaaagcaaagtagaagatccagagattaactccatccaggacattaaggaagggcagcttctgaggggctatgtagggtccatccagccacacggtgtgttctttcgccttggcccctccgttgtgggtttggctcggtactcccatgtctcccagcacagcccgtccaagaaagccctttataacaaacacctccctgaagggaagctgctcacagccagggtcctacgccttaaccaccagaagaacctggtagagctgtctttcctccccggagacactgggaagccagacgtgctttctgcttccttggaagggcaacttacaaagcaagaggagaggaaaacagaggctgaggagagagaccaaaaaggggaaaagaaaaatcagaaaaggaacgagaagaagaaccagaaggggcaggaggaggtggagatgcccagcaaggagaagcaacagccccagaagccacaggcgcagaagcggggcgggcgggagtgccgggagtctgggagtgagcaggaaagagtgagcaagaagccaaagaaagccggcctgtcagaggaggacgacagccttgtggacgtgtactatcgggagggaaaagaggaggcagaagagacgaatgtgctgcccaaggagaagcaaaccaagccagcagaagcgccccggctgcagctgtcttcaggcttcgcttggaatgtgggactagactctctgaccccggccttgccacctctagcagagagctcagacagcgaggaggatgagaagccacaccaagccacgataaagaaaagcaagaaagaaagggagttggagaagcagaaggcagagaaggaactgtcccgcactgaggaggcgctgatggatcctgggcggcagccagagtccgcggatgattttgaccgactggtgctgagctcccccaacagctccattctgtggctgcagtacatggctttccacctgcaggccacggagatcgagaaggcccgtgccgtggctgagagggcccttaagaccatctccttcagagaggagcaggagaagctgaacgtgtgggtggctctgctgaacctggagaacatgtacggctctcaggagtccctgaccaaggtctttgagcgagccgtgcagtacaacgagcctctcaaagtctttctccacctggctgacatctacgccaagtcagagaaattccaggaagctggtgaactctacaaccggatgctgaagcgtttccggcaggagaaagctgtgtggatcaaatacggcgccttccttctgcggaggagccaggctgcagccagtcaccgcgtgctgcagcgagccctggagtgcctgcctagcaaggagcatgtggatgtcattgccaagtttgcccagcttgagtttcagctgggggatgcagagcgggccaaagccatttttgagaacacgctgagcacctacccaaagcgcacagatgtctggtcggtctatatcgacatgaccatcaagcacggcagccagaaggacgtccgggacatctttgagcgggtcattcatctgagcttggcccccaagagaatgaagttcttcttcaagcgctacctggactacgagaagcagcatggcactgagaaggatgtgcaggcagtcaaggccaaggccctggagtatgtggaggccaagagctcagtgctagaggactagtggcaggctggctctgtgggacactgtcaacaatgggccagcccggccccgcctcgagtgcctgggcactcggaaaactgttacctcaggactctatttaaatgctgctttttctgcagcacgcttggggaaatcctgtcaggatgaaaaggaagttgagattttttaaatccctcttcgcttgctttattttcagtaccaacttgttatctttttccttatctgaggctacctggggattgtgggcagcaggcccctggactcccagaaatgctgagggtccctcttccaggggagttccctggggagcaagagtagaggggctattcccgagggtcctgtggtcagggtcctgctttgtccctggcaggctgtcagtccagctggagggggtcagtaggctccagggagtgggccctcccctccgatcttggagtctctgggtgttccttcagcctcagcctcactggtacctctctgccctttaggggaggctatgaagtcttggaaaggaggacaaaatcagagcccagagggggaaatggagaaacctgggctgctgaggaaagccacgggtgttggcgtgaactgatgatgtctcatcccacgcccactatggccacattacctaacctctccatatctgggctattcaaggtcttggaggccagcacagacccagctagttgttgaagccagttcttttttgtcttggtcatgagggaattaaacgttttctctggcagaa

SEQ ID NO: 2486 - DNA, 3428 bp, Homo sapiens
ggagaaacggagcccttggaagttgtacccttaggttcccctgcggttctgggcccaggtctgcagcctccactctgggcttgccggctgtgaggtgcgctggttataggactgtgtgggggctgcatatcaggtgatctcagctatcaccttctcccagcacctggcttccagctcatggggtgggactatcccactcacccctctgctataggcactgcccatcttatgctgctggccctggcctcacctggtcacttccaccaacaggagctcccagataacagtgggttgctggacagatcaggctgggactcttaaggggtgggggacgtggggccttcagtgctttatcccctaggaaagggtgcacgttatcccaagggagcccccaggaagtggggagggaggggggaggagcatgtctaggtgctgaccacctggagcacttggccagcaagtgggccgcatgctttgggagcaatgggtgacccagcaggaagcacaaaagaccggccagtgtgccatcatcaagggctgctgagcagcttgaagagccactgggtggggagggcacacggggaggtctcagctggggctgcccctggaggacagggcagggaacttgagggctgaggacagaaatctcacatgactccaggaaatagaggaagaggaggatgctgagcgagggattgtgagggagtgggggtaggtcagagggggctgaactgcaggaagccagggggagtcgtggaccactggagctggccagccccagggcattggggacaaggccaggtcagagggagacagtgtgggcctggtgggtggaccctggcagaggccctcttgtcccccacaaggccaggccacactgtgattctgcctgtacctgagcatctgtcctgtgctcctaggccggagaccactgtgtgtcaggtggggcggttggctgagtcccagagaaaaacactcctcactgggcactcttgatgcttgcacacaccctgtggtttatttggtggtcagtaaggaacgtctttgctgctaagtggaagaaagctaatggaacgtaatcaaaatagtggtttaattgacgaattttacttgcacctgtgccttcttcagatcctacctgcctacttagtttacgtgaaggccgactgcaccatgccccccaaccccgacccccaccacacacaacggggccattgtcatgctaggtgcttgctttccccacctcagctccggagatgtgatggtctttggctctggaggtctcggccagcctgtcctccatcctgttctcgttctcgggcaccaccagcagccggtgctgggttttggctccaagcttgtggtcgggccggtggtcgggcctcaagcctgtcttggtgtccagtttgcactcagcgcggtacttgccctccccctccctcttgaaggaggcagaagacgtggcttttgggcttggggggctgcagccacgagtggcttaggatctcatcgatgtggagccgcttggctgacgtcgggcctgcagcatgcggtagatgaggtccttgcactcgcaggtcaggttcttggagcgcgggaagtccacacggtgctccttctggatacgcagcatcttcctgatgtcggagtcgtcatagggcatggagccgcagaccatgatgtacaggatcacgcccaggctccagatgtcatacaccttgggctggtaggggatgctctgcagcacctcgggggctgcatatgctgccgacccgcagaaggtcttgctgaggatgatgcgcccattgctgtcccgcaggcagcgcttggagaagccaaagtcagacagcttgatgttgaagtccttgtcgaggagaaggttctcgcacttgaggtcccggtggacgatgtccaggtcgtggcagtacttgacggcggaggagagctgtcggaacatcttgcgtgccacgtcctcatgcagggctccctggcacttgatgaactcgaggaggtcgccctggacgccaagctccatgatgatgtagatccgtccgtcagaggtctcaaagatctcgtaagtcttgatgatggagccgtggttgacagttgccaggatgtccatctcccgaggaaggaatctctccacaaagtcagtaggggttttcttgcgggcgatgatcttgacagccacattgaacttgaggcgctcagagtaggcagatttgacttttgcgtaggaacccttgccaagattgatgcctacgatgtaacccttcttccttaggactgtggcatcgtccatggtgccaggagcgactggcgccgctgccgtctacatccccccgtcatgtgggccagcaggcattgtcctcatttacactaccggaggcgtctggctgggctgccctgggctgggcttcgactcaggggtggaacactcagcattgtctccgggtgacttcagccaatgaactcataaagccaaggagtgggggcggggactgggctgagggagaacagggtctctggaaccgtggaagccaggctggtctggcaggagcacccactccccgcccgctggaaggaagcctgtccccaggacaggactctggtggccctgctgctgctgcattggtttccctgtcacaagtcaagctggaggggaggcggcccacgtccagcctgtttgcatcacctggctgtggggactgaccctgcattggtctttgtcccactagggtgggtttcctgcagcttctttggctatgaagaaaagcacccccagggctgtgtccttggtgtggtaggacagttgtccctgacagtcacccagacaggcctgcatagcaccccagttacacagacagatttccacagcactgccttaccattgagcacatagttaaatctagggaaatcagtgcccagacatcaaagctagaaatgaaacatggtcagcaggagccttgcatgggcttctcttttgctggagcaagccaaaataataggaacggttttacattcctagtgccaggacccatctcgggtcgacaaaatctgaagacaagttaagggaacaggcagctgtttgaatagatcaattggatagtctaaggcagctctctggaccaagctgtaaaggagatacaatcgaaataatcactccggtaccacagtagacaggccttgaaggcactgggccccttttaatcggacttagcaagcattttttttgcctctgaccttctccttggaacaaaattagttaccgagtagacttaggtgattgctgtactgcatgtaggcacataaccccaacctatataaacagtaagaaaattgtagcactttgagttggtctgctggaattatctccagccttctccctgtatccagttacactgactaaactcccttctctcctacac

SEQ ID NO: 2487 - DNA, 827 bp, Homo sapiens
  misc_feature (1)...(827): n = a,t,c or g
ttttttttttttctggctgacaaagatatttattgagggtttactgggtacagcgagaagggctgaatggcttgggatgcagagagagacccctcccctgggatcctgcagctccaggcccctgtgggtggggtgggggctggaacctatgaacattctgcaggggccactgacttctccacggtgctcccttcttgcataacctggcagctgtagcttctgcgggacctccactgctcgggcgtcaggctcaggtagctgctggccacgtacttgttgttgctctgtttggagggcgtggtcttctccacgctctgggtgatgagggtaccatctgccttccaggtcaccatcaagattcccggataaagttattcatgagacacaccagtgtggccttgttggcttggggctcctcacaggacggcaggaacagaatgaccgacggggtagtcttgggctgacctgtgtggacagaggagggggtgagagatggcagagggagtgtggggtgttgtggagcgcctctctctgtctaaagtctctgggagggttcatggtgtggccgtctggtccacccagggcctctccttccctcctcattccctcctttccactggagccctctgcagagcagacagccctgtgccttcctaggagcccttcccaagtcacctttcccaggtgtcctggcccagccctttcctctgcagcctcagtttccccgtgtgtacccagggcaggctgtgctccctccttcctggtttctgggaattccaccgcnctgactaatgtcatcagtgnntcaattnncccccctcccctcg

SEQ ID NO: 2488 - DNA, 2464 bp, Homo sapiens
gataaacccacaagacacaaaacatacctttcgagcagttgggccaagatggcggccgccgagggaccggtgggcgacggcgagctgtggcagacctggcttcctaaccacgtcgtgttcttgcggctccgggagggactgaaaaaccagagtccaaccgaagctgagaaaccagcttcttcgtcgttgccttcgtcgccgccgccgcagttgctgacgagaaacgtggtctttggcctcggcggagagcttttcctgtgggacggagaagacagctccttcttagtcgttcgccttcggggccccagcggcggcggcgaagagcccgccctgtcccagtaccagagattgctttgcataaatccacccctgtttgaaatctatcaagtcttgttaagcccaacacaacatcatgtagcacttataggaataaaaggacttatggtattagaattacctaaaagatgggggaagaattctgaatttgaaggtggaaaatcaacagtgaattgtagtaccactccagttgcggagagatttttcaccagttccacctctctgactctaaagcatgctgcatggtatccaagtgaaatcctggatccccacgtagtgctgttaacatcagacaacgtaatcagaatttactcactacgtgagccgcagacacccactaacgtgataatactttcagaagccgaagaggaaagtctagtactcaataaaggaagggcgtataccgcatctctaggagagacagcagttgcatttgactttgggccattggcagcagtcccaaagactctatttggacaaaacggcaaagatgaagtagtggcatacccactgtacatcttatatgaaaatggagagactttcctgacatacatcagtctgttacacagccctggaaatattggaaagctgttgggtccattgcccatgcatcctgcggctgaagataactatggttatgatgcgtgtgctgtactctgcttaccctgtgtccccaatatcttagtgatcgctactgaatcaggaatgctgtatcactgtgtcgtgctagaaggggaagaagaagatgaccacacgtcagaaaagtcctgggattccaggattgacctcattccttctctgtatgtgtttgaatgtgttgagttggagcttgctttgaaactggcatctggagaggatgacccttttgattctgacttttcttgtccagtcaaacttcatagagatcccaagtgtccttcaagatatcactgtactcatgaagctggtgtacatagtgttgggctaacttggattcataaacttcacaaatttcttggatcagatgaagaagataaggatagtttacaggaactctctacagaacagaaatgctttgttgaacacatcctttgtacgaagccattgccctgcaggcagccagctccaattcgaggattttggattgtacctgacattctgggacccacgatgatctgcatcaccagtacctatgaatgcctcatatggccgttattaagtacagtccatccagcgtctcctcccctgctttgtactcgagaagatgttgaagtggcagagtctcccctccgtgttctggctgaaaccccagattcctttgaaaagcatattagaagcattttgcaacgtagtgttgccaatccagcatttttgaaagcttctgaaaaggacatagcccctcctcctgaagaatgccttcagctcctcagcagagccacccaggtgttcagagagcagtacattctcaaacaggacttggcaaaggaggagattcagcggagggtcaaattattatgtgaccaaaaaaagaaacaactagaagatctcagttattgtcgagaagagaggaaaagtctgcgggaaatggctgagcgtttagctgacaaatatgaggaagctaaagaaaaacaagaggatatcatgaacaggatgaaaaaactacttcacagttttcactctgagctcccagttctctctgatagtgagcgagacatgaagaaagaattacagctgatacctgatcaacttcgacatttgggcaatgccatcaaacaggttactatgaaaaaggattatcaacagcaaaagatggagaaggtgttgagtcttccaaaacccaccattattctcagtgcctaccagcgaaagtgcattcagtccatcctgaaagaggagggtgaacatataagggaaatggtgaagcaaatcaatgatatccgcaatcatgtaaacttctgacaccaccaggagctgactcacacctgaactgaacaccattgaaggcttaaacccatattgtaaaacaggtagaattatctaatttataaaaaggtgttttgatgacctttggtgtggttcatctttttaaatatgttgttttataataattgagtaaatgcttttatttaaaatttggaatgtgctttat

SEQ ID NO: 2489 - DNA, 2464 bp, Homo sapiens; identical to SEQ ID NO: 2488

SEQ ID NO: 2490 - DNA, 4454 bp, Homo sapiens
ttttttttttttagcacaaagcattttaggtttatttaaataaaaattataatttatacaatactttttctttaaacaaacaaagttttcttaaaaaaatgttacaggagaatttttttcatcggttcttaatacagtacaatccttttgttgaacaaaagtcacactggcaatgattatttacagatccaaaatagactcaggcttcagacataaaaaatttaacattcgtctagttcagtgattagtcacagaaattaaacatctgcccagatgtacacaatttggtaaaaactacagcttctctccacggggagcccagagcccgtgccgatccgcgctccgctcccgaggacttccagggaggggcctgtgctggcagcagagccagtcggtggccctcccccgaccccccgctccccgaatgtggccctccctgggggcttcggccacacctggcacgtggtcagttttcatctccctttctccacaaaagggactcgaactaaaccacccgacgctggtaaagccccatctgccccagggacccctcccgctgtgtttggggactgaatcccagcacctaggaagaggcgctcattggccccgaggccccggacccatccttgggcactgccgggccctggggagagaggtgtggccattgtctgcgggcactgcctctgcagccgcccctgggggtgggtcagtgcccaccctgtgttgcctcaggcgccaaggtggggttcactgggatatgtccccctcccctggtgcaccaagagagccagtcccctacaggagccagacccacggctcagagcgggttctgtccccattcgggaaaggccgccgtgtggtcatcctgacgccaacgtccgcgcagtccagagccacgggggctccgctccaccgcctgggataggacatgtgctgaatctggtgatcggcgcagctccccccaaagcacccccggcaccagcgtgtgactctgcggcccctcgtgaagggggtgaaaccagcccatgccgccggatccctcacccacaccagcaaatgaggatcggagcaaagataaaaattacatctgaaaaaggatacaaaaataagaaaaccagcttgctcgctgtaaaaaatagaatcttctgtttcttcaaaaaacaacaatctcaacgacacccaagggactcaggacaagctgagggagctgcgggatccgccccagcagacacgcaggcccgcggggtggccacctccttccaggaggcccaagccgcctttccctcccttcagcccagcgcaggcggccccagcagaccaggcctgcgggcgctccctccacaaatgccaccttgttcccgggaagcccaggcttccctggggcagggcgggggctgggggggtctgtgcccggaccggcaccggctaggcacgcgggggagggaacgctgtcgcatgtcggctgcaggcagtgcaggcccaggcctctgggctcggctcacggttgctccctaaagcacaggggctgccagagcctctcggatggcccaaaggcggctgcagcctgggccaccatggtcccggaacactcctccccacttcctcccccaaccaacccaggcaaccgcagcctgggggccatgtgccagacatgccacagtgctcggagcacctccaacagccttcgcggatgttctcctgggccttccaaagagcaaagtgtgagaaagatgtgcttttacctgcaccatcctgtgcccttactggtccccagctacagacctcctggccggcgtgtcaggccgagagcagcaggcaggcccttacagacacggtgctgagcgccctggaggccagcaaggaaggtgccaccaaagacactgagggcaggtgaggggtgggcccttctcaccctctctgttcccgtggagcgagtgtggagcgcaggcagggtcactgcgcccggccccagcccggcaccaagggcaaatgccacaggagggtctcatgtaagaggaaggagggccgccaggcccgtttctcggtggttggtgaaaggcccccatgtccctccttgacgacatctttctgtccccaggaggaagggccccgcactcttcagctatggctttggtggtggacgagcttctggcctctggagagcgggacacaaggttgcgagaacctcttggggtggctggagaggtttctctgtccaggctggaacggagaagggcagggccaggggtcctgtgtgtcttctccacgggcccccgagggcctctgccccctcccccagtctgcgggtggccctcagaggcacctgacgtgccctgtgggagaggggcacccccgtccctgtgagccctggccccttcttggtcgataaaacgcagaggtcaacacaatagaaccacaggtccaggagaattattgccaaagctcatgaggatgtcccattgttttcccttccaaattgttaaaaaaaaaaaagaaaaagaaaaagaaaaagaaaattccagcaacgtcctgggcaagtcaatactagctgtccccgccagacgctgccgctgaggtgatcttgatgtactggctgagaatggtctcgaaggcctcatccctgtgcaccatggcaccaaacacgagcggtttctgggtggatggcgtcgacacggcaatccccatgcctgagcctgggaggacagacaggaccttgtacttctggatgtccgtgatgtccactagcttgatgactttgttcctctttgaggacccagatttggagctttcgaagcacaagtaattctgccgtgacgtagagcaccccgttcctgatgtagtccgtgggcatcttccggtccctgttgatgaggcagcagcgccagccattctcgcacaccgccagcggacgctcgttttctgtcagattgaagatctcgtggaaattgcccttcttggtgctgtggaagcgaccggcgtcctcctctttacccaggccggccggtgcgctgggtacgtagctccgtgacgaggtcgtctgcagcctgcgtgagactgcggcgctggagcgctccttgagctgcgggtcggtggggagactcctccagatgatatagggcgtgtcgtacttggcgcgcagcctcgggcagcgtttaaagatgaaatcaatgaggaagaacttgataccagcatagagtcccacggcaagccccaccaggcggtaggggaagaagcaggaggccaggaaggcagcccagagcgccacatacagcttctgtgtgatctccggctggacccacatgaacaagttcttgatcttctccaggatgtcagccatcttcccgaaaaggttctgggctttctgggcgacgtccagcaccagctggaacttctcagacacagtcaggtcttcctttggaggttccacgggctcagacacttcgggcacgatgctccactgtatccgccaccccctggcgatgaggtaattgagggataacctcagaattgctagaaataagaacaatgggatggcccagccatgccacacggcattcatgtacacggtgaaggcaatggcagacgtgtagacggagtaccagtcggataaggcagagaggttcttcacaaagttagtgaccggcttggcaccgcgcttgagccgtctcatattttcagttaacctgcgggcgctcaggggttcctctgtctccacagtgttctcctcgggctggaaccggaagtcctccacgtactccccgaaccgctcgtagaaccacttctgcaggcgcgaggacagcccctggctccggcgctctgctccattgctggcctgggcctgcccttttgggggctgctgagccatctgctcctcggttctggccttcagcacctcctgcaccttctgctccagctccatccgccgctgccgctcgcggtccagctcctgccgcagcatctccgcgttggtttcttctcgcagcttccggagctcctcctgtaagaaatgtttttccaataaggcaatttccaggtgacctttgatctcattcagtcgatcaaactctgtccggttaaagtcctggactcctgtggccatgatgagggtccctggaccagcagggtccctcagctcctcgctgtcccggggcgaggtccgcggtaccttcagggggatttcgtcgctgcattcggtgtccgaggcatttggagactccgctagatcgaggaagtcatctctcttgtgacctctgaacctgattttgtccaacctccttagcatgttcagcactgaggtcctctgcttcaccctaacatgacgctcgggttccctccgtctgtctcagatacatccagaaacactctttcactgtggctccttcaggtcctggcccagaaccagaatgtgcttcgaggacccaccaaccatagcctccaagccaccccacaccagc

SEQ ID NO: 2491 - DNA, 1229 bp, Homo sapiens
tacggctgcgagaagacgacagaagggggcagcagcggcagccgagactcacggtcaagctaaggcgaagagtgggtggctgaagccatactattttatagaattaatggaaagcagaaaagacatcacaaaccaagaagaactttggaaaatgaagcctaggagaaatttagaagaagacgattatttgcataaggacacgggagagaccagcatgctaaaaagacctgtgcttttgcatttgcaccaaacagcccatgctgatgaatttgactgcccttcagaacttcagcacacacaggaactctttccacagtggcacttgccaattaaaatagctgctattatagcatctctgacttttctttacactcttctgagggaagtaattcaccctttagcaacttcccatcaacaatatttttataaaattccaatcctggtcatcaacaaagtcttgccaatggtttccatcactctcttggcattggtttacctgccaggtgtgatagcagcaattgtccaacttcataatggaaccaagtataagaagtttccacattggttggataagtggatgttaacaagaaagcagtttgggcttctcagtttcttttttgctgtactgcatgcaatttatagtctgtcttacccaatgaggcgatcctacagatacaagttgctaaactgggcatatcaacaggtccaacaaaataaagaagatgccttgaattgagcatgatgtttggagaatggagatttatgtgtctctgggaattgtgggattggcaatactggctctgttggctgtgacatctattccatctgtgagtgactctttgacatggagagaatttcactatattcagagcaagctaggaattgtttcccttctactgggcacaatacacgcattgatttttgcctggaataagtggatagatataaaacaatttgtatggtatacacctccaacttttatgatagctgttttccttccaattgttgtcctgatatttaaaagcatactattcctgccatgcttgaggaagaagatactgaagattagacatggttgggaagacgtcaccaaaattaacaaaactgagatatgttcccagttgtagaattactgtttacacacatttttgttcaatattgatatattttatcaccaacatttcaagtttgtatttgttaataaaatgattattcaaggaaaaaaaaaa

SEQ ID NO: 2492 - DNA, 4563 bp, Homo sapiens
gctctggagttcccgggtcgacgatttcgtagggccggtggcggcggcggctgcggctacggccggagacggcagtgttggcggtagtggtgggtggcaggggcctgtgaccgggagctgcccccggacccgggcaccatgagccaaggccccccccacaggggagagcagcgagcccgaagcaaaagtcctccacactaagcggctttaccgggctgtggtggaggctgtgcatcgacttgacctcatcctttgcaacaaaactgcttatcaagaagtattcaaaccagaaaacattagcctgaggaacaagctgcgtgagctctgcgtcaagcttatgttcctgcacccagtggactatgggagaaaggctgaggagctgctgtggagaaaggtatactatgaagttatccagcttatcaagactaacaaaaagcacatccacagccggagcactttggaatgtgcctacaggacgcacctggttgctggtattggcttctaccagcatctccttctctatatccagtcccactaccagctggaactgcagtgctgcatcgactggacccatgtcactgaccccctcataggatgcaagaagccagtgtctgcctcagggaaggagatggattgggcacagatggcatgtcaccgatgtctggtgtatctgggggatttgtcccgatatcagaatgaattagctggcgtagataccgagctgctagccgagagattttactaccaagccctgtcagtagctcctcagattggaatgcccttcaatcagctgggcaccctggcaggcagcaagtactataatgtggaagccatgtattgctacctgcgctgcatccagtcagaagtgtcctttgagggagcctatgggaacctcaagcggctgtatgacaaggcagccaaaatgtaccaccaactgaagaagtgtgagactcggaaactgtctcctggcaaaaagcgatgtaaagacattaaaaggttgctagtgaactttatgtatctgcaaagcctcctacagcccaaaagcagctccgtggactcagagctgacctcactttgccagtcagtcctggaggacttcaacctctgcctcttctacctgccctcctcacccaacctcagcctggccagtgaggatgaggaggagtatgagagtggatatgctttcctcccggaccttctcatctttcaaatggtcatcatctgccttatgtgtgtgcacagcttggagagagcaggatccaagcagtacagtgcagccattgccttcaccctggccctcttttcccacctcgtcaatcatgtcaacatacggctgcaggctgagctggaagagggcgagaatcccgtcccggcattccagagtgatggcacagatgaaccagagtccaaggaacctgtggagaaagaggaggagccagatcctgagcctcctcctgtaacaccccaagtgggtgagggcagaaagagccgtaagttctctcgcctctcctgtctccgccgtcgccgccacccacccaaagttggtgatgacagtgacctgagtgaaggctttgaatcggactcaagccatgactcagcccgggccagtgagggctcagacagtggctctgacaagagtcttgaaggtgggggaacggcctttgatgctgaaacagactcggaaatgaatagccaggagtcccgatcagacttggaagatatggaggaagaggaggggacacggtcaccaaccctggagccccctcggggcagatcagaggctcccgattccctcaatggcccactgggccccagtgaggctagcattgccagcaatctacaagccatgtccacccagatgttccagactaagcgctgcttccgactggcccccacctttagcaacctgctcctccagcccaccaccaaccctcatacctcggccagccacaggccttgcgtcaatggggatgtagacaagccttcagagccagcctctgaggagggctctgagtcggaggggagtgagtccagtggacgctcctgtcggaatgagcgcagcatccaggagaagcttcaggtcctgatggccgaaggtctgcttcctgctgtgaaagtcttcctggactggcttcggaccaaccccgacctcatcatcgtgtgtgcacagagctctcaaagtctgtggaaccgcctgtctgtgttgctgaatctgttgcctgctgctggtgaactccaagagtctggcctggccttgtgtcctgaggtccaagatcttcttgaaggttgtgaactgcctgacctcccctctagccttctgctcccagaggacatggctcttcgtaacctgcccccgctccgagctgcccacagacgctttaactttgacacggatcggcccctgctcagcaccttagaggagtcagtggtgcgcatctgctgcatccgcagctttggtcatttcatcgcccgcctgcaaggcagcatcctgcagttcaacccagaggttggcatcttcgtcagcattgcccagtctgagcaggagagcctgctgcagcaggcccaggcacagttccgaatggcacaggaggaagctcgtcggaacaggctcatgagagacatggctcagctacgacttcagctcgaagtgtctcagctggagggcagcctgcagcagcccaaggcccagtcagccatgtctccctacctcgtccctgacacccaggccctctgccaccatctccctgtcatccgccaactggccaccagtggccgcttcattgtcatcatcccaaggacagtgatcgatggcctggatttgctgaagaaggaacacccaggggcccgggatgggattcggtacctggaggcagagtttaaaaaaggaaacaggtacattcgctgccagaaagaggtgggaaagagctttgagcggcataagctgaagaggcaggatgcagatgcctggactctctataagatcctagacagctgcaaacagctgacttttggcccagggggcaggtgaggaggatccgagtggcatggtgaccatcatcacaggccttccactggacaaccccagcgtgctttcaggccccatgcaggcagccctgcaggccgctgcccacgccagtgtggacatcaagaatgttctggacttctacaagcagtggaaggaaattggttgatactgacccccaggccctgcagtggggctgactccagatctctcctgccctccctggcagccaggaccagcacctgtagtcaccccaccacacgcagactcatgcacgcacacaggagggaggcctagctgctcagaggctgcagggagggcccaggagccggctgggagggtggggtccctttgttgccaagacgttaggaaagcgaggaaagtgcttggattaggagggtcttgtgggcccctggccagccttcctgcctcagctcccctgctgtctccaggggcaggtggtaggcatgggtacctgcatttcactggagtgggttcttggatctctgaggggaaggaacagcaaaagaggcccttcttcctcacccaagatgcagggtggttggggccaggagtttggaccctctaggtcttgggggaagagctgggtaatacctggtgtctgagtgattctctgcagacccttcccctcctcaaggatcacccatcctcctttcagccccctttatggggaccaggcagctctggagccagccacaggggctgttagagaagcaaggcctggagtggcctgcaccgagtagcagggtcagggttcgtgtgctcctcctcctgctgcaggggctgcacatcccattgccccacttctgctttgtgtctccctctgtctagcttccagggcagggagcaggccccacctagggctgcaggcagtctggcctgtgccagcacggtctcctgtgcccaccagccccacaggtgctgtgctttgtgctcttggctgctgtgctgggacagaatgggatgccaggaagagaagaaagggggtgcagtctgaggccaccaccccccttcctatctaagggagggctgaagacaaggggccggcattcagtgggcagcagaaaggagaggctccttgaagctgctcagtcagaggcccccgtccctccttttgccttccgcaggactgaagacctgaaggggctggcttttggagtgttgaggtgaatatctgggagcagagatcatgaatagctcagggcagtgaatggcgcaccaagagcagggctgtgtgtgggaggctgcagccaggattgcctcagctcctccccctcaggctgggaggatagcacaggctaggggctcggggtggagggtctcagctctgctgcccccaccccagtactagcctagcttcccaagctgtggcttagaggatagttggcttcctgcctctctcctctaaaatagcaagtctgggaaatcctggggtgagtggagtcaccccactcccagttgctggcagagactgagactaaagcatcacttaataaaccccccaagccccaaaaaaaaaa

SEQ ID NO: 2493 - DNA, 3904 bp, Homo sapiens
atgacggagcctagggagaggagaggttacagtgtaccacctagaccagaggtcgggacccaggccacggagtggagagtagaagaatctaacttcaacaagatcttcctgaaaaaagacgctgagcttggacggtccaaccacctccctacctgggataagccggaggatgcttcttggcttccccaaagctgtcttggtggtgatgctgtggcaaccacaggggagattcacgaggagaaagcctggaagaccagagccctggaagtggggcagccagcccagcgggacattcgtaggggcgagctctgggggaaggagcacggggctgatcaagccatccaggaaacactggaggacttgtccagccttgaaagaactctagtggtttctgaatctagcccacttggcggggattgtcaggaggtgaccactctcacggtgaaataccaagtgtcagaggaagtgccatctggtacagtgatcgggaagctgtcccaggaactgggccgggaggagaggcggaggcaagctggggctgccttccaggtgttgcagctgcctcaggcgctccccattcaggtggactctgaggaaggcttgctcagcacaggcaggcggctggatcgagagcagctgtgccgacagtgggatccctgcctggtttcctttgatgtgcttgccacaggggatttggctctgatccatgtggagatccaagtgctggacatcaatgaccaccagccacggtttcccaaaggcgagcaggagctggaaatctctgagagcgcctctctgcgaacccggatccccctggacagagctcttgacccagacacaggccctaacaccctgcacacctacactctgtctcccagtgagcactttgccttggatgtcattgtgggccctgatgagaccaaacatgcagaactcatagtggtgaaggagctggacagggaaatccattcattttttgatctggtgttaactgcctatgacaatgggaacccccccaagtcaggtaccagcttggtcaaggtcaacgtcttggactccaatgacaatagccctgcgtttgctgagagttcactggcactggaaatccaagaagatgctgcacctggtacgcttctcataaaactgaccgccacagaccctgaccaaggccccaatggggaggtggagttcttcctcagtaagcacatgcctccagaaggtgctggacaccttcagtattgatgccaagacaggccaggtcattctgcgtcgacctctagactatgaaaagaaccctgcctacgaggtggatgttcaggcaagggacctgggtcccaatcctatcccagcccattgcaaagttctcatcaaggttctggatgtcaatgacaacatcccaagcatccacgtcacatgggcctcccagccatcactggtgtcagaagctcttcccaaggacagttttattgctcttgtcatggcagatgacttggattcaggaaacaatggtttggtccactgctggctgagccaagagctgggccacttcaggctgaaaagaactaatggcaacacatacatgttgctaaccaatgccacactggacagagagcagtggcccaaatataccctcactctgttagcccaagaccaaggactccagcccttatcagccaagaaacagctcagcattcagatcagtgacatcaacgacaatgcacctgtgtttgagaaaagcaggtatgaagtctccacgcgggaaaacaacttaccctctcttcacctcattaccatcaaggctcatgatgcagacttgggcattaatggaaaagtctcataccgcatccaggactccccagttgctcacttagtagctattgactccaacacaggagaggtcactgctcagaggtcactgaactatgaagagatggccggctttgagttccaggtgatcgcagaggacagcgggcaacccatgcttgcatccagtgtctctgtgtgggtcagcctcttggatgccaatgataatgccccagaggtggtccagcctgtgctcagcgatggaaaagccagcctctccgtgcttgtgaatgcctccacaggccacctgctggtgcccatcgagactcccaatggcttgggcccagcgggcactgacacacctccactggccactcacagctcccggccattccttttgacaaccattgtggcaagagatgcagactcgggggcaaatggagagcccctctacagcatccgcagtggaaatgaagcccacctcttcatcctcaaccctcatacggggcagctgttcgtcaatgtcaccaatgccagcagcctcattgggagtgagtgggagctggagatagtagtagaggaccagggaagcccccccttacagacccgagccctgttgagggtcatgtttgtcaccagtgtggaccacctgagggactcagcccgcaagcctggggccttgagcatgtcgatgctgacggtgatctgcctggctgtactgttgggcatcttcgggttgatcctggctttgttcatgtccatctgccggacagaaaagaaggacaacagggcctacaactgtcgggaggccgagtccacctaccgccagcagcccaagaggccccagaaacacattcagaaggcagacatccacctcgtgcctgtgctcaggggtcaggcaggtgagccttgtgaagtcgggcagtcccacaaagatgtggacaaggaggcgatgatggaagcaggctgggacccctgcctgcaggcccccttccacctcaccccgaccctgtacaggacgctgcgtaatcaaggcaaccagggagcaccggcggagagccgagaggtgctgcaagacacggtcaacctccttttcaaccatcccaggcagaggaatgcctcccgggagaacctgaaccttcccgagccccagcctgccacaggccagccacgttccaggcctctgaaggttgcaggcagccccacagggaggctggctggagaccagggcagtgaggaagccccacagaggccaccagcctcctctgcaaccctgagacggcagcgacatctcaatggcaaagtgtcccctgagaaagaatcagggccccgtcagatcctgcggagcctggtccggctgtctgtggctgccttcgccgagcggaaccccgtggaggagctcactgtggattctcctcctgttcagcaaatctcccagctgctgtccttgctgcatcagggccaattccagcccaaaccaaaccaccgaggaaataagtacttggccaagccaggaggcagcaggagtgcaatcccagacacagatggcccaagtgcaagggctggaggccagacagacccagaacaggaggaagggcctttggatcctgaagaggacctctctgtgaagcaactgctagaagaagagctgtcaagtctgctggaccccagcacaggtctggccctggaccggctgagcgcccctgacccggcctggatggcgagactctctttgcccctcaccaccaactaccgtgacaatgtgatctccccggatgctgcagccacggaggagccaaggaccttccagacgttcggcaaggcagaggcaccagagctgagcccaacaggcacgaggctggccagcacctttgtctcggagatgagctcactgctggagatgctgctggaacagcgctccagcatgcccgtggaggccgcctccgaggcgctgcggcggctctcggtctgcgggaggaccctcagtttagacttggccaccagtgcagcctcaggcatgaaagtgcaaggggacccaggtggaaagacggggactgagggcaagagcagaggcagcagcagcagcagcaggtgcctgtga

SEQ ID NO: 2494 - DNA, 2314 bp, Homo sapiens
catttcgtatgaactctcccgccacccgggaacagtggctgccaccgtttgtgttttcccgagtttgaattcttgcaggtgaccaagatggagttttctggaagaaagtggaggaagctgaggttggcaggtgaccagaggaatgcttcctaccctcattgccttcagttttacttgcagccaccttctgaaaacatatctttaatagaatttgaaaacttggctattgatagagttaaattgttaaaatcagttgaaaatcttggagtgagctatgtgaaaggaactgaacaataccagagtaagttggagagtgagcttcggaagctcaagttttcctacagagaaaacttagaagatgaatatgaaccacgaagaagagatcatatttctcattttattttgcggcttgcttattgccagtctgaagaacttagacgctggttcattcaacaagaaatggatctccttcgatttagatttagtattttacccaaggataaaattcaggatttcttaaaggatagccaattgcagtttgaggctataagtgatgaagagaagactcttcgagaacaggagattgttgcctcatcaccaagtttaagtggacttaagttggggttcgagtccatttataagatcccttttgctgatgctctggatttgtttcgaggaaggaaagtctatttggaagatggctttgcttacgtaccacttaaggacattgtggcaatcatcctgaatgaatttagagccaaactgtccaaggctttggcattaacagccaggtccttgcctgctgtgcagtctgatgaaagacttcagcctctgctcaatcacctcagtcattcctacactggccaagattacagtacccagggaaatgttgggaagatttctttagatcagattgatttgctttctaccaaatccttcccaccttgcatgcgtcagttacataaagccttgcgggaaaatcaccatcttcgtcatggaggccgaatgcagtatggcctatttctgaagggcattggtttaactttggaacaggcattgcagttctggaagcaagaatttatcaaaggaaagatggatccagacaagtttgataaaggttactcttacaacatccgtcacagctttggaaaggaaggcaagaggacagactatacacctttcagttgcctgaagattattctgtccaatccaccaagccaaggggattatcatgggtgcccattccgtcacagtgatccagagctgctgaagcaaaagttgcagtcatacaagatctctcctggagggataagccagattttggatttagtaaaggggacacattatcaggtagtcctgtcaaaaatactttgagatgatacacactgtggatgattgtggcttttcttttgagtcatcctaatcagtacttttgtgagagccaacgtattctaaatggtggtaaagacataaagaaggaacctatccaaccagaaactcctcaacccaaaccaagtgtccagaaaaccaaggatgcatcatctgctctggcctctttaaattcctctctggaaatggatatggaaggactagaagattactttagtgaagattcttaggcagttttataaccctttttcctcaatagcctgtttcctgtttttaagattttgcctttgttgttgaaaaagggtttcactctgtcaccaaggcttagtgcagtgacacaattacagctgattgcagccttgaccttcccagctcaagtgatcctcctacctcagcctcccaagtagttaggaccacaggtgtgcacctcatatccagataattttttcaatttttttttgtagaggtggggggtctccctatgttgcccaggcagatctcagactcctgggctcaagcgatcctcacacctcagcgtcccagagtgctgggattacagttgtgagccactgtgcctggcctttttttttttttaaaccttttggttaaacttctctcttcactgcatcccaatccatttacgggcttgcccccttattagggaaggggggtttggggtaaccaacagagactttcacctatattttggctttgacagaaggaaagaggaagagtttctattaaaatctgtcacttgagtgatgtcattcaagtcctattttaggagataaaaacacctttggggactggttaaagtcccccagaaactacaataaagaacaacttttgttttaactcttaatcactttgtaattttgactcaatccttttctggaccgatttttgttaataaatatcaaagtgt

SEQ ID NO: 2495 - DNA, 1665 bp, Homo sapiens
ttttttttttttggcgctgccaaaactcatttttcattaacacggggtggggtcccaggctcaggcccccgggcccgatcatggccccagtccgcacagagcgcccggccctggccgcccgcagctccaccgctcagccagtgatgcgcacatccgtgcggcggcggatccgccgggcccgagccgcctcgggcaggatggcgagcagctgctcttgcaccagcatctccacgatcttgctccttggtgcgggatgtcaggccgcagccactggcggggacaagctcccgcagctgccggaaagcctcccggggacccgccgcatcctggtagcggaactgccggaaacgctggcggaacgtctcgggaccgagtctagagccggcggggcctggtgtggagcgcgcttcagcttcggcctgaggcgctacgctcacgggtgcgggcccgagaggcagctccagggccgcggaggccgcagctcggggcgtagggatggcttcagggaccgcggcgttgggactggaaggctcaggggcaggcggtgaggcctctggcagcgaggagcccacacagttacgctcaggggctgagctcgaaccggctccttccagtttctccggtggcaccgccgcgggactcccagtggccgccaagatcggctccgtagccgccataactccagctccgggcgtcactctttgtccggtagctgtgtgctcagcactgcgtctgcaccagcgaagcgcctgcggcagccggaagcgaaagtctctggcttctctgcgtccaggtcggcgcgcgagcacccggaagccgcttgcgggctcccggaagcggcgccctctagcgttctcgagtcgcatgaggcggctgctgccctcgcggtgcgggagggcgagctgcgcgtggcctgggctccttccgaatggtggcgcctctgagcgccagttcgaggaggagtcggaggaggagcctgaatgtttggagatagacttcaagtcccggaccttatccgtgcgccgcttcggtttgcaggtgacctttgcgtgcgggcgccccttctgattgaccctgatgagctgtagctctgatggcccctccttcgggaatgattagggtgacggctggccggggctcgttcgagtggcgcccggccggtggtgacccgaacaggagagcgggacggcgaccattctctcgggaggggcccatctggagaaagtcctctcgcttggtcaaactaggagggcgatagcaccggccttactgcgacgatgacaaagtacaacacaccgtctggcgcgaaggagatgctcgagaaccctttgctgttgttatttttcgcgtgtcctccgaaaccaagggaaatgcggctctgtgggttctgttaacgtcagcatttaataagtgaactctaaatgcatttgccccttatgggtcgcgctggcctcctgagttgactcagctcttgcaacgtagctagttgataaccctcgaaatatagcgaattgagatgtgctatattgtaaaatacgggacttagtacgaaaaaactgatgtaaaaattatctcaatactttttaatactgattacatgttggaatataatgttttgcatatattgggtcaaataaaaatgttattaatttcaaaaaaaaaaaa

SEQ ID NO: 2496 - DNA, 2383 bp, Homo sapiens
ttcccgggtcgacgatttcgtaacgcggtgtcgctggttcagatctcgcagagctcagagtcctgcatgcctcagtcctcgcctcgctcctcctcgcggaggattctgggaggtgacgtcgcgggtctcggtcgcggggcccgtttgcagagcccgcggcgccgggaggactttgttcttcttcagaagagaaaactgaagaaggaggaatggctgtggggctttgtaaagccatgtcccaggggttggtgaccttcagagatgtggcgctagacttttcccaagaagagtgggaatggctgaagccatctcagaaggatttatacagagatgtcatgttggagaactacaggaacttggtatggcttggactctccatttctaagcccaacatgatctccttactggagcaagggaaggaaccgtggatggtggagagaaagatgtcacagggtcactgtgcagactgggagtcttggtgtgaaattgaggaattatctccaaaatggttcattgatgaagatgaaatatcccaggagatggtaatggaaaggctagcaagtcatggccttgaatgctccagtttcagagaagcctggaaatataagggtgaatttgagctacatcagggaaatgcggagaggcatttcatgcaagtgacagctgttaaggaaatctctactgggaaaagagacaatgaatttagtaattctgggagaagcatacccctgaaatcagtatttttaacacaacagaaagttcctaccatacagcaagtacataaatttgatatttatgataaactcttcccccaaaattcagtcataattgaatataaaagactccatgctgagaaggaatctttgataggtaatgaatgtgaagaattcaaccagagtacgtaccttagtaaagatataggaattcctcctggggagaaaccttatgaaagtcatgatttttcaaagctcttaagtttccactcattatttactcaacatcagaccactcattttggaaaattaccccatggatacgatgaatgtggtgatgcctttagctgttactcattctttactcaacctcagagaattcacagtggagaaaaaccatatgcatgcaatgactgtggaaaagcctttagccacgacttctttctcagtgaacatcaaagaactcatattggggagaaaccttatgaatgtaaggaatgtaacaaagctttcagacagagtgctcaccttgctcaacatcagaggatccacactggagagaaaccgtttgcgtgcaatgaatgtgggaaggcctttagccgttatgccttccttgttgaacatcagagaattcacacaggtgagaaaccatatgaatgtaaagaatgtaataaagccttcagacagagtgctcaccttaatcaacatcagaggattcacactggagagaaaccctatgaatgtaatcagtgtggaaaagccttcagcagacgcatagcccttactctacatcaaagaattcacacaggagagaaacccttcaaatgtagtgaatgtgggaagacctttggctatcgctcacacctgaatcaacatcagagaattcataccggagaaaagccctatgaatgcatcaaatgtgggaagttttttaggactgactcacaacttaatcgacatcatagaattcacactggagagagaccatttgaatgcagtaaatgtgggaaagccttcagtgatgctttagttctaattcaccataagagaagtcatgcaggagagaaaccctatgaatgtaacaaatgtggaaaggccttcagttgtggctcatatcttaatcaacatcaaagaattcatactggagagaaaccctatgaatgtagtgaatgtgggaaggcttttcatcagatcttgtccctaagactacaccagagaattcacgctggagaaaaaccttataaatgtaacgaatcacaaagagtccggcgctcagagctagcggtttcccgaggactcaccaccaagcccgcggacacaggccccgattccacacttaacgctgccaaagtggcagagccggcgcgggctgggacagaggcggcactgaggccggcgctgtcggtggctgagagcgccacaagtctcggtccgttacaccaggggcgacgcttcccagaggcccccgcggctcacccgggcgggactggcttcactgtttgcgcgtcctgagaagcagaccacggtgttccagggctcacagctccgcgcaggggagctcagcctaggttttgcacgagcggcctcccgcgagcccagctctgagagattgggagcgcaacttggtgctgagaagaatcgaatcgttacgaaatcgtcgacccgggaat

SEQ ID NO: 2497 - DNA, 1652 bp, Homo sapiens
agcgagccgccacggtatgaccccaggggctctgctgatgctgctgggggcgctggggccgccgctcgccccaggcgtccgcggctcggaggcggagggtcgactccgggagaaacttttctctggctatgatagctccgtgcggccagcgcgggaggtgggagaccgtgtcagggtcagcgttggtctcatcctggcgcaactcatcagcctgaacgagaaggatgaagagatgagcacaaaggtgtacttagacctggagtggactgactacaggctgagctgggaccctgcggagcacgacggcatcgattcgctccgcatcacggcggaatccgtgtggctccctgacgtggtgctactgaacaacaatgatgggaattttgacgtggctctggacattagcgtcgtggtgtcctccgacggctccgtgcgttggcaacccccgggcatctatcgcagcagctgcagcatccaggtcacctacttccccttcgactggcagaattgcactatggtgttcagctcctacagctacgacagctcggaggtcagcctgcagacaggcctgggtcctgacgggcaagggcatcaggaaatccacattcatgaagggactttcattgagaatggccagtgggagaatatccacaagccctctcggctaatccagcctccaggcgatcctaggggagggagggaaggacagcgccaggaagtcatcttctacctcatcatccgccgcaagcctctcttctacctggtcaacgtcattgccccatgcatcctcatcactcttctggccatcttcgtcttctacctgccaccagatgcaggagagaagatggggctctcaatctttgccctgctgacccttactgtgttcctgctgctgctggctgacaaagtacctgagacctcactatcagtacccattattatcaagtacctcatgtttaccatggtcctcgtcaccttctcagtcatccttagtgtcgtggttctcaacctgcaccaccgctcaccccacacccaccaaatgcccctttgggtccgtcagatcttcattcacaaacttccgctgtacctgcgtctaaaaaggcccaaacccgagagagacctgatgccggagccccctcactgttcttctccaggaagtggctggggtcggggaacagatgaatatttcatccggaagccgccaagtgattttctcttccccaaacccaataggttccagcctgaactgtctgcccctgatctgcggcgatttatcgatggtccaaaccgggctgtggccctgcttccggagctacgggaggtcgtctcctctatcagctacatcgctcgacagctgcaggaacaggaggaccacgatgcgctgaaggaggactggcagtttgtggccatggtagtggaccgcctcttcctgtggactttcatcatcttcaccagcgttgggaccctagatcatcttcctggacgccacgtaccacttgccccctccagacccctttccttgaagactggagggttgagacccatgccccctgccagttgaagtgagagagtttggtgatactgtcaagccctatccttctctgcctcttaactccttcacgaggaatctgggcctcttatttcgttctggg

SEQ ID NO: 2498 - DNA, 1905 bp, Homo sapiens
ggcgagagggccagaggggcagcacgaaaaaaaaattttgtaaattaattattttttttaaagctaaggcttaaagactcagactttttattgtactcaagtaaaaacctgctggacccacagcaggtggcacagaaaagaggtaggagggggtaaggacactgaggatcaggtctccagcaggtctgtccagtgtgcctcttctaattctgagtcttctacttctttctcagtgtccatctggcacagccagatcaggtctccccaaagcagtgacttctcacagcaagggcattggccctctaggggcagaagctgccctggttcttcctgaagaaactcctctgccaggcagatcacatgggcccttagcaggcagccagggtgggggcaacacaagggcccctcttcatcctggatggtctgggcgcacagggagcagcaggcccctggatccccctggtctggctcaggctccgcgtcatcaaagggacctgcgcggcgcctttggggccgcgggacctgggccggtggaggcccaaaggccaaaagcacgtgcggcggcggcgggaggcaaaggtcctggcggaggtctgggcgcacccagcgcagcgtgagcgggaggcgagcccagggcggtgcgcgcagcatgtgcgccagcacgcgcaggtggaaagcgaaggctgtctctcctcgcaggcgaggccccacgtgcgccaggcggcgcgaggcgtgcgggtgctgccaagcccactcaaaccgaagggcggccacggaggacgggaagccgtgcacgacgagcaccatctcccatggccctcgcccgctggtccgcccaggccccgccttttttgcggcccccattgtgctgctggacccgacgagcagtgttgacagtgaaccccacgtagacgtcggacccggtaccgggggttcaggcagtagagcaggtagacgccgaaaaagcgccctggcctcgccgcgacccccgcgggacccatcgggccttggggttcgggaaccacagcagggggttgattgccgtgacctagggtccaggggagggctggatcgctagggctgcagggtgcttgcttcggaacaagctctcggggactatccggaggcatgcctgcaggaagccgtagcgccggtacgtgcccctctcctgtctggaggcgggtgtagaagtccgaccgcggaagccagactgctgtccagtcggcgagcgcgtaccattcagcatcggctccgcccgagtcccacctttctcaggctctgattggctgacacatggcaagcgcgaaaagcctggaccgctggaaagcccggttgcttgagggcggaagtactgcgttgacgtacgccttagtaagggcggaagtgagttttccagcggaagtggctcctgtaaggcagcaaggtagcgtggccggcgcccgagctggggttgtgtccctgctgggctgccgttccagctggactgccgccatggaactcagcgccgaatacctccgcgagaagctgcagcgggacctggaggcggagcatgtggaggtggaggacacgaccctcaaccgttgctcctgtagcttccgagtcctggtggtgtcggccaagttcgaggggaaaccgctgcttcagagacacaggctggtgaacgcgtgcctagcagaagagctcccgcacatccatgcctttgaacagaaaaccctgaccccagaccagtgggcacgtgagcgacagaaatgagggactgggatctgcacagccattaaattataaatctggtgccttcaagatcatacacctgctcacaggcgagaaccctctgcaagtcctggtgaacgccgtggggggcggcggccccgggaggactccacacgcattgggcgcgccgggact

SEQ ID NO: 2499 - DNA, 3686 bp, Homo sapiens
tgggggggggggggtcttgctacattgcccaggctcaaacttctgggctcaaatgatcctcctgcttctgcctcagcttctgcctcggcctccggagtagctgggactacaggcctgaaatactgtttctttaaggaagggcatgttacctataataccaaaccacaaaaggatagctgcggttttgggcgaggagagctcagagagtttcttgcatatggccctgtgatggcggccatggccctgcatagacacgagctggaatctgcaggtggcagccaggacgctgcgtgtgtcgagtgcacagtgtggcttggtgccaaccatggcgagggtggagagccccgtgcctgcagcgcgcgcttccctcactgggtcctgcgtccttgggcaggcgatgcccctgcggggaggggctggtccatccccggccagccacggacccacgcatggacccagcgacccacggacctgcttacctgggcgcggcgcgggtggcatgcggccacacggaaggggcgcgctgggctgctgcggcctctgcagcttctacacctgccacggggcggccggagatgaaatcatgcaccaggacatcgtcccgctctgtgctgccgacatccaggaccagctaaagaagcgctttgcttacctgtccggtgggcgggggcaggacggaagcccggttatcaccttccctgactacccggccttcagcgagattccggacaaggagttccagaatgtcatgacctacctcaccagcatccccagcctgcaggacgctggcatcggattcatcctggtgatagaccggcgacgggacaaatggacctccgtgaaggcgtccgtcctgcgcatcgcagcatctttcccggcaaacctgcagctcgtcctcgtgcttcgcccgacgggttttttccaaaggactctctccgacatcgctttcaaattcaatagagatgactttaagatgaaggtgccggtcataatgctgagctccgtaccagacttacacggttacatcgataagtcgcagctgaccgaggacctgggtgggaccctggactactgccactcccggtggctgtgccagcgcacggccatcgaaagtttcgccctcatggtgaagcagacggctcagatgctgcagtccttcgggaccgagctggctgaaacagagctgcccaatgacgtccagtcgacacagctcagtgctgtgtgcgcacacagagaagaaggacaaggcgaaggaggatttgaggctggcactgaaagaggggcacagtgtcctggagagcctcagggagctgcaggctgagggctcagagcccagtgtgaaccaggaccagcttgacaaccaggccaccgtgcagaggctcctggcccagctgaacgaaaccgaggctgccttcgatgagttctgggcaaagcatcagcagaaactggagcagtgtctgcagctccggcactttgagcagggcttccgggaggtcaaagccatcttggacgcagcgtcccagaagatagcaaccttcacagacatcggcaacagcctggcgcatgtggagcacctgctgagggacctggccaactttcaggagaaatcaggcgtgttcgtggagagggcccgagccctgtctttgaccgcaagcagcttcattgggaacaagcactacgcggtagactccatccgcccaaagtgccaggagctccggcacctctgtgaccagttctctgcggagatcgcaaggaggagggggctgctcagcaagtccctggagctgcaccgccgcctggagacgtccatgaagtggtgtgatgaagggatttacctgctggcctcacaacctgtggacaagtgccagtcccaggacggcgcggaggctgccctccaggaaatcgagaagtttttggagaccggtgcggaaaataagatccaggagctcaacgcgatttacaaggaatacgaatccatcctcaaccaagatctcatggagcacgtgcgaaaggtcttccagaagcaggcaagcatggaggaggtgttccaccgcaggcaggccagcctgaagaagctggcggccaggcagacgcggcccgtgcagccggtggcccccagacccgaggcactggcaaagtcgccctgcccctccccaggcattcggcgaggctctgagaactccagctccgagggcggtgcgctccggagagggccctaccggagggccaagagtgagatgagtgagagccggcagggccgcggctcagcgggggaggaggaggaaagcctggccatcctgcgcaggcacgtgatgagcgagctcctggacacagaacgggcctacgtggaggagctgctgtgcgtcctggagggctacgccgcggagatggataacccactgatggctcacctcctgtcaacaggccttcacaacaagaaggatgttttgtttggaaacatggaggaaatctatcacttccacaacaggatattcctcagggagctggaaaactacactgactgcccagaactggttggaagatgctttctggagaggatggaagatttccagatctatgagaagtactgtcagaacaagccccgctctgagagcctgtggagacagtgctccgactgcccgtttttccaggaatgccagagaaagctggaccacaagctgagcctggactcctacctgctgaagccagtgcagaggatcaccaagtaccagctgctgctcaaggaaatgctgaaatacagcaggaactgcgagggggctgaggacctgcaggaggcgctgagctccatcctgggcatcctgaaggccgtgaacgactccatgcacctcatcgctatcaccggctatgacgggaatctcggcgacctgggcaagctgctgatgcagggctcgttcagcgtctggaccgaccacaagaggggccacaccaaggtgaaggagctggccaggttcaagcccatgcagcggcacctgttcctgcacgagaaggcagtgctcttctgcaaaaagagggaggagaatggggaggggtatgagaaagctccctcctacagctacaagcagtccttaaacatggctgccgttggcattacggagaacgtgaagggagatgctaagaagttcgagatctggtacaacgcgcgcgaggaggtctacatcgtccaggcgccaactcctgagattaaagccgcgtgggtgaatgaaattcggaaagtgctgaccagccagctgcaggcttgtagagaagccagccagcaccgggcgctggagcagtcacagagcctgcccctgccggccccgaccagcaccagtccctcaagaggaaactcaaggaacatcaagaagctggaagaaaggaaaacagaccccctaagcctggagggatacgtcagctcagcgccactgacaaagccccccgaaaagggcaaaggttggagcaaaacgtcccactcactggaggcacctgaggacgacgggggctggtcaagtgcagaggagcagattaactcgtccgacgcagaggaggacggcgggttgggccccaagaagctggttccaggtaaatacacggtcgtggcggaccacgagaagggaggccccgatgcgctgcgcgtgaggagcggggacgtggtggagctggtgcaggagggcgacgagggcctctgg

SEQ ID NO: 2500 - DNA, 8486 bp, Homo sapiens
tttcgtggagccgagctgggtgcggtgaggcgcgcagatcaccgcggttcctgggcagggcacggaaggctaagcaaggctgacctgctgcagctcccgcctcgtgcgctcgccccacccggccgccgcccgagcgctcgagaaagtcctctcgggagaagcagcgcctgttcccggggcagatccaggttcaggtcctggctataagtcaccatggcacagcaagctgccgataagtatctctatgtggataaaaacttcatcaacaatccgctggcccaggccgactgggctgccaagaagctggtatgggtgccttccgacaagagtggctttgagccagccagcctcaaggaggaggtgggcgaagaggccatcgtggagctggtggagaatgggaagaaggtgaaggtgaacaaggatgacatccagaagatgaacccgcccaagttctccaaggtggaggacatggcagagctcacgtgcctcaacgaagcctcggtgctgcacaacctcaaggagcgttactactcagggctcatctacacctattcaggcctgttctgtgtggtcatcaatccttacaagaacctgcccatctactctgaagagattgtggaaatgtacaagggcaagaagaggcacgagatgccccctcacatctatgccatcacagacaccgcctacaggagtatgatgcaagaccgagaagatcaatccatcttgtgcactggtgaatctggagctggcaagacggagaacaccaagaaggtcatccagtatctggcgtacgtggcgtcctcgcacaagagcaagaaggaccagggcgagctggagcggcagctgctgcaggccaaccccatcctggaggccttcgggaacgccaagaccgtgaagaatgacaactcctcccgcttcggcaaattcattcgcatcaactttgatgtcaatggctacattgttggagccaacattgagacttatcttttggagaaatctcgtgctatccgccaagccaaggaagaacggaccttccacatcttctattatctcctgtctggggctggagagcacctgaagaccgatctcctgttggagccgtacaacaaataccgcttcctgtccaatggacacgtcaccatccccgggcagcaggacaaggacatgttccaggagaccatggaggccatgaggattatgggcatcccagaagaggagcaaatgggcctgctgcgggtcatctcaggggttcttcagctcggcaacatcgtcttcaagaaggagcggaacactgaccaggcgtccatgcccgacaacacagctgcccaaaaggtgtcccatctcttgggtatcaatgtgaccgatttcaccagaggaatcctcaccccgcgcatcaaggtgggacgggattacgtccagaaggcgcagactaaagagcaggctgactttgccatcgaggccttggccaaggcgacctatgagcggatgttccgctggctggtgctgcgcatcaacaaggctctggacaagaccaagaggcagggcgcctccttcatcgggatcctggacattgccggcttcgagatctttgatctgaactcgtttgagcagctgtgcatcaattacaccaatgagaagctgcagcagctcttcaaccacaccatgttcatcctggagcaggaggagtaccagcgcgagggcatcgagtggaacttcatcgactttggcctcgacctgcagccctgcatcgacctcattgagaagccagcaggccccccgggcattctggccctgctggacgaggagtgctggttccccaaagccaccgacaagagcttcgtggagaaggtgatgcaggagcagggcacccaccccaagttccagaagcccaagcagctgaaggacaaagctgatttctgcattatccactatgccggcaaggtggattacaaagctgacgagtggctgatgaagaacatggatcccctgaatgacaacatcgccacactgctccaccagtcctctgacaagtttgtctcggagctgtggaaggatgtggaccgcatcatcggcctggaccaggtggccggcatgtcggagaccgcactgcccggggccttcaagacgcggaagggcatgttccgcactgtggggcagctttacaaggagcagctggccaagctgatggctacgctgaggaacacgaaccccaactttgtccgctgcatcatccccaaccacgagaagaaggccggcaagctggacccgcatctcgtgctggaccagctgcgctgcaacggtgttctcgagggcatccgtatctgccgccagggcttccccaacagggtggtcttccaggagtttcggcagagatatgagatcctgactccaaactccattcccaagggtttcatggacgggaagcaggcgtgcgtgctcatgataaaagccctggagctcgacagcaatctgtaccgcattggccagagcaaagtcttcttccgtgccggtgtgctggcccacctggaggaggagcgagacctgaagatcaccgacgtcatcatagggttccaggcctgctgcaggggctacctggccaggaaagcatttgccaagcggcagcagcagcttaccgccatgaaggtcctccagcggaactgcgctgcctacctgaagctgcggaactggcagtggtggcggctcttcaccaaggtcaagccgctgctgcaggtgagccggcaggaggaggagatgatggccaaggaggaggagctggtgaaggtcagagagaagcagctggctgcggagaacaggctcacggagatggagacgctgcagtctcagctcatggcagagaaattgcagctgcaggagcagctccaggcagaaaccgagctgtgtgccgaggctgaggagctccgggcccgcctgaccgccaaagaagcagggaattagaagagatctgccatgacctagaggccagggtggaggaggaggaggagcgctgccagcacctgcaggcggagaagaagaagatgcagcagaacatccaggagcttgaggagcagctggaggaggaggagagcgcccggcagaagctgcagctggagaaggtgaccaccgaggcgaagctgaaaaagctggaggaggagcagatcatcctggaggaccagaactgcaagctggccaaggaaaagaaactgctggaagacagaatagctgagttcaccaccaacctcacagaagaggaggagaaatctaagagcctcgccaagctcaagaacaagcatgaggcaatgatcactgacttggaagagcgcctccgcagggaggagaagcagcgacaggagctggagaagacccgccggaagctggagggagactccacagacctcagcgaccagatcgccgagctccaggcccagcatcgcggagctcaagatgcagctggccaagaaagaggaggagctccaggccgccctggccagagtggaagaggaagctgcccagaagaacatggccctcaagaagatccgggagctggaatctcagatctctgaactccaggaagacctgaagtgcgagcggggcttccaggaataaagctgagaagcagaaacgggaccttggggaagagctagaggcgctgaaaacagagttggaggacacgctggattccacagctgcccagcaggagctcaggtcaaaacgtgagcaggaggtgaacatcctgaagaagaccctggaggaggaggccaagacccacgaggcccagatccaggagatgaggcagaagcactcacaggccgtggaggagctggcggagcagctggagcagacgaagcgggtgaaagcaaacctcgagaaggcaaagcagactctggagaacgagcggggggagctggccaacgaggtgaaggtgctgctgcagggcaaaggggactcggagcacaagcgcaagaaagtggaggcgcagctgcaggagctgcaggtcaagttcaacgagggagagcgcgtgcgcacagagctggccgacaaggtcaccaagctgcaggtggagctggacaacgtgaccgggcttctcagccagtccgacagcaagtccagcaagctcaccaaggacttctccgcgctggagtcccagctgcaggacactcaggagctgctgcaggaggagaaccggcagaagctgagcctgagcaccaagctcaagcaggtggaggacgagaagaattcccttccgggagcagctggaggaggaggaggaggaggccaagcacaacctggagaagcagatcgccaccctccatgcccaggtggccgacatgaaaaagaagatggaggacagtgtggggtgcctggaaactgctgaggaggtgaagaggaagctccagaaggacctggagggcctgagccagcggcacgaggagaaggtggccgcctacgacaagctggagaagaccaagacgcggctgcagcaggagctggacgacctgctggtggacctggaccaccagcgccagagcgcgtgcaacctggagaagaagcagaagaagtttgaccagctcctggcggaggagaagaccatctctgccaagtatgcagaggagcgcgaccgggctgaggcggaggcccgagagaaggagaccaaggctctgtcgctggcccgggccctggaggaagccatggagcagaaggcggagctggagcggctcaacaagcagttccgcacggagatggaggaccttatgagctccaaggatgatgtgggcaagagtgtccacgagctggagaagtccaagcgggcaatagagcagcaggtggaggagatgaagacgcagctggaagagctggaggacgagctgcaggccaccgaagatgccaagctgcggttggaggtcaacctgcaggccatgaaggcccagttcgagcgggacctgcagggccgggacgagcagagcgaggagaagaagaagcagctggtcagacaggtgcgggagatggaggcagagctggaggacgagaggaagcagcgctcgatggcagtggccgcccggaagaagctggagatggacctgaaggacctggaggcgcacatcgactcggccaacaagaaccgggacgaagccatcaaacagctgcggaagctgcaggcccagatgaaggactgcatgcgcgagctggatgacacccgcgcctctcgtgaggagatcctggcccaggccaaagagaacgagaagaagctgaagagcatggaggccgagatgatccagttgcaggaggaactggcagccgcggagcgtgccaagcgccaggcccagcaggagcgggatgagctggctgacgagatcgccaacagcagcggcaaaggagccctggcgttagaggagaagcggcgtctggaggcccgcatcgcccagctggaggaggagctggaggaggagcagggcaacacggagctgatcaacgaccggctgaagaaggccaacctgcagatcgaccagatcaacaccgacctgaacctggagcgcagccacgcccagaagaacgagaatgctcggcagcagctggaacgccagaacaaggagcttaaggtcaagctgcaggagatggagggcactgtcaagtccaagtacaaggcctccatcaccgccctcgaggccaagattgcacagctggaggagcagctggacaacgagaccaaggagcgccaggcagcctgcaaacaggtgcgtcggaccgagaagaagctgaaggatgtgctgctgcaggtggatgacgagcggaggaacgccgagcagtacaaggaccaggccgacaaggcatctacccgcctgaagcagctcaagcggcagctggaggaggccgaagaggaggcccagcgggccaacgcctcccgccggaaactgcagcgcgagctggaggacgccactgagacggccgatgccatgaaccgcgaagtcagctccctaaagaacaagctcaggcgcggggacctgccgtttgtcgtgccccgccgaatggcccggaaaggcgccggggatggctccgacgaagaggtagatggcaaagcggatggggctgaggccaaacctgccgaataagcctcttctcctgcagcctgagatggatggacagacagacaccacagcctccccttcccagaccccgcagcacgcctcttccccaccttcttgggactgctgtgaacatgcctcctcctgccctccgccccgtccccccatcccgtttccctccaggtgttgttgagggcatttggcttcctctgctgcatccccttccagctccctcccctgctcagaatctgataccaaagagacagggcccgggccagggcagagagcgaccagcaggcttcctcagccctgtttttgccaaaaagcacaagatgttgagggcgagcaggggcagggcccccggggaggggccaagagttttctattgaatctatttttcttcagactgagggctttttggtagttgggagcccccgcagttcgttcagccttccctgacgttctgccaccagcgccccccactcctcctcctttctttgctgtttgcaatcacacgtggtgacctcacacacctctggccccttggggcttcccactcccatgggctctggggcggtccagaaggagcaggccctgggcttccacctctgtgcagggcacagaaggctggggtggggggaggagtggattcctccccacccctgtcccaggcagcgccactgtccgctgtctccctcctgattttaaaatgtctcaagtgcaatgccccctcccctcctttaccgaggacagcctgcctctgccacagcaaggctgtcggggtcaagctggaaaggccagcagccttccagtggcttctcccaacactcttggggaccaaatatatttaatggttaagggacttgtcccaagtctgacagccagagcgttagaggggccagcggccctcccaggcgatcttgtgtctactctaggactgggcccgagggtggtttacctgcaccgttgactcagtatagtttaaaaatctgccacctgcacaggtatttttgaaagcaaaataaggttttcttttttcccctttcttgtaataaatgataaaattccgagtctttctcactgcctttgtttagaagagagtagctcgtcctcactggtctacactggttgccgaatttacttgtattcctaactgttttgtatatgctgcattgagacttacggcaagaaggcattttttttttttaaaggaaacaaactctcaaatcatgaagggatataaaagctgcatatgcctacaaagctctgaattcaggtcccagttgctgtcacaaaggagtgagtgaaactcccaccctacccccttttattatataaaaaaagtgccttagcatgtgttgcagctgtcaccactacagtaagctggtttacagatgttttccactgagcatcacaataaagagaaccatgtgctaaccagcttactgtagtggtgacagctgcaacacatgctaaggcacttttattatataaaaaagggggtagggtgggagtttcactcactcctttgtgacagcaactgggacctgaattcagagctttgtaggcatatgcagcttttatatcacttcatgatttgagagtttgtttgctttcaaaaaaagaaatgccttcttgccgtaagtctcaatgcagcatatacaaaacagttaggaatacaagtaaattccgcaaccagtgtagaccagtgaggacgagctactctcttctaaacaaaggcagtgagaaagactcggaattgtatcatttattacaagaaaggggaaaaaagaaaaccttattttgctgtcaaaaatacctgtgcaggtggcagatttttaaactatactgagtcaacggtgcaggtaaaccaccctcgggcccagtcctagagtagacacaagatcgcctgggagggccgctggcccctctaacgctctggctgtcagacttgggacaagtcccttaaccattaaatatatttggtccccaagagtgttgggagaatccactggaaggctgctggcctttccatctcaggctgcaggagaagaggcttattcggcaggtttggcctcagccccatccgctttgccatctacctcttcgtcggagccatccccggcgcctttccgggccattcggcggggcacgacaaacggcaggtccccgcgcctgagcttgttctttagggaggctgacttcgcggttcatggcatcggccgtctcagtggcgtcctccagctcgcgctgcagtttccggcgggaggcgttggcccgctgggcctcctcttcggcctcctccagctgccgcctgagctgcttcaggcgggtagatgccttgtcggcctggtccttgtactgctcggcgttcctccgctcgtcatccacctgcagcagcctcgtgcc

SEQ ID NO: 2501 - DNA, 2769 bp, Homo sapiens
gtgctctacaggagtttccaaagctcctttaacttacctgatgtcttacggctttgagcttgggtggagaaagggtaacagggctgtggcttgccgggaagacagaggaggagagtctgtgggcatggggcaggagtcaattctgtctcaggttcactggtgggaggctgagccggtggaaaagacaccgggaagagactcagaggcgaccataatgtcgttacgtgtacacactctgcccaccctgcttggagccgtcgtcagaccgggctgcagggagctgctgtgtttgctgatgatcacagtgactgtgggccctggtgcctctggggtgtgccccaccgcttgcatctgtgccactgacatcgtcagctgcaccaacaaaaacctgtccaaggtgcctgggaaccttttcagactgattaagagactggacctgagttataacagaattgggcttctggattctgagtggattccagtatcgtttgcaaagctgaacaccctaattcttcgtcataacaacatcaccagcatttccacgggcagtttttccacaactccaaatttgaagtgtcttgacttatcgtccaataagctgaagaccggtgaaaaatgctgtattccaagagttgaaggttctggaagtgcttctgctttacaacaatcacatatcctatctcgatccttcagcgtttggagggctctcccagttgcagaaactctacttaagtggaaattttctcacacagtttccgatggatttgtatgttggaaggttcaagctggcagaactgatgtttttagatgtttcttataaccgaattccttccatgccaatgcaccacataaatttagtgccaggaaaacagctgagaggcatctaccttcatggaaacccatttgtctgtgactggttccctggtctccttgctggtcttttggtatcgtaggcactttagctcagtgatggattttaagaacgattacacctgtcgcctgtggtctgactccaggcactcgcgtcaggtacttctgctccaggatagctttatgaattgctctgacagcatcatcaatggttcctttcgtgcgcttggctttattcatgaggctcaggtcggggaaagactgatggtccactgtgacagcaagacaggtaatgcaaatacggatttcatctgggtgggtccagataacagactgctagagccggataaagagatggaaaacttttacgtgtttcacaatggaagtctggttatagaaagccctcgttttgaggatgctggagtgtattcttgtatcgcaatgaataagcaacgcctgttaaatgaaactgtggacgtcacaataaatgtgagcaatttcactgtaagcagatcccatgctcatgaggcatttaacacagcttttaccactcttgctgcttgcgtggccagtatcgttttggtacttttgtacctctatctgactccatgcccctgcaagtgtaaaaccaagagacagaaaaatatgctacaccaaagcaatgcccattcatcgattctcagtcctggccccgctagtgatgcctccgctgatgaacggaaggcaggtgcaggtaaaagagtggtgtttttggaacccctgaaggatactgcagcagggcagaacgggaaagtcaggctctttcccagcgaggcagtgatagctgagggcatcctaaagtccacgagggggaaatctgactcagattcagtcaattcagtgttttctgacacaccttttgtggcgtccacttaatttgtgcctatatttgtatgatgtcataatttaatctgttcatatttaactttgtgtgtggtctgcaaaataaacagcaggacagaaattgtgttgttttgttctttgaaatacaaccaaattctcttaaaatgattggtaggaaatgaggtaaagtacttcagttcctcaatgtgccagagaaagatggggttgttttccaaagtttaagttctagatcacaatatcttagcttttagcactattggtaatttcagagtaggcccaaaggtgatatgactcccattgtccctttatttaggatattgaaagaaaaaataaactttatgtattagtgtcctttaaaaatagactttgctaacttactagtaccagagttattttaaagaaaaacactagtgtccaatttcatttttaaaagatgtagaaagaagaatcaagcatcaattaattataaagcctaaagcaaagttagatttgggggttattcagccaaaattaccgttttagaccagaatgaatagactacactgataaaatgtactggataatgccacatcctatatggtgttatagaaatagtgcaaggaaagtacatttgtttgcctgtcttttcattttgtacattcttcccattctgtattcttgtacaaaagatctcattgaaaatttaaagtcatcataatttgttgccataaatatgtaagtgtcaataccaaaatgtctgagtaacttcttaaatccctgttctagcaaactaatattggttcatgtgcttgtgtatatgtaaatcttaaattatgtgaactattaaatagaccctactgtactgtgctttggacatttgaattaatgtaaatatatgtaatctgtgactttgatattttgttttatttggctatttaaaaacataaatctaaaatgtcttatgttatcagattatgctattttgtataaagcaccactgatagcaaatctctctcc

SEQ ID NO: 2502 - DNA, 1815 bp, Homo sapiens
ggagagtggagaagagaagagaacaaaaagtaacttcaggatggggaccagtgaagtacttgcggcctgtacccagaatcaaaccccaagtttcacatgcctgaggatgtacgagaaaaaaaggaaaatcttctactcaattctgagagatctactaggctcttaacaaagaccagtcattcacaaggaggggatcaagctttaagtaagtccacagggtcaccaacagagaagttgattgaaaaacgtcaaggagctaagactgtttttaacaagttcagcaacatgaattggccagtggacattcaccctttaaacaaaagtttattcaaagataataaatggaagaaaactgaggagacccaagagaaacgaaggtctttccttccaggagttttgcaagaaatacggtgggggtgagtcatcatcagtcacatctttttcatacagtatccagaatctatgtagaagataaacacaaaatcttatattgtgaggtacctaaggctggctgttccaattggaaaagaattctgatggtactaaatggattggcttcctctgcatacaacatctcccacaatgctgtccactacgggaagcatttgaagaagctagatagctttgacctaaaagggatatatacccgcttagatacttacaccaaagctggtgttggttcgtgatcccatggaaagattagtatcagcctttagggacaaatttgaccaccccaatagttattaccatccagtattcggaaaggcaattatcaagaaatatcgaccaaatgcctgtgaagaagcattaattaatggatctggagtcaagttcaaagagtttatccactacttgctggattcccaccgtccagtaggaatggacattcactgggaaaaggtcagcaaactctgctatccgtgtttgatcaactatgattttgtagggaaatttgagactttggaagaagatgccaattactttttacagatgatcggtgctccaaaggagctgaaatttcccaactttaaggataggcactcttccgatgaaagaaccaatgctcaagtcgtgagacagtatttaaaggatctgactagaactgagagacaattaatctatgacttttattacttggactatttaatgtttaattatacaactccatttttgtagtttgcattcattttctaaaaccctgtatatacttaatgatgataagttcaaatcagctgtaatttttctataattctctgtatgaccagaaatttaacccaagtgcagttgtccttgatttaatgtagatttttaccaaatagtatgacacccaattggcacaaagttataggaaaatcacctacaggagatgtaaacaacttgagttgctctaaaatgtttggaaaagagctgcttttgcattatgaattatattgttgaagcaataacctagccagctgttgcattagctaaagcagcctcttgcaatggtaggaaaaaaggatctcaaatagcatgagtgtatgtctatatcctgaaatttattgtctaagatgcatgaatatatttttagcagtctgtggcatattaatcaaactgttgaattgttttcttacaccctggaaatctttctatcaactataatgataaatccattttgaagtgatattttggacttaggcattttactttagattggaaggcattatgtgatttacaatatgagaatatagcagaaaaaccagatgaggctgtggctttttataccccacagccaataaaaaatgcacaaaaaaataagatcaaaaaaaaaaaaaa

SEQ ID NO: 2503 - DNA, 3291 bp, Homo sapiens
gtgcgacaaatctggcgctgtccccttcagcaccacgcggagtccgcgccgcccctccccgcgctcagctgggcccagcctctcctctgtctctcctcggtctcagctctgggcgagcagcggcctgtctgaagagcatgcagcccccttactccccgcctggcctcgccatccctgcccccccagcctgacccccggccccagcatggcccagggtgccatgcgcttctgctcggaaggcgactgtgccatctccccaccacgatgcccacgccgctggctccccgaaggcccggtgccccagagccccccagccagcatgtatggcagcacaggctccttgctacggcgagtggcaggtccaggtcctcgaggccgggaactgggacgtgtgacagcaccctgtacacctctgcgtggccccccctcaccccgtgttgctccctcaccctgggcaccctcttcacccactgggcagcccccacccggggcccagagctctgtggtcatcttccgctttgtggagaaggccagtgtgaggccactgaatgggctacctgctccagggggcttgagtcggagctgggatctgggtggggtttctcctcccaggcccaccccagcccttgggcctggctccaaccggaagttacggctggaagcatccacatcagacccactccccgccagaggaggctcggccctacctggcagccggaaccttgtacatgggccgccagccccaccccaggttggagcagatggcctttactcctctctccccaatgggctgggggacccccctgagcgcctggccacactcttcggaggacctgctgacactggattcctgaaccagggggatacctggtcctccccccgggaagtctcctctcatgcccagagaatcgctagagccaaatgggaattcttctatggctccttggacccccccagctcaggtgctaagcccccagagcaggcccccccatctccacctggggtgggctcaaggcagggctctggggtggctgtggggcgagcagccaagtactccgagacagacctggacacggtgcccctgaggtgctaccgcgagactgacatcgatgaggtgctggctgagcgggaggaggccgactcggccatcgaaagtcagcccagctctgagggcccaccaggcactgcctacccacctgccccacggcccggcccactccctggccctcatcccagcctcggcagtggcaatgaggatgaggacgacgatgaggcaggtggggaagaagatgtggacgacgaggtgtttgaggcctctgaaggggcccggccagggagccggatgcctctcaagtcacctgtgccctttctacctgggacgagcccctcggctgatgggcctgactctttcagttgtgtgttcgaagccatcctggagtcacaccgggccaaaggcacctcctataccagcctcgcctcgctggaggccttggcctcacctggcccaacccagagccccttcttcacctttgagctgcctccccaaccccctgcaccccggcccgacccaccagctcccgccccacttgcccctcttgaaccggattctggtaccagctctgctgctgatggtccttggacacagagaggggaggaggaggaggcagaggccagagccaagctggccccagggagggagccccctagtccctgccactcagaggacagccttgggctgggggcagcaccccttggcagcgaaccacccctgagccagctggtgtccgactcagactcagagctggacagcacagagcggctggccctgggaagcacagacaccttgtccaatgggcagaaagcggacctggaggctgcgcagcgcctggccaagaggctgtaccgactagatggcttcaggaaggccgatgtggcccggcacctgggcaagaacaatgacttcagcaaactggtggctggggagtacctcaagttctttgtcttcacgggcatgactctggaccaagctctcagggtgtttctgaaggagctggccttaatgggtgagacccaggaacgagagcgcgtgctggcccacttctcccagcgatacttccagtgcaatcctgaagccctgtcctcagaggacggcgcccacacgctgacctgtgcgctcatgctgctcaacacggatctccacggccataacatcgggaagcgcatgacctgcggggacttcatcgggaacctggagggcctcaatgatggcggcgacttccctagggagctgctcaaggccttgtacagctccatcaagaatgagaagctgcagtgggccatagacgaggaggagctgagacgctttctgtctgagttggccgaccccaaccccaaggtcatcaagcggatcagcgggggcagtggcagtggctccagccctttcctggacctgactcccgagcctggggctgccgtctacaagcacggggccctggtgcgaaaggtgcacgcagaccctgactgcaggaagacacctcggggcaagcggggctggaagagcttccacgggatcctcaagggcatgatcctctacctgcagaaggaggagtacaagcctgggaaggccctttcagagacggagctcaagaatgccatcagcatccaccatgccctggccactcgtgccagttaactacagcaagaggccccacgtcttctacctgcgcacagctgactggcgggtcttcctcttccaggccccgagcctggagcagatgcagtcctggatcactcgcatcaatgtagtagccgctatgttctctgcgccccccttcccagctgctgttagctcccaaaagaagttcagccgccctctcctgcccagcgctgccacccgcctctcccaggaggagcaggtgcggacccacgaggccaagctgaaggccatggcaagtgagctgcgggagcaccgggccgcccagctgggcaagaagggccggggcaaggaggctgaagagcagcggcagaaggaggcctacctggagtttgagaaatcccgctacagcacctatgcagcgctgcttcgggtcaagctgaaggcaggcagtgaggagctggatgcagtggaggcagcactggcccaggccgggagcacagaggatggactccctccttctcactccagtccctccctgcagcccaaaccctccagccagccccgggctcagcgtcacagctcagagcctcggccaggggcaggcagtgggcggcggaagccctgagatgaggttt

SEQ ID NO: 2504 - DNA, 1968 bp, Homo sapiens
gggtcagggtttttgacgttcctcgccagctgcacaaacctcccggagcaagtgtgagtgtgggtgagagtgcgcgcgcgcgcacgggctggctgcgcttggcacgcttggtggcccagggtcccggggcccggggtcccgtctggcggcccgggattaccgtgacgtcacattgagcctctggccaccttggactgggacacctccggagcctcacagccccgcgccgcgccgcgcctcacctcgccaccacgcgcctttgggaacccgcatcttcttccttcccctgcccatccatgggcccttctgtcttccggaccccacgggccggaggggcgccttccggagcgcagggctcggcagccgggctgccctcggctctgcctccactggggccaaccaggcgaaggaaccggcgctgggcatccgcagcggtgtaaggaactgagacacctcactgctgggggcgcggaacagctgggctgagacgggaactcgacagggaagagagagacgggccagggacagccaccatgtccttcccacactttggacacccgtaccgcggcgctttccagtttctgggcgtcggcaagttccagcaccacatgctgcgaatctaccctacgctctgtatcatatgtggcttcaggctccaccccagcgcccgctctttgctgcgcacccttacgatagtcgactgctgggcagtgcgcgaccggagctgggcgccgccttgggcatctatggagcaccctatgcggccgctgcagctgcccagagctaccctggctacctgccctatagcccagagcccccctcactgtatggggcactgaatccacagtatgaatttaaggaggctgcagggagttttacatccagcctggcacaaccaggagcctattatccctatgagcggactctggggcagtaccaatatgaacggtatggcgcagtggaattgagtggcgccggtcgccgaaagaacgcgacccgggagaccaccagtacactcaaggcctggctcaacgagcaccgcaaaaacccctaccccactaagggtgagaagatcatgctggccatcatcaccaagatgaccctcacccaggtgtccacctggttcgccaacgcacgccggcgcctcaagaaagagaacaaaatgacatgggcgcccaagaacaaaggtggggaggagaggaaggcagagggaggagaggaggactcactaggctgcctaactgctgacaccaaagaagttactgctagccaggaggcccgggggctccggctgagtgacctggaagacctggaggaagaggaggaggaggaggaggaagctgaagacgaggaggtagtggccacagctggggacaggctgacggagttccgaaagggcgcgcagtcactgcctgggccgtgcgctgcagctcgagagggccgattggagcgcagggagtgcggcctggctgcgccccgcttctccttcaatgacccttccggatcggaagaagctgacttcctctcggcggagacaggcagccctaggttgaccatgcactacccatgcttggagaaaccgcgcatctggtctctggcgcacaccgcgacagccagcgctgttgaaggtgcacccccagcccggcctaggccacgaagtcctgagtgccgtatgattcctggacagcctcctgcctctgcccggcgactctcagtccccagagactccgcgtgcgacgagtcttcctgcatacccaaagcctttggaaaccccaagtttgccctgcagggactaccgctgaactgtgcgccgtgcccgcggaggagcgagcctgtagtgcagtgccagtacccgtctggagcagaaggtagtgggcccccagcggcgctgggagtatctatgcaaaagacacccacctaccgccccgcccggcaattgcacaccctctgccattccagtctgcccag

SEQ ID NO: 2505 - DNA, 2080 bp, Homo sapiens
gcggccgcgagaagccccgctctcctgtaaacgtccgcggaggagcagcaagcctccctgtgagtcggtgggagacaagacggagcggcggtaagggcggtagggaagtgaagcgcctctctccaccttgttagaagcgcgctgaaagcggcctgcctacccaccccatcgctgccgttatgcagtcgtcgctcccaccttccgctgccgcctggagggaagccggagcgacgggggtcacggcggcggtcagagggtaaaggtcttgctcccagcagcctccgcggcggatacgccgccatcttggatccgcgggacaagaaaattcatgcgagggagacgtggtgggcggtccttcctgtgacacgacccttgagtgacagttctatttgattgcctccggtactgtgaggaaaggacacgactctatggtgaggactgatggacatacattatctgagaaaagaaactaccaggtgacaaacagcatgtttggtgcttcaagaaagaagtttgtagagggggtcgacagtgactaccatgacgaaaacatgtactacagccagtcttctatgtttccacatcggtcagaaaaagatatgctggcatcaccatctacatcaggtcagctgtctcagtttggggcaagtttatacgggcaacaaagtgcactaggccttccaatgagggggatgagcaacaatacccctcagttaaatcgcagcttatcacaaggcactcagttaccgaggccacgttcacgccaacaacaggggtaccaacaatgttcatttcacaccgcctccatctccaagcaggggtattttgcctatgaatcctaggaatatgatgaaccactcccaggttggtcagggcattggaattcctagcaggacaaatagcatgagcagttcagggttaggtagccccaacagaagctcgccaagcataatatgtatgccaaagcagcagccttctcgacagccttttactgtgaacagtatgtctggatttggaatgaacaggaatcaggcatttggaatgaataactccttatcaagtaacatttttaatggaacagacggaagtgaaaatgtgacaggattggacctttcagatttcccagcattagcagaccgaaacaggagggaaggaagtggtaacccaactccattaataaaccccttggctggaagagctccttatgttggaatggtaacaaaaccagcaaatgaacaatcccaggacttctcaatacacaatgaagattttccagcattaccaggctccagctataaagatccaacatcaagtaatgatgacagtaaatctaatttgaatacatctggcaagacaacttcaagtacagatggacccaaattccctggagataaaagttcaacaacacaaaataataaccagcagaaaaaagggatccaggtgttacctgatggtcgggttactaacattcctcaagggatggtgacggaccaatttggaatgattggcctgttaacatttatcagggcagcagagacagacccaggaatggtacatcttgcattaggaagtgacttaacaacattaggcctcaatctgaactctcctgaaaatctctaccccaaatttgcgtcaccctgggcatcttcaccttgtcgacctcaagacatagacttccatgttccatctgagtacttaacgaacattcacattagggataagttatttttctttttcagctggctgcaataaaacttggccgatatggtgaagaccttctcttctatctctattacatgaatggaggagacgtattacaacttttagctgcagtggagctttttaaccgtgattggagataccacaaagaagaacgagtatggattaccagggcaccaggcatggagccaacaatgaaaaccaatacctatgagaggggaacatattacttctttgactgtcttaactggaggaaagtagctaaggagttccatctggaatatgacaaattagaagaacggcctcacctgccatccaccttcaactacaaccctgctcagcaagccttctaaaaaaaaaa

SEQ ID NO: 2506 - DNA, 2834 bp, Homo sapiens
tttcgtcgccaagatggcgacgagtcagtatttcgacttcgcgcagggcggcggcccgcagtacagcacccaggctccgacccttcccctgcccactgtgggggccagctatactggacaacccactcctgggatggaccctgccgtgaacccggcctttcccccagctgccccggcagggtacggtggataccagccccactccgggcaggacttcgcctacggcagccgaccccaggagcccgtccccacggccaccaccatggctacctaccaggacagttacagctacggacagtcagcagctgccaggagctatgaggacaggccgtacttccagtctgctgccctccagtctgggcgcatgacagccgcagactccggccagccagggacccaagaagcctgcgggcagcccagcccccatggcagtcacagccacgctcagcccccacagcaggcgcccatagtggagtccggacagccagcgagcaccttgtcctcgggatacacctaccccacggcgacaggcgtccagcccgagtcgtcagcttccatcgtgacctcctaccccccgccctcctacaaccccacctgcaccgcctacacggcaccaagctacccgaactatgacgcgtcggtgtactccgctgccagccctttctatcctccagcgcagcccccgcctcccccgggacccccgcagcagctgcccccgccgcccgcgcctgcaggctcaggaagcagccccagggccgactcgaagccaccgcttcccagcaagctgccgagacccaaggcggggcccaggcagctccagcttcactactgcgacatctgcaagatcagctgcgctggcccccagacctaccgggaacatctgggagggcagaagcacagaaagaaggaggcggcccagaagacaggcgtgcagcccaacgggagcccgcgcggggtgcaggcgcagctgcattgcgacctgtgcgccgtgtcctgcaccggggcggacgcctacgcggcccacatccggggatccaagcaccagaaggtcttcaagctgcacgccaaactggggaagcccattcccaccctcgagcctgcactggccacagagagcccccccggggcagaggccaagcccacgtcccccactggccccagcgtgtgtgcctcgagcaggccagcgctggccaagagacccgtggcctcgaaggccttatgcgaggggcctcctgagccacaggcagcaggctgcagaccccagtgggggaaaccagcccaacctaaattagagggtcccggagcacctacccaaggaggctcaaaggaagctcccgcgggctgctctgatgcgcagccggtgggcccggaatatgtggaggaggtgttcagcgacgaagggcgagtgcttcgcttccactgcaagctgtgcgagtgcagtttcaacgaccttaacgcgaaggacctgcacgtgagggggcggcggcaccggctgcagtaccggaagaaagtgaacccggaccttcccattgccacggagcccagcagccgggctcggaaggtcctggaggagcgcatgaggaagcagcggcacctggcggaggagcggctggagcagctgcggcgctggcacgcggagaggaggcggctggaggaggagccaccccaggacgtgccgccccacgcgccgcccgactgggcccagcctctgctcatgggcaggccggagtcacccgccagcgccccactccagcccgggcggcggccggcgtccagcgacgaccggcacgtcatgtgcaagcacgccaccatctaccccacggagcaggagctcctggccgtgcagagggccgtgtcccacgcagagcgggccctcaagctggtgtccgacacactggccgaggaggaccggggccgccgagaggaagagggtgacaagcgcagcagcgttgccccccagactcgggtcctgaaaggcgtcatgcgagtaggcatcctggcgaaaggcctcctcctgcgtggggacaggaacgtgcgcctcgctctgctctgctccgagaagcccacgcacagcctgctgcggaggatcgcccagcagctgccccggcagctccagatggtgaccgaggatgagtatgaggtctcctccgaccctgaagccaacattgtcatctcctcctgtgaggagcccaggatgcaggtcaccatatctgtcacctcacctctgatgcgggaggacccctccacagacccaggtgtggaggagcctcaggctgatgcaggtgatgtcctgagccccaagaagtgcctcgagtccctggccgccctccgtcatgccaggtggtttcaggctcgagccagcggcctgcagccatgcgtgatcgtcatcagggtcctgagggacctctgccggcgtgtgcccaccctggggggccctgccagcctgggccatggagctgctggtggagaaggctgtgagcagtgcggctgggcccctgggccccggggatgcagtcaggcgagtcctggagtgcgtggccacagggacgctcctgacagacgggcccgggctccaggatccctgcgagagagaccagacagatgccctcgagcccatgaccctccaagagcgggaagacgtgaccgccagcgcccagcacgccctgcgaatgctggccttccggcagacccacaaggtcctgggcatggatctcctgccgcccagacaccggctgggggcccgcttccggaagaggcaacggggacctggcgagggagaggagggcgcaggggagaagaagcggggccggcggggcggagaggggctcgtgtga

SEQ ID NO: 2507 - DNA, 2160 bp, Homo sapiens
tttcgtcggcgacggggcgctctcgggctgccggcggggccgagcgccgcgcgtcccgagcatggcaggctccctgcctccctgcgtggtggactgtggcaccgggtataccaagcttggctacgcaggcaacactgagccccagttcattattccttcatgtattgccatcagagagtcagcaaaggtagttgaccaagctcaaaggagagtgttgaggggagttgatgaccttgactttttcataggagatgaagccatcgataaacctacatatgctacaaagtggccgatacgacatggaatcattgaagactgggatcttatggaaaggttcatggagcaagtggtttttaaatatcttcgagctgaacctgaggaccattattttttaatgacagaacctccactcaatacaccagaaaacagagagtatcttgcagaaattatgtttgaatcatttaacgtaccaggactctacattgcagttcaggcagtgctggccttggcggcatcttggacatctcgacaagtgggtgaacgtacgttaacggggatagtcattgacagcggagatggagtcacccatgttatcccagtggcagaaggttatgtaattggaagctgcatcaaacacatcccgattgcaggtagagatattacgtatttcattcaacagctgctaagggagagggaggtgggaatccctcctgagcagtcactggagaccgcaaaagccattaaggagaaatactgttacatttgccccgatatagtcaaggaatttgccaagtatgatgtggatccccggaagtggatcaaacagtacacgggtatcaatgcgatcaaccagaagaagtttgttatagacgttggttacgaaagattcctgggacctgaaatattctttcacccggagtttgccaacccagactttatggagtccatctcagatgttgttgatgaagtaatacagaactgccccatcgatgtgcggcgcccgctgtataagaatgtcgtactctcaggaggctccaccatgttcagggatttcggacgccgactgcagagggatttgaagagagtggtggatgctaggctgaggctcagcgaggagctcagcggcggcgaggatcaagccgaagcctgtggaggtccaggtggtcacgcatcacatgcagcgctacgccgtgttggttcggagggctccatgctggcctcgactcccgagttctttcaggtctgccacaccaagaaggactatgaagagtacgggcccagcatctgccgccacaaccccgtctttggagtcatgtcctagtgtctgcctgaacgcgtcgttcgatggtgtcacgttggggaacaagtgtccttcacaacccagagaaggccgccgttctgtaaatagcgacgtcggtgttgctgcccagcagcgtgcttgcattgccggtgcatgaggcgcggcgcgggcccttcagtaaaagccatttatccgtgtgccgaccgctgtctgccagcctcctccttctcccgccctcctcaccctcgctctccctcctcctcctcctccgagctgctagctgacaaatacaattctgaaggaatccaaatgtgactttgaaaattgttagagaaaacaacattaggaaaatgggcgcaaaatcgttaggtcccaggagagaatgtgggggcgcaaacccttttcctcccagcctatttttgtaaataaaatgtttaaacttgaaatacaaatcgatgtttatatttcctatcattttgtattttatggtatttggtacaactggctgatactaagcacgaatagatattgatgttatggagtgctgtaatccaaagtttttaattgtgaggcatgttctgatatgtttataggcaaacaaataaaacagcaaacttttttgccacatgtttgctagaaaatgattatactttattggagtgacatgaagtttgaacactaaacagtaatgtatgagaattactacagatacatgtatcttttagttttttttgtttgaactttctggagctgttttatagaagatgatggtttgttgtcggtgagtgttggatgaaatacttccttgctctcattgtaataaaagctgttagaatatttgtaaatatcaaaaaaaaaaa

SEQ ID NO: 2508 - DNA, 4322 bp, Homo sapiens
aaccaaacggcgtcgcccttttacaccttcccggagcggcagtcatcccaaatacaaactacatgttccaggatgctttgggcggcagatctcgcggaagccgcgaggagagcccggccccgtctcgcgcgcctgcttccgcctccctgtggcggcggcttgttgttgtggaggccaaaatggcggctcatgcggcggcagcggcccaggcggcggcggcccaggctgcgcatgccgaggcggccgactcgtggtacctggcgcttctgggcttcgctgagcacttccgcacttccagcccgcccaaaatccgcctgtgcgtgcactgcctgcaggccgtgttccccttcaagccgccgcagcgcatcgaggcccgtacacacctgcagctgggctccgttctctatcaccacaccaagaacagcgagcaggcgcgcagccacctggagaaggcgtggttgatatcacagcaaatcccacagttcgaagatgttaaatttgaagcagcaagtctgttgtctgaattgtactgtcaagagaattccgttgatgcagcaaagccgctgctgcggaaggcgatccagatctcacagcagaccccatattggcactgccgcctgctcttccagctcgctcaactgcacacgcttgagaaggacctggtgtctgcctgtgacctcctgggtgtaggggccgagtacgcccgggtggtgggatctgaatacacacgggcgctgttcctcctcagcaaggggatgctgctgctgatggagcgaaagctgcaggaggtgcacccgctgctgaccctctgcgggcagatcgtggagaactggcaggggaaccccatccagaaggagtcgctgcgtgtcttcttcctggtgctccaggtcacccactatctggatgccgggcaggtgaagagcgtgaagccgtgtctgaagcagctgcagcagtgcatccagaccatctccacactgcacgatgatgagatcctgcccagcaaccccgctgacctcttccactggctgcccaaggagcacatgtgtgtgcttgtctacctggtgactgtgatgcactccatgcaggccggctacctggagaaggcgcagaagtacacggacaaggccctcatgcagctggagaagctcaagatgctggactgcagccccatcctgtcatccttccaagtgatcctgctggagcacatcatcatgtgccgccttgtcacgggtcacaaggccacggcgctgcaggagatctcccaggtctgccagctgtgccagcagtccccccggctcttctccaaccatgcagcacagctgcacacattgctgggcctgtactgtgtctctgtcaactgcatggacaacgcggaagcccagttcaccacggccctgaggctcaccaaccaccaggagctgtgggccttcatcgtcaccaacctggcgagtgtgtatatacgggaaggaaatagacaccaagaggtagtagctctacagtctgctggagaggatcaacccggaccacagcttccctgtcagctcgcactgcctccgagcagccgccttctatgtgcgtgggctcttctccttcttccagggacgctacaacgaggccaagcgatttctgcgggaaactctgaagatgtccaatgctgaggacctgaaccggctcacagcctgctccctcgtgcttctgggccacatcttctatgtgctgggaaaccacagggagagtaacaacatggtggtgcctgccatgcagctcgccagcaagatcccggacatgtcggtacagctgtggtcgtcagcactgctgagagacctgaataaagcctgtgggaacgccatggatgcccatgaagccgcccagatgcaccagaacttctcgcagcagctgctccaggaccacattgaggcctgcagcctccccgaacacaacctcatcacgtggacagacggtccaccccccgtgcagttccaagctcagaatggacccaacaccagcctggccagcctcctgtgaggccttgatggggccatccagctccgcagggcctgcgcgtctccggcttccacccagacggcactcaagcctgcccccgaggcgtgcttccttcctgattgtctctagagcttccaagtcctgggaatgtgcggggccagtccctgccctcccaggaggggtggtagccgttcccacctcgcagcaggacccccagtgcagaggctcacaggtggcacacaggcgctgtctctccagagccatccttcagagtggacctcagtgccagtcctgcctcagcatctgggtcacgtcggccaggagtagggtgcaggcctccagcaggtcctaatcctgtgtgccagggcaggcagtgccccaggggcaccacgcctgactctccatcacccaggccttgatgccgagcgggagtagagtgtttcctctgctcaaggcaatttccagagcccggatgccagtttctggcctgaatttggagggaagaagtaatggccctagtgtgggacgaagcacagatcccagcacttttcccagctttctctccagcatcagtccctgcagcagctggggcctctggtcaggaaccctcagggacccaggaactcagcttccaaacatctgcaccttgaccggactcgccatcccgccgtgggggtgcaggtgattgtaaacacgggtgtgcatgtggatgcacacgggtgtgcggtgaagatctgtggagatggagctgggagctgaggctcctgttgcaccagccaccttcccccatcttgtggctgctgaggggcaggaagcgggggagtgggctcgtctcctaaatttaagatcacctcctcagctagcttagagtgcgtggcacgggccccccgcccccgagatctggagcccagggactttcttcctggcagatctgtggccttccctgctcagcctcttggtccccccactccctccaccgcctcaccttccctgctgggtctctggggcacagtgtgaaacccgcaccctagccaggccccagggagcctccgctgggcccagacagcagcgtttggttttatccacttttcttggataatcaggaggtgccccagtggtcacagtgtggcattccgagttggggcgggtggtcgggtcaagatagcagcagcaggtgtcagggctcaagacaccaccccctccagcttctggggcccaggagcctctccctgctacagggggtgggggtcctgctcagcagggtaggtggtggttttaggtcttgtcaccctcactcagtggaactgcctctgggagctttggcgtctgtgactaaagggacgctggattgctcaggtcagctgctcggggctcccaggctgggtgtgccttagccacaggcagggctgtcaataacccccttcctcactggccaccacctgacatcagcaccagtgacaggctggtcagagggcggggctggtgagggtttgtcctaagaggaccaccgccatctctgggtctccagggggagagcctggccctgtcctttgctacccagggctgcccccaggcccatgaagccaataggagagcgtgtggcactggcccacaaactgtccctgtcctgtcttcctcccgagccatggcctctgctagctccaccttgaaggagccccccacatcctcccctacatcccagagatgccaccacttgtgtctccacaatgtgctcctgcccacccgggttccgcactgtccgacccctgcacaccactcatgtcaccacggcgtgcatcatgttcatccccatctatttatttaagcctttctttgcttgtagggcattttgtatgtagagcagttgaaaacagaacctcagaacttaacatctgtcctgatgttaaagtgcttttcatgaccaccctgttatctatgtatatgtaaagttaaggatgagatcttaagtttacaattaaaaactcagtactcaatatttaatattctactcgagctttatggaagccaaatcatgtgcatgtgtgtgtgtgcgtgtgtgcaagctttgaacctccttccacagccgcatcttctcatgacacaaagcttttgataagtactttcctgtgggtcgctcagggcctcatagcatctcattcaattacaagaatagaggccagacacggtggcgcatgcctgtagtcccagctaactgggaggctgaggcaggaggatcacttgagcccaggagattgaggctgcagtgagcatgatcgcgacactgcactccagcctgggtgacggtgagactttgtctc

SEQ ID NO: 2509 - DNA, 4322 bp, Homo sapiens; identical to SEQ ID NO: 2508

SEQ ID NO: 2510 - DNA, 5999 bp, Homo sapiens
tgtccttcgaggccagcgtggccctgctggaggcctcgctgaggaacgacgccgaggaaggaatgaatggagaatccatgatgtaaccacagcccccttccctgggcttgttcagaggcggtctcgcctgctcattgtgagccaagtacgctacttcctgaagaataaggtcagccctgatttgtgcaatgaggacggactcacagccctacaccagtgctgcatcgacaactttgaggaaattgtgaagctgctcctctcccatggtgccaatgtgaacgccaaggacaacgagctgtggacacctctccatgctgcagccacctgcggccacatcaacctggtgaagatcctcgttcagtatggggccgacttgcttgctgtcaactcggatgggaacatgccatatgacctctgcgaggatgaacccaccctggatgtcatcgagacctgcatggcataccagggcatcacccaagagaaaatcaacgagatgcgggtggctcctgagcagcagatgattgcggacatccactgcatgatcgcagcgggccaggacctggactggatagatgcccagggtgccacactgctgcacatagctggagccaatggatacctgcgggcagctgagctcctcctggatcatggagtgcgtgtggatgtgaaggactgggatggctgggagcccctgcatgcagctgccttctggggacagatgcagatggcagagctattggtgtcccatggagctaatcctcaatgcaaggacatccatggatgagatgccaatagacctgtgcgaggaggaagagttcaaggtcctgctgctggagctaaaaacacaagcatgatgtgatcatgaagtcacagctgaggcacaagtcatccttgagccggaggacctcccaccgccaggcaagcccgtgggaaaggtggtgcggcgaacccagcctgtcggaacaggacccaacctgtaataggaaggagtatgaagggaagaggccatcctgtggcagcggagtgccagctgaggatcagcggacctccacctacaacggggacatcagggagacccaggacagaccaagagaataaggaccctaaccccaggctggagaagcaccgtgctactctccgaatttcctaccaagatcccacgaggtgaactggacatgcctgttgagaatggcctccgggctccggtcagtgcctaccagtatgcgctggccaacggggatgtctggaaggtgcatgaggtgcctgactacagcatggcctatggcaaccctggcgtggccgacgccaccccgccctggagcagctacaaggaacagagccctcagacgcttctggagctgaagcggcagcgggctgcagccaagctgctcagccaccccttccttagcacacacctgggcagcagcatggccaggacgggcgagagtagcagtgaaggcaaggcccccttgatcggaggcagaacttcaccgtacagcagcaatgggacctcggtatattacacggtcaccagcggagatcccccactcttaaagttcaaggcccccatagaggagatggaggagaaggtgcatggctgttgccgtatctcctagtctccgtgtgatggaggagggagatgcctggggaggggctcctggaatccaggccagcccaacaaccctggctggggaggtgtcagggcagctggggagaggtgggctctgcttttcagaggaactcagaccccagccctcagctggctgcccatagcatcccatgtcccacgtcccgtggttctgcttcctgctgcatcgtctgccatctgacacaaggcctgtcgtggcctcctggttcactctgctgtctgatcttgggagggtgggcttgagatcccagctctattcttggtataaaggcttctccggatcagtacatgcatgtcacattaacacacacacacacacacacatatacacacacacacaagctcgatcagtgtgtgtaggaatgacatacctgggctcaggggaagcaagggggcttagaatttgtggggtattcccaaaaggatggaagttaagactcagagtctcattaccactgccaatgtggttttagcaggggaggggacctgctaagctgagacccatagtcctgctcagagttatcccaaagtctgagccaccagccacacctgacaggggtgagaagtcctcgctgtgttcagagggagccaggaatctacatgggtagatgagatagacacagacctgctccccgcagccttgttgagagccacacttctgcccatgccaggagccagctgtgtgaccatccaggggtggagggggaaaaccaggcaatttcgttcctggaatcaaccaaatcatgttttcctcttggatggaagtgtcaaaggcagaagggtgtgggagggggacaaggtcagtatttaccaaagtgtatctgattttaaaaattcctttagtctgtaaaactcctagagggagggaggtaactgaattcacttctttttgtggatcgtatcaaggtcactgggttttactggctggtgctgggaaaatgaagctaagtgaggagcttccattggaatgcttttccagggagagaggccagttaatttaaaaaaaacagtcgctagttaacagcgacagagcccagcaccctggggtctttgtgaatatccagactgtttcagcccagcccatctcagccaaccctccttagactgagctgtcagagcaagcaattaggggccagcctgcctccacctcccacccccttccacctccatcagtcatgtgtgcagagtcagtgctcgggatcccgggcccagcttttgcctttttggggatgcttggtgagacagatttgccagtcagcccttttgagttcccgcctcacccaggggctcccagcctgcacttgcaggagtggtgatgccccaagtctgcgaatccagggtgcacgtggtcaatatcccctcctgcattcaggagagccatggtagggctggagttgggtcttgcccagccctgcagtttcatagtcccagccttcctggtgctggggagggaggactgtgaatggctgttctcccctcactgctgagtctcccaggaccccctttggagatgcccatggcatgggcactgcccacaggctcagccagaacctcttggtgtacccgataagctgcaggttatcccttgctctgtgcgccttttatttgtccttaaactacctccttagagctctgaaggggtctcctagttccagattttaatttggggaacagatctgggttctttttaaccctcttctttctcagtctatgagaaacttgccctgaggggcacctgggctaggggcttgggactggaagaccatccccgccttgtgccacaactttggtcatgggatctgctctttgtcattcttagccccctactgtggcccccatagccccataacccagagagggagctggacttcagggagcctgagtgatgctttcccaggagcagggcagctggctggaccagaaagtagagggcccatgggagtgactgcacccttgttggctgctggaaggggagaggttctcagcatcaggccacctccaccccaatgccaggatagatgtattctggagtaggggtggaggcggcccaggaggctgaatgacaggtgcacagatgcttcccacgaccttgccatttggggtgggctcttcaacatctcaggctggggctggaacaggacaggatgatctaaaacacacgtaccattggctgtaaaacagtatgagcccagactgacgctgaaatccctcatgagccaaccttagctacaaggtagggagttctgagggaagccgcgtgctcctcaggagagagctgtttaggttttccgatctttttgctcaggggccaaacactgaaggcacgtactgcccaacccactgagcgcctgaggccattccctccttttccgcatgcctcctgcctcctgggctattcctctccacccagaaggctgggaatcccagctgattccctgacaggagccgacttcacacacaggtgactctcaggcattggctcatgttttcagccagggataaaccatcccttcttggggctttaagtccctggggagctttccctgtaggtctcctgggtgttgagagacaagttggagaccaacctccaatgaatgagccgcggtcattcattaattcactcacgtaatttactgagtagctgcaacatgccagcctctacgttaggttctgcggataaaggaggaataagacagagtcaggagaactgttccttgtggtttccgtcccttggggaccacaggcatcagcagtcccattcaagtcacctgaggcaaagtgtctgcatcttcgtccagcgaccctttgcttttcggctcctagaatccttagagtctgaattcctttagctgggaacagctgtcatggtcacccctggataacatttgccaccaagtatagatgctggatcttgggttccaggcagacatcatccaggtccatctggaactttcagtgatagctgccttcagccagcatctttgggggactctataatagcagcttgagatcagtgtctagaagactgttctgcaatttgctgccaaatgcatctcaggtttttaaagtcattgtttcttgctcatgggggctcatttattacatagtcccctcaccccactaatggataatgggaggaaaagttgctgcttccttcagcatcaaagcctttccttgggaatctgcctccctccatggcaggggtggattcgggagctgggagtaaccaggcaaagtcaaccagatgcctagctcctgctgagacccaggtcctatggcagctcctcattagattaaaggagaccacttccaaagcaggtgctgcatggctcaccatcatatgccccaaacaactgaaagttggcggttatcaccagactgtgagtttctggcaagtagcttggggaagctgaataaactctaggcccagggctactaaagacttcaggatagaattctccatcaaatatacagcataagtaaaactgctctgcactgtttaatccatttccaaggggcttagaaaagctaacaagggtgtgtcccctgtcctgccccaccggtttgctggctttgtaataacataagaccattgtggttgttggtgtcagataccttcccatcctgagctctctcacctacctgctctctctcctagagcaggatactggggtacttttaagaagggtgctccttttaagatgcccagaaaagctgtatttaactcttgctatttgtaacttggggatgggtctcccctgccccagggcacataagagcaaaggctccaatggtcagtggatgactctgcaaaagtgaccccctgtgccagaagctatagccctctccccaacaggtctctcttgttggccagagggcctgcttcccatgggcattgcaagtgccaccgtgcggggcctggctcctgcacacccaggaaaagtctgcagacccccagcccctccgcaataattcaccagaccagaagccactgggtgtacagagaacacttaaaaaaatgtattttatgtgaaaaaaaattaaaactctgtatacctgtatccagcagctttgtgtaaaaatggcaatcaagagagtcgtaatatatttaaaactttttttaaaaaaaatcttcgcagatctttgatatcgtactgaggtaacttccacgtagccccttgccactgcggcaccggtgggccttgggtccaaaatctgtggctcagccacatcccaaagggggcacatgtccctggagttgcttccagcttgccaagggcctgtgacagaattcgctgttaagagtttttaattaaaattattaaattccttttaataaccaaaaaaaaaa

SEQ ID NO: 2511 - DNA, 2696 bp, Homo sapiens
  misc_feature (1)...(2696): n = a,t,c or g
tagataacctggagccggcggcgtaagttggctctttagggcttcaccccgaagctccaccttcgctcccgtctttctggaaacaccgctttgatctcggcggtgcgggacaggtacctcccggctgctgcgggtgccctggatccagtcggctgcaccaggcgagcgagacccttccctggtggaggctcagagttccggcagggtgcatccggcctgtgtgtggcgcgaggcacggaaaccggtacccgggtcctggccccagcgctgacgttttctctcccctttcttctctcttcgcggttgcgcgtcgagntangttgtgagcccccatggcagatacgaccccgaacggcccccaaggggcgggcgctgtgcaattcatgatgaccaataaactggacacggcaatgtggctttctcgcttgttcacagtttactgctctgctctgtttgttctgcctcttcttgggttgcatgaagcagcaagcttttaccaacgtgctttgctggcaaatgctcttaccagtgctctgaggctgcatcaaagattaccacacttccagttaagcagagcattcctggcccaggctttgttagaggacagctgccactacctgttgtattcactcatctttgtaaattcctatccagttacaatgagtatcttcccagtcttgttattctctttgcttcatgctgccacatatacgaaaaaggtccttggacgcaagggggctcaaatagtttacctctgctgaggatctgtcttggacaaattaagtgctaatcaacaaaatattctgaaattcattgcttgcaatgaaatattcctgatgcctgcgacagtttttatgctttttagtggtcaaggaagtttgctccaaccttttatatactatagatttcttacccttcgatattcgtctcgaagaaacccatattgtcggaccttatttaatgaactgaggattgttgttgaacacataataatgaaacctgcttgcccactgtttgtgagaagactttgtctccagagcattgcctttataagcagattggcaccaacagttccatagtttaacatctagttaagctacaaatatagtataagcattattagcagctggtacttctgctaggggttgtaaattccaggtgttacactgacctcaatccaatttacataatttacataaatgcatctcggtggaaaaataatcattttcttggcatgttaaatcaagcttaaaaagttttgagaaaattttactgtgctgtgttgctaatggttaaagaagtctgtatctagtgataaatataccagtttttttaaaaagatgctgttgtgcctatatcatgaagtacattaatttctcatgtaaaaaaaatagctctaaaatttgtttcaacctaattggtaacctgagtttatatctggcatgaattcattatggtgatacacatatgtgaattcagtacattttgagacagtattctaccattcagtaattttggttaatgattttaacacttctcagtgtatttaatttcaaattgtttttttaattggttttatgctgctttgttaggacagatgtgttttgaatgtaccattataagaagaattctatgtatcttaaactatgatcttctaaaattttatttccgtaagtacttctgtggccttgagtattttttaaaaggctcagctgtaagcctcttagccagttggataaatatttggggtcacctagccattgaaagcagaaagcagtagtgacacagctttcccttcaaagagccattgagaaacatttctcaaacaggaaatccttcttttactaatgtggacatatagattattcgtattatagtttgtagaactacctagttcagaatcttgactgccagttttcttggtttcttaggcttgaattttcatagacaattgcaacagtttagatgccttttgaaaggaatgtaatgaagattcagcatctgactatatgtgtgtctatcctgaaataataatggagagtatactgtagattacatgtttacccatcaaatctgacttaaaaggttaaatggaaggttttataggtaaggtaattgattgggaatggggtagggggaggagttgtgggggaataatgtgcatttcagtctcaacgcatagataaatttaggggaattggatgtattattcaactttgatttgggttgtaaaatgtgttaaatcctgttcattgaactcccatcaactcttataaaattcatgctgatcttcattaccgttgcatgattggaaatgtttaaaacattgtacagttttagtatagagaaatgtaatggtttttgtgaccagtttctgtctgcatgtaatttggatttctcaaatacattcattagtaatttatcagtaacattagttttatttttgttcatctccttatctataaaaaggggatattcttaggataaatacatgaaaaattatacttgatagcttaactataatcagctatttttgtatttttgtaatatttgtccactaagctggagaagcagcctcatacagttgattttgtgtatgtggctagtcttattgtcactatgtaagtaatccaatggttttagaaactaaactttctagagcaataaaatgactataatgttaagtaaaaaaaaaa

SEQ ID NO: 2512 - DNA, 3277 bp, Homo sapiens
tttcgtcgcggactcgggagatggaggaaaaggagatattacggcggcagatccgcctactgcagggtctgattgatgactacaaaaccctccacggcaatgccccggcccctggtaccccagcagcttctgggtggcagccacccacttaccacagtggcagagcctttagtgcccgctaccctcgtccaagccggaggggctactcttcccaccatgggccttcgtggcgcaagaaatactccctcgtgaatcggcccccgggaccctcagaccctcctgccgaccatgctgtgcggccgttgcacggggcccgggggggccagcctcctgtcccgcagcagcatgtccttgagagacaggtccagctcagtcagggtcagaacgtggtcatcaaagttaaaccgccatcaaagtctggctctgccagtgcctcaggggcccagcggggctctttggaagaatttgaggacaccccctggagtgaccaaaggccccgggaaggtgaaggtgagccccctcggggacagctgcagccctcgaggccaacaagagccagggggacctgcagtgtggaagatcctcttctggtctgccagaaggagcctggtaagcccaggatggtgaagtcagtgggcagtgtgggcgacagcccccgggagccccgccggacagtcagtgagagtgtgattgccgtcaaggcgagcttcccatcctccgctctgcccccacgcactggcgtggccctgggccggaagctgggttctcattccgtggccagctgtgctccacagctccttggggacaggagagtagatgctggccacacagatcagccagttccgtctggctcagtggggggccccgccagaccggcctcaggacccaggcaggcccgggaggcctcgctggttgtgacctgtcgaactaacaagttccggaaaaacaactacaaatgggtggctgcctcctcgaagagtccccgggttgctcggagggccctcagtcccagagtggctgcagagaatgtgtgcaaggcctctgctggcatggcaaacaaggtggagaagccgcagctcatagctgacccagagcccaagcccaggaagccagccacgtcctccaagccagggtctgcccccagcaagtacaagtggaaggcctccagcccctctgcctcctcctcttcctccttccgttggcagtcggaggccggcagcaaggaccatgcctcccagctctccccagtcctgtctaggtccccgtcgggggaccagaccagcattagcacacagtggcttgaagcccctctctggggagaccccactctcggcttacaaagtgaagacccgcaccaagatcatccggagacgcggcagcacaagccttcctggagacaagaaaagcggcacctcacctgccgccaccgccaagagccacctcagcctccggcggagacaggccctcagggggaagagcagccctgtcctgaagaagacccccaacaagggcctggtacaggtcaccaagcaccgactatgtcgcctgccaccgagccgggcccacctccccaccaaggaagcgtccagcctgcatgccgtgcggactgcacccaccagcaaggtgatcaagacccgctaccgcattgtcaagaagacgccggcctcgcctctcagcgccccgcccttccccctgtctctgccctcctggcgggcccggcggctctcactatccaggtccctggtgctgaaccgcctgcgtccagttgccagcgggggtgggaaagcccaaccgggctccccttggtggcggagcaaaggctaccgctgcatcggaggggtcctctacaaagtatctgccaacaagctctccaagacctccggccagcccagtgatgcgggcagcaggcccctcctgcgcacaggccggctggatcctgcaggcagctgtagccgttccctggccagccgggcagtgcagcgcagcctggccatcatccggcaggcgcggcagcgcagggagaagaggaaggagtactgcatgtactacaaccgcttcggcaggtgcaaccgtggcgagcgctgcccctacatccacgatcccgagaaggtggccgtgtgcaccaggtttgtccggggcacctgcaagaaaacggatgggacctgccccttctcccaccatgtgtccaaggagaagatgccggtgtgctcctacttcctgaagggcatctgcagcaacagcaactgtccctatagccacgtgtacgtgtcccgcaaggccgaggtctgcagcgacttcctcaaaggctactgccccctgggtgcaaagtgcaagaagaaacacacgctgctgtgccccgactttgcccgcaggggggcgtgtccccgcggcgcccagtgccagctgctccaccgtacccagaaacgccacagtcggcgggcagccacgtcccccgccccagggcccagcgacgcaaccgccaggagcagggtctcggccagccacgggcccaggaagccttcagcatcccagcgccccaccaggcagacgcccagctcggctgccctcactgcggctgccgtggctgcacctccccactgcccaggggggtcagcctctccctcatcctcgaaggcttcctcctcctcctcctcctcctcatcccctcccgcttccttggaccacgagggcaccatctctccaggaggctgccttagcagcagcgtgctccaacaggctctgcaagctgccttccttcatctccctgcagtcctcgccgagcccaggagcccagcccagggtccgggcccctagggcccccctcaccaaggactcagggaagcctctgcacatcaaaccacgtctgtgaggaccccagggaccggcctgcacctacctcagaccctcatccttggagaggaaagaggctctgtccaccactctaccccacaggagggccgcccgccaccaagcctcacctgggggccacagggacactgctctgcctgcctggccctcaaccttccatgaccagcgtgtgcgcagggcctggtcttcctcccccaagccaggcccctgtccccaccccaccaccttccagggtgccaggcagggctggcctccaggcctgtccccgactgccattggcaacaggtggccctgcagcccccagccctccccacccaggttttcggcccagtgaagaggccatctggccaggcctcccaggtcaggtgttttatgttcagcaataaaggttctatccgtaaaaaaaaaa

SEQ ID NO: 2513 - DNA, 1731 bp, Homo sapiens
  misc_feature (1)...(1731): n = a,t,c or g
ttttttttttttgctagctatcataactttattaaacaagaaaagccctgacgcgtaaataaaaaacacctgagttctgatgaccccgccccgcccagtcccgcccgccgaggtccgtgtccaagtcccgngtttttcaggagctatgtttctgccgcttccaaaagcgcttgacgtcgctgtgcccggccggggtcaccaccatgagccgcttggccggagtttctcgaacacgagcacgcccagcttcggggcgtgggccagcaagcagctcaaagtccacttgcgacaggaactggttatacaggacaccctcagtgaaccggagtctgtccctttccagctcccagagccggatctggtcggtgatggtggggggcagcacaggtgtctgtttgagcatcactgggtgggctcttgtccttaggaaatggattatctgctgggctgtgatgccactggcgattgcctgctgcacactctccccgggtcaccctcgccaaccaccatgttgggggaacggataaagcatctcagagaagagggcaatgagggcaatctgcagctccgactccgtgtaggcatacagtcggtaattggtttccacggacaatgaaacctggctgatgcacagtgcccccagctccagagacacctgatgagagattgatggccaaggcggtgtggggtagtaacgccgagatttcctcttcctctggaaaacaagcccaaactcacgcagatgttgcaggaagttcaacagagaatcactcataccttccacagagtaatccttgcccagagtagagaagctgagctggaagaggaaggagagaatctctaccaggtccatgccccggctctgggctgtctgcaaatactgcaacataaagtaccagagctgagccggggtgtccagcaacaggaactggaagccagcggaagtaatgcagggcggctctccaggttcagtactcttcatgagcccagcctggctgaggagctgagccaagtcctggctgacagctgcactgggggagcccaccatgaagtgcaagaccacctcccatcgctcctcggcgtacttgtcaagggagggaacgtcccgggcatgcttgtctggtcccagctgacttgtgtcatcagaccaggccttccccccacccagaagggcaatgcggaggttctggcggaaaatggggttgaggatgaggccctggagcccgcctgggagcagctgtgtgtgccagatccggaggccgctcagcagccctgtactttcctcctgagccttgctgaattccttctttacccacagagctacagcagcctgtggcaaaggctgctccagaaagagcatccgcatcacccagttcttagccaaggatgggagctccctgaagacagccagacatgtggcagggtgcccatacaatcggtccaataccccagggctcaggccccctaagaattcctgcagattcctgcattgtaggtgtactcggttcagtccccttgaaggggtgctctccatcaccactctgtcgatcctcctcgcgcaccccaagtctcgggccgtcgcttaatcggagccaaagtctcgcattggctcctggagattgagggaaagatggtgaaaaaatgcgaggaaaagatggggaaagcaaagaaagatttcacaggcaagagcccagaatggagaattcagaagagaagggaggtaaggggagg

SEQ ID NO: 2514 - DNA, 894 bp, Homo sapiens
tttttatgtttcatgaatttaattctattaaggtaaggcttactacgttcaaaactccaaccccctcccttttttcttgccctttaacaaggcaccatccggttttctttactaacaaaatgtcagtgttcaagttcagtcttggtgcaagatcgatggcagatgtcaggggctggccgggatggcttacattgatatcatcatacgtaggtccttctcatagatgtcagggatgttacctaccggcgagttgatcatgcgcacggtgttgttattaaacagcttgaattcgtaattgatgagctgttcccaaaagccgttgttgggccggatgatggggcggcgcgactttgggcccatgtatgggcgtccagcagccgacatggagtggtatttcatgaggtacgcaaggcacagtgaggcggaacggctcattcccagccatgcagttcagcagcgtacggccctgcctcatactgacggtgtggataagatcagcaatggggtcaaaaaagtcgtagagacgcgagtcacgagcatcggtaacaggcacctttatgtactgaatgccctcgaagaatacgttgaccacttcccaccgaggcattgacaatggcggtgatgcgattgctggacagaaggagtttgtcgttggcggccacaccattgctgagaaacaagcttctggttatttgggagaagctgtagatggagggctgctggacaccctgagatgatgaaaaggaggacgcggatgctgtcatcaaggcggctggtccgaggtctctctacgctggttcgggacacaacacttaccaagctagttcaggatagcagccgcgccgccaagtctcaggctaggtgttggagaaagaggaccagctatcggccacc

SEQ ID NO: 2515 - DNA, 2053 bp, Homo sapiens
tctctttcaaggtttctgctgggtttctgaactgctgggtttctgcttgctcctctggagatgcagcgtctgttgactccagtgaagcgcattctgcaactgacaagagcggtgcaggaaacctccctcacacctgctcgcctgctcccagtagcccaccaaaggttttctacagcctctgctgtccccctggccaaaacagatacttggccaaaggacgtgggcatcctggccctggaggtctacttcccagcccaatatgtggaccaaactgacctggagaagtataacaatgtggaagcaggaaagtatacagtgggcttgggccagacccgtatgggcttctgctcagtccaagaggacatcaactccctgtgcctgacggtggtgcaacggctgatggagcgcatacagctcccatgggactctgtgggcaggctggaagtaggcactgagaccatcattgacaagtccaaagctgtcaaaacagtgctcatggaactcttccaggattcaggcaatactgatattgagggcatagataccaccaatgcctgctacggtggtactgcctccctcttcaatgctgccaactggatggagtccagttcctgggatggtcgttatgccatggtggtctgtggagacattgccgtctatcccagtggtaatgctcgtcccacaggtggggccggagctgtggctatgctgattgggcccaaggcccctctggccctggagcgagggctgaggggaacccatatggagaatgtgtatgacttctacaaaccaaatttggcctcggagtacccaatagtggatgggaagctttccatccagtgctacttgcgggccttggatcgatgttacacatcataccgtaaaaaaatccagaatcagtggaagcaagctggcagcgatcgacccttcacccttgacgatttacagtacatgatctttcatacacccttttgcaagatggtccagaagtctctggctcgcctgatgttcaatgacttcctgtcagccagcagtgacacacaaaccagcttatataaggggctggaggctttcggggggctaaagctggaagacacctacaccaacaaggacctggataaagcacttctaaaggcctctcaggacatgttcgacaagaaaaccaaggcttccctttacctctccactcacaatgggaacatgtacacctcatccctgtacgggtgcctggcctcgcttctgtcccaccactctgcccaagaactggctggctccaggattggtgccttctcttatggctctggtttagcagcaagtttcttttcatttcgagtatcccaggatgctgctccaggctctcccctgggacaagttggtgtccagcacatcagacctgccaaaacgcctagcctcccgaaagtgtgtgtctcctgaggagttcacagaaataatgaaccaaagagagcaattctaccataaggtgaatttctccccacctggtgacacaaacagccttttcccaggtacttggtacctggagcgagtggacgagcagcatcgccgaaagtatgcccggcgtcccgtctaaaggtgttctgcagatccatggaaagcttcctgggaaacgtatgctagcagagcttctccccgtgaatcatatttttaagatcccactcttagctggtaaatgaatttgaatcgacatagtagccccataagcatcagccctgtagagtgaggagccatctctagcgggcccttcattcctctccatgctgcaatcactgtcctgggcttatggtgcctatggactaggggtcctttgtgaaagagcaagatggagcaatggagagaagacctcttcctgaatcactggactccagaaatgtgcatgcagatcagctgttgccttcaagatccagataaactttcctgtcatgtgttagaactttattattattaatattgttaaacttctgtgctgttcctgtgaatctccaaattttgtaccttgttctaagctaatatatagcaattaaaaagagagaaagag

SEQ ID NO: 2516 - DNA, 2860 bp, Homo sapiens
tttcgtgctttgggcaggcaggagcgaaagggccaggggttgcctgtcctcccccaccctgttgaggccttcctccccctctgctgagcctcggttaattataactctgacctaagtgccctgtgacgtcaagcccgggccagccctgcccaggagacccagcaaccaggtccatgtctcagccatgctccccacggaggtcccccaatcccacccgggcccctcagcgttgcttctgctgcagctgttgctgccccccacatctgccttcttccccaacatctggagcctgctggctgcccctggctccatcacccaccaagacctaactgaggaggcagcgctcaacgtcaccctgcagctcttcctggagcagccacccccaggccgcccccctcttcgtcttgaggacttcctgggtcgaacactccttgctgatgacctctttgccgcctactttggacctggttcttctcggcggttccgagcagccttaggtgaggtgtctcgtgccaatgcagcccaggacttcctgccaacttccaggaatgaccccgacctgcactttgatgctgagcgactgggtcagggacgcgcgcgcctggtaggggctctgcgggagaccgtggtggcagccagggcccttgaccacaccctggctcgccagcgcctcggggctgcacttcatgccctgcaggatttctacagtcatagcaactgggtggagctgggcgagcagcagccacaccctcacctcctctggccaaggcaggagctccagaacctggcacaagtggccgatcctacctgctccgattgcgaggagttgagctgccccaggaattggctgggcttcacactcctcacctctggctactttggaactcatcccccgaaacctccagggaaatgtagccacgggggccattttgaccggagcagctcccagccaccgaggggaggcatcaacaaggacagcacatccccaggcttctcccctcaccacatgctgcacctccaggctgcaaaactggcccttctagcctccatccaggccttcagccttctgcgaagccgcctgggagacagggatttctccaggctgctggacatcaccccagcctccagcctgagctttgtcctggacaccacgggcagcatgggtgaggagatcaacgctgccaaaatccaggctcgccaccttgtggagcagcggagaggcagccccatggagcctgtccactatgtcctggtgccttttcatgacccagggttcggccctgtctttacaaccagtgaccctgacagcttctggcaacagcttaatgagatccatgccttggggggtggagacgagcctgagatgtgcctgtcagccctgcagctggccctgctgcacacacctccactctcagatatctttgtcttcacggatgcctcccccaaggatgcctttctcaccaaccaggtggaatccctgactcaggagcggcgctgccgggtaacattcctggtgactgaagatacatcaagggttcagggtcgagctcggcgtgagatcttgtcccctctgcgttttgagccatacaaagcagtggccctggcctcaggaggagaggtgatcttcaccaaagaccagcacattcgagacgtggcagccattgttggggagagcatggctgccctggtgactcttcccctggaccctcctgttgtggtgcctgggcagccacttgtgttcagcgtggatgggctgctccagaagatcacagtccggatccacggagacatcagcagcttctggatcaagaaccctgcaggggtctcccagggccaggaggaaggcgggggtcctctaggtcacactcgccgctttgggcagttctggatggtgaccatggatgaccctccacagacaggaacctgggagatccaggtcacagctgaggacacccctggggtgagagtgcaagcccagacctccctggacttcctcttccactttgggatccccatggaggatggaccccaccctggcctctaccccctgactcagccagttgcaggtcttcagacccagctgctggtagaagtgacagggttgggttccagagccaatcctggggatcctcagccgcatttctcccacgtcatccttcgaggggtcccagagggtgccgaactaggccaggtgcccttggagcccgtgggacctccggagcgaggtctcctcgcagcctcgctgtcgcccacgctgctgtccacccctagacccttctccctggagctgattggccaggacgcagcgggtcggcgcctgcacagggctgcccctcagcctagcactgtagtccctgtccttctggagcttagtggcccctcgggtttcttggccccgggcagcaaagtcccgctcagtctccgcatcgccagcttctcgggccctcaggatcttgaccttaggactttcgtcaaccccagcttctccctcacctccaacctctccagggctcacctggaactgaatgagtcggcctggggccgcctgtggctggaggtcccagattcagcggccccggattccgtggtgatggtgactgtgactgcagggggacgagaagccaacccagtacccccgactcatgctttcctccggctcctggtatcggccccagccccgcaggaccggcacaccacccctaccggctcatctgacccgatcctcaccacggccacccctgccttttcccccttcacattggtgactcaaggcagggctggggcagggctggctgcgggcagcccctggtggggcacagttggaggggtgctgcttctgataggcctggcctcctggtga

SEQ ID NO: 2517 - DNA, 8152 bp, Homo sapiens
  misc_feature (1)...(8152): n = a,t,c or g
tttgcagtcattggccagtgtggtggaattcgcaaaggtaaaagcacctcgctccgcagcatccagacctggaggggctgcgaccacgggccgagcccacccattccccagccaaaggacgggcccgccgctctccatggtactgcggagagctcagctccgcccttctctttcagaaggacagcacccggcgtcacgtaacccagccttctcaggctccaccaccgccttttccttcccagctctttccctctcctccccctcctcctttananctnctnctcctcctcctgctcccctccgttgcctgttctcccctcccgcactcctggagatagacgctcaagcctgacgcctctgaaaaggcagcagcagtcgccttatccatagacctcaggaaattcgctttgaccgatgcatgcttcaggctctggctcgagctgaggggaataaccgggcagatgtctgagtccttaaaaaagacaagataaaaccaaaatgcatcaccaacacacaaccaattgatgtgctggcatcttagcttggccctgcagaggcagagagaaaagaagaggagctgttgcgatttccacatctaacagcttctggctatttcgcaactgctgggtttgagtcctactgttgccgtggctgaaaagagaagtaaaatccaacttgtgagaccacgcacaaggaattaggctttggctgcagcggtgctgaagcccatgctatgacagaagaagcaggcctttgaagctatcctcgggttaagaaatggtgccctaaagaggcaagcatccctttctccgttctgctgtaagacaccacatctgaaggagacagacttgaggcattcacaagcatccaaggatactggctcactgctggcttcctgtactttcttgagaaaagtgttttctttttactgactctcactgcttccttttggcctggtaccactggtggaacctggcagataatgggatttgaggagttaagtatctgttgacactgcagatactcttaaattagttaatcagactcaaatgggtcagtgctttcccttgatcttttgttgaagccttttccagaacgttgtctccaaagtgcatcctccctttggtctggaagttctgtggctaccctgtaccactggggtcaacgttttccagttggaagaggactacagggagagagggcggggttattggaagaagaagaagaaaaaaagaactagataaaggagggcacatccctctcactcccgcctttccccttacctttctgtctctcgggacccttatttcttcgtcacggtgtccaggaccattttgaccctgtcggccccggcacccccccgccgcaccccagccccgagcatggggacggcgctgctccagcgcgggggctgttttcttctgtgcctctcgctgctgctcctgggctgctgggcggagctgggcagcgggctggagtttccgggcgccgagggccaatggacgcgcttccccaagtggaacgcctgctgcgagagcgagatgagcttccagctcaagactcgcagcgcccgcggcctcgtgctctacttcgacgacgagggcttctgcgacttcctggagctgattctgacgcgcggcggccgcctgcagctcagcttctccatcttctgcgctgagcctgcgacgctcctggccgacacgccggttaacgacggcgcctggcacagcgtgcgcatccgccgccagttccgcaacaccacgctcttcatcgaccaggtggaggccaagtgggtggaggtcaagtccaagcgcagggacatgacggtgttcagcggccttttcgtcggggggctgcccccggaactgcgcgccgcggcgctcaagctcaccctggcctcggtgagggagcgggagcccttcaaggggtggattcgtgacgtgagggtcaactcctcgcaggtcctgcccgtggacagcggcgaggtgaagctggacgatgagccgcccaacagcggcgggggaaggcccgtgcgaggcgggcgaggagggcgagggcggggtgtgcctcaacggaggtgtgtgctccgtggtggacgaccaggccgtgtgcgactgctcgcgaaccggcttccgcggcaaggactgcagccaagaagacaacaatgtggaaggtctggcgcacctgatgatgggcgaccaaggaaaagaagaatatattgccacgttcaaaggatctgaatacttctgctacgacttgtctcaaaaccccattcaaagcagcagtgatgaaataactctgtcatttaaaacccttcagaggaatggactgatgcttcacactgggaaatcggctgattatgtcaatcttgccctgaaaaatggagctgtctctctggtcattaatttgggatcaggggcctttgaagcactagtggagcctgtgaatggaaagtttaatgataatgcctggcatgatgtgaaagtcaccaggaatctgcgtcagcactcaggcattggacacgctatggtgacaatatcagtggatgggattcttaccacaacgggctacacgcaagaagattataccatgctggggtctgatgactttttctatgttggaggcagtcccagcacagccgaccttccagggtcaccagtcagtaacaactttatgggctgtctcaaagaggttgtatataaaaataatgatgtgaggctggaattatctcgacttgccaagcaaggagatcctaagatgaagatccatggagtggtggcatttaaatgtgagaatgttgcaactttagacccaatcacctttgaaaccccagagtctttcatctctttgcctaaatggaatgcaaagaaaactggctccatatcatttgatttccgtacaacagagccaaatggcctcatcttatttagccatggcaagccaagacatcagaaagatgccaagcacccacagatgataaaggtggacttctttgctattgagatgctagatggccacctctacctcctcctggacatggggtcaggtactataaaaataaaagccctgttgaagaaagtgaatgatggagaatggtatcatgtggacttccagagagacggacggtcaggtaccatttctgtcaacacgttgcgtactccctacactgctcctggtgagagtgagattctggacctggatgatgagttgtacctgggggggctgccagaaaataaagctggccttgtcttccccaccgaggtgtggactgctctgctcaactatggctacgtgggctgcatcagggatttgttcatcgatggccaaagcaaagatatccggcaaatggctgaagttcaaagtactgctggagtgaagccttcctgctcaaaggaaacagcaaaaccgtgccttagcaacccttgcaaaaacaatggcatgtgcagggatgggtggaacagatatgtctgtgattgttccggaacaggctatcttggcaggtcctgtgagagagaggcaacggttttgagctatgatgggagcatgtttatgaaaattcagctccccgtagtcatgcatacggaggctgaggatgtttccttacggttccgatcccagcgtgcatatggcattctgatggcaaccacttctagagactctgctgacaccctccgcctggagctagacgcaggacgtgtgaaactgacggtcaatctagattgtatcaggattaactgtaattccagcaaaggtcccgagactctttttgctggctataacctcaatgataacgagtggcacacagtgcgtgtagttcggcgtggaaaaagtttaaagttaacagtggatgaccaacaggccatgacaggtcaaatggcaggtgatcatactaggctggagttccataacatagagactggcatcatcacagaacgacggtatctttcttctgtcccctccaacttcattggacacctgcagagcttgacatttaatggaatggcatacattgacctgtgtaaaaatggcgacatagattactgtgagcttaatgccagatttggcttcaggaacatcatagcagatcctgtcaccttcaagaccaaatcgagctatgttgccttagctaccttgcaagcctacacttctatgcatctttttttccagttcaagacaacatccctagatggattaattctatataacagtggggatggaaatgactttattgtggttgaattagttaaagggtacttacattacgtgtttgatttgggaaatggtgctaacctcatcaaaggaagctcaaataaacctctcaatgacaatcagtggcacaacgtgatgatatcaagggacaccagcaacctccacactgtaaagattgacacaaaaatcacaacgcaaatcaccgccggagccaggaacttagacctcaagagtgacttatatataggaggagtagctaaagaaacatacaaatccttaccaaaacttgtacatgccaaagaaggctttcaaggctgcctggcatcagttgatttaaatgggacggcttccgggacctcatctccgatggttctttttcttgcaacgggacagattcgaggagagggatgtggaaggggcccagcacaacctggccaagaggactcatgttccaatcaaggtgtgtgcttgcaacaatgggatggcttcagctgtgactgtagtatgacttccttcagtggaccactctgcaatgaccctgggacgacatatatctttagcaaaggtggtggacaaatcacgtataagtggcctcctaatgaccgacccagtacgcgagcagacagactggccataggttttagcactgttcagaaagaagccgtattggtgcgagtggacagttcttcaggcttgggtgactacctagaactgcatatacaccagggaaaaattggagttaagtttaatgttgggacagatgacatcgccattgaagaatccaatgcaatcattaatgatgggaaataccatgtagttcgtttcacgaggagtggtggcaatgccacgttgcaggtggacagctggccagtgatcgagcgctaccctgcagggcgtcagctcacaatcttcaatagccaagcaaccataataattggcgggaaagagcagggccagcccttccagggccagctctctgggctgtactacaatggcttgaaagttctgaatatggcagccgaaaacgatgccaacatcgccatagtgggaaatgtgagactggttggtgaagtgccttcctctatgacaactgagtcaacagccactgccatgcaatcagagatgtccacatcaattatggagactaccacgaccctggctactagcacagccagaagaggaaagcccccgacaaaagaacccattagccagaccacagatgacatccttgtggcctcagcagagtgtcccagcgatgatgaggacattgacccctgtgagccgagctcaggtgggttagccaacccaacccgagcaggcggcagagagccgtatccaggctcagcagaagtgatccgggagtccagcagcaccacgggtatggtcgttgggatagtagccgctgccgccctgtgcatccttatcctcctctatgccatgtacaagtacagaaaccgggatgaaggctcataccatgtggacgagagtcgaaactacatcagtaactcagcacagtccaatggggctgttgtaaaggagaaacaacccagcagtgcgaaaagctccaacaaaaataagaaaaacaaggataaagagtattatgtctgatcccaagatcttaaatggacacttgtatagaaatagtcttcattttatctgagacataatataaacttatttactttcctttttatgaagcacatacaaaagaagacagggaatgcaatcaggaaggaaagactttttaaaaaataaaaacaagtatctcatgctcttgtttctcaaaaaagaaaaacaaaaaacaaaaaacaggggccaataaattccctaacatccacagtgttttcatttactctgcttgtctttatgttgctggaacatttctaaaagacagtgatgaccgcacgcattcataaagcaaaggagtactacagcatcaaggcacaacacaaaaaccaacacaaaacataacacaaaaaagaagctacctatgatcctggatttagccaaaagtgctagcgctttcctgagaagtcagttcaatttgcagagaaagactgtccttttgaagtgactcaacctgcaaaccctttaaaagtttgccgcctggtgcaactggagcagtggttggaacttgcatttgaaacaaagtgctggcttttttgaagacttgtgtaggaacacattcaaaaagcccctttctggttgtgagagaggaaaaaaaagtatggaggccttattttcaaaaatgtgaaatataaggcacgttttcacacaaaatttcaaaacaaaaacaagagggcatagatgcaatcattgggaaattttcatgcacgcttattatgttattacatatgtttatataaaatccatctctgtgggctttctggactgtgataagtgacgttttatagcctgttgtatagaaaatgcaaaatatatctctgctcttcagccatttttggtaaattcaatgttataagtgttgctaagtatagggagttttatgacatcagagcaacaattatttcagttgggtttttctttttttttgccaccattataaattgccacaattacttacttttattttttaaagaaattacagtgtagtgtttattctaaggaagatatgtatgaatgtatatacaaagactcagctacttcttttcttatatgtacagccttcattctgttgcaattaagttttagtacttgtatgaaaggtgtgaattagaaagtcacatatatacatatgtatcttataatcttttctccctgaaatactcacattcccacatacattcactattttcacacacacacacacacacacacacacacacacacacgaatccacagcaatccatcagatatgctggaagatccaaacgtgcatacagtagcaaatatttattgacaaattgaaaagcaggaaggaagagggttgtgcccaaggtattgatgacaaatggggtgatttgcttcattgagatcttgctcccaggtaaccttaagaagattttagtccctaaagaaatgaacctttccttatcaaatagaatatcactgatatactgctgcatgaataagaaccattatgtgggcaggttatggaagcaaaattggttaatctacaccttaactctggctgctgcaattgaaaactttctttctaataaaataatatatatatctctgaatctgatgtgcatgatgaacatttctggaaagtaaacactttctctcgactaagaaagtatttttcagtaatttttgattctgtattactacccacttaaaaaatcattctctgttaattattgactatgttttaacttttctggttttacatatatatcattaaatatagttttagtttaacacattaagtagtggaaaagtatagattatacacttgttttgcatattattcaatgatgttcacagcaataaattactaatatgagaaggtagtgcaaaaaatgcattattacattgcaagttgatgtttcaggaaaaattggttgcattacttgaataccttctaaaagaacgataaaaaattttgtagaagagaagaatatctttccaattagctttaatcagcaaaggcaaaaaatgcaaaacatcttttgtgatactttagttgatgaaaaaaaagccaagaagtggcctggatttcagacatacagcaccttagaaatatgtataattcatagcaaatcaccactatctatggttgccaagtaattgttgtgtacaaagaaatttagtggctttttatgacccagaaagtagaaggtataaaatgaaaatttaatatccattgsttytttttytagattttcattttttttaatttgccacattaaataattcacgagtcttttcttttccccgtctcattcagtcttactcaggggaagccagttaaataaga

SEQ ID NO: 2518 - DNA, 417 bp, Homo sapiens
ttgatttttaagagctctcaaactgtcaattcactggaagctcagagccactgaaagctcagagcctctagaagctcagagccactggaagctcagagccacttctccagccttccactttctgtgtctggaccatggaacatctctcttctgcagggctgttcccttccttgatgcatctgcttttccctttctcactttaggcagcttctgtctctgatttgcagggtccttcttaggcctggtctctggttttggaggggtaggtttagaaaataatcctgctgatctcctctgtaactcaaactagcctttactttgtcactcatagcaccttcactgggctttctcttaggcatgatgatgacagtgaatggcaggtgggctggctttcatagtccaagggttacctccatc

SEQ ID NO: 2519 - DNA, 3501 bp, Homo sapiens
acggtggaattctcgacgggagggtgaggcgcggcgcagtgatcgggcggccggggtcctgtgcgcgtgcgcagcgaacagctgtcacctagtgcggaacaagtctcccaaatttcccaaatctccctgggccggaggccactgtcttctcttcctcctccaccgagtcgtgctctcgccccaacccgcgcgccagacactgccctaaccatcatggaggtggccgaggtggaaagtcctctgaaccccagctgtaagataatgaccttcagaccctccatggaggagttccgggagttcaacaaataccttgcatacatggagtctaaaggagcccatcgtgcgggtcttgcaaaggtgattcctcctaaggagtggaagccaagacagtgctatgatgacattgataatttgctcattccagcaccaattcagcagatggtcacagggcagtcaggactgttcactcagtacaacatccagaaaaaagcgatgactgtgaaggagttcaggcagctggccaacagtggcaaatattgtactccaagatacttggattacgaagatttggagcgcaagtactggaagaacttaacttttgtggcacctatctatggtgcagatattaatgggagcatatatgatgagggtgtggatgaatggaacatagctcgcctcaatacagtcttggatgtggttgaagaagagtgtggcatttctattgagggtgtaaataccccatatctctattttggcatgtggaagaccacgtttgcatggcacaccgaagacatggacctctatagcattaattatctccactttggagagcccaagtcttggtatgctatacctccggagcatggaaaacgacttgaaagactagctcaaggttttttcccaagcagctcccaagggtgtgatgcatttcttcgccacaagatgacattgatttctccatcagtattgaagaaatatggtattccctttgacaagataacccaggaggctggagaattcatgatcactttcccatatggctaccatgctggttttaatcatggtttcaactgtgcagaatctacaaattttgctactgtcagatggattgactatggaaaagttgccaaattgtgcacttgcaggaaagacatggtgaagatttcaatggatatctttgtgaggaaatttcagccagacagatatcagctttggaaacaaggaaaggatatatacaccattgatcacacgaagcctactccagcatccacccctgaagtaaaagcatggctgcagaggaggaggaaagtaagaaaagcatcccgaagcttccagtgtgctaggtctacctctaaaaggcctaaggctgatgaggaagaggaagtgtcagatgaagtcgatggggcagaggtccctaaccccgactcagtcacagatgacctcaaggtcagtgaaaagtcagaagcagcagtgaagctgaggaacacagaagcatcttcagaagaagagtcatctgctagcaggatgcaggtggagcagaatttatcagatcatatcaaactctcaggaaacagctgcttaagtacatctgtaacagaagacataaaaactgaggatgacaaagcttatgcatatagaagtgtaccttctatatccagtgaggctgatgattccattccattgtctactggctatgagaagcccgagaaatcagacccatccgagctttcatggccaaagtcacctgagtcatgctcatcagtggcagagagtaatggtgtgttaacagagggagaagagagtgatgtggagagccatgggaatggccttgaacctggggaaatcccagcggtccccagtggagagagaaatagcttcaaagtccccagtatagcagagggagagaacaaaacctctaagagttggcgccatccacttagcaggcctccagcaagatctccgatgactcttgtgaagcagcaggcgccaagtgatgaagaattgcctgaggttctgtccattgaggaggaagtggaagaaacagagtcttgggcgaaacctctcatccacctttggcagacgaagccccctaacttcgcagctgagcaagagtataatgcaacagtggccaggatgaagccacactgtgccatctgcactctgctcatgccgtaccacaagccagatagcagcaatgaagaaaatgatgctagatgggagacaaaattagatgaagtcgttacatcggagggaaagactaagcccctcataccagagatgtgttttatttatagtgaagaaaatatagaatattctccacccaatgccttccttgaagaggatggaacaagtctccttatttcctgtgcaaagtgctgcgtacgggttcatgcaagttgttatggtattccttctcatgagatctgtgatggatggctgtgtgcccggtgcaaaagaaatgcgtggacagcagaatgctgtctctgcaatttgagaggaggtgctcttaagcaaacgaagaacaataagtgggcccatgtcatgtgcgccgttgcggtcccagaagttcgattcactaatgtcccagaaaggacacaaatagatgtaggcagaatacctttacagaggttaaaattgaaatgcatcttctgcagacaccgggttaagagggtctctggagcctgcatccagtgttcctacggtcgctgcccggcctccttccatgtcacttgtgcccatgctgctggggtactgattggagcctgatgattggccttatgtggtgaacattacatgctttcgacataaggtcaaccccaacgtgaagtccaaggcttgcgagaaggtcatttccgtgggtcaaacggtcatcacgaagcatcggaacacccggtattacagttgcagagtgatggctgtgacatcgcagaccttctatgaggtcatgtttgatgatggctcctttagcagagacacatttcctgaggatatcgtgagccgagactgtctgaagctgggcccacctgctgagggagaagtcgtccaagtcaagtggcccgatggcaaactctatggagcaaaatattttggatcaaatattgcccacatgtaccaggttgagtttgaagatggatcccagatagcaatgaagagagaggacatctacactttagatgaagagttacccaagagagtgaaagctcgatttgtaagtgctggcagatgccacttggggacctgccaagtgaattccttgtcctcacctcatgtttcccaagcccagcaggaaacatacttgggcttttggattaattctaaaaaaagccaatgcaacattttccttagtggaacctattgaatgcacacttcaaattcaaccaaaatcggggaaattaatgcatgtgctttacttttcttctaatgaagtcacatgatgcttctttgtgttgacatttattggtgcacaaaaatacttactgaatgtgtgctctgtgtaaaaca

SEQ ID NO: 2520 - DNA, 1123 bp, Homo sapiens
ttttttttttgtatttgtagaaaacctttaatgttccccaggctgagggagccctgtgagccagctaaaaacccccactgtgaagtccctgccatgtcccagcagtgtggagtggcatggggcttcatcctgactgtcagaggctgaagccactaccatctcctcgaatgcgactcccccagccagaactggcctgctcctggtcatccagggagggcagagagctgcgggtaccaggatgtcggcagccagggtgcaggtcccagcacgggggcccctgagacagcccattggaactgggaggctggcggttctcaatgaccaggtcactgctgtcatcgtcactatcaggctcagcaggcccaggccctgcagagggaggacctgtcaaacgcccagatgcccctcgcaccacgttattgcgctggttggcgggcttgacagtgacaatgagggttatggctgttggcaaccatcatgtccgtcacttggttcaaagtcttccctgctacttcaatgccattgacctcgaggatctcatcactgaccgccagcagccctgtactctcagccagacccccacgtaccaggcgggagatgaagattcctggaacccgctccagggccctggggagccacacgcacgctcatgccatctcggatgtagaagcccagggggcggtctgaaccatgcttgtgcagccgcacccgtcggtgggtctcaggcagtaggtccacgtctatgactgaggaaacctggcggaaatcttggggcaggctgattagcaagggtggccgggtgcgcaggggtgccactggccgcagcaagagccctttcttgcgccgctgcagagagttggaggcaaaagccaggccgctggagtcagcttcccgcttctgcaccagtaggcgcagtggcggggcccgctgccagggcccggtgcaggctgtcgtcgttggtgaggggcagcaggtcgccatgagcatccgtatagccaagtagcacgtccaggcccgggatctgtgcaccgcccgcagcaaccgcgagaactcctgaagccgctcaccgaagccgaggcaggcgaagcgtcggaactcggcgtcaaattgctcttcacctcga

SEQ ID NO: 2521 - DNA, 2898 bp, Homo sapiens
tttcgtgtcgttccgccacctcccagtcgggttgcggtggaggccgttcctggctttgtagctcgctcaagatggcggcgcagccaccccgcgggatacgcctcagcgcgctttgcccgaagtttttacatacaaattctactagtcacacctggccattcagtgcagttgctgaattaatagataatgcttatgatcctgatgtgaacgctaaacaaatatggattgacaaaacagtgataaatgaccatatatgcttgacattcaccgacaatgggaatggtatgacttctgataaattacataaaatgctaagctttggcttcagtgacaaagtcaccatgaatggtcatgtcccagttggattatatgggaatggcttcaagtcgggttctatgccgtctgggtaaagacgcaatcgtttttaccaaaaatggagaaagcatgagcgtgggccttttgtctcagacctaccttggaagtcataaaagcggagcatgttgttgttccaatagtggcattcaacaagcaccgacagatgattaatttagcagaatcaaaagccagccttgctgcaattctggaacattctctgttttccacggaacagaagttactggcagaacttgatgctattataggcaagaaggggacgaggatcatcatttggaatcttagaagctacaaaaatgcaacagagttcgattttgaaaaggataaatatgatatcagaattcccgaggatttagatgagataacagggaagaaggggtacaagaagcaggaaaggatggaccagattgcccctgagagtgactattccctgagggcttattgcagtatattatatctaaagccaagaatgcagatcatcctacgtggacagaaagtgaagacacagctggtttcgaagagtcttgcctacatcgaacgtgatgtttatcgaccaaaatttttatctaaaacagtgagaattacctttggattcaactgcagaaataaagatcattatgggataatgatgtatcacagaaatagactcatcaaagcttatgaaaaagttggatgtcagttaagggcaaacaacatgggtgttggagtggttggaattatagagtgtaatttccttaagccaactcataataaacaagatttcgactatactaatgagtacagacttacaataacagcactaggagaaaagctgaatgattactggaatgaaatgaaagtgaagaaaaatacagaatatcctctaaatttgccagttgaagatatacagaagcgtcctgatcagacatgggttcagtgtgatgcctgtctaaagtggcggaaattacctgatgggatggatcaacttcctgaaaaatggtattgctccaataacccatgacccacagttcagaaattgtgaggttccagaagaacctgaagatgaggatttggtacatcccacttatgaaaaaacctacaaaaagaccaacaaggaaaaattcaggatcagacagccggaaatgatccctcggattaatgctgaactgttgtttcggccaactggctctttcaactccaagtcttttcttctcctaaggaaagtgtttccaaaagaagcatctttcagaaggaacaaattcttatgcgacaagacttctaaataatcatcaagttccacctcagtctgaacctgagagcaacagcttgaaacggagactttctactcgttcctcaattttgaatgcaaagaatcggagattggagtagtcagttttgaaaattcagtttataaaggtggatgatgatgatgaagatgtcatcatcttagaagaaaacagtacccccaaacctgcagtagatcatgatattgacatgaaatcagaacagagtcacgttgagcaaggtggtgttcaggttgagtttgtgggtgacagtgaaccttgtggccagactggttcaacaagcacctcatcatcccgatgcgaccagggaaatactgcagctacccagactgaagtaccaagtttagttgttaaaaaagaagaaactgttgaagacgagatagacgtaagaaatgatgcagtgattctgccctcctgtgtagaagctgaagcaaagatacatgaaacccaggaaaccaccgataaatctgcagatgatgcaggctgccaattacaagaactgagaaaccagctactccttgtcactgaggaaaaagagaattataaaagacagtgtcatatgtttactgatcaaatcaaagtgttacaacagaggatactagaaatgaatgacaagtatgttaagaaagaaacttgccatcagtccactgaaaccgatgctgtatttttacttgaaagtattaatggcaaatctgaaagtccagaccatatggtatctcagtatcagcaagctttggaagaaatagaaaggctgaaaaaacaatgtagtgctttgcaacatgtaaaggctgaatgcagccagtgttccaataatgagagtaaaagtgaaatggatgagatggctgtgcagcttgacgatgtgtttagacaactggacaaatgcagtattgagagggaccagtataaaagtgaggttgaattgctggaaatggaaaagtcacaaatccgttcacagtgtgaagaactcaaaactgaagtagaacagttaaaatctacaaatcaacagacggcaacagatgtttcaacatcaagtaacattgaggagtctgtaaatcatatggatggagaaagcctcaaactccgatctcttcgagttaacgtaggacaactgctggctatgattgtgcctgatcttgatcttcagcaagtgaattacgatgttgatgtagttgatgagattttaggacaagttgttgaacaaatgagtgaaatcagtagtact

SEQ ID NO: 2522 - DNA, 2346 bp, Homo sapiens
  misc_feature (1)...(2346): n = a,t,c or g
gcggccgcctgaggcgggcggtcggtatagagcgggcggcaggaggcaagcagcgaaaccttcccggccgccgctcccgtcccgacggcggcttccccaaggcggcaggactcggcgcgccatggacaggccggcggcggcggcggcggcgggctgcgagggcggcgggggcccgaacccggggccggcgggcggcaggaggcctcctcgggccgcggggggcgccaccgccggctcccggcagcccagcgtggagaccctggacagtcccacaggatcacatgttgaatggtgtaaacagcttatagctgctacaatttctagtcagatttcaggttcagtgacatcagaaaatgtgtccagagattacaaggctctaagggatggaaataagctggcacagatggaagaggctccacttttcccaggagaatcaattaaagccattgtgaaagatgtcatgtatatctgcccatttatgggagcagtgagtggaaccctgacagtgacggactttaagctgtacttcaaaaatgtcgagagggacccgcattttatccttgatgttccccttggagtgatcagcagagtggagaagattggagcacagagccatggagacaattcctgtggtatagagatagtgtgcaaggatatgaggaacttgcggcttgcttataaaacaggaagaacagagtaaactagggatatttgaaaacctcaacaaacatgcatttcctctttctaacggacaggcactatttgcattcagctataaagaaaaatttccaattaatggctggaaagtttatgatccagtatctgaatataagagacagggcttgccaaatgagagttggaaaatatctaaaataaacagtaattatgagttctgtgacacctaccctgccatcattgttgtgccaactagtgtaaaagatgatgacctttcaaaagtggcagtttttttagcaaaaggcagagtccctgtgttgtcatggattcatccggaaagtcaagcaacgattacccgttgcagccagccacttgtgggtcccaatgataagcgctgcaaagaggatgaaaaatacttgcaaacaataatggatgctaacgcacagtcacacaagcttatcatctttgatgctcgacaaaacagtgtcgctgataccaacaagacaaagggtggaggatatgaaagtgaaagtgcttacccaaatgcagaacttgtgttcttggagatccacaacattcatgtcatgcgagagtcactacgcaaattaaaagagattgtgtacccttcgatcgatgaggcgcggtggctctccaatgtggatgggacgcattggctggaatatataaggatgctgcttgctggggcagtaagaattgctgataaaatagaatctgggaaaacatctgtggtggtgcattgcagcgacggttgggaccgaacagcccagctcacatctctggctatgctaatgttggacagttactacaggaccattaaaggatttgaaactctcgtagaaaaggagtggataagctttggacacaggtttgcactgcgagtgggccatggtaatgacaaccatgcggatgctgaccgatctcccatatttctgcagtttgttgattgtgtttggcaaatgacaaggcagtttccttcagcattcgagtttaatgagctattcttgattacaattttggatcacctttatagctgtctttttgggacctttttgtgcaactgtgaacagcagcgattcaaagaggatgtatatacaaagacgatatctttatggtcgtatatcaatagccagctagacgagttttctaatcccttctttgtgaattatgaaaaccacgtgttatatcctgttgctagtctgagtcatttggaattgtgggtaaattattatgtacgatggaatccacggatgagacctcagatgcccattcaccagaatctcaaggagctgctggccgtcagggcggagctgcagaagcgtgtggagggtctacagcgggaggtggccacgcgcgccgtctcatcctcatctgagcggggctcctcgccctcccacttcgccacctccgttcacaccttggtctgatgggcgaggtcagcctgctgctccactgtctcccggtggctcaagaaagggacctggcgatcactgttatggctgtagcttgtgatcttgtcttttaggattaggcccagggaccatttgtgtggctaggtgacagctcccactgttggcaaccgttaccctcctgtcagcggtttcacaggggagccgtctgtnacggccaccctgtgaagcaacttctggcatt

SEQ ID NO: 2523 - DNA, 2451 bp, Homo sapiens
ggctccagcatcaagatccgtctgacagtgttatgtgccaagaaccttgcaaagaaagacttcttcaggctccctgaccccttttgcaaagattgtcgtggatgggtctgggcagtgccactcaaccgacactgtgaaaaacacattggacccaaagtggaaccagcactatgatctatatgttgggaaaacggattcgataaccattagcgtgtggaaccataagaaaattcacaagaaacagggagctggcttcctgggctgtgtgcggctgctctccaatgccatcagcagattaaaagataccggataccagcgtttggatctatgcaaactaaacccctcagatactgatgcagttcgtggccagatagtggtcagtttacagacacgagacagaataggaaccggcggctcggtggtggactgcagaggactgttagaaaatgaaggaacggtgtatgaagactccgggcctgggaggccgctcagctgcttcatggaggaaccagccccttacacagatagcaccggtgctgctgctggaggagggaattgcaggttcgtggagtccccaagtcaagatcaaagacttcaggcacagcggcttcgaaaccctgatgtgcgaggttcactacagacgccccagaaccgaccacacggccaccagtccccggaactgcccgaaggctacgaacaaagaacaacagtccagggccaagtttactttttgcatacacagactggagttagcacgtggcacgaccccaggataccaagagaccttaacagtgtgaactgtgatgaacttggaccactgccgccaggctgggaagtcagaagtacagtttctgggaggatatattttgtagatcataataaccgaacaacccagtttacagacccaaggttacaccacatcatgaatcaccagtgccaactcaaggagcccagccagccgctgccactgcccagtgagggctctctggaggacgaggagcttcctgcccagagatacgaaagagatctagtccagaagctgaaagtcctcagacacgaactgtcgcttcagcagccccaagctggtcattgccgcatcgaagtgtccagagaagaaatctttgaggagtcttaccgccagataatgaagatgcgaccgaaagacttgaaaaaacggctgatggtgaaattccgtggggaagaaggtttggattacggtggtgtggccagggagtggctttacttgctgtgccatgaaatgctgaatccttattacgggctcttccagtattctacggacaatatttacatgttgcaaataaatccggattcttcaatcaaccccgaccacttgtcttatttccactttgtggggcggatcatggggctggctgtgttccatggacactacatcaacgggggcttcacagtgcccttctacaagcagctgctggggaagcccatccagctctcagatctggaatctgtggacccagagctgcataagagcttggtgtggatcctagagaacgacatcacgcctgtactggaccacaccttctgcgtggaacacaacgccttcgggcggatcctgcagcatgaactgaaacccaatgggcagaaatgtgccagtcacagaggagaataagaaagaatacgtccggttgtatgtaaactggaggtttatgagaggaatcgaagcccagttcttagctctgcagaaggggttcaatgagctcatccctcaacatctgctgaagccttttgaccagaaggaactggagctgatcataggcggcctggataaaatagacttgaacgactggaagtcgaacacgcggctgaagcactgtgtggccgacagcaacatcgtgcggtggttctggcaagcggtggagacgttcgatgaagaaaggagggccaggctcctgcagtttgtgactgggtccacgcgagtcccgctccaaggcttcaaggctttgcaaggttctacagggcgcggcagggccccggctgttcaccatccacctgatagacgcgaacacagacaaccttcggaaggcccatacctgctttaaccggatcgacattccaccatatgagtcctatgagaagctctacgagaagctgctgacagccgtggaggagacctgcgggtttgctgtggagtgaaaagcaaccaaaggcaacagagtctagctcatggccaccagaccaaaagcatccagcttctgtgcacctcctgcaaagctggcagaggccctggaattccagatcacctgaggggaaagggttgtctctctcctttctgttgggggagggggatgggggacttttgttggtggctcccacccatatatccctcctttaccatagtactcccacccacttccatcacccatccaataaaatgcagccaggtttagcctttggctttggtcacacaggaaa

SEQ ID NO: 2524 - DNA, 6867 bp, Homo sapiens
ggatcttgtacatcaacccggcagacttgggatggaaccctccagtgagcagctggattgagaagagggaaatccagacagagagagccaacttaaccattttgttcgacaagtatcttccaacctgcctagacacactcagaaccaggtttaagaagatcattcccatcccagagcagagcatggttcagatggtgtgtcaccttctggaatgtctcctgaccacggaggacatccctgcagactgccctaaggaaatttatgagcattattttgtgtttgctgccatctgggctttcggcggagcaatggtccaagatcagcttgtggactaccgggcagagttcagcaaatggtggctgactgagttcaaaacagtcaagtttccttcccaaggaaccatctttgactattacatcgacccagagaccaagaaattcgagccttggtccaagctcgtcccccagttcgaatttgaccccgagatgcccttgcaggcgtgtttggtgcacacgagtgagaccatccgtgtgtgctacttcatggagcggttgatggcgcggcagcggcctgtcatgctggtgggcacggctggcactggcaagtcggtgctggtgggagctaagctggccagccttgaccccgaggcatacctggtgaaaaacgtgccattcaactactacaccacgtcagcaatgctgcaggctgtcctggagaagcctctggaaaagaaggctggcagaaactatggccctccagggaacaagaaactcatctatttcattgatgacatgaacatgcctgaggtggatgcctacgggacggtgcagccccacaccatcatccggcagcatctggactatggccactggtatgatcggagcaagctgtccctaaaggagatcacaaatgtacagtatgtttcctgtatgaaccccacggcaggcagcttcaccatcaacccccggcttcagcgtcacttcagcgtgtttgtcctctccttcccgggggcagatgccctgtcctctatctacagcatcatcctcactcagcatctgaagctcggaaacttcccggcgtccctgcagaaatccatccccccactgatcgatctggccctcgccttccaccagaaaattgctaccaccttcctacccacaggaatcaaattccactacatcttcaacctcagagattttgccaacattttccagggcattctcttctcctcagtggaatgtgtgaaatccacatgggatcttataaggctctatctgcatgaatcaaatcgagtttatcgggataagatggtagaagaaaaggactttgatctttttgataaaatccagacagaagtgctcaagaaaacttttgatgatattgaagaccctgtggagcagacccaaagcccgaacctgtattgtcactttgcaaatggtattggggagcccaaatacatgcctgtacagtcttgggaacttttgacccagactctggtggaggccttggagaaccacaatgaagtcaacacagtgatggacctagttctctttgaggatgccatgcgccatgtctgccatatcaatcgcatcttggagtccccgcggggaaatgctctgctggttggtgtaggtgggagcggcaagcagagcctgacaaggctggcagctttcatcagctccatggatgtcttccagatcacactgcgcaaaggctaccagatccaggacttcaagatggacctggccagcctgtgtctgaaagctggagtgaagaatctcaacacagtgtttctcatgactgatgcccaagtggctgatgagaggttccttgtgctcatcaatgatcttttggcatctggggagatcccagatctctactctgatgatgaagttgaaaacatcataagcaatgtgaggaatgaagtcaagagccagggtctggttgacaacagagagaactgttggaagttctttatagatcggatccggcgacagctgaaggtgactctctgtttctcccctgtgggaaacaagctaagagtccgcagcaggaagttcccagccattgtgaactgcacagccatccactggttccacgagtggcctcagcaagcattggagtctgtcagcctccgcttcttgcagaacacagagggcattgagcccacagtaaagcagtcgattagcaaattcatggcctttgtccacacaagtgtcaaccaaacatcccagtcttatctgagcaatgaacagcgctacaactatacaactcccaagtcctttctggagttcatcagactctaccagagcttgttgcacaggcacagaaaagagctcaagtgcaagacagagcggttggagaacgggctgctgaagctgcatagcacctctgcccaggtggatgatctgaaagcaaagctggctgcccaggaagtagagctgaagcagaaaaatgaagatgcagacaaactgattcaggtcgtgggtgtggagactgacaaagtgagcagagagaaagccatggcagatgaagaggagcagaaggtggccgtcatcatgctagaggtgaaacagaagcagaaggactgtgaggaggacctggcaaaggctgagccagcactcacagcagcgcaggcagctctcaacaccctgaacaagaccaacctgacagagctgaagtcatttggctctccgcctctggccgtcagcaatgtcagcgctgcggtgatggtactgatggctcccaggggtagggtgcccaaggaccggagctggaaggctgctaaggtcaccatggccaaagtggatggcttcctggactcgctaataaacttcaacaaagagaacattcacgagaactgcctcaaagccatcaggccgtatctgcaagacccggagttcaatcctgagtttgtggccaccaaatcctatgcggctgcaggcctctgctcctgggtcatcaatattgtgagattttatgaggtgttctgtgatgtggaacccaagcgccaggcactgaacaaagccaccgcggacctcacagctgcccaggagaagctggctgccatcaaagccaagatcgctcaccttaatgaaaacctggcaaagctcacagccaggtttgagaaagcaacagcagacaaactcaaatgtcagcaagaagccgaagtgaccgcagtcaccatctcccttgccaaccgcctggttggaggactcgcttctgaaaacgtgaggtgggcagatgccgtgcagaacttcaaacagcaggaaaggacgttatgtggagacattttacttataacggctttcatttcctaccttggcttcttcacaaagaaataccggcagagcctcctggacagaacttggaggccctacctgagccagctgaaaactcccattccagtcaccccagccctggatcccctgaggatgctgatggatgatgctgacgtggctgcctggcagaacgagggcctcccagccgaccgcatgtccgtggagaatgccaccattctcatcaactgtgagcgctggccactcatggttgaccctcagctacaaggcatcaaatggatcaagaataaatatggtgaagatctccgggtcacgcagattggtcagaaaggctaccttcaaatcatagagcaggccctggaagctggagctgtggtgctgattgaaaatctagaggagtccattgatcctgttctgggacccctgcttgggagagaagtcattaaaaaaggacgattcattaaaattggagacaaagaatgtgaatacaatcccaagttccggctcatcctccacaccaagctggctaatcctcactaccagcctgagctgcaggctcaggccaccctgatcaacttcaccgtgaccagggatggcctggaggaccagttgctggccgctgtggtcagcatggagaggccagacttggagcagctgaagtccgatctcacaaagcagcagaatggattcaaaattaccctgaaaacgctggaagacagtcttctctctcgcctctcctccgcctctgggaacttcctgggagaaacagtgctggtggaaaacctagagatcaccaagcagactgctgccgaagttgagaaaaaggtccaggaggccaaggtgactgaagtgaaaatcaacgaggcccgagagcactaccggccagcagctgccagggcctcactgctctacttcatcatgaacgacctcagcaagatccatccaatgtaccagttttctctcaaggccttcagtatcgtcttccagaaggctgtggagagggctgctcctgacgaaagcctcagggagcgggtggccaacctaatagacagcataaccttctctgtgtaccagtacaccatccgcgggctctttgagtgtgataagctgacctaccttgcccagctcacctttcagattctcctcatgaaccgagaagtcaatgcagtggagttggatttcctgcttcgatctccagtgcagacgggcaccgccagccccgtggagttcctctcccatcaggcgtggggagctgtcaaggtactttcatcaatggaagaattctctaatctggatcgggacatagagggatctgctaagagctggaaaaagtttgtggagtccgaatgtcctgagaaagagaagctcccacaggagtggaagaacaagacagccctgcagcgcctctgcatgctgagagccatgcggcccgaccggatgacctatgctttgcgagattttgttgaagagaagttaggaagcaaatacgtggtgggaagagccctagattttgcaacctcatttgaagaatcgggaccagccactcctatgtttttcatcctgtctccaggggtggacccactgaaggatgtagaaagtcaaggaagaaaacttggatacaccttcaacaatcagaactttcacaacgtgtctttggggcaaggacaggaagtggtggctgaggctgcgctggacctcgctgccaagaaaggtcactgggttattttgcagaacactctggagatgtgttctcgggagacggagtttaagagcatcctctttgctctttgttacttccatgcggtggtggcagaaagacgaaaatttgggccccagggatggaatcgctcatacccctttaacactggagacctcactatctctgtgaatgtcctctacaacttcctggaggccaacgcaaaggtcccctatgatgatttgcgctacctgtttggagagatcatgtatggaggccatatcacagatgactgggacagaagactctgcagaacctacctgggggaattcattcgaccagaaatgttagaaggagaactgtctttggccccagggttcccactcccaggcaacatggactacaatggttatcatcagtacatcgatgctgagctgcccccagaatccccctacctctatggcctccacccgaacgcagagattggcttcctgacccaaacctcagaaaagctcttccgcactgtgctggagctgcagcctcgggacagccaggccagagacggagcgggcgccacaagagaagaaaaggtcaaggcacttctggaagaaatattggagcgggtgacagacgagtttaacatcccagaactgatggccaaagtggaggagcgcaccccttacattgtagttgccttccaggagtgtggccggatgaatatcctcaccagagagattcagcgctcactgagggagctggagctcggcttaaagggggagctgactatgaccagccacatggagaacttacagaatgccctgtacttcgatatggtgccagagtcctgggctagacgagcctacccttccacagcaggcctggcagcctggtttccagacctcctcaacagaatcaaggagctagaggcttggacgggtgactttacaatgccctccactgtgtggctgacaggcttcttcaacccccagtcgttcctgactgccatcatgcagtccacggctcgcaagaatgagtggccactggaccagatggccctgcaatgtgacatgacgaagaagaacagagaagagtttaggagtcctcctcgggaaggggcctacatccatggcctcttcatggaaggtgcctgctgggacacacaggctgggatcattacagaggcaaagctgaaggatctgacaccccctatgcctgtgatgttcatcaaggccattcctgcagattaggcaggactgcggccatgtctattcctgtcctgttaccaagactagtcagccgggaccccacctacgtgtggactttcaacctgaagactaaggaaaacccatccaagtgggttctggctggagtagccttgcttctccagatttagcatcctgcagagccaccgagaaaataaaaaagctgggcttggaggctgcctagagggacaggtgggtgaagggtcaccacagacacttagaacggtaagaaaccatgagcactcacaattctgtagaattcctctagggaacttggagaggtgtgcctaaggtgaggctgagctgaaggaatgtgggcccaggtttcttaataaaatgatttactcttcaactgtgtctggcccaggatttgagagctgctgaatcataaatgatcatgtagagaccaagagaaacaaaccacaagggccctgaccttgttacacaacactatcctaggtgctcttcttccaggctaccccacgcagtccttggaccagtggtattggcatcacccatgaaccagaatctccattttaacaatctctctggaaaatctgtatgcacattatagtttgagaaacactaccctggagcaggggtcaccaac

SEQ ID NO: 2525 - DNA, 6867 bp, Homo sapiens; identical to SEQ ID NO: 2524

SEQ ID NO: 2526 - DNA, 3932 bp, Homo sapiens
caggagtgatcgggcagcagtcggccggccagcggacggcagagcgggcggacgggtaggcccggcctgctcttcgcgaggaggaagaaggtggccactctcccggtccccagaacctccccagcccccgcagtccgcccagaccgtaaagggggacgctgaggagccgcggacgctctccccggtgccgccgccgctgccgccgccatggctgccatgatggatcggaagtgagcattagggttaacggctgccggcgccggctcttcaagtcccggctccccggccgcctccacccggggaagcgcagcgcggcgcagctgactgctgcctctcacggccctcgcgaccacaagccctcaggtccggcgcgttccctgcaagactgagcggcggggagtggctcccggccgccggccccggctgcgagaaagatggcggacctggccgagtgcaacatcaaagtgatgtgtcgcttcagacctctcaacgagtctgaagtgaaccgcggcgacaagtacatcgccaagtttcagggagaagacacggtcgtgatcgcgtccaagccttatgcatttgatcgggtgttccagtcaagcacatctcaagagcaagtgtataatgactgtgcaaagaagattgttaaagatgtacttgaaggatataatggaacaatatttgcatatggacaaacatcctctgggaagacacacacaatggagggtaaacttcatgatccagaaggcatgggaattattccaagaatagtgcaagatatttttaattatatttactccatggatgaaaatttggaatttcatattaaggtttcatattttgaaatatatttggataagataagggacctgttagatgtttcaaagaccaacctttcagttcatgaagacaaaaaccgagttccctatgtaaaggggtgcacagagcgttttgtatgtagtccagatgaagttatggataccatagatgaaggaaaatccaacagacatgtagcagttacaaatatgaatgaacatagctctaggagtcacagtatatttcttattaatgtcaaacaagagaacacacaaacggaacaaaagctgagtggaaaactttatctggttgatttagctggtagtgaaaaggttagtaaaactggagctgaaggtgctgtgctggatgaagctaaaaacatcaacaagtcactttctgctcttggaaatgttatttctgctttggctgagggtagtacatatgttccatatcgagatagtaaaatgacaagaatccttcaagattcattaggtggcaactgtagaaccactattgtaatttgctgctctccatcatcatacaatgagtctgaaacaaaatctacactcttatttggccaaagggccaaaacaattaagaacacagtttgtgtcaatgtggagttaactgcagaacagtggaaaaagaagtatgaaaaagaaaaagaaaaaaataagatcctgcggaacactattcagtggcttgaaaatgagctcaacagatggcgtaatggggagacggtgcctattgatgaacagtttgacaaagagaaagccaacttggaagctttcacagtggataaagatattactcttaccaatgataaaccagcaaccgcaattggagttataggaaattttactgatgctgaaagaagaaagtgtgaagaagaaattgctaaattatacaaacagcttgatgacaaggatgaagaaattaaccagcaaagtcaactggtagagaaactgaagacgcaaatgttggatcaggaggagcttttggcatctaccagaagggatcaagacaatatgcaagctgagctgaatcgccttcaagcagaaaatgatgcctctaaagaagaagtgaaagaagttttacaggccctagaagaacttgctgtcaattatgatcagaagtctcaggaagttgaagacaaaactaaggaatatgaattgcttagtgatgaattgaatcagaaatcggcaactttagcgagtatagatgctgagcttcagaaacttaaggaaatgaccaaccaccagaaaaaacgagcagctgagatgatggcatctttactaaaagaccttgcagaaataggaattgctgtgggaaataatgatgtaaagcagcctgagggaactggcatgatagatgaagagttcactgttgcaagactctacattagcaaaatgaagtcagaagtaaaaaccatggtgaaacgttgcaagcagttagaaagcacacaaactgagagcaacaaaaaaatggaagaaaatgaaaaggagttagcagcatgtcagcttcgtatctctcaacatgaagccaaaatcaagtcattgactgaataccttcaaaatgtggaacaaaagaaaagacagttggaggaatctgtcgatgccctcagtgaagaactagtccagcttcgagcacaagagaaagtccatgaaatggaaaaggagcacttaaataaggttcagactgcaaatgaagttaagcaagctgttgaacagcagatccagagccatagagaaactcatcaaaaacagatcagtagtttgagagatgaagtagaagcaaaagcaaaacttattactgatcttcaagaccaaaaccagaaaatgatgttagagcaggaacgtctaagagtagaacatgagaagttgaaagccacagatcaggaaaagagcagaaaactacatgaacttacggttatgcaagatagacgagaacaagcaagacaagacttgaagggtttggaagagacagtggcaaaagaacttcagactttacacaacctgcgcaaactctttgttcaggacctggctacaagagttaaaaagagtgctgagattgattctgcatgacaccggaggcagcgctgctcagaagcaaaaaatctcctttcttgaaaataatcttgaaccagctcactaaaagtgcacaaaccagttggtaccgtgataatgcagatctccgctgtgaacttcctaagttggaaaagcgacttcgagctacagctgagagagtgaaagctttggaatcagcactgaaagaagctaaagaaaatgcatctcgtgatcgcaaacgctatcagcaagaagtagatcgcataaaggaagcagtcaggtcaaagaatatggccagaagagggcattctgcacagattgctaaacctattcgtcccgggcaacatccagcagcttctccaactcacccaagtgcaattcgtggaggaggtgcatttgttcagaacagccagccagtggcagtgcgaggtggaggaggcaaacaagtgtaatcgtttatacatacccacaggtgttaaaaagtaatcgaagtacgaagaggacatggtatcaagcagtcattcaatgactataacctctactcccttgggattgtagaattataacttttaaaaaaaatgtataaattatacctggcctgtacagctgtttcctacctactcttcttgtaaactctgctgcttcccaacacaactagagtgcaattttggcatcttaggagggaaaaaggacagtttacaactgtggccctatttattacacagtttgtctatcgtgtcttaaatttagtctttactgtgccaagctaactgtaccttataggactgtactttttgtattttttgtgtatgtttattttttaatctcagtttaaattacctagctgctactgcttcttgtttttcttttcctattaaaacgtcttcctttttttttcttaagagaaaatgggaacatttaggttaaatgtctttaaattttaccacttaacaacactacatgcccataaaatatatccagtcagtactgtattttaaaatcccttgaaatgatgatatcagggttaaaattacttgtattgtttctgaagtt

SEQ ID NO: 2527 - DNA, 2171 bp, Homo sapiens
atggcgtctgtgcaggcgtcccgccgccagtggtgctacctgtgcgacctgcccaagatgccgtgggccatggtgtgggacttcagcgaggccgtgtgtcgcggctgcgtgaacttcgagggcgcggaccgcatcgaactgctcatcgatgccgcccgccagctcaagcgcagccacgtgctccccgagggccgctcgcccgggcccccggcccttaagcacccggccaccaaggacctggcggcggcagccgcacaggggccccagctgccgcccccgcaggcccagccccagccgtcagggaccggcggcggcgtgtcgggccaggaccgctatgacagggccacatcatcaggccgcctccccctgccctcgcccgccctggagtacactctggggtcccgcctggccaatgggctgggccgtgaggaggccgtggctgagggggcgcgaagggccttgcttggctccatgcctggcttgatgccccctgggctgctggcagctgcagtgtctggcctgggaagccgaggcctgacgctggcacccggcttgagtcctgcccgtcccctcttcggctccgatttcgagaaagagaagcagcagaggaatgcggactgtctggcagaactgaacgaggccatgcgaggccgggcagaggaatggcacgggcgccccaaagcagtgcgggaacagctactggcgctgtccgcctgcgccccgttcaatgtgcgcttcaagaaggatcacgggctggtggggcgagtgttcgccttcgatgctactgcccgtcctccaggatacgagttcgagctgaagctcttcaccgaatacccctgtggttccggcaatgtgtacgccggcgtcctggcagtggctcgccagatgttccacgatgctctgcgggagccgggcaaggcactggcttcttcgggcttcaagtacctcgaatatgaacgccggcatggatcaggagaatggcggcagctgggcgagctgcttaccgacggcgtccgcagcttccgcgagccagctcccgcggaggccctgccccagcagtacccagagccggcccctgcggctctctgtggcccacccccgcgagccccatcccggaacctggcgcccacgccgcgccgtcgcaaggcatcccccgagccggagggcgaggcggctgggaagatgaccaccgaggagcagcagcaacggcactgggtggcacccggcggcccgtactccgctgagacccctggtgtgccctcgcccattgccgccctgaagaatgtggccgaagccctgggccactcacccaaggaccctggcggaggcggggggcctgtgcgtgcagggggcgccagccctgcagcctcctccacggcccagccgccaacccagcatcgccttgtggcccgcaacggcgaagcagaagtcagtcccacagcgggggccgaagctgtcagcgggggtggcagcggcactggggcgacccctggggcccccctgtgcttgtaccctgtgcagggagcggctagaagacacccacttcgtccaggtgccctccggtgcccgaacacaagttctgcttcccctgctcccggaagttcatcaaggcgcagggcccggccggggaaggtgtactgcccgagcggagacaagtgcccgctggtcggctcctccgtgccctgggccttcatgcagggcgagatcgccaccatccttgctggagacatcaaagttaagaaagaacgggacccctaggctaccactgcctccaggctactgccctctgcccctttgccacccaccgctgccgcggataaattattccctccccgacccagcccagtgccacctctatctgtgtacatactcccttcttccacccagatgggtcccctggggtagatgcattgtgggtggggggagaaagcttgtggctcctgtccgagggggtgtttggggtcccttggcccctccagtttccctctgtcctccttggcttggctttgctgctgcttgtagttgggggagaggtgcccccctcctccttgagaagggacctcctgaaaactcgctctttataaacgaggcaaaagcatttaattcccacccccccaccccccgctcccttctgctccttcaataaaccgaaagatgggtttttttttttc

SEQ ID NO: 2528 - DNA, 2528 bp, Homo sapiens
gaaacacaaattcatccagtgttacaaattctgcagcaggtgttgaagatcttaacatcgttcaagtgactgttccagataatgagaaggaaagattatcaagcattgaaaagattaaacagctaagagaacaagttaatgacctctttagccgaaaatttggtgaagcaattggcgtggatttccctgtgaaagttccctacaggaagatcacattcaaccctggctgtgtggtgattgatggcatgcccccgggggtggtattcaaggcccccggctatctggaaatcagttccatgaggaggatcttggaggcagctgagtttatcaaattcacagtcatcaggccgcttccagggcttgagctcagtaatggtgagtattctacagtgggaaaacgcaagatagaccaggagggccgtgtgtttcaagaaaagtgggagagagcgtatttcttcgtggaagtacagaatatttcaacatgtctcatatgcaaacgaagcatgtctgtgtccaaagaatataacctaagacgccactatcaaaccaatcacagcaagcattatgaccagtatatggaaagaatgcgtgacgagaagcttcacgagctgaaaaaagggctcaggaagtatctcttaggcttgtcagacaccgagtgtcccgagcaaaaacaagtgtttgcaaacccaagtccaacccagaaatcccccgtgcagcctgtagaggacctagctgggaacttatgggagaagttacgtgaaaaaatcaggtcttttgtggcatattctatcgcaatcgatgagatcacggatataaataataccacccagttggccatattcatccgtggtgtcgatgagaatttcgatgtgtccgaagaacttctggacacggtgcccatgacgggtacaaaatctggcaacgagatcttttcgcgtgttgagaaaagcctgaaaaacttctgtatcaactggtcgaaattagtaagcgtggcctccactggcaccccaccgatggtggatgccaataacgggcttgtcacaaaactgaagtccagggtggcgacgttctgcaagggtgcggaactgaagtccatctgttgtataattcatccggaatcactctgtgctcaagaagttgaagatggaccacgtcatggacgtggtagtgaagtccgtgaactggatatgctcccggggactgaaccacagcgagttcacaaccttgctctatgagctggacagccagtatggtagcctcctgtactacacggagattaagtggctcagtcgcgggctcgtgctaaagagatttttcgaatccttggaagaaatcgactccttcatgtcatccagagggaaacccctgcctcaactgagctccatagattggatccgagacctggccttcttggttgacatgacgatgcatctgaacgctttgaacatctctctccaaggacactcccaaatcgtcacgcagatgtatgacctgatccgggcgttcctagcaaaactgtgcctctgggagactcatttgacgaggaataatctggcccactttcccaccctgaaattggtttccagaaatgaaagcgatggcctgaactacattcccaaaatcgcggaactcaagaccgaattccagaaaaggctgtctgatttcaaactctacgaaagcgaactgactctgttcagctccccgttctccacgaagatcgacagtgtgcacgaggagctccagatggaggttatcgacctgcaatgcaacacggtcctgaagacgaaatacgacaaggtgggaataccagaattctacaagtacctctggggtagctacccgaaatacaagcaccattgcgcaaagattctttccatgttcgggagcacctacatctgcgaacagctgttctccattatgaaactgagcaaaacaaaatactgctcccagttaaaggattcccagtgggattctgtactccacatcgcaacgtgatggagagaaaactcctggcagggccctatggtgggaaaggctggagtcttctagtcccaagggattgggagatgacaaaatgaattttttttttcttttttgagatggagtcttgctctgtcgcccaggttggagtgcagtggcgtgatctcggcttactgcaacttccagctcctgggttcgaacgattctcctgcctcagcctcccgagcagctgggactacaggcatgcgccaccatgcccggctaatttttgtattagtagagatgaggtttcaccatgttggccaggctggtctccaactcctgacctcaggtgatccacctgcctcgacctcacaaagtgctgggattacaggcatgaaccactgtgcccagctgacaaaatgagttcttaaactttttttttttttcagttttttttccactttgaatcagaaatataatctgcagtatcatacttgtttatattacattgtatgcctcactattcattaaaaatcaagaaagttttattgtaaaaaaaaaaaaaa

SEQ ID NO: 2529 - DNA, 1835 bp, Homo sapiens
tttttttttttttagcatttaattctgattttaatttccataaaattaactctacaaagatttctcaaagaaatctgaccgccttcaaactacatgtttgttttgtattacatgtaatagatttccacatatgaaaaaatcataaaatgaaggctacgttttccaaccgctatttaagtactgtttagaaactatcgttgaatgaatgaacctgattttgcctcatcgtgtttatctaaaagagtctttgaaagatatttattttccattttctttacacggtccctctttttcaatctgtaaataaaaattaatgagcaatttaggacacaatatcacaacacaattattctgtaattgatctgataaccaaagacacataagaataggatgatctataggatagatgtttccacacagcatttgtctgaaatcagattattttaaatgatgccttgacttttgaattcaattctagaaccaattatcctaaactaaatcagagtattacaaatgaagatattccaacacaaagacttgtaggattttgtttagattgtcaatggttgattcatccaaattttcttcattgtcatccatggtgtgccagacttcagggaaaggagacggtatcagatgcagaactggaacacctcttcttaaaaatggaatatggtcatcctgaatcacacctccataactgtaattctggaaataccgcccctccaaagagtgatccttgagcaaacccaattcatgaagttcatgttcaattgcttgaagtctttcgaaccacctggctgagtttggaaaaaaattgggaaacgttgggtttggagctccaatcaaatccaataagaccaataaatccatgccatgcagttggctggtgcctctcgctccaggtgggtgcggggtcgatgccatctttgcagctaagtgtcgagacccatagagagaatcttgaggagaccagtgaagaaaagcctcttcaccatcaaagaagatcagctggagtgacaaatctggcttggagtctgaaacagtctttaaggaaaggagtttcttgtctaaggcacgagcaagttccaacatcattgcacatggcacggctgaatcagtggctcctacaaacactctgttgttcccagtgggaaaaatacttggagtcatagtggcaggcgaggaccaaatgtcgtttagcagtgggattgagggtgctgatgatatttgagaaagaccggtacccatagggtgtctgactcaagaaggtgtctatttccaagacccagtcagcctgaagcctctgaattcgctgcatgatgtgctgacgagcagcatagcttccaggggatcccgggtatcgctctatcagcaatggctgtaagtcattttgccacatttcagagatactggtgccttctgcaatttgccgaagagccgatgaattcaaaatggctggctggtggtaattcttctcctctggccaggctgaggcactcggactgacccccctggatgcccagggcagggcggccaccagcagcagcaggtggagggtgcccacgacgcgccggtgtcttccgcctgccatctctccgagtctgtctgggagcgggttccccgggccgctggcggtcacgagcccgggaacgcgcgtccttcgccttccctcttctccacccttgggtcgactgcgcccgccttcccatcgcccccggtgaggatcagggcttggcctgctctgagtcatctcccagtaacatctagttcccagaaaaatcagaacaaggatactgaagcagaaccatttcacagagagcaaagatttgaag

SEQ ID NO: 2530 - DNA, 1835 bp, Homo sapiens; identical to SEQ ID NO: 2529

SEQ ID NO: 2531 - DNA, 1023 bp, Homo sapiens
cttccggcttgctaagcagaggccggaagcggtggtttttagcggctctctgggtagcagggtggtgtgatagcggcagcgaggggctcggagaggtgctcggattctcgtagctgtgccgggacttaaccaccaccatgtcgagcaaaagaacaaagaccaagaccaagaagcgccctcagcgtgcaacatccaatgtgtttgctatgtttgaccagtcacagattcaggagttcaaagaggccttcaacatgattgatcagaacagagatggtttcatcgacaaggaagatttgcatgatatgcttgcttcattggggaagaatccaactgatgagtatctagatgccatgatgaatgaggctccaggccccatcaatttcaccatgttcctcaccatgtttggtgagaagttaaatggcacagatcctgaagatgtcatcagaaatgcctttgcttgctttgatgaagaagcaactggcaccatacaggaagattacttgagagagctgctgacaaccatcgggggatcggttttacagatgaaggaagtggatgagctgtacagagaagcacctatttgataaaaaagggggaattttcaattacatcggagttcacacggcatcttgaaacaggggggcccaaagacaaagatgaccggaaaataaccttccaaatccccagcccaaacgttccttggttggccacttttggggtattcctggagattttcctcttgcatggcccttaagctttagcagcttttgcatttccctgttggtatttattcctcagcccattttgggccaaatggatcctttaaaactcagctgggaaacgggcctttctattaatatccatttttcagaataaaaaatagggtaatttaacctaccagcccttctcccccaataactggtgggtctatacagagtcaatatattttttcagaggaaagttagttcggctcgattttttctggaatcctaatttaaactttatgataaaataaaaaaaaaa

SEQ ID NO: 2532 - DNA, 6051 bp, Homo sapiens
atggcggctgccccctccgcgctgcttctgctgccgccctttccagtcctctctacctatcggctccagagccgcagtcgtccttccgccccagagaccgatgatagtcgagttgggggcattatgagaggagagaaaaactactacttccgtggagctgcgggggaccacggttcctgccccactacaacttcgcctctggcctcggccctcttgatgccctcggaggcagtctcaagcagctggtctgagtctggaggcggtttgtcagggggagatgaagaggacactcggctccttcaactcctccgcactgcccgggatccttctgaggccttccaggctttgcaagctgctttgccgcggcggggcggtcgacttggcttcccccgacgcaaggaagctttgtatcgggcactgggccgagtgcttgtggaaggaggtagtgatgagaagcggctctgcttgcaacttctctcggacgttctccggggtcagggggaggcaggccagcttgaagaggcctttagcttagcacttttgcctcaactagttgtctcgttacgggaagagaatccagccctgcggaaagatgcgctgcagatccttcatatatgtctgaaacgtagtcctggagaggtgctgagaacgcttatacaacaaggactggaaagtaccgatgcccgacttagagcttccacagcactactgcttcccatcttgcttactactgaggacttgttgcttggtctggatctcaccgaggtgataatatccctagcccgaaagcttggtgatcaggagacagaagaagaatctgagacagctttctccgcacttcaacaaattggggagcgacttggccaagacaggtttcaatcttacatttctcgtctgccctctgccctgaggagacactacaatcgccgcctggagtcccagtttggaagtcaggttccttattatttggaacttgaagcctctggatttcctgaagatccccttccctgtgcagtgactctttccaacagcaatcttaaatttgggattattcctcaggagctgcattcacgattattggatcaggaagactataagaaccggacccaggccgtcgaagaactaaagcaggtgctgggaaaatttaaccctagttctactcctcattctagtcttgttggcttcattagtttgctatataatttgttagacgattctaacttcaaagtggtgcatggcacacttgaagtcctgcatttactggttattcgccttggagagcaggtacagcagttcttgggaccagttatagcagcttctgtcaaagtgctggcggacaacaagttggtgatcaaacaagaatacatgaaaatcttcctcaagctaatgaaggaagtaggacctcagcaggtgctttgtttactcctggaacatctcaaacataagcattccagagtgagagaggaggtggtgaacatttgcatctgctccctgctgacctatcctagtgaggattttgacttgcccaaactgtcctttgatcttgccccagctcttgtagatagcaaacgcagggtacgccaagcagctttagaagcttttgccgtattggcatcatcaatgggctcaggtaaaaccagcatcctttttaaagctgtggatacagttgaactgcaagataatggagatggagtgatgaatgctgtgcaggccagattggctaggaaaaccttaccaaggctcacagagcagggatttgtggaatatgcagtactgatgccatcttctgccgggggtaggtcaaaccatttggcacatggagcagatacggactggcttttggctggtaacagaactcagagtgcacactgtcactgtggtgaccacgtgagggatagcatgcacatttatggatcttacagcccaactatctgtacccgaagggtattaagtgcaggaaaaggaaaaaataaattaccatgggaaaatgagcaacctggaatcatgggagaaaaccagacctccacttccaaggatatagagcagttttcaacatatgatttcatcccatctgcaaaattaaagctttctcaaggaatgccagtcaatgatgatttatgttttagcagaaaaagagtatcaagaaacttatttcagaatagtcgggattttaacccagattgtcttcctttatgtgctgctggtactactgggactcatcaaacaaatctttctgggaaatgtgcacaacttggattttcacaaatatgtggtaaaactggcagtgtgggttctgacttacaattcctagggacaactagcagtcatcaagaaaaagtgtatgctagcctcaattttggcagtaagacacagcaaacatttggtagtcaaacagagtgtacttcctcaaatggtcaaaatccaagtccaggagcttacatccttccatcctatcctgtctcatcacctcgaactagtccaaagcatacatctcctcttattatatctccaaagaagtctcaagataattctgttaatttctcaaattcctggcctcttaaaagcttcgaaggactatcaaagcccaagtcccacagaagaagcttgtcagcccaaaaatcgtctgaatcctacgggtaggaaatcatgggagaaaattctcaagaaaaacctcccagttcagcttacacctgcccttggtgagatcgccatcttcccgacgaggtctaaatgggacaaagcctgttcctcccatacccaaggggaataagccttttgcctgataaagctgatttaagcacagtgggacacaaaaagaaagagcctgatgatatttggaagtgtgaaaaagatagtcttccaattgatctttcagaattaaatttcaaggataaagatttggatcaagaagagatgcatagctctcttaggtcccttcgtaatagtgcagctaagaaaagagcaaaactgagtggcagtacttcagatcttgaaagccctgattctgcaatgaagctcgacttgacgatggactccccgtctctgtcttcctcaccaaacatcaattcttacagtgaaagtggagtttacagccaagaatcattgacttcttctctgtctacaactccccaggggaagagaataatgtcagacatatttccaacatttgggtcaaaaccttgtccaacaagactttcttctgcaaagaaaaaaatttctcatattgctgaacaaagccccagtgcagggtcatcatcaaatccacagcaaatttccagttttgacttcacaaccacaaaggctttatcagaagactcagtagtagttgttggaaaaggcgtatttggaagtttaagttcagcaccagcaacctgcagccaatcagtgatatcttctgtggaaaatggggatacattttcaattaaacaaagtattgaaccaccatcagggatttatggaagatcagtccagcaaaatatttcatcatatcttgatgttgagaatgaaaaagatgctaaagtttctatttctaaatctacttataacaagatgagacaaaagagaaaagaagagaaagaactgtttcacaataaagattgtgaaaagaaggaaaaaaattcctgggaacgaatgagacatacaggaactgagaaaatggcatctgaaagtgaaacacctactggagctatttcacagtataaagaaaggatgccttctgtcactcatagtccagaaataatggatctgtcagaactacgaccattctctaaaccagaaatagcactgacagaagccctgaggcttttggctgatgaggattgggagaagaaaattgagggactgaattttattagatgcttagctgcttttcattctgagatactgaacacaaagttgcatgaaacaaattttgcagttgttcaagaggtgaaaaatttacgttctggagtttctcgtgctgctgtggtctgtttaagtgatcttttcacttatttgaaaaagagcatggatcaagagctagataccacagtaaaagttttgttgcacaaggctggtgaatcaaatacatttataagagaagatgttgacaaagcattgagagctatggttaataatgtaactcctgcacgtgcagttgtttctcttatcaatggtggacaaaggtattatggtcgaaagatgctgttcttcatgatgtgtcatcctaactttgaaaaaatgcttgaaaagtatgtcccatctaaagatttgccatatattaaggactctgttagaaacttacagcaaaagggtttgggggagataccattagatactccttcagcaaaaggaagacgatctcatactggcagtgttggaaatacaagatcatcatctgtttctagagatgctttcaattcagctgaaagagctgtaactgaagttcgtgaagtcaccagaaaatcagtccctcgtaattccttagaaagtgctgagtaccttaaactcataactggcttattaaatgcaaaagactttcgtgatcgtattaatgggattaagcagcttttatcagatacagaaaataatcaagaccttgttgttggaaacattgtgaagatttttgatgcttttaaatctcgacttcatgattctaatagtaaagtaaatctggtggctctggaaacaatgcacaaaatgattcctctacttagagaccacttatctcctataatcaacatgctaattccagcaatagtggataacaatctgaattccaagaatccaggcatctatgcggctgctacaaatgttgttcaggcactgagtcagcatgtagacaattacttacttctacagccattttgcacaaaagctcagtttttaaatggaaaagcaaaacaggacatgacggaaaagcttgctgatattgttacggaactttatcaaaggaagccgcatgccacagagcagaaagtgttggttgttttatggcatctcttaggaaatatgacaaatagtggctctctgcctggagctggaggaaatatacgaacagccacagctaaattatcaaaagcactctttgcacagatgggtcagaatctgttaaatcaggctgcatctcaaccaccacatatcaaaaagagtttggaggaattactcgatatgacaattttaaatgaattatgaatcttcgataaaatactgtatgatgaacaaaagtgtttacatgatgacaaatggaactttctaaaagttatgttatcagtgcctgcacttcacatccagcaaattaagtcaatggctatttttatttgcagcctatgagtacacatctgtcctatatcaaccttaccacttatattcatcacataaaaacctaaaatattcatgaataattcatgaaatctgagtcacatgggatgaattcaattttaatatttttgagaaaagtcctgctcatttgcactattctatagaaactacaatttgttgccctatatgtaaaattagaattgtaattaaaaatacacattttattatgtaatcatgttctggtatgtctcatttctcagccttattttataacgtggaagtcattgaactatgttatcagaaactaagtttgtatattatttgtgaaaaacatgtatttctgaatcagtccgctaatatgattgtgcagtattagcttgcttttgctgctgtgttaatgtcatatatttgcttaccttttgggttcaattatctacataattgtgaaatttaacaagttataataaagcatgacaaccaaagttttagaaaacattaaacattttaaatgcacgtttaaaaaacgtgttgaatgtaacccccctatttttgtgtgcaaacactaaattttattgctttatgttttgacctttataaaggtgttattctgctgcccagttttgtaattctcaaaaatagtgccaggtcttctatagcttttttcagaattcatgggcttacaagtactgtatgcatctttaaaaagaaaaggaatgttataaaataaaaggatttatttctttaaaaaaaaaa

SEQ ID NO: 2533 - DNA, 1897 bp, Homo sapiens
ccacgcgtaaacttgggcccctccagggatcctttaaaacggccgccccttttttttttttttagaagtttggaccagaatatattttatttttctcataaaagttataccaaaaatatattttcttaacttaaaaatacagcttcaaaaagcaaaatttgagttgttagaattcattacacattttataaacagcagtgaaaggaagaagtcagcagaatggattcaatttttaaatacacaaatgttcatttcacaagcttgactttgtcctttaataacttaaaggtagggttcttgctgattttcttgttaaagatgaccaggagttcctcttcggatctgtgatgctcatctgtcactgtgtagtactgagctaaaacctttttccttagctttttgatggttatttcattgtctggggcctgtttcagaattgctttaatagttcccttccagttgaatttaccttttgcaggagcctcatcgtcttctggttctccgccctcaggatgctctgggagcttcatctttttcttcttagaatctgtttcaactttcgagtgcctccgcttcctcttccctgcgcccacgcgtgcctcttcctcactggcgctgtccttgcgctgcttcttcttcttgctcctcttccctgcagagccattggcctcagggacttcctccccaccagcctcaaggtcagcctcctgtccctttttgcgcttcttaggcttctgattccttgagttttcctggtggttttctaactttagttctttcttttctcttttccttttcttctgccgttcttcctttctttctcttttattcttcttcacctccccttgctgttccacggcgtctttcactttggaggctggaaccttggtggagatttctgcatgtggatttgccactgggtggagtggccgttgatcctgttccttattgactggttcgctgttggaagcttcagaaaagatattccacacctggtccagaatggattcattatgaacttttaaactgttcttcatccaattctgaaattttgcctttttcctggggaacgttgtcaaaagcactaatttgctctaaaagttctctcactttggggctgacattgggtctcttttattaattcactaattttctgaatccacgcctgctgttttgatggtcgcctttgtgggtttttaccttccatagcctttgccaccatacttctgatcttcacttatgcatttcacgtggtttttatagtcatcgccccagaaatctttaccgcagtcaatgcaagaaaggcattcacagtttctgcaaacagacacatgcttttccacttgtattttcttcactgattcaccacatgcattgcatgtaaaaaataccatttttaggtaaatggctaaatattctctatccaagacaggttttaagtcttgtcaaaaagccgtcatgtagaaattcagtcactccaatggaagacagcaaacattgcctctcagccagcgcccgccaacggtttcaaccggccgcggggagcacgtggactcgccgccgccagcccagcgccgcagctacctgcctctcaggcttcgcggtgcagaattcgcttctgaaccacccagcgcgcctgcgccgcggccacgccccccccagtggaagtgacgccaacggaagcaggaaggcggttccggcaagccaagggggcgttgtcgtgatgattccgcggccagcatcgctgcgagtggccttgaaggcagctgctgcagccagggagtggaggaagctgaagaaggctacagccggaagcgggagtgaggagcctgacaactcaagaggtggcacagggggagagaactgggacacaaaagagtctgagaagcagggaaca

SEQ ID NO: 2534 - DNA, 674 bp, Homo sapiens
tcgcaccggactcgaatgcccggaacgaccatttcgacgcatgctccctgcgggtgcaggctgggcttagctccgctggacccgcgctggggaactctggcctcgctgcactcatggcttctcctagcaaggcagtgattgttcccgggaacggaggcggggatgtgaccacccacggctggtatggctgggtgaaaaaggagctggagaagatacctggtttccagtgtttggctaaaaacatgcccgacccaattacagcacgagagagcatctggctgcccttcatggagacagagctgcactgtgatgagaagactatcatcattggccacagttctggggccatcgcggccatgaggtatgcagaaacacatcgagtatatgctattgtattagtgtctgcgtacacatcagacttgggggatgaaaatgagcgtgcaagtggatacttcacccgcccctggcagtgggagaagatcaaggccaactgcccttacattgtgcagtttggctctactgacgacccgttccttccctggaaggaacaacaagaagtggccgataggttggaaaccaaattgcacaaattcactgactgtggccactttcagaacacagagtttcatgaactgattactgttgtaaagtctttgctgaaagtaccagcatag

SEQ ID NO: 2535 - DNA, 2424 bp, Homo sapiens
ccgacactttcgggttgacgatcctcgccttgggtgggtctagacagccgcggcggctgcggcgcctatagtgacagtgagtgcgtgagacccggagagagatggcgatggcgatgtcggacagtggggcgagccgcctgcgtcggcagctggagtcagggggttttgaggcgcggctgtacgtgaagcagctctcgcagcagtcggatggggaccgggacctccaggagcaccggcagcgcatccaggcgctggcggaggagacggcgcagaacctgaagcgcaacgtctaccagaactaccggcagttcatagagacggcccgcgagatctcctacctggagagcgagatgtaccagctcagccatttgctgaccgagcagaaaagcagcctggagagcatcccgcttacgttgctgcctgccgctgctgccgccggagccgccgccgcctctggaggggaggagggagtcggtggggcggggggccgagaccacctccgaggccaggccggctttttctccacccccgggggtgcctcccgcgacggctccggtccaggcgaggaaggaaagcagcgcactctcaccaccctgcttgagaaggtggaaggctgcaggcatctgctggagacgccgggacagtacttggtgtacaatggggacctagtggaatacgatgcggaccacatggcccaactgcagcgggtgcacggctttctcatgaacgattgcttgttggtggctacctggctgcctcagcggcgtgggatgtatcgctacaacgctctctattccctagatggtttggccgtagtcaatgtcaaggacaacccgcccatgaaggacatgttcaagctgcttatgttccccgagaaccgtattttccaggccgaaaatgctaaaatcaaacgagagtggctggaagtgctggaggacaccaagagggccctcagtgagaaaaggcgaagggagcaggaggaggcagcggcccctcgagggccaccccaagtgacttccaaggccactaacccatttgaggatgacgaagaagaagaaccagctgttcctgaggtagaggaagagaaggtggacctctccatggaatggatccaggagttacctgaagacctggatgtctgcattgcgcagagagactttgaaggggcggttgacctgctggataaattgaaccattacctggaagataaacctagcccacctcctgtaaaagaactaagggccaaagtggaggagcgagttcgacagctcactgaggtgctagttttcgaactctccccagatcgttccctgagaggtggtccgaaggctactcgcagagcagtttcgcaactgatccggctgggccagtgcacgaaggcctgtgagctatttttgagaaacagggcagccgctgttcatactgcaattcgtcagcttcgcatcgaaggtgccactttactctatattcataagctgtgccatgtcttctttaccagccttctcgagactgcaagagaatttgagatcgattttgcaggcactgacagcggctgctactctgcctttgtggtctgggcaagatcagccatgggcatgttcgtggatgcttttagcaagcaggtgtttgatagtaaggagagcctctctacagcagctgagtgtgtaaaagtggctaaggagcattgccagcaactgggtgatatcggactggatctcaccttcatcatccatgcccttctggtgaaagacatccaaggggccttgcacagttacaaagaaatcatcattgaagccactaaacatcgcaactctgaagagatgtggaggaggatgaacttgatgacgccagaagccctgggtaagctcaaagaagagatgaaaagttgtggggtaagtaactttgagcagtacacaggggatgactgctgggtgaacctaagttacacagtggttgctttcaccaaacagaccatgggcttcttggaagaggccctgaagctgtatttcccagagctgcacatggtacttttggagagcctggtggaaatcattttggttgctgttcagcatgtggattatagtcttcgatgtgagcaggatccagagaagaaagcttttatcagacagaatgcatcctttttatatgaaacagtcctccgctgtggtggagaaaaggtttgaagaaggtgtggggaaacctgccaagcaactccaagatctgaggaatgcatctagacttattcgtgtgaatcctgaaagtacaacatcagtggtctaatgcttgggtctgtttatatgtgtatatatgcagagagagagagctttatattatttatatttatattaagttgtattagcatactctatagtttcaaacacaacttgaaaattaaaagtgccctcttaaaaatacaaaaaaaaa

SEQ ID NO: 2536 - DNA, 1705 bp, Homo sapiens
ttttttttttttctgtaatgaataatatttatgcaggcttgttttctaaagcaaaacaatattctcaatgtacaaagtttggccaccatccccactttaagatgaactatgtcttaatgacagagatacttgaaacgttgctcgaaaactataaactttgggattctaatagctagaaacaaattgtcagcttttactaattccaaagaagttaagagagaacctcataagaagagagttttattcaacattatggcatggccagttgtaattgttccaacaaagggaacctactttggtgccccgaggaaatggctgtttgtgatgctggggaaaagtcaagatgctgacgcctaatggctgttctagcctttccaggtttgtaacatgaagatggggaaggaaatgggcaccactgctgtttgtaatctgaggaactcttgggcagcattcactctccaaaggcagtacaaaacttacaaaggaaggtcaaaaagtcttaacactcccattccccccaggaactcttgtctgtgtcatctgggtagggaggggagggaatccggggttccctcagggtccttgttcatgtttaggctttttgataggcttccaatccaactcggctcgcttcagccttgctgctgggcctgaatgtaatagtgtgtgtcatcccttagtaatcactttgaagaggtttccctggacattccctttaaccccagtgggaacgccattatcttccagagcagacacgagtgaaccacgaagagaaaacccacccactggcctgttctcttctttggaagggtcatagtaatgcaggaaagctggatccttccttagaacaaagcgacgcaccttccagtttttcctcttgtgtccctgcttggccaggtagccttgtttcaccaccgtgccacttaactccacagtgctcaggctaatttcttccttggggcttatcttctttttgtagctctcagcaaaagtgtacagggctgtggagtcatccaggaactgctcggccagatccccagagcgaatggctcccatgcttcggacacccacaggcctgaggaagttctcctccatgagcatggaggccagggtcaccgcctccagacggctggccgtgaagctgttggagatgagccagtccaccagggaggagccgaggaaggtctttttataggtgcttccctgctccatgttggggcttgaacggattccggtgttgctatcgtgcatcttgtccacaatgcgatgcaggctgatgtgcgggggcagcttgaaggagtttctcaggctgtgcagctgctggacctttccccgggcttgccctgcatgaatagccccggtgatcttcaaaggcccaggcatcccggcttcctctcgagaacaggcctccaggaagtactccgtggatgtttgagtcttcagcttaatgaggagcggtcggttttcatactccaggcaggggcaggtgatggtgcagccatccaggaggatccggcccttgggaggggtcactctccgacccccctcaagcttgtagtacaccagcgtgttctgccgaaggatgaaccatcgcgccttccagttgtggacaatgtggcccctcttgaccaggaagccctcgttgagcacgccgtcctccatgtcgccgtccgcacgccagggccacgccaggtgcgccacgaaa

SEQ ID NO: 2537 - DNA, 4200 bp, Homo sapiens
cccacgcgtccgtctctctgtccctaggctgccccaggccctgtgcagacacaccaggccctcagccgcagcccatggacctgcgggtgggccagcggcccccagtggagcccccaccagagcccacattgctggccctgcagcgtccccagcgcctgcaccaccacctcttcctagcaggcctgcagcagcagcgctcggtggagcccatgagggtaaagatggagctccctgcatgtggggccaccttgagcttggtccccagcctccccgccttcagcatccctagacaccagtctcagtcctcaactccttgtccctttctgggctgccggccctgcccacagctctccatggacacgccgatgcccgagttgcaggaggctccccaggaacaagagctgcggcagcttctccacaaggacaagagcaagcgaagtgctgtagccagcagcgtggtcaagcagaagctagcggaggtgattctgaaaaaacagcaggcggccctagaaagaacagtccatcccaacagccccggcattccctacagaaccctggagcccctggagacggaaggagccacccgctccatgctcagcagctttttgcctcctgttcccagcctgcccagtgaccccccagagcacttccctctgcgcaagacagtctctgagcccaacctgaagctgcgctataagcccaagaagtccctggagcggaggaagaatccactgctccgaaaggagagtgcgccccccagcctccggcggcggcccgcagagaccctcggagactcctccccaagtagtagcagcacgcccgcatcaggatgcagctcccccaatgacagcgagcacggccccaatcccatcctgggctcggaggcgctcttgggccagcggctgcggctgcaggagacttctgtggccccgttcgccttgccgacagtgtccttgctgcccgcaatcactctggggctgcccgcccctgccagggctgacagtgaccgcaggacccatccgactctgggccctcgggggccaatcctggggagcccccacactcccctcttcctgccccatggcttggagcccgaggctgggggcaccttgccctctcgcctgcagcccattctcctcctggacccctcaggctctcatgccccgctgctgactgtgcccgggcttgggcccttgcccttccactttgcccagtccttaatgaccaccgagcggctctctgggtcaggcctccactggccactgagccggactcgctcagagcccctgccccccagtgccaccgctcccccaccgccgggccccatgcagccccgcctggagcagctcaaaactcacgtccaggtgatcaagaggtcagccaagccgagtgagaagccccggctgcggcagataccctcggctgaagacctggagacagatggcgggggaccgggccaggtggtggacgatggcctggagcacagggagctgggccatgggcagcctgaggccagaggccccgctcctctccagcagcaccctcaggtgttgctctgggaacagcagcgactggctgggcggctcccccggggcagcaccggggacactgtgctgcttcctctggcccagggtgggcaccggcctctgtcccgggctcagtcttccccagccgcacctgcctcactgtcagccccagagcctgccagccaggcccgagtcctctccagctcagagacccctgccaggaccctgcccttcaccacagggctgatctatgactcggtcatgctgaagcaccagtgctcctgcggtgacaacagcaggcacccggagcacgccggccgcatccagagcatctggtcccggctgcaggagcgggggctccggagccagtgtgagtgtctccgaggccggaaggcctccctggaagagctgcagtcagtccactctgagcggcacgtgctcctctacggcaccaacccgctcagccgcctcaaactggacaacgggaagctggcagggctcctggcacagcggatgtttgtgatgctgccctgtggtggggttggggtggacactgacaccatctggaatgagcttcattcctccaatgcagcccgctgggccgctggcagtgtcactgacctcgccttcaaagtggcttctcgtgagctaaagaatggtttcgctgtggtgcggcccccaggacaccatgcagatcattcaacagccatgggcttctgcttcttcaactcagtggccatcgcctgccggcagctgcaacagcagagcaaggccagcaagatcctcattgtagactgggacgtgcaccatggcaacggcacccagcaaaccttctaccaagaccccagtgtgctctacatctccctgcatcgccatgacgacggcaacttcttcccggggagtggggctgtggatgaggtaggggctggcagcggtgagggcttcaatgtcaatgtggcctgggctggaggtctggacccccccatgggggatcctgagtacctggctgctttcaggatagtcgtgatgcccatcgcccgagagttctctccagacctagtcctggtgtctgctggatttgatgctgctgagggtcacccggccccactgggtggctaccatgtttctgccaaatgttttggatacatgacgcagcaactgatgaacctggcaggaggcgcagtggtgctggccttggagggtggccatgacctcacagccatctgtgacgcctctgaggcctgtgtggctgctcttctgggtaacagggtggatcccctttcagaagaaggctggaaacagaaacccaacctcaatgccatccgctctctggaggcccgtgatccgggtgcacagtaaatactggggctgcatgcagcgcctggcctcctgtccagactcctgggtgcctagagtgccaggggctgacaaagaagaagtggaggcagtaaccgcactggcgtccctctctgtgggcatcctggctgaagataggccctcggagcagctggtggaggaggaagaacctatgaatctctaaggctctggaaccatctgcccgcccaccatgcccttgggaccgtggttctcttctaaacccctggcaatagcccccattcctgggtctttagagatcctgtgggcaagtagttggaaccagagaacagcctgcctgctttgacagttatcccagggagcgtgagaaaatccctgggtctagaatgggaactggagaggaccctgagaggagacgggctgggcggcgacccccacagggctctcgagaacagattctcccctccagtatgggccctggctgtggcccccattcctcaggactgcacagaggaggactggctccggctccgtcgggctcacccttaaccactattcctggctctgcaaaccccagactttgcacacagcctcaggctccacacagaaatgtgaacttggcctcagacaggctggcccttcctaggctctaggggctaggggggagtggggagccaagaggtcccatattcctgagtgcaggggtagtccctctcacctgcttcctcagacgactctggaagcttccctctaccactgggcactgagacgaagctccctgacagccgagactggcagccctccatctggtccgtaccctcgccagaggcccccctacatcaacctcctggcgatgccctggtggagcagatgggtgctctgggagtcctgtgcttcctgatccaatggtgccaaacccttcatctcccccagaagcgcagcatacccctggggacccctcggccacttgcccacttcggggaagcttctctgtttcctggggcctccccccaccatagctctgattccccacccccacataggaatagcctgactgagggggaaggggtgggagagaagatacagacatggaggaggggaggctgctctggcaaagtcttcaaggcttttgggggtccaggcctggggtcaagaaggaaaatgtgtgtgagcatgtgtgtgagtgaggcgtgtgtgtgagcgtgtgtgtgagtgaggcgtgtgtgtgtgtctttcctaggacccaccataccctgtgtatgtatgcatgtttttgtaaaaaggaagaaaatgaaaaaaaatctgaacaataaatgttttatttgctttaaaaaaaaaa

SEQ ID NO: 2538 - DNA, 1333 bp, Homo sapiens
  misc_feature (1)...(1333): n = a,t,c or g
tttcgtagaagatggcggcgctaggggaacccgtgcggctggagagagatatttgtagagcaattgaattattggaaaaactacaaaggagtggagaagtaccaccacagaaacttcaggctttgcaaagagtccttcaaagtgaattctgcaatgctgtgagagaggtatatgaacatgtctatgagactgtggacatcagtagcagtcctgaagtgagagcgaacgctactgcaaaggctactgttgctgcatttgctgccagtgaaggacattctcatcctcgagttgttgagctaccaaaaacagaggagggccttggattcaatattatgggaggcaaagaacaaaactctccaatctatatatcccgaataattccagtggaattgctgatagacatgggggcctcaaacgtggagatcaactcctctctgttaatggagtgagtgttgaaggagaacatcatgaaaaagctgtagaactgctgaaagccgcacaaggaaaggttaaattagtggtacgatacacacccaaagtcttagaagaaatggagtcgcgctttgaaaaaatgagatcagcaaaacgcaggcaacagacctaatacatttcaaaacttgatatttcattttgcgttttagctagagaagttttccttgtgacttactaatggctgcaatgccaatgattgtaagaaaacaaacaaatttatcatgaaattctccttgtcattttataaatgcctattttaacatcatttatggttccagagatgcatacacttttttctgacaagaaaaagtaaaaggtgatgagggcaattctgtcctactgtttttacaggcctttttcaaatgcaaattttgtcataaagttgttatagattttttaaaatgcttttttaatattaaaatgtacttttacattcttaatctttttttagaaaggaaaagttttcttcatttagctgctgatttaaaagtaaagttctccaattctttttttttgcttactctattttttttaacctgtgaaatttctttacagttttccaagaaattaagcataacagtctcatctacggcagttcattacactgtcaatgttaacatcattgctgcattttgtactttgaacacacacataatatatataaccagtggtaaatcatgactcagtacagtgcaagttttttcacttttacttaaacataatatataatggatattcatttatactgatttatgaaagtaagtttttaaacactgaaacaatcattgctaaaatacatattcttaatatttgagcattgaggnnagaggatgnaattgat

SEQ ID NO: 2539 - DNA, 2142 bp, Homo sapiens
  misc_feature (1)...(2142): n = a,t,c or g
ctgctgctcacctccccgggtgaaactctgacgcagtcaccgcgggtctcggcagcgtcatagcggcgggcatcccatctgcacgtcacacctctttctcacctggacacgcatcccttcctaccctgccagccacgacgtttcctctttcccctctccaatgccccagccccagatctggcggaagaagatggagaacgggggtgggacagagttgtggacaacctctcatgagagggtcgcaaggtgggaccctgaacagtggtagaaacaaaatgagattgtccctgaagtttgcccttcagctgagacacaaggagtagaggaagaggaaggactaacgcagaggcactcaaggtctcactatgactgtagttgagagtcctctcccttcttccctaaccctttccccatttctctcaccacttctttgccagtctagatccgtcctggtgccttactgtgcatacagttctactcgtctcagattcctttcttgtctgttagaaacgtatgtcaaacgaggatacagtgtctggaactattggttctaagatataagtggaatgagcctggatcaggagaagtatgctgagctagagttgaaggaagcttctctttctaacaagagaaagcagagttaaattatggcagagacaagtctgttagaggctggggcctctgcagcctctacagctgcggctttggagaacttacaggtggaggcgagctgctctgtgtgcctggagtatctgaaggaacctgtcatcattgagtgtgggcacaacttctgcaaagcttgcatcacccgctggtgggaggacctagagagggacttcccttgtcctgtctgtcgaaagacatcccgctaccgcagtctccgacctaatcggcaactaggcagtatggtggaaattgccaagcagctccaggccgtcaagcggaagatccgggatgagagcctctgccccccaacaccatgaggccctcagccttttctgttatgaggaccaggaggctgtatgcttgatatgtgcaatttcccacacccaccgggctcacaccgttgtgccactggacgatgctacacaggagtacaaggaaaaactgcagaagtgtttggaagcccctgaaccagaagctgcaggagatcactcgctgcaagtcctctgaggagaagaagcctggtgagctcaagagactagtggaaagtcgccgacagcagatcttgagggagtttgaagagcttcataggcggctggatgaagagcagcaggtgttgctttcacgactggaagaagaggaacaggacattctgcagcgactccgagaaaatgctgctcaccttggggacaagcgccgggacctggcccacttggctgccgaggtggagggcaagtgcttacagtcaggcttcgagatgcttaaggttcgacctttgcccctgcatagcccctcaggctgagtgcagcgtagctttgcgtagcctgggatttgtcagcctgggatactcattcttctgctctccttctctaaatccagttctttctgccaggtgtactcaaagggtctttgctacggaaaagtgatttctcccatccccttctaaccatttttgtgttcttatctctggtcagcaattatgtgcttaatctgttccaaagaaaagattcattcttttgaaaggagggaagtctagcctgagttagtgaaaaactatgcattaaaaattttgtaaatgcagttaccattacttttaagtcctgaaatttgatttatgtactgctgaaaaaggacagaaacatagtttaaaggatannnnnnnnnnnnnnnnnnnnnnnnnnnnnnnnnnnnnnnnnnnnnnnnnnnnnnnnnnnnttgatccgaaaaccttgaacaacgagatggtgacttcctaaatcatannnnnnnnnnnnnnnnnnnnnntgttagtatnnnnnnnnnnnnnnnnnnnnnnnnnnnnnnnnnnnnnnnnnnnnnnnnnnnnnnnnnnnnnnnnnnnnnnnnnnnnnnnnnnnnnnnnnnnnnnnnnnnnnnnnnnnnnnnnnnnnnnnnnnnnnnnnnnnnnnnnnnnnnnnnnnnnnnnnnnnnnnnnnnnnnncttgaaaacccacatgtatt

SEQ ID NO: 2540 - DNA, 1330 bp, Homo sapiens
agcccatggtgcgccatgaggcaggggaggccctgggggccatcggggacccggaagttctggagatcctaaagcagtattcctcggaccccgtcatcgaggtggccgagacctgccagctggccgtgcgcaggctggagtggctgcagcagcacggcggggagccggcggcgggaccctacctctccgtggaccctgccccgccggctgaggagcgtgagcgtggggcgcctgcgggaggcgctgctggatgagtcccggccgctcttcgagcgataccgcgccatgttcgccctgcgcaacgcgggaggcgaggaggccgccctggcgctggccgagggtctgcactgtgggagcgccctcttccgccacgaggtcggctacgtcctgggacagctgcagcacgaggcggcggtgccccagctggcggccgccctggcccgatgcaccgagaaccccatggtgcggcacgagtgcgcggaggccctgggcgccattgcccggcccgcctgcctggccgcgctgcaggctcacgcggacgacccagagcgcgtggtgcgggaaaagctgcaaggtggctctggacatgtatgagcacgagaccgggcgggccttccagtacgcggacggcctggagcagctgcgcggggccccctccttagggcccaaccctcacccggagctcccggaggactcttgagggccgctcctcccccgcagagctttggcgtctaaaccggggtgtgtgtaaatcggtgtcatcgcttgtgtcttgctgggcgcatggttgctgtccccctcctccgtctgggaccggagaagctgccggtgggctgtgactccttgagtcccctgactgctcctcggggcctggcgcagggctgtagcgtggaagtttccaggcttggggtgggactctgcgggaggctctgggatgcccggctcaggacaggggaggattgcgagggaagccaggggaggatcgcgagggaagccaggggaggatcgcgagggaagccaggggaggatcgcgagggaagccaggggaggatcgcgagggaagccaagggaggatcgcgaggggagccaggggaggatcgcgagggaagccaggggcagagctggggctctgggaagaggctgacgttatggtggcttcagcttcactaggaatgggacacagggtctgggggcctctgactcccccaccccgaggcctgggtagggacagggtggtggtccctgagtgggtcaggtagggcacaggggccagggagggacaagcagacctcagagcgctgcccagatggaatattaaattatttttgcc

SEQ ID NO: 2541 - DNA, 1601 bp, Homo sapiens
  misc_feature (1)...(1601): n = a,t,c or g
ttttttttttttaaggagcaaaaggctttattgataaatatgcagatatgtctgtccacagggacctgctgtggaggccatgaccaggctgcagacctcccactgcctgggttacagccaggacatggccctgtgcagaccctgccacgacagcccagccgtccaccacccgcctcatctctgccaattgtgctgggggcagggagaggcagaggcccgcctcaggcttcccaagccctggggctcacgggtggttccctcccttccaagggagtggcactgtgcccaggggagagccaggggatgggggcagaggagggagacagcagctgcttcagaccctgagcagaaaaccagagtgagcacagctggcagcaccagatgacagatctgggctccaggggcctcctggttggcccttgtggctcgaacctgcttcgggagacaggcagggtgagggccctgttcgccttttctctgacaaggttgcaaggcccgtgtgtggctgcctgctccctgggtaccgggaactggtggcgcgtagtgccctgaaaggcagggtcccttcacggctcacccaccagccacaccgaggggagggcccctgaagaaaatgacagcactggaaggcagcagcagggtgggggcctagtgctccaggcggggcctcttcccaggggtccgtgggcccatcagtcctggggtggtgggggctggttgatgatgacctggatgacaaaatctttctggatcttggtctcctggagccgtgtgcggtctgtgagcagcttcccggagaagaaccaccgctgccacgatggcttcggagtncctcctgggcgtgcagctgcctcttgagctgccccactgtgtcgggcaggctggcgctgagcctcacgtccttgcccgtggacaggcgcaccttcagcgggaactcacggcgcacgctgggtggaggctcggggggctccaggctctcctcctccgtgtgctccagcagcaggttcaccggcggtgacaggcagtagatgggcagctggtagcgattgcccagctcatcgtagcattcacagagggtgccatgaggcagggtgatgctggctccatccaggatggcctgggccagctcgtggtcgttggcttcagcagcataggcggcagccttgagggcatcccagatctccttgcggccctcgaaggcaggcgctgtgtcccagaactcatcccgtttgctccgcagctgcccgtcagtcatggggtagtcgctcttccacttaagccgctctttcttcaggggctcattgcgtcctgggcaggacagaaggagaggctcagcatctctaaagccacttgagctgcaacctgccctccccctcccctcccctccccaggccagaccctgaaaccctgctgcactggctactaagtattcaggtctttgaagcccttcctaaatagcagggaagagtcagaaagcttcacatagccaacctaggcacataaaataattgtgtcagcaaagcatacaataccaaagnnnnnnnnnnnnnnnnnnnnnnnnnnnnnnnnnnnnnnnnnnnnngaattccaccacgctggtc

SEQ ID NO: 2542 - DNA, 6282 bp, Homo sapiens
ccggtcgacgatttcgtggagcatctcaggaaaggggtccccggactctggggctctcagcacctgcggtcgcaaaccaacctcatgccctgactttaccaggcgtcgggactctgacttaaccggggaatgagggacttggtctggcggcagatcacaatgaggacctagggcatctgtctgctgacgccccctggcctgcagtgaccatggccccccgcaagaggagccaccatggcctgggcttcctgtgctgcttcgggggcagtgacatccccgaaatcaacctccgggacaaccaccctctgcagttcatggagttctccagccccatcccgaacgcagaggagctcaacatccgctttgcagagctggtggatgaattggatctcactgacaaaaaccgagaggctatgtttgcactgccccctgagaagaaatggcagatctactgcagcaagaagaaggagcaggaggaccccaacaagctggcaaccagctggcctgactattacatcgaccgcatcaattccatggctgcgatgcagagtctgtacgcgtttgatgaggaggagacggagatgaggaaccaagtcgtggaagacctgaagacagccctccggacacagcctatgaggtttgtgacccgcttcattgagctggagggcttgacctgtctgctaaatttcctccggagcatggaccacgccacctgtgagagccgcatccacacctcactcattggctgcatcatagcattgatgaacaactcccaggggcgggcacatgtgctggcacagcctgaggccattagtaccatagcccagagcctacgcacagagaacagtaagaccaaggtggctgtgctggagatcctgggtgctgtgtgcctcgtgcctgggggccacaagaaggtgctgcaggccatgctgcactaccaggtgtatgcagcagagcgaacccgcttccagaccctgctgaacgagctagaccgaagtctgggccggtaccgggatgaagtgaatctgaaaacagccatcatgtccttcatcaatgctgtcctcaatgctggagctggagaggataatctggagttccgcctacatctacggtatgaattcctgatgctgggtatacagcctgtgattgacaagctccggcaacatgaaaatgccatcctggacaaacatttagacttcttcgagatggtgcggaatgaggatgacctggagctagccaggaggtttgacatggtccacatcgacaccaagagtgcttcccagatgtttgagttgatccacaagaagctgaagtacacggaggcctacccctgcctgctctctgtgctgcaccactgcctgcagatgccctacaaacggaacggtggctacttccagcagtggcagctcctggaccgcatcctccagcagattgtcctccaggatgagcggggtgtggaccctgacctggctcccttggagaacttcaatgtcaagaacatcgtcaacatgctcatcaacgagaatgaagtgaaacagtggcgagaccaggcagagaagttccggaaagaacacatggagcttgtgagccgtctggagaggaaggagcgggaatgcgagacaaagacattggagaaggaagagatgatgcggacgcctgaacaaaatgaaggacaagctggcccgggagtcccaggagctgcgccaggctcggggacaagtggcagagctggtagcccagctcagtgaactctcaacaggccctgtatcttccccaccaccccctgggggcccactcaccttgtcttcctcaatgacaaccaatgacctgcctccaccccctcctcctctgccctttgcctgttgtccccctcccccaccaccaccccttcctcccgggggacccccgactcccccaggtgccccaccttgcctcggcatgggcctgcccctccctcaggacccctaccccagcagtgacgtcccactcaggaaaaagcgtgtcccccagccttctcacccactgaagtccttcaactgggtgaagctgaatgaggagcgtgtccctggcaccgtatggaatgagattgatgacatgcaggtatttcggatcctggacctagaggattttgaaaaaatgttttcagcctaccagaggcaccaggagctgataactaatccttctcagcagaaagagctgggctccactgaagacatatacctggcttcccgcaaggtcaaagagctgtcggtcattgatggccggagggcccaaaactgcatcatccttctttccaagttgaagctttctaacgaggagatccggcaggccatcttgaagatggatgagcaggaggaccttgctaaggacatgctggagcagctcctcaagttcatcccagagaagagtgacattgacctcctggaggagcacaagcatgaaattgagcggatggcccgtgctgaccgcttcctctatgaaatgagcaggattgaccactaccagcagcgactgcaagccctcttcttcaagaagaaattccaggagcggctggctgaggcaaagcccaaagtggaagccatcctgttggcctcccgggagctggtccgcagcaagcgtcttagacagatgctagaggtcatcctagccataggcaacttcatgaacaaagggcagcgtgggggcgcctacgggttccgggtggccagcctcaacaagatcgctgacaccaagtccagcatcgacagaaacatctctctgctccattacctgatcatgatcctggagaagcattttcctgatattctaaacatgccttcagagctgcaacatcttccagaagccgccaaagtcaacctagcagaactggagaaggaggtgggcaacctcaggaggggcctgagagcggtggaggtggagctggagtatcagaggcgccaggtacgggagcccagtgacaagtttgtccctgtcatgagcgacttcatcacggtgtccagcttcagcttctccgagctggaggaccagctaaatgaggccagggacaagttcgccaaggccttgatgcacttcggggagcatgacagcaagatgcagccagacgaattctttggcatctttgataccttcttgcaggccttctcagaggcccggcaggatctagaggccatgaggaggaggaaggaggaggaggagcggcgggcgcgcatggaagccatgctgaaggagcagagggaacgtgagcggtggcagcggcagcggaaggtcctggctgcaggcagctcgctggaggagggaggagagttcgatgacctggtgtcggccctgcgctctggggaggtcttcgacaaggacttatgcaagctcaagcgcagccgcaagcgatcagggagccaggccctggaagttacccgggagcgggcaataaaccggctaaattattgacctggggaactagccacacaggaggccgggagacagggactggtgagaatggggctgagtggaggaggtggtgatatttaaaccatttggtgcttggtttagagccttgggctgggtcctgggatggggggctgtgtgtggctggaccaggtgtctccccacgcttaccttaaggggctcctcttatctccccttcacacgattccttctgtgccctggccccaggtattattctgaggctgccttggatggcctcaggccaggtaaccccaggctgaaggggccctgctccccatcccctaccatgggcacccatgtgctggcacagaacagttccagatctagactggagaggtccacagccttgtccagagttcctgtgtagcacggggagcaatgatggagggagcccctgagagggaatctggtgagggaatccaaactcccttctctcaaggggaggctcaacagaacattgacctgggggcaaactttcctcttgaatgggaacagaggaggcattatatattctagttagatcagctctggtaggttccagagaacagtcaatgttggaaggatgatgcagggaccaaagccatcaggacagagtagcagtgtctgtttcccatgtcacaagtcctctggcctctccctgcatgtcttaagtatctttcccttccttctctaccctcacctccatcctgtctactaatccacagtcctagaagactcaccttgggtttccacagctatggctcactaccaggtgcttgatgaatctggcgaggggctcaagacagacctcatgcatcaccacacctcatgccttttgggcatctcccatgtccccatctcctggacacctggccattgttgtgaagccagacagtgacctcaaatgttgccttggagtcccctacagcccctcagcagagggcagcacttgaatgcttagctccatcccatagttctctacttcatataaattgctcaggccctcccaccccttctctaacactagcttcaaggcagaagccacagcagcctctgtccagcctgcaggtggccacttggaaccatgtgtccactggcgttggggagttggttcctgagaggtctgagggccagagctgccctctacattaacatgctgtctctaagggtggcccctcctctcaggcgttcagatggtgcgaacagcagagcaggcaagggaaactggggagatggggatggagagaggaaggctgatatcctctggggagcacataacctgaaggtgccaaggaggaaggctgagaggggggccaccccatttctggtacccaatttggttcttcagcccaacttgcaaggggttccttctggtcctcccatccactgccaccttccattttgtccatctcatgctggccttggtggatgggatggctgtatctagacaaaatttttctaaaactccatcaaggctcttattcaataccacgttccgagttggcctttcatcttctttgagactggccctgcctaacctctaccatcaatgagctcttggcccttctgcccttccctgtgtttctcactttccaacctaatccctggctcagggttattgccagtggagactggtgagctgggcctactctcagctgcctatcttctgcctttcacttgcatccaactcctggggctgggaccgtagtagctgcgggggggaagaaacacagggtcggtgagcccagcatgtgcgttggtttgagggggcgggcggtgtgtgtgtgttctggtgggagggatctgagcaagtgcaagcctggctgacacaggtgtgaagaggccatcctggaacccaggtgagggcaagatgaaggcttccaggcagaacagctgcagagagtttggctatatgcatctgcagccccaagagctcccactgcaagacaagtgttggggaagatgggaggttgtgggtgaggcctctaaaggtcctctcccaaactgaccaggctgatgtcaacctaaccccctcaggggcagggaacaggggagggctccacaagcgtgtctggcattcccacccaccatggaagactggatacgcacctggaaacaaaaggactatggaagctgttcaagatacatttgatcttcagaaaagcagaatttggttcaactgttgacagaggacacaaatacgttgttccagagctcagccttctcactctaaaagaaagatatttttctatttattttctacatctggccagtggctctggtgctagatgccactgtagccagatctccaacagtgccttggaccatggactcatactcaactgagtaagaaggggctggtgcccagtcggggtggctgagctggtccttaataggttgtttcttggtcttgctttcttcatgccctccccactgctcctgccacctttagataagtttctctagctaattttgtggccaatgtaaaattcgtcatcaacctaacaaacacaaccttctcagcagcatttctcccctgtgatggaaataaagtgtttagggcagtgggaggagaaaattctccaggtgaatggggaagggtctgttccagcctctccctactcccatcccatttccaccaactggggaactgtgactatctatctcccccgacttctaccagggatgccttcacgccaaggctgttctcaccagctgcctcagatgacaaatgaggctaatggacataatctacagtgtcctttttcacttgcaccttttttataagaatatattgtaatactaaaaaatattaaattcataccatccctaaaaaaaaaa

SEQ ID NO: 2543 - DNA, 1517 bp, Homo sapiens
gcatgtggtctgtgtgtggggtggagggctgggggtgttggcaagtctcacaggtgaggacccaacgagggaatcagacaaaaagtggccacaaattaggcagctccaggaaggacatgtccttgccatagtaagatgttctgctcacgcgtatccacgagaaagccccgcatttcacggggagcatagaaacaggagtccccaactctgctcaccagctcctccggctgctgccatctgctcctgcagcatggcggcctgggaagcctgcactggtgattttctgccactcaagttttgcagacttcgggaagatggatgcatagcctggggcaatgacagtcacaggcccgccttgtcacaaggtccctggagcgggcaatgccttgagcccaaaggctgggagcacaaagccatcttcagccatcctcgatttccagcaagaccccagggctcacccaacagcccgacactccatactacaaggtgggttaattttttaaaagactctgcagaaatataccaactacagagctcaggaaagcaactgatttataaaacccaatccaagttgtttgcttttatagcattagagacatgtctgaagaacttcaagtttttatctatagaaacataattagtttaataaattactaggtctattttgaatatctaaattgagtacttttattagacctaagtggaactttatctgaatctgaattttccaaggggccagtgtagagtgacacaggtgtccgaggccacctttccatcttcagacacccccccgtctctctgcacagggagttggccttccagtaggtgttgctcttctgtcttgacgtctcctggaaagatttttatctctattttcctgtggtggggttttccacgagctaattctttctatttttaaactcattggctttggaggagctgaattgttagatgacgatctttgtccccaggaagagtggccactctggattcttgtggccagcgtatttgggtattgtctcttcatcagctgacagaggtgaaatttttccaaaagcaggttccaatgccagagtgtgcgattcttgccccgcgtgtggggacgctgcagatttcttcctggctttccaccgctgcagctgcagagctctcagcttttctcggagctccatgttctgctccctcaaagcatctatatgactccggagttttccatgaacatcagcccacagagacttctgtctcccaagctcttggtggagtctgatgatctgctgctgtaatggtggcatctccccagtgttgcagtcctccgtgagaacctcggctgccacagctgtcttctccatgacagccccagctcctgggcacgggtcctctgggtgggtgccctccttggggtccctggcctcgagttgacctgccagcatcctggtccccaacagtcactactgccaggatcagatcatctgggccatgtccccacagttgtccccaagccctcctgcctcatatcc

SEQ ID NO: 2544 - DNA, 1778 bp, Homo sapiens
atggagtacctaagcggcacagtccaggcactgtcccagggctttgcacgaattatctcagcctctcgacagtggggaggtctatcacataaagctgctatggacattgcagtacatgtcttggtaaacccacaagcactcatttcctgttgggcatataccctgaggtacaatgaatgggtcaaaggggagagctcccagggaggtggtgtggccattgcttccaaagcctccatcacctgcccatacacgccagctcattgtattggccttactcttccaagaggccatggaagtataaataataaagcaagaaaggcagatgcatttggctggctcagtggacttctgaatgtactgtgagtatgagaccttcccttccaaaagatccggtgcttcttgtctattccacacgaagcttgcttcagatcgagggaggatgtagcactgtccacaggtgggtgtatgaaaggaaaattctagaggatctccaaaatccaggtctactactcaacaggatattcttcaaggaaaatgaaccccacactaggcctggccatttttctggctgttctcctcacggtgaaaggtcttctaaagccgagcttctcaccaaggaattataaagctttgagcgaggtccaaggatggaagcaaaggatggcagccaaggagcttgcaaggcagaacatggacttaggctttaagctgctcaagaagctggccttttacaaccctggcaggaacatcttcctatcccccttgagcatctctacagctttctccatgctgtgcctgggtgcccaggacagcaccctggacgagatcaagcaggggttcaacttcagaaagatgccagaaaaagatcttcatgagggcttccattacatcatccacgagctgacccagaagacccaggacctcaaactgagcattgggaacacgctgttcattgaccagaggctgcagccacagcgtaagtttttggaagatgccaagaacttttacagtgccgaaaccatccttaccaactttcagaatttggaaatggctcagaagcagatcaatgactttatcagtcaaaaacccatgggaaaattaacaacctgatcgagaatatagaccccggcactgtgatgcttcttgcaaattatattttctttcgagccaggtggaaacatgagtttgatccaaatgtaactaaagaggaagatttctttctggagaaaaacagttcagtcaaggtgcccatgatgttccgtagtggcatataccaagttggctatgacgataagctctcttgcaccatcctggaaataccctaccagaaaaatatcacagccatcttcatccttcctgatgagggcaagctgaagcacttggagaagggattgcaggtggacactttctccagatggaaaacattactgtcacgcagggtcgtagacgtgtctgtacccagactccacatgacgggcaccttcgacctgaagaagactctctcctacataggtgtctccaaaatctttgaggaacatggtgatctcaccaagatcgcccctcatcgcagcctgaaagtgggcgaggctgtgaacaaggctgagctgaagatggatgagaggggtacggaaggggccgctggcaccggagcacagactctgcccatggagacaccactcgtcgtcaagatagacaaaccctatctgctgctgatttacagcgagaaaataccttccgtgctcttcctgggaaagattgttaaccctattggaaaataa

SEQ ID NO: 2545 - DNA, 6273 bp, Homo sapiens
gtatcatcagtttctcatgaaaatcctactgaagtgtttgaagatggagaaaatccaccaagtagtcgatcatcagagagtggattcactgagtttatacaatatcaagcagaccgaactgatgatattgacagagaactgagtgagggccagggggcagctgccatcccaattggtagcacatcctctgagacagaaacagcatccactgtgggatctgaagaaaccatcatccagaccccttccgtagtcactcaggggacagcaacccgaagtaggaagacagcccaaaagactgcaatgcagtgctgcttggagtatgtccaacagtttcttaccagacttatcaacctctacatcattcagaataactctttttctcagtctttggctacagaacatcaaggggatcttggtcgagaacaaggagagacttcaaaatgggacagaaattcacaaggagatgtaaaagagaaaaacataagtaaacaaaaaacttctaaagaatacctgtctgccttccttgctgcctgtcagctcttcctagagtgctcaagtttcccagtttacattgctgaggggaaccatacatcagagttacgttctgaaaaattggagactgactgtgagcatgtgcagcctccacagtggctccagactctgatgaatgcttgcagccaagcaagtgatttcagtgttcagagtgttgctatttcactagttatggacctggtgggactgacacagtctgtggccatggtcactggggaaaacatcaacagtgtagagcctgcacaacccttaagtccaaaccagggaagagtagctgtggttattagacctcccctcactcagggcaatctgaggtacatagctgagaagactgaatttttcaagcatgtagctttaacattgtgggaccagttgggagatgggacacctcagcatcaccagaagagtgtggaactattttatcaattacataacttagttccttcttctagcatctgtgaggatgttataagtcagcagttaacccataaagataagaaaataaggatggaagcacatgccaagtttgcagttctttggcatctaacgagagatctccatataaataaatcttcatcttttgtacgttcttttgacaggtcactgttcatcatgttagatagccttaacagtctcgatggttctactagctctgtgggacaagcctggctgaaccaagtcctacaaagacatgatattgcacgagttttggaaccattgctattgctcctgcttcatccaaaaactcagagggtttcagtacagcgtgtacaagcagaacgttattggaataagtctccctgttatccaggagaggagagtgacaagcatttcatgcaaaattttgcctgcagcaatgtgagccaagtacaactcatcacatcaaaaggaaatggtgaaaagccacttaccatggatgaaatagagaactttagtctcactgtgaatccattaagtgacagactttccctcctaagtaccagcagtgagacaattccaatggttgtgtctgattttgatcttccagaccaacagatagaaatacttcagagttctgactcgggatgttcacagtcctctgctggggacaacttgagttacgaagttgatcctgaaaccgtgaatgcccaagaggattctcaaatgcccaaggaaagctccccagatgatgatgttcaacaggtagtatttgacctgatatgtaaagttgtaagtggcctcgaagtggaatctgcatcagttacatctcaattagaaattgaagctatgcccccaaagtgcagtgatatagatccagatgaagagacgattaaaattgaagatgactccattcaacagagtcagaatgctttgctgagtaatgaaagttctcagtttctgtctgtgtctgcagagggaggccatgagtgtgtggcaaatggaatctccaggaatagctcctcaccttgtatttcaggaaccacacacactcttcatgactcttctgttgcttccatagaaaccaaatctagacaaaggagtcacagtagtattcaattcagcttcaaagaaaaattatcagaaaaagtttcggagaaggaaacaatagttaaggagtcaggtaaacaaccaggagcaaaacctaaagtaaaacttgccagaaaaaaggatgatgacaagaaaaaatcttcaaatgaaaaactcaaacaaaccagtgtattcttcagtgatggtctggatttagagaactggtatagctgtggagagggagacatttctgaaattgagagtgacatgggttctccaggatctcgaaaatctcccaatttcaacattcatcctctctatcaacatgtgctcctgtatctccagttgtatgattcatccaggactttgtatgctttctctgccatcaaagccatcttgaaaactaaccctatagcttttgtaaatgccatttcaactactagtgtaaataatgcatatactcctcagttgtctctccttcagaatctattggccagacaccggatttctgttatgggcaaagatttttatagtcacattccagtggactcaaatcataacttccggagttctatgtacatagaaattcttatttctctctgcttatattacatgcgtagccattacccaactcatgtcaaggttactgcacaagatttaataggcaatcgaaacatgcaaatgatgagcatagaaattctgacactactcttcactgagctggcaaaagtaatagaaagctcagcgaagggtttccctagttttatttctgatatgttatctaagtgcaaagttcagaaagtgattcttcattgtttgctgtcatctatctttagtgctcagaaatggcatagtgaaaaaatggcaggtaagaacctggttgctgtggaagaaggtttctcagaggacagccttattaatttctcagaggatgaatttgacaatggcagcacgttgcagtcacaacttcttaaggtgcttcagaggctgattgttcctagaacacagagtaatgaactattcctgaagagcaatgaaacaggttttgattttgttgtatcctgacttagaacacatcagtccccatcaacccatgacttctcttcagtatttgcatgctcagtcaatcacatgtcaaggcatgttcctctgtgcagtgatacgagcttttgcatcagcactgtgcatgtaagatgcacccacaatggattggtttaatcacatctactctgccttacatgggaaaagttctgcagagagtggttgtttctgtgacactacaactgtgcagaaatttagataatctaattcagcagtacaaatacgaaacaggattatctgatagtaggcctctgtggatggcatcaattattccaccagatatgattcttactcttttggaagggattacagccattatccattactgtttgttggatccaactacacagtatcaccaacttttggtcagtgtagaccagaaacacttgtttgaagcacgcagtggaatcctctcaatccttcatatgatcatgtcctctgtgacactgctttggagcatactgcatcaagctgattcttcagaaaagatgactattgccgcatccgcatctcttaccactattaatcttggagctacaaagaacttgagacaacagattcttgaattgttgggccccatttcaatgaatcatggtgttcactttatggctgccattgcatttgtgtggaatgaaagaagacagaataaaacaaccaccaggaccaaggtcattcctgcagccagtgaagaacagcttttattagtggaattggttcgttcaatcagtgtcatgagagcagaaactgttatccagactgtaaaagaagttttaaagcagccaccagccatagccaaggacaagaaacatctttctttggaagtctgcatgcttcagtttttctatgcttatattcaaagaattccagtgcccaatttagtggatagctgggcgtcactgttgatacttctgaaagactctatacaactgagtcttccagctccagggcagtttcttatacttggggttctgaatgagtttattatgaaaaaccctagtttggaaaataaaaaagaccaaagagaccttcaggatgtaactcacaaaatagtggatgcaattggtgcaattgctggttcttctctggaacagacaacatggctgcgacgaaatcttgaagttaagccttctcccaaaataatggtagatggaaccaatttggaatctgatgttgaagatatgttatcacctgcaatggaaaccgcaaacataactccttctgtatatagtgtccatgcattgacattactctctgaggttttggctcatcttttggatatggttttctatagtgatgaaaaggagcgggttattcctttacttgtaaatattatgcattatgttgtgccctacctcagaaatcacagtgcacataatgcccctagttatcgagcttgtgtccagctgctcagcagtcttagtgggtatcagtacacacggagagcttggaaaaaagaagcttttgacctctttatggatcccagtttctttcagatggatgcctcttgtgttaatcattggagagcaattatggacaatctgatgacacatgataaaacaacatttagagatttgatgactcgtgtagcagtggctcaaagcagttcacttaatctctttgcaaaccgtgatgtggagctagaacagagagctatgcttcttaaaagattagcatttgctatttttagcagtgaaattgaccagtaccagaaatatcttccagatatacaagagagattggttgagagtctccgtttgccacaggtgccaactctccattctcaagtgttcctgtttttcagagtgttacttttaagaatgtctccccaacatcttacctcactctggcctaccatgattacagaacttgtacaagtatttttactgatggagcaggaactcactgctgatgaagatatttcacggacttcagggccctctgtggctggtctggagacaacgtacacaggaggtaatggcttctctacttcatataacagccagcggtggttaaacctctatctctctgcttgcaaatttttggatttggctctcgcattgccctctgaaaaccttcctcagtttcagatgtaccgatgggcctttattccagaagcctcagatgattcaggtttggaagtcagaaggcagggtatacatcaacgagaatttaaaccttacgtggtacgactagcaaaacttcttcggaaaagagcaaagaaaaatccagaggaagacaactcagggagaacattgggttgggagccagggcacttgctgctcaccatctgcaccgtgcgcagtatggagcagctcctgccgttcttcaatgtgctcagtcaagtcttcaacagcaaagtcacaagccgatgtggaggacactcagggagtcctatcctctactcaaatgccttccctaataaggacatgaaactggagaaccacaaaccatgttccagcaaagccaggcaaaaaatagaagagatggtagaaaaagattttctggaagggatgataaaaacttgagcaccattgctggttccatttagcttacatgtaaatgtaattatttaaaacacacacactgctctgcgttgtatagtttttccttttttgtatgtaacagaacacatttcagattgtatttaatttaaatatttgtatataagagcaaatgtctgaatgtggcctgaatcaagtttaaatattgttggctcatactgattatggtgcctaagagagctatatatatacacatgtaaagtccattgtttttattgtcctgagttgtcttaaacctgcaaaatatacactacccattttttttttccattggtttcagacttggttcaattaagattggttggggatttttctcttttccttattaaccatgttctggtatcagaatggtgttccttctccatcagaggctgggaaacgtattataattagtttttctcccacataccttcaccaagagcagtgaagaataactgaaggctggaccatgcatccttaaaagtattgcatgagcatctccacctcagtatggaagagggatggacaaccccctattcatacctctgagttcctgatggcattagtcatatag

SEQ ID NO: 2546 - DNA, 6273 bp, Homo sapiens; identical to SEQ ID NO: 2545

SEQ ID NO: 2547 - DNA, 3082 bp, Homo sapiens
ttttttttttttaaatggaatctcactctgtcacccaggcgggagtggtgcaatggcttgatcttccgctcactgcaacctctgcttcccgggttcaaactattctcccgcctcaacctcccaagtagttgggattgcaggcacgcgccaccacgcccggctaatgtttgtatttttagtagagacggggttttgccatgtttcccaggctggtcttaagctcaagcgatccgcccgcctcggcctcccaaagtgctgggattacaggcgtgagccgatcggctcctggcctcctgcttctttcttccccgcgcccaatcatttgttcccactcagacgtgcttgattggcggtagcagctcttttcgtcatgaattggagtgtctgagacacaggcagattattcctcgatgctgtttctgttggtgctagctactggggctcgttccccacctggccttgctggcaggttctgcctcctctctgattctcacttgtgccacgacaggtgggctttaagctcagccgtgagcctggtagccgtgaccttgactcatttctccttcgccagctctttcctctcaggatcctgctctttccctgaaagagaatctcgaggatatatcgggttggggtcttcccgaagccaggtccaaggaatcggtgagtttcaaggatgtggctgtggacttcacccaggaggagtggggtcaactagactcccctcagagggccttgtaccgggatgtgatgttggagaactaccagaaccttcttgccctaggacctccactgcacaagccagatgtgatctctcatctggaacgaggcgaggagccatggagcatgcagagggaagtccccagagggccctgtccagaatgggagctgaaggcggtgccctctcaacagcagggcatttgcaaagaagaaccggcccaggagcccatcatggagcggcccctcggcggggcgcaggcgtgggggcgccaggcaggtgctctgcagaggagtcaggctgcgccctgggcgcccgcacctgccatggtctgggacgtccctgtagaggaattccccctcaggtgtcccctcttcgcccagcaacgcgttcccgaggggggacccttgctggacacacgcaagaacgtccaggccactgagggcagaaccaaggcccccgcgagactgtgtgcaggggaaaacgcctccacgccaagtgagccagaaaagttcccccaggtgcgccggcagcgcggggcgggcgccggggagggcgagttcgtgtgcggcgagtgcgggaaggcgttccgccagagctcctccctcacgctgcaccggcgctggcacagccgggagaaggcttacaagtgcgatgaatgcggcaaggccttcacctggagcaccaaccttctggagcaccggcgcatccacaccggcgagaagcccttcttctgcggcgagtgcgggaaggccttcagctgccactcgtccctcaacgtgcaccagcgcatccacacgggcgagcggccctacaagtgcagcgcctgcgagaaggccttcagctgcagctcgctgctcagcatgcacctgcgggtgcacaccggcgagaagccctaccggtgcggcgagtgcggcaaggccttcaaccagcgtacacacctcacacgccaccaccgcatccacacgggcgagaagccctaccagtgcggctcctgcggcaaggccttcacctgccactcatccctcaccgtgcatgagaagatccacagcggggacaagccgttcaagtgcagcgactgcgagaaggccttcaacagccgctcgcgcctcaccctccaccagaggacgcacacgggcgagaagcccttcaagtgcgccgactgcgggaagggcttcagctgccacgcgtacctgctcgtgcaccggcgcatccacagcggcgagaagcccttcaagtgcaacgagtgcggcaaagccttcagctcccacgcctacctcatcgtgcaccggcgcatccacacaggcgagaagcccttcgactgcagccagtgttggaaggccttcagctgccactcgtccctcatcgtgcaccagcgcatccacaccggtgagaagccctacaagtgcagcgagtgcggcagagccttcagccagaaccactgtctcattaaacatcagaaaatccactccggggagaagtcgtttaagtgtgagaaatgtggggagatgttcaactggagctcgcacctcactgagcaccagaggctgcacagcgaggggaagcccttggccatccagttcaacaaacacctgctcagcacatactacgtgcctggcagcctgctgggtgcaggggatgctggactgagggacgtggatcccatcgacgcgctggatgtggcaaagctcttgtgcgtggttccccccagagctggcaggaatttctccctggggagcaaacctcgaaactaacatgatgtgctttggtgtcagtagctgctttctgagctactcaacaaggaaagcaccctggtcctccctggctcctagatccagaccaccttcctccaggtgtgggagccttgccttatcaccccaatcaggtctgcatgccagggtgcctcctctagttaaagtcagtcacctccccagaagggccacactccaggaggagtgttgagagtcatttgaggtagtcttgccacctgttttccttgatgggcctggaagttgttgacaaggggaaagatctttcttgccaataaaaagaagggatatcgttgggtgccatggctcacacctgtaatcttaacactgtgcggaggccaaggcaaggggatcacttgagcccaggagtctaggaccagcctggacaacatggtgagacctcgtctctacaaaaaatgcaaaaattagccagatgtggcggcatgtccctgtggtcccagctactcaggaggctgaggtgggaggatcatttgagcctaggaggtcaaggctgcagtgagccatgattcacagcactgcactgcagcctgggtgacaaagcaagaccctgtgtgaaattaaaaggaggtcgacg

SEQ ID NO: 2548 - DNA, 4220 bp, Homo sapiens
ttttttttttttcagagaaaacatgagtttattaccagatggtggagatggtgggcctcaagtttggaagctgggggatttaagggctggattagtgcccctacaaatgttgggtccctcaagatcatggttaggctcacggccaagaaagaaaaataagttcacagaggtggggtctctagacaggagtaaggcacacggtgtgggtgaggctgacatccccctcttggtttcatcctggagcagggagcaggaggctccctctgcagccactgcctggtccagtcctcccaggcagggctgccattgtgcctcagcacacgctgaacactgaaggggcctggccttggtacttctcatggactgtcttcagaatgggtatgaggttctcgaaggttgggcgaaaggacgcctctgtctcccagcagttcttcatgagatgatagacctcacagggacatttgtcgggccgtggcagcctctcccctcgttccagcaactcagtgagtctcagaactgtcatctgaccctgagcaatgcctatgagctcaaggaatttcgtgggggggctctggctggagtcacagtgcgtcagcagctcatacagggtcaccccgaaggaccagacatctgacgcatagtagaacttatactccttcaggcactctggggcataccagaacacggggctgtccccatcctcgcgcacgcggtagtactcgtggccttcgggcacggccttggctaggccaaagtccccgatcttgaccagcctgtcgttgtccagcagcacgttgcgcgcggctaggtctcggtggatgtagtgctgcgcgtgcagataggccatgccctcgcagatctgctgggcgaagagcagcagctgggccagcccgatgctgtgccggggcaggtagtctcggaggctgcccaggggcacgtactccatgaccagctgcagcgacttctcgccttggtcctcgcagcagcccttgtacttgatgatgtgctcgtggtagagcgtgcgcagaatgtcaatctcctgcttccagcccgagcggtgctgggggccgcagtctgccttgagggctttcaccgccaccatctcgccagtgccgtcgttggtcggatcgtagcagtacaagctgaccttgccgaagtgaccctcgcccagatctcggatctttttcaaatagcgcttgtggaaaaccgtagggtccgacgccggtgagtccgggttcacagtcaagacgtcagcaagattgtggggctgcagccgggtgaggtcacgcaggatggtgcggaatgatggcctctgggttggctcataggtcagacactggctggtgagtgtggccagctgtgggcaggagggctcgggcagccggtgctgcctctggtagaaatgctccttctcggagggactgcggctctgcagaggggcctctccgtcaaagcagatctccaggagggtggcgccaaacccccacttgtccatggcggtgcttaggctgttggccccacctggtaggcattcgggggccagccaggggatcctctccacccgctcctccctggagagggcgcccaggcccacgccaggatcactcagcttgatgaaggggctggtgccctctgccaaccccagccgggccagcaggatgttccggccacacacattaccatgaaccaggttcttgttctccaggtagctgagggcgctggccagctgctgggccaccaccatcttccaagccatgggcacatggccccgctccctccgcagccacacatccaggggtccgtgctccacgtactctgtcaccatgatattttcagggccgcgcacacagacgccatgcacgaaggccaggtgcgtgtgggagacctggctcatgaggctggctgtctcgtagaaggccagggcgatgtcatggtgactagggtccagcactttgagcaccactcgtagctcctgcccacggtccctgccaggcacgagggggtcctcgtcatccatcttgccctcctcagggtccccgctgccctccactcgcaggcggccctcatacacgttggtccttgtgccctggcccaagtgggacagctgggtgatctccttctggtcaacccggtggaagctgagctggctgaggttgagtgtcctggggctggcccgagccccccgcatgatgatgagattggaggtttctcctggttggggcaggcaacagcgacgcagagagaagcagtcatccccggccctcagcaagcagccctgcaaggcagccccaagttcccgaacgctggggaaggaccggccccagccctccagcacgaaggccccgtcctgctgctcaatggggaactttcggagccgcaagctctgcatgccgtctggtgcctggctacgctgggccactgtgaggatcaggcggtaggggtggctggtgctccagtgaatgaggtacaggccgtcctcgggccgcagcttggcctgcacaaatggctccagcaggggtccgtggatcccatcccggatgctcatcaccagccgtgggggagccacctcgtggcacaggtagtggctggagtcggccgtcaggcggaaatagccgtccaccagcgacacgaaggacagcgccgcagcccgggaaggcaagctcagctccaggcacttgttgtcctgccggtggatgctgacacagtgctctttcagccccacgtgggtgatgtcccggaagtcacagaagtaggcccccagtggctcccgcggcctgtctgccggctggccgaatgccttgtgagccttggccttcttcccaaacaggctggcttgggggttcctgccactgctgccactagaaccctcctccttgttcacctcctcctctactggccaccactggatgccaccagtgcctgtcaccagcacctcgtgggttgggggcccagcagcagactcagggccagggtctgtaggggccaccccactgtcccggatgtagcagggctccccctcggcctgggccagcagcctcaggtggcacacgggcacacgctctgtgccgaagcggggtgccagccgctcgagtgtggctaggtatttgaccatgaccatctgctgggagagtcggcccggctggaagtcccgcaggaacctgcggaagacgttccgaaggcgcagccgggtcagggcgctgtgctgccggatatgccggcggaaggagcgcgggatgcagtccttgaagctggtcttcttggccacctcctccagggggatgccatggcggagagcgaggtgacagaggtgcagaaaggccatgcccaggctctcattcttaaagtggtggatctcctcctcggtcgacagctcccacagtgatgccacgtcattcacaaactcatgcttgccctgctcaaagaggtactcaaatgaggctgggtccaggagttgcatcccctgtgctgtctgatctgaggatgcctcggttcctgggggcccacaacggtacacagccggttcccgaggattcatgccatgccagttcccgggaataaaacctatggcggaaaatatagcatcaggcttgcatctctggggatctctaggatgtggtttgggggcaaccagacttgggcctgagcatcgaagagggcaaagagattgaagcaaggaggagtgataccaactttatgtgcaatgtggatgcagacttcctcagctgtcagcgatgactcactgaaagtgacccagggctccccgccgcctggaccagcccagtgcagaagcaccttcaggcctcccatggcagccatgggctgggctccatccccaacgggcttactgcccctggccatcccccagtggcgcagaggcatgctcccggcaggtggctcagctgagggtgagtcctggagctccctgtgtcaactcaagcaagccacttagcaattctgggcctcagtttccccatctggaaaagggaggtcctcagggtgttgccatcaaaagatggttgtaatgtttcaatatagttccgcatattacacattcagcacagacccgggcatcggagcagtcccgaggcaccaggtgctcccatccaagtgcagcctgtcaagcgcagccagtccccgcggcttcttcctgaggacctccggccgcgctccttccgcgcccgcgtccagactcacccttccgggggaacacaagctcgaac

SEQ ID NO: 2549 - DNA, 6495 bp, Homo sapiens
acttcccgggtcgacgatttcgtcaggcaccagccgccgccgcacccggccccagcgcccaccgtctgcatgtgcccgccgtagccgtctgcccagcccgcagcccgcgctccacggagcgctggagaccaccgtggggggccccttctgccctcgagagaagcggtcttggaggtattgatttaggtggttggattttttccgtggatctatcaattcacaattcgaatttggaagaaagaaggaaaacatgacgtctccagccaaattcaaaaaggataaggagatcatagcagagtacgatactcaggtcaaagagatccgtgctcagctcacagagcagatgaaatgcctggaccagcagtgtgagcttcgggtgcaactgttgcaggacctccaggacttcttccgaaagaaggcagagattgagatggactactcccgcaacctggagaagctggcagaacgcttcctggccaagacacgcagcaccaaggaccagcaattcaagaaggatcagaatgttctctctccagtcaactgctggaatctcctcttaaaccaggtgaagcgggaaagcagggaccataccaccctgagtgacatctacctgaataatatcattcctcgatttgtacaagtcagcgaggactcaggaagactctttaaaaagagtaaagaagtcggccagcagctccaagatgatttgatgaaggtcctgaacgagctctactcggtgatgaagacatatcacatgtacaatgccgacagcatcagtgctcagagcaaactaaaggaggcggagaagcaggaggagaagcaaattggtaaatcggtaaagcaggaggaccggcagaccccacgctcccctgactccacggccaatgttcgcattgaggagaaacatgtccggaggagctcagtgaagaagattgagaagatgaaggagaagcgccaagccaagtacacggagaataagctgaaggccatcaaagcccggaatgagtacttgctggctttggaggcaaccaatgcatctgtcttcaagtactacatccatgacctatctgaccttattgatcagtgttgtgacttaggctaccatgcaagtctgaaccgggctctacgcaccttcctctctgctgagttaaacctggaacagtcgaagcatgagggtctggatgccatcgagaatgcagtagaaaacctggatgccaccagtgacaagcagcgcctcatggagatgtacaacaacgtcttctgcccccctatgaagtttgagtttcagccccacatgggggatatggcttcccagctctgtgcccagcagcctgtccagagtgagctgctacagagatgcctacaactgcagtctcgcttatccactctaaagattgaaaacgaagaggtaaagaagacaatggaggccaccctgcaaaccatccaggacattgtgactgtcgaggactttgatgtgtctgactgcttccagtacagcaactccatggagtccgtcaagtccacggtctctgaaaccttcatgagcaagcccagcattgctaagaggagagccaaccagcaagagacagagcagttttatttcacaaaaatgaaagagtacctggagggcaggaacctcatcaccaagttacaagccaagcatgaccttctgcagaaaaccctgggagaaagtcagcggacagattgcagtctagccaggcgcagctcaactgtgaggaaacaggactccagccaggcaattcctctggtggtggaaagctgtatccggtttatcagcagacacggactacagcatgaaggaattttccgggtgtcaggatcccaggtggaagtgaatgacatcaaaaatgcctttgagagaggagaggaccccctggctggggaccagaacgaccatgacatggattccatagctggtgtcctgaagctttacttccgggggctggaacaccctctcttccccaaggacatctttcatgacctgatggcctgcgtcacaatggacaacctgcaggagagagctctgcacatccggaaagtcctcctagtcctgcccaaaaccactctgattatcatgagatacctctttgccttcctcaatcatttatcacagttcagtgaagagaacatgatggacccctacaacctcgccatctgcttcgggccctcgctaatgtcagtgccagagggccacgaccaggtgtcctgccaagcccacgtgaatgagctgatcaaaaccatcatcatccagcatgagaacatcttcccaagccccagggagctggagggccctgtctacagcagaggaggaagcatggaggattactgtgatagccctcatggagagactacctcggttgaagactcaacccaggatgtgaccgcagagcaccacacgagcgatgacgaatgtgagcccatcgaggccattgccaagtttgactacgtgggccggacagcccgagagctgtcctttaagaagggagcatccctgctgctttaccagcgggcttccgacgactggtgggaaggccggcacaatggcatcgacggactcatcccccatcagtacatcgtggtccaagacaccgaggacggtgtcgtggagaggtccagccccaagtctgagattgaggtcatttctgagccacctgaagaaaaggtgacagccagagcgggggccagctgtcccagtgggggtcatgtagccgatatttatcttgcaaacatcaacaagcaaaggaagcgtccagaatctgggagcatccggaaaacttttcggagtgacagccatgggctgagcagttccctgactgactcctcctccccaggggtgggggctagctgccgcccatcctcccagcccatcatgagccagagcctccccaaagaagggccagataagtgttccatcagtgggcacgggagcctcaactccatcagccgccactcatccctgaagaatcggctggatagtccacagatccggaagactgccacagcgggaaggtcaaaaagcttcgataaccatcggcccatggaccctgaggtcattgctcaggatattgaggcaacaatgaactcggccctgaatgagctacgggaactagaacggcagagcagtgtcaaacacacccctgacgtggttctggacaccttggagcccctcaaaacctccccagtggtggcccccacgtcagagccctccagccctctgcacacccagctcctcaaggaccccgagcccgccttccagcgcagcgccagtactgctggggacatcgcctgcgccttccggcctgtcaagtctgtcaagatggctgccccggtcaaaccaccagccactacggcccaagcccacatgtcttccccaaaacaaatgccactagccctggtgtcaactcatcaacttccccacagtctactgacaagtcttgtactgtctgagggataataatttaattgttctagacaaggggactatagggactgactgttattaaaatcttcctatttaactagcttggggacttcagttgaaaattaggttctaagttgttcttgcaggaattagcctccccgtctcccaaaaccttgagaatgaagcccttggtatcgcctctcccttcccactgccctctgcttcccccagtcgtcgtaattcagccagctgcagtccgtaccgttcttaggttagccagagacaggttttcattatcaggtcactgtgaaatctggtaaggcagtcctgaggacatgggctcaagtctcagtcccctcagaccacggtgatgccttgaccagatggttggctactgccatccagctttcagtggcatcttgttttgggaactgattatagagaatcatatatagtccagtcttcattttacatacacacacatattttacacacacacacattttacacacacacacacacacacacacacacacatatgtttttctagtctctggcatgtgtagcctctcctggtcatagaccagtctctttgtaagttattgtggcagttcacacagtagccaccaggggtctctgtttccattacaaactttgttctgtctgggccagagaacctagcctttgaaatctctccatcatgtgaaacataacgggatgggacaatcccgtaacctgtttggggttgggggctttctctctgtgttctttccattgatgtgaattggtcattggtgtttgctcttgcctctcctccatcccctagaagtacacccccgtcttattaaggagcttttaaagtttttctgaatgtatagacatttctcgggttcctacctttgtctctgatggaccattttccatttaagacattttcctgtataagacagttttatagctggttccttttagggtaaagagtcttaagagagttttattgtgtctatggcaggtttgggaaaggtaagaaatgggtcctttttcctcctaatgtttttggcacttaaaacataaaattcattatcctattaaaaaattaaattcagctttgctaatccagaaattgttcccaaatgaaaacttgttttaagtccaccccttagtttccttattttacaaggtctctcttcagggaccaacaggggcttagagagccttagttagattaaagggagaccctacctcttaaaaccagttttcatttatgcaaacaaggacaattaagggaaccctgaccccacaggctctcaagtcttcccaaggccagaatcgaaagaaaattaaaatttgaatgctgaatattctggctctactctggcctttttttctggttcccttccaaaatgcacaaatcatacccttgtctgctccaattcagtctccaaacctggtgcctgtgctcctggcccccctagcatcatgctatcccaggagtatcaggaccagacacatccacagccaggctcatgggtctcagacagcaacttgagttaaagctgaaactcatccttcttctctgtgttttctggtttaaaagctgcacttatattttagccttattattttctgtagttccggagagatggtgggttgccattctggcaggaaaatctgagttttcttatctttgacctagaagagattctttttggaccaacctgcgaaattggtagttaggtctatggaaagtggtaggatttttttttttttaatcctgtgcaaaggaaaagaggtgctttgtgggaaatcactaatgagaaggctaacctgcagcaccagagaaacctttccaagtgctaggcaggagaactgaagaactctttcagtgaagtgagtcagcctagaagaggcaacccacagtcttgatttttgttgctgtttcctgacctgttcttgcctgtcacctgggcctacacaggtcccgagccaacggggctttcatacccaaggatctgtttccttgctgaaaatgaaaccctatctttcactttacattcctttcaatccaactgatcaaaactggtacccacacttgccctttctccctctctccagcacactcccctctaagaaagtaaaagcaaagccttcttaatggcaacactttgggcctgttctgttgctcctgccttatttctctttcaaccctgtacatgactcgtgttcaccatccccttgatcagtgtccatccgcgctaatttgcatcatgaactgaacagtgtgtgagtggtcacctactaaacccagctctgggggcagagctgtcttccccatctctggtgctcctaacacctgtgagatggtcctgtcgagaggactaggaaccgataggaggagagttcttctcggcagagctcactgcaaacaactggaattgaggttgcacactgtgatttttacaccgaaaagccaaaaggagctggccatccagggcctagggagaccagccttcctcagctatgcttgccgaaaccagcatgatgcttcaaagagccctgctccacccctcatggcatggatccttttcctggtgtggactctgaagggtcagtcttcggggaagagaggtggggtggggctactagcatcccaatttagaaaacagaggagtttgtagccagcagcctgtaaactggaaacactggtctcagccaacctcctcagggcgccctggcttctccccaaggagatgaggagcggtgatgccagcaccgggatgcgcagagcactggaagggctggtgcagatctacttcccatgcagaagagaagtcacatcttccagggaatcgcaatgttgtggcgtctgacttgtatgtcacatttgtgtaaaatggtatattctttaaaatagtgttgataactggaatattgtatgtatgcttggagatgctttgtgtgaacctaagactgtcactcaacagatgttggattggggaaaatccaaagcacaacttcaaaataaaatacatttttaggtttcaaaaaaaaaa

SEQ ID NO: 2550 - DNA, 3468 bp, Homo sapiens
tttcgtcgctttgtctgtccggcaagccgacggcccgctgctggcctccgtgacgcggcctcctccgcgcctcgcggcatggcgtcggaggggccgcgggagcccgaaagcgagggcatcaagttatcagcagatgtcaaaccatttgtccccagatttgccgggctcaatgtggcatggttagagtcctcagaagcatgtgtcttccccagctctgcagccacatactatccgtttgttcaggaaccaccagtgacagagcagaaaatatatactgaagacatggcctttggagcttcaacttttccacctcagtatttatcttctgagataactcttcatccatatgcctattctccttatacccttgactccacacagaatgtttactcagtgcctggctcccagtatctttataaccaacccagttgttaccgaggttttcaaacagtgaagcatcgaaatgagaacacatgccctctcccacaagaaatgaaagctctgtttaagaagaaaacctatgatgagaaaaaaacgtatgatcagcaaaagtttgacagtgaaagggctgatggaactatatcatctgagataaaatcagctagaggttcacatcatttgtccatttacgctgagaatagtttgaaatcagatggttaccataagcgaacagacaggaaatccagaatcattgcaaaaaatgtatctacctccaaacctgagtttgaatttaccacactggactttcctgaactgcaaggtgcagagaacaatatgtcagagatacagaagcaacccaagtggggacctgtccactctgtctctaccgacatttctcttctaagagaagtagtaaaaccagctgcagtgttatcaaagggtgaaatagtggtgaaaaataacccaaatgaatctgtaactgctaatgccgctaccaattctccttcatgtacaagagagttatcttggacaccaatgggttatgttgttcgacagacattatctacagaactgtcagcagcccctaaaaatgttacttctatgataaacttaaagaccattgcttcatcagcagatcctaaaaatgttagtataccatcttctgaagctttatcttcggatccttcctacaacaaagaaaaacacattattcatcctacccaaaagtctaaagcatcacaaggtagtgaccttgaacaaaatgaagcctcaagaaagaataagaaaaagaaagaaaaatctacatcaaaatatgaagtcctgacagttcaagagcctccaaggattgaagatgccgaggaatttcccaacctggcagttgcatctgaaagaagagacagaatagagacaccgaaatttcaatctaagcagcagccacaggataattttaaaaataatgtaaagaagagccagcttccagtgcagttggacttggggggcatgctgacagccctggagaagaagcagcactctcagcatgcaaagcagtcctccaaaccagtggtagtctcagttggagcagtgccagtcctttccaaagaatgtgcatcaggggagagaggccgccgcatgagtcaaatgaagaccccgcacaatcccttggactccagcgccccactgatgaagaaagggaagcagagggagatccccaaggccaagaagccaacctcactgaagaagattattttgaaagaacggcaagagagaaagcagcgtctccaagaaaatgctgtgagtccagcttttaccagtgatgacacacaagatggagagagtggtggtgatgaccagtttcccgagcaggcagagctgtcagggccagaggggatggacgaactgatctccactccttcggttgaggacaagtctgaagagccaccaggcacagagctccagagggacacagaggcctcccaccttgctcccaatcacaccaccttccctaagatccacagccgcagattcagggattactgcagccagatgcttagtaaagaagtggatgcttgtgttaccgacctactcaaagaactggtccgtttccaagaccgtatgtaccagaaagatccagtcaaggccaagactaaacgtcgacttgtgttggggttgagggaggttctcaaacacctgaagctcaaaaaactgaaatgtgtcattatttctcccaactgtgagaagatacagtcaaaaggtgggctggatgacactttgcacacaattattgattatgcctgtgagcagaacattccctttgtgtttgctctcaaccgcaaagctctggggcgcagtttgaataaggcagttcctgtcagtgtggtggggatcttcagctatgatggggcccaggatcagttccacaagatggttgagctgacagtggcggcccgacaggcgtacaagaccatgctggagaatgtgcagcaggagctggtgggagagcccaggcctcaggcacctcccagcctacccacacagggccccagctgccctgcagaagatggccccccagccctgaaagaaaaagaagagccacactacattgaaatctggaaaaaacatctggaagcatacagtggatgtaccctggagctagaagaatccttggaggcttcaacctctcaaatgatgaatttgaatttatgagagttcttgcctgtgtgtctgtattttgggtaaggaggggaggtctgaaaaagactttggggctttttcttctgtttttcatgacaatgtaatttgtgtaactgttgaatctggaaattgatcagcattaaagggcacatgaagcagtgtctgcaggcgttcagtgctgcggagcctgttaaaggtcactcagatgtgcaggtgttaatcttctctaaaagcctggtgatacagctctggctttctgagcacactacggatctggaaaatactggaaaatgtgatacttagaatactttggctgctaaggaaacttcctctccattgcagaatagctgagccaagtgagtgagtttgcagaaagcaggtggtgagctcctgcctgctggaggttgccatggagggccattcctgcccggcaacagcaccgtcctgcagggagccacttggcagaagggtgcagggctgctggtgtcagagcaagagggctacagggaaagggccctttctcaggggatgtagcttttttaaaagatttgggaacacttggaggatttgctaaaatgagcctcagaaggaaaattggttttctaacctgtgactttttgaaatgaattattcctttcagtctttatttttcaaagaaacaatgtgtattgaagtacctagatttgtttgataatcaacaaatctttcctttttcaatgaacatattctgaatgtggtttctgtcttagaccaggaggacagagtttgctttcatattttccctgtaagtaagagggcttatttattttaaataaagagtaattattaaaaaaaaaa

SEQ ID NO: 2551 - DNA, 1747 bp, Homo sapiens
ttttttttttttgaagaaaaaatgctttttttaatcacaacatgaaattaacatgacatcgtattagaattaaaccaggataaatactgctgttataaaatttacatttctcacatccattccagaggaaaatcttacatattagggctcatcttaatgttatggactgatttcagtaaaactttttaaatagtaaatagcaattaacgtattctcaaactgtgctaagtagttagaaaggcaactataaaatctataatgataacacgtggcaggattagaactgttctgttaaacattaagaaccacatctctgttttagatgttacctcagtgcacctttttcactggtaaggcaactgcttgctgtgggtgccacaatgattaccaagtttcttcttaagtaaaagacacttgtttgatcaagactcaagtgagttttctttcccaattttgttcttttgaagcagaaggaaataccttggtctttgatatatataaggaggcaaatatgaaatacagctgttataatcttctaaatcacaagggcaatgaattattcattttctttgaaaatattcagtctttgaaatatttcatttttaaaataacaaggcttctgaataatttctcaaaactagctttccattttagtacacgatttgataaacatagcacattagataggtatttagcaatttcttctaccaactacactttgccctcactaagggttagagtatgatttgaaacaatttctacatataaagcatctttaaataagttttgtgttcactgaactgagacttctttcacttatgtacctatggaagttaatctgagcatacacatatatacatacttgcatacatatgtgtacatatgttttttaagtaagttacttttaccattagaataaacctagacactacagggacaactctggggaacagggcggtctgccttaacaacccttctctaggttgaggaaggcaggtatagttcactgaaggatgtgatgaggctgtagtaagtcttctcatcatctgttaatcctgcgttgcctggtctcaccaccacagctacgtgcacatctgcttcctcagcagcactggcctctcgagtaacatctgtcagaaacaaaatgttgttggttgagcacccaatgctgtctgcaatctttcggtaactttcactctctactttgtgtccaatcttggtatcaaagtgaccatcaacaagctcaagaatatctccctccgtagaatgcccgaataacagtttctgtgcctccacactccctgaggaatagatgtacaccttcattccggcctctctccacttcctgactgctggaactacatctgcaaagaacctgtttcctcaaaagactgacatcctgctggcactcctcttcttcccaatgtgtctgcagatactctttaacattttcttcgatgtaaggaaataaaatgtccttcacgaaagcaatcggggttgtggtaccttcgatatctaacaggatcacggtgacttcggcggggaccgaaagcacgaccatttccctaccggatgctacgggactcggcctgctgttggggagggcggagggcggcgccggctgcggctgcggcccccggtaccgtcttgggcttccggcggccccgcgcgatctcggagccagcgaccaagtgcagcccgccgcgcgtggggagaggacacttctgcacacctggaactggaaaag

SEQ ID NO: 2552 - DNA, 1352 bp, Homo sapiens
gcggccgccctcccacagccccacacactgggagaccgcccaccgcaaaccgcggagacccccgtctagatttaaagcgcggctgcgcccggcttctgacgtccattgaatcgcgcgggcggccggcggcgagcgcggggctgcgccgggatcgctgcgccctccgccgctggcctctgcgacgcgcgccgctcgcccgagccacccgccgccgcgccggctccccgcgccgctgcgctcctcgcccacgcgcctgcccccaaggatggtcccgcgcgaggcaccagccgggtgggctttgccttctgctgctgctgctctgccagttcatggaggaccgcagtgcccaggctgggaactgctggctccgtcaagcgaagaacggccgctgccaggtcctgtacaagaccgaactgagcaaggaggagtgctgcagcaccggccggctgagcacctcgtggaccgaggaggacgtgaatgacaacacactcttcaagtggatgattttcaacgggggcgcccccaactgcatcccctgtaaagaaacgtgtgagaacgtggactgtggacctgggaaaaaatgccgaatgaacaagaagaacaaaccccgctgcgtctgcgccccggattgttccaacatcacctggaagggtccagtctgcgggctggatgggaaaacctaccgcaatgaatgtgcactcctaaaggcaagatgtaaagagcagccagaactggaagtccagtaccaaggcagatgtaaaaagacttgtcgggatgttttctgtccaggcagctccacatgtgtgggtggaccagaccaataatgcctactgtgtgacctgtaatcggatttgcccagagcctgcttcctctgagcaatatctctgtgggaatgatggagtcacctactccaggtgcctgccacctgagaaaggctacctgcctgctgggcagatctattggattagcctatgagggaaagtgtatcaaagcaaagtcctgtgaagatatccagtgcactggtgggaaaaaatgtttatgggatttcaaggttgggagaggccggtgttccctctgtgatgagctgtgccctgacagtaagtcggatgagcctgtctgtgccagtgacaatgccacttatgccagcgagtgtgccatgaaggaagctgcctgctcctcaggtgtgctactggaagtaaagcactccggatcttgcaactccatttcggaagacaccgaggaagaggaggaagatgaagaccaggactacagctttcctatatcttctattctagagtggtaaactctctataagtgttcaggggtgacatagcctttgtgcaaaaaaaaaa

SEQ ID NO: 2553 - DNA, 3774 bp, Homo sapiens
  misc_feature (1)...(3774): n = a,t,c or g
cgaccctcgctcactcctcagtgcacgagtgatctgaagcatgacaagctcagcctgcagctgccgtgggctttgtgtggactggacgcagagcttgggagacgggggagggctattactccaattcactgtcaatggaattacagctatagcggcagtgtatataggattgctttttctcgtcttcctgggttctgaagtaacggaagctaccttgtataaagacctcaacactgctgaccatgatcagcgcagcctggagcatcttcctcatcgggactaaaattgggctgttccttcaagtagcacctctatcagttatggctaaatcctgtccatctgtgtgtcgctgcgatgcgggtttcatttactgtaatgatcgctttctgacatccattccaacaggaataccagaggatgctacaactctctaccttcagaacaaccaaataaataatgctgggattccttcagatttgaaaaacttgctgaaagtagaaagaatatacctataccacaacagtttagatgaatttcctaccaacctcccaaagtatgtaaaagagttacatttgcaagaaaataacataaggactatcacttatgattcactttcaaaaattccctatctggaagaattacatttagatgacaactctgtctctgcagttagcatagaagagggagcattccgagacagcaactatctccgactgcttttcctgtcccgtaatcaccttagcacaattccctggggtttgcccaggactatagaagaactacgcttggatgataatcgcatatccactatttcatcaccatctcttcaaggtctcactagtctaaaacgcctggttctagatggaaacctgttgaacaatcatggtttaggtgacaaagttttcttcaacctagttaatttgacagagctgtccctggtgcggaattccctgactgctgcaccagtaaaccttccaggcacaaacctgaggaagctttatcttcaagataaccacatcaatcgggtgcccccaaatgctttttcttatctaaggcagctctatcgactggatatgtccaataataacctaagtaatttacctcagggtatctttgatgatttggacaatataacacaactgattcttcgcaacaatccctggtattgcgggtgcaagatgaaatgggtacgtgactggttacaatcactacctgtgaaggtcaacgtgcgtgggctcatgtgccaagccccagaaaaggttcgtgggatggctattaaggatctcaatgcagaactgtttgattgtaaggacagtgggattgtaagcaccattcagataaccactgcaatacccaacacagtgtatcctgcccaaggacagtggccagctccagtgaccaaacagccagatattaagaaccccaagctcactaaggatcaccaaaccacagggagtccctcaagaaaaacaattacaattactgtgaagtctgtcacctctgataccattcatatctcttggaaacttgctctacctatgactgctttgagactcagctggcttaaactgggccatagcccggcatttggatctataacagaaacaattgtaacaggggaacgcagtgagtacttggtcacagccctggagcctgattcaccctataaagtatgcatggttcccatggaaaccagcaacctctacctatttgatgaaactcctgtttgtattgagactgaaactgcaccccttcgaatgtacaaccctacaaccaccctcaatcgagagcaagagaaagaaccttacaaaaaccccaatttacctttggctgccatcattggtggggctgtggccctggttaccattgcccttcttgctttagtgtgttggtatgttcataggaatggatcgctcttctcaaggaactgtgcatatagcaaagggaggagaagaaaggatgactatgcagaagctggcactaagaaggacaactctatcctggaaatcagggaaacttcttttcagatgttaccaataagcaatgaacccatctcgaaggaggagtttgtaatacacaccatatttcctcctaatggaatgaatctgtacaaaaacaatcacagtgaaagcagtagtaaccgaagctacacgagacagtggtattccagactcagatcactcacactcatggatgctgaaggacctcaccagcagacttgtgttttggggtttttttaaaccctaagggaggtggatgggtaggaaccctggttcttactgccaaaacactggaaaaagagactgaaaaaaagcaatgtactgtacatttgccattataatttatatttaagaactttttattaaaagtctcaaatttcaggttactgctgcgattgatgtagtggagatgcctgaacacaattctatattttagtattttttagtaatttgtactgtattttccttgcaaatattggagttataaaccatttactttgtgttctactgagtaagatgacttgttgactgtgaaagtgaattttcttgctgtgtcgaacaatcaggactgcattcatatgagatccttgtagtataagcacaggccatttttcactttggtattaataaaatgtnnnnnnnnnnnnctggctgaatggctgaatgagataaaatttaattttaaaaaatggttatgaaataatgttccaattattaaatttgtattatcccagtggtattcaataaatcaaaatgtgtgaagtaatgggcaatatcaaacttcctgcatatctccatttttgctctaggcaaattaattatccttaaaaaagttaagcatatcttctgaactgaatacatcagctggcataaaaggagcatgaagtctgttaaagccattgtcagcaaagctttgaaaataaaggacttcacaaaaacggtaatgtaaatgtgcttccaagttggggggaaaatgtgtacttaggaaaacatggaaacttagacttgtatagtgtaatgaacacaaataccaaaactgcattttggttttgcctataccatcctgatttttgaaaagtgaattataaacacaaaattgttagtgtttatgatgtttttatcataaaggatgtcagagaaactttatgcatattaaaaatgtaatgtaattataagcgattcccctcaacaatccagagaaagtagttctttaaataagagataatttaaagaaaaataaatactagacatcaaatttagatctggtttatgtcaaaggttttaacactgtacataaatgttcaatttacttttacaaagatcaagaatactgcccattactgtcacaattttccagatattatataatgaactcgtaatgtaacatttccttctagcttcctactgaattgtgagctgttacttgttgaaaaaccatatcacttttctgttgccatgatttttttttttcaacaaaaaaccaaagtgcattgtaccgccctttggccaagtcttgtatgtgccttggatccaacgctacatgtattcagctttttaaaactcccacaaaatttttcatactccttaaatatgaaaaattatggtcttattgctgaataaaacttttaaaaagtacagaataattgtgcttgctttttcaggattgtgttactatcactaagtagcaaattgcccagcacattagtcctaaacgtcccatgtatttttctaggcataaaaataaaagttggctaaaaattttaaaaaatcaaaa

SEQ ID NO: 2554 - DNA, 6996 bp, Homo sapiens
cgccgatggctgcggggtctcgcgccgtcgcaccgtccccacgcggcaagcgaccttcgggctcagggcggcggcggctgcaacgaggattaggagggcggcgcggaagccaagaatagtgtcgtcagcagcagccatttggtcccaggaggaaaagaggctgtggcagcgacgccgacgtcctgcgcgtaccccctctccgcggcacccaccgggccccctcctcctcctcttcggcggcggcagcgtccaccatcttcctcttgctgccagtggtagcgctcgtctggcggagctggttgttggtcttgacgatattatggatgaaggagttgttaaagaaagtggcaatgataccattgatgaagaagaactgattttacctaacaggaacttaagggacaaggtagaagaaaattcagtgagatctccaagaaaatcacctcgtttaatggcacaagaacaagtaagaagtttgcgacagagcactattgccaagcgttcaaatgcagcaccattaagtaacacaaaaaaagcatctgggaagactgtatctactgctaaagcaggagtgaaacaaccagaaaggagtcaggttaaagaagaagtatgtatgtcactgaaacctgagtaccataaggagaatagaaggtgcagccgaaatagcggacaaattgaagtggtacctgaagtatcagtgtcttcaagtcattcttcagtgtcatcttgtcttgaaatgaaggatgaagaatgattagactctaaggattatgtgtaataatccgggagacatagatgtgccatctcatgaattaaattgttcacttctttcagagacttgtgttactattggagaaaagaaaaatgaagctttgatggaatgtaaagccaagcctgttggtagtccaattgtttaagttttcagataaagaagaacatgaacaaaatgattccatttcaggtaaaacgggtgagactggtgttgaagaaatgatagcaacaagaaaagttgaacaagattcaaaggagacagtaaaattatcccatgaagatgaccatattcttgaggacgctggatcttctgatatttctagtgatgctgcttgtacaaatccaaataagacagaaaacagccttgtaggtttgcctagttgtgtagatgaagtgactgaatgtaatttggaattgaaggataccatgggtattgctgataaaactgagaacacccttgaaagaaataaaattgaaccgttgggttattgtgaagatgcggagtctaataggcagttggagagcactgagtttaataaatcaaacttagaggtggttgatactagtacttttggaccggaaagtaatatcttggaaaatgctatttgtgatgtgcctgaccaaaattcaaaacagttgaatgctatagaaagtactaaaatagagtcccatgaaacagcaaaccttcaggatgacagaaacagccagtcaagtagcgtttcttacttagagtcaaaaagtgtaaaatccaaacatacaaaacctgtaattcattctaagcaaaacatgaccacagatgctccgaagaaaattgttgcagcaaagtatgaagtaatacatagcaaaactaaagttaatgtcaaaagtgtgaaacgaaatactgatgtaccagaatctcagcaaaattttcataggccagtcaaagtcagaaaaaaacaaattgataaggagccaaagattcagagttgcaattctggggttaaatctgtgaaaaaccaagctcattctgtactgaaaaaaacattacaggatcaaactttagtacaaattttcaagcccttaactcattctttgagtgataagtcacacgctcatcctggttgcttgaaagaacctcatcatcctgcacaaactggacatgtatcacattctagccagaaacagtgtcataagcctcagcaacaggccccagcaatgaaaaccaatagtcacgtgaaggaagagcttgaacacccaggcgttgagcattttaaggaagaggataaactgaaactgaaaaaacctgagaagaacctacaaccccgccaaagaagaagcagcaaaagtttttctttagatgagccaccattgttcattccagataacatagctaccataagaagagaaggctctgatcatagctcctcatttgaaagcaaatatatgtggactcccagcaagcagtgtgggttttgcaaaaaaccacatggcaacaggtttatggttggctgtgggagatgtgatgactggtttcatggtgattgtgttgggttaagtctttctcaagcacagcagatgggcgaggaagacaaagaatatgtctgtgtaaaatgttgtgctgaagaagacaaaaagactgaaatactagatccagatactttggaaaaccaagctacagttgaattccatagtggagataaaacaatggagtgtgaaaagcttggattatcaaaacacacaacaaatgatagaaccaaatatatagatgatacagtgaagcacaaggtcaaaattttaaaacgggagtctggtgaaggcagaaattcatcagactgtagagataatgaaattaaaaaatggcagctagctcctcttcgtaagatgggacaaccagttttacctcggagatcctcagaagaaaaaagtgaaaaaataccgaaagagtctacaactgttacttgcacaggagaaaaagcttcaaaaccaggtactcatgagaagcaagagatgaaaaagaagaaagttgcaaaaaggagtgcttaatgtacatcctgctgcttctgcttccaagccttctgcagatcagatcaggcaaagtgtcagacattctctcaaagacattcttatgaagagacttacagactcaaatttgaaggtaccagaggaaaaggcagcaaaagttgccacaaaaattgagaaagagcttttctctttttttcgggacacagatgctaaatataagaacaaatatagaagtttgatgtttaatttgaaagatcctaaaaacaatatattatttaaaaaagtactgaaaggagaagtaactcctgatcatcttatcagaatgagtccagaagaactagcttctaaagagttagctgcttggagacgaagagaaaacagacataccatagaaatgattgagaaagagcagagagaagtggaacgacggccaatcaccaaaataactcataaaggtgaaatagaaattgagagtgatgccccaatgaaagaacaggaagcagccatggagattcaggaaccagccgccaataagtcattggagaagccagaaggatctgaaaaatcgaaaagaggaggttgactctatgtctaaagataccactagtcaacacagacagcatctttttgatctcaactgcaaaatctgcataggtcgaatggcaccacctgtagatgatctttctccaaaaaaagtaaaagttgttgtaggagtagctcgcaaacattcagacaatgaagcagaaagtatagcagatgcattatcttcaacctcaaatattttggcttctgaattctttgaggaggagaaacaggagtctccaaagtcaacgttctctcctgctccacgtccagagatgcctggaactgttgaagttgagtctacctttctggctcgattgaacttcatctggaaaggttttatcaacatgccttctgtggcaaaatttgttaccaaagcctatccagtatctggctccccagaatacctgacagaggacctaccagatagtattcaagtaggtggcaggatatcacctcagacagtttgggattatgtggaaaaaataaaagcatcaggaaccaaggaaatttgtgtggttcgcttcacaccagtaactgaagaagatcaaatttcttatactttgctctttgcatacttcagtagcagaaagcgctatggagtagctgctaacaacatgaagcaggttaaagatatgtaccttattcctttgggtgccacagataaaattccacaccctcttgtgccttttgatggacctgggcttgaactgcatagacctaatctattgttgggcttaattattcgtcagaaactgaagcgacagcacagtgcctgtgctagtactagtcatatagctgagactcctgaaagtgcaccaccaatagcattgccacctgataaaaaaagtaaaatagaagtttctacagaagaagcaccagaggaagaaaatgacttttttaattcttttacaactgtattacacaagcagagaaataaacctcagcagaatcttcaggaagaccttccaacagcagttgaacctttaatggaagtcaccaaacaggagccaccaaaacctttaagatttcttcctggcgtgttgattggctgggagaatcaacctactactctggaattagcaaataaacctcttcctgtggatgatatacttcaaagccttttgggcaccactggtcaagtatatgaccagggcccagtcagtgatggaacaaaacactgttaaagaaattccatttttaaatgagcagaccaactcaaaaatagagaaaacagataatgtggaagtaactgatggtgaaaacaaggagataaaagttaaagtagataatatttcagaatctacagataagtcagcagaaatagaaacatcagtagtagggtcctcttccatttctgcagggtctttgacgagtcttagtctcagaggtaagccaccagatgtttctacagaagcatttttaacaaatttatcaattcagtcaaaacaagaggaaactgtggagagtaaagagaaaacattaaaaagacagcttcaggaagatcaagagaataatttgcaagataaccagacttcaaatagttctccatgcagatctaatgtaggaaaaggaaacatagatggtaatgtgagctgtagtgaaaaccttgttgctaatacagcgaggtctccacagtttatcaacctgaaaagggatcctaggcaagcagcaggacgaagtcagcctgtaactacttcagaaagcaaagatggagatagttgccggaatggagaaaaacacatgctgcctggcctgtcacacaacaaggagcacttaacagaacaaatcaatgtagaggaaaagttgtgttctgcagagaaaaactcgtgtgttcagcagagtgacaatttaaaagttgcacaaaactcaccatcagtagaaaacatacagacttctcaagcagaacaagcaaaacccttacaggaggatattttaatgcaaaatattgaaactgtgcacccatttcgaagaggatcagcagtagcgacatctcattttgaagttggaaacacatgtccatcagaatttccttctaaaagcatcacctttacttccagaagcaccagccccagaacaagtacaaacttttcacccatgaggccacagcagcccaaccttcagcatctcaagtctagcccacctggatttccatttccagggcctcctaattttcccccacaaagcatgtttggatttccaccacatttgccacctccattacttccccctccaggctttgggctttgcttcaaaatcccatggttccctggccacctgttgtttcatctcccaaggtcagccacagcgtatgatgggtcctctctcacaagcatcaaggtatataggcccgcagaatttttaccaggttaaagacattcggaggccagaaaggcgccatagtgacccttggggtaggcaagaccaacagcaactggataggccatttaataggggtaaaggggaccgccagagattttatagtgattcacaccatttgaaaagagagcgacatgaaaaggaatgggagcaagaatctgaaaggcatagacgcagagacagaagccaagacaaggacagagacagaaaaagcagggaggaagggcacaaagataaagagagggcacggttatcacatggtgatcgaggaacagatggaaaagcaagcagagatagtaggaatgtagacaagaagccagataaacctaaaagtgaagactatgagaaggacaaagaacgagagaaaagtaaacacagagaaggagaaaaggacagggataggtaccacaaagatagggaccacactgacagaactaaaagcaaaaggtaaaatttgcaggctgcttcaggattacatttaaataactgttaaaatgttgtatcttgtaaacaaaagaaagattgcctgctaggattgtgccatctttaaaatttttactattggtcatttgcagaacagtaaattctgtgtgttggtacagagtgctctgtaccagtgctcatcatcccttcttcataccaacggtccctagttataggaatttaatatttttaaaagttttacattgctgtatattcaaagatttgttttattaatatgcaataaaggcttagaaattttagttttattccttaattggtaaatatggttaactatggaatatatttacttcctctagtgaatgtcctttatataatgactaatttgggagtaatgtgtgctctgtaagtttgttttaaattgcactgtttttaaagaaactgtagaggagcaacaaaaatccaagcaacttcataatcagattatgctaatcatttagttgagcagtttttgaccaagaatcagaagcccaaggggtacatttattgctttaatctgcactcattgaagtcatttattaccatatactacagctttgtggtaggccattattttcattttcatttttggctcttcagaaacttgaatacttaagcttgtacatgatcttgtgttttgctatcctttttactgtaaaatgtaaatattttaagggatattttgattctaaatatgataaaataatttctcacctattttgtgtgtgtgacttgaaattcagtagtaaaagaatttcttctttaaagctttaaaaaaaaaaa

SEQ ID NO: 2555 - DNA, 2325 bp, Homo sapiens
ggttcgaggggagaggctgttggggtttgcaaaacgggccaaatgggggaatgctcccatcgactccagtctgagctcaggcaagggctcaggcatctgagcgcagaggccagggtgaccccactggggcgacctgggtctgttatatggggatagggttcctggactgtggaattgtctttgaagccctcggcctcccccagcctcaaatgggtctgccttccaggagcagctgctgtgaataaacacagaagtggagctgggggactgattagaagcctcattcagtgcacctgggccccagcaggcccagccaggcgtggaggaagaggcattgaggactttccttacctgtttttccagctcacccactgccagcagaggatctgctccgtcacccaggctggagtgcagtggtgtgatcacagctcactgcagcctcaaactcctgggctcaaccagtcctctcacctcagcctcctgagtagccgggattacagaatgctgtccagtttcaacgagtggttttggcaggacaggttctggttaccacccaatgtcacgtggacagagctagaagaccgggatggccgtgtctacccccacccccaggacttgttggcagccctgcccctggcgctggtcctcctggccatgcgccttgcctttgagagattcattggcctgcccctgagccggtggctgggtgtgagggatcagaccaggaggcaagtgaagcccaacgccacgctggagaaacacttcctcacggaagggcacaggcccaaggagccccagctgtctctcctggccgcccagtgtggcctcacgctgcagcagacccagcgatggttccggagacgccggaaccaggatcgaccccagctgaccaagaagttctgtgaggccagctggaggtttctcttctacctgtcctccttcgtgggcggcctctcggtcctgtaccacgagtcatggctgtgggcaccagtaatgtgctgggacaggtacccaaaccagctaaccttgtcctgtcctgctgcagactctgaagccatccctgtactggtggtacctcttggagctgggtttctacctctcactgctaatcaggctgccctttgatgtcaagcgcaagggtgggggaccttccagcatcaagcctcgtccccactatgacccaccgtctactgcaggatttcaaggagcaggtgatacaccacttcgtggcggtcatcctgatgaccttctcctacagtgccaacctgctgcgcattggctctctggtgctgctgttacatgattcctctgactacctgctggaggcctgtaagatggtcaactacatgcagtatcagcaagtgtgcgacgctctcttcctcatcttctcctttgtcttcttctacacccgactggtcctctttcccacccagatcctctacaccacatactacgagtccatcagcaacaggggccccttcttcggctactacttcttcaacgggcttctgatgttgctgcagctgctgcacgtgttctggtcttgcctcattctgcgcatgctctatagcttcatgaagaagggccagatggagaaggacattcgtagtgatgtagaagaatcagactccagtgaggaggcggcggcggcccaggaacctctgcagctaaagaacgggacagctggagggcccaggccagcccccactgatggccctcggagccgggtggccgggcgtctgaccaacaggcacacaacagccacatagccgggcggggctggctgtaaggggttgcccccccgccagtgccttggatatttctggggtgactggactggcgcccctgggccacctttctggagacagggagggccccacccggggtgggtgggaaggctgatgatctgtctccagccccttccttctgcccacccacccttcttccctctgggcaactggacagatctgggagccagcagctggatgctgtggctggccagagacacctccaggctgtggcctgggggctggggggagccccaggctgaaaagggtccaattaaaacaaatggagccaaattttctgcctgagaacttgggtccctatcaaagttccttcttcatccccagagacccccgagggagccaggcctctgcttacataccccacctacgggatacccactgcacttcagcctgggcaacaagagcaagactccatctaaaggaaaaagaaaaagaaaaaaaaaattcccaaaaagaaatggccaataagcacatgaaaagatattcaacattgttagtcataaaaataatgcaaatc

SEQ ID NO: 2556 - DNA, 3520 bp, Homo sapiens
  misc_feature (1)...(3520): n = a,t,c or g
tttcgtcgagccgatatttttgacgtgaggtttgttgaccccacagatacggaggactgactatgatttcttctcaatgtattgagacttatgacacatcttatgaaatcctgctcccaagtcacagataggctgacgggtcagagggcaagacgtgacccagggccgagccggggccatggcacctgcaaggtgtttctcagcaagattgaggaccgtgtttcagggcgtggggcattgggctttgtccacatgggctggcctgaagcccagccggctactgccacagcgggcttctcccaggctgctctcggtcggccgtgcggacctcgccaagcatcaggaactcccggggaagaagctgctctctgagaaaaagctgaaaaggtactttgtggactatcggagagtgcttgtctgtggaggaaacggaggcgctggggcaagctgcttccacagtgagccccgcaaggagtttggaggccctgatggaggggacggaggcaacggtggacacgtcattctgagagttgaccagcaagtcaagtccctgtcgtcggtcctgtcgcggtaccagggtttcagtggagaagatggagggagtaaaaactgcttcgggcgcagtggcgccgtcctctacatccgggtccccgtgggcacgctggtgaaggagggaggcagagttgtggccgacctgtcttgcgtgggagatgagtacattgccgcgctgggcggggcaggagggaaaggcaaccgcttcttcctggccaacaacaaccgtgcccctgtgacctgtacccctggacagccaggacagcagcgagttctccacctggagctcaagacggtggcccacgccggaatggtgggattccccaacgccgggaagtcctcactgctccgggccatttcaaacgccagacccgccgtggcttcctacccgttcaccaccctgaagccccacgtcgggatcgtccactacgaaggccacctacaaatagcagtggccgacatccccggcatcatacgaggcgcccaccagaacaggggtctggggtccgccttcctcaggcacatcgagcgctgccgctttctcttgttcgtggtggatctttctcagcctgagccgtggactcaagttgacgatttaaaatatgaactggagatgtatgaaaagggcctgtctgcgaggccccacgcaatcgtcgcaaacaagattgacctccctgaagcccaagccaatctgtcccagctccgggatcacttgggacaggaggtcatcgtgctgtcggcgttgaccggcgagaacctggagcagctgctgttgcacctgaaggtgctgtatgacgcctacgcggaggccgagctgggccagggccgccagccgctcaggtggtagccacgccagagcggggtcgcctctgggcctctgtctgagcaaacctgggtgtgaattcggtggttttgaatgcataaagtgccttgtggacacgggggagttgtggtgcttctgggtctctgggccccgcctgcttggcctgaaatgccctcatgttgggaagcattccgtgccccctaccccgcctgccctcccgtatttacttgcacctgtcagccctgcaccggacttgantgagccagtttgctcatttgtgctgattaacacccctaataaggggtttgggggttgcccataaacggggttggccctgccgctgactcgggtctccgccatgcacgcgtggactctcggatgagctcagcagaaccgcacagccagagccccaggtcagaagtgcagaccagggttctcagcacagtgcccgtcgtgcttccatggcttgctacggagagagacctctggatccacactggggctgcgtctggcccgttgtccagcagccctgcggtaccgcaagcccaggcaccagtgtctcggggggcctcactgctgcgcaaggggtggggccgaggatgcaagtccaggcagagcggcgcaggcagctgtgagcttttctccatcagccgtctgagaagagcagtgaggccagctgcttcctgtccttcagaacacttctctgtgctcagtgggagccaggaagcctcaggcttcacgactgaatgcacccaatatccgacctggctgcgtgtttctggctgggctgccgtgtgcacagcaagttaactagaggggctgtgggccatggaactgtcagcgttattctcagaaggcggccgtggcatgggcagggtatagtgaggagtggaaggagacgtgtgcctggtaatatggggcggaatttccactcagctccatttgctggggatttaaagagaacccttgtgctgcgccaggcagttaccgagccgaagggagatgatgggccttcgcccctcagtgggatggcagctgagggggccctgcatttgaccctcgagactgcagcagcgcctttcctgtctgtggtttaagtctttgcagtcaagtactgatgcatccaagccaggcctatgcctggtgtctccctgactgcagaggagccccagggcaaggacagctcagctgctggcagcctgcctggcccatagacatcccccaagtagtctcaggcctctgacatgtccctgaggggcccctaagaaagaaagtggaggggacactccagaggctgtcgtgggaggatcatgtgagcctgggaggtcaaggctgcagtgagccgtgattgcaccactgcactccagcctgagtgacagagcgagaccctgtctcaaaaaacaaacaaacaaacaaacaaaaacagaacattctgggcacggtggctcatgcctgtagtcccagcactttgggaggccgaggctggtggatcacaaggtcaggagattgagaccatcctggctaacacagtgaaaccccgtctctactaaaaatacaaaaaaattagccaggcgtggtggcggtcacctgtagtcccagctactcgggaggctgaagcaggagaatggcgtgaacctgggaggcggagcttgcagtgagccgagatcacaccactgcactccagcctgagcgacagagcaagactccatctcaaaaaaaaaaaataataataataatagctaaatactggaaacaaccaatattccatcaacaggagaatgaataaacaaattgtggtatagctatacaatccaatactatgcagcaataaaaattgaatcaatcactgatacacataacatgcaaggatgaagctcaaaaacattacactgaacaaaagaggccagacacaacagtatgtctgagtccatttacatgaaattctaggaaaggtagaatatcctacagtgtagagaacacaataataagaaaacaaacaacctgatttaaaaataggcaaaccaagagtagtagtgtgtgcctgtagtcccaactacttgggaggctgaggcgggaggatcccctaagcccaggagctcaagacctgcctgggcaacatagcaagactctgtctcaaaaaaaaaa

SEQ ID NO: 2557 - DNA, 8598 bp, Homo sapiens
gacacgcaggtttccgagacactaaagcgttttgcagggaaggtgacaacagccagtgtaaaggaacggagagaaatcctcagtgaacttgggaagtgtgttgctggaaaagatcttccagagggagcagtgaaggggctctgcaaattgttctgcttgactctgcatcgatatagagatgcagcctcccgcagggccttgcaggcagccatccagcagttggctgaggcccagccagaagccactgctaagaaccttctacactctctgcagtcttctggtataggctccaaagcaggtgttcccagtaagagcagtggctctgccgccttgctggccttgacctggacctgcctcctggtgcgcattgtctttccatcgagagccaagcgacaaggagacatctggaacaaactggtggaagtgcagtgcctgctcttgctggaggtgctgggtggctcccacaagcacgccgtggatggtgctgtgaagaaactcacgaagctgtggaaagagaaccccgggctggtggaacagtacttgtcagccattctcagcctagagcccaaccagaactatgctggcatgctggggctgctggtgcagttctgcacgagtcacaaggagatggacgtggtcagtcagcacaagagcgccctactggacttttacatgaagaacatcctgatgagcaaagtcaagcctccgaagtacctgttggatagctgtgcccctctgctccgatacctgtcccactcagaatttaaggatctgatactgcccaccatacagaagtccttactgaggagtccagagaatgttattgaaactatttctagtctgctggcatcagtgacgcttgacctcagccagtatgccatggacatcgtgaaaggactggctggtcacctgaaatccaacagtccccgcctgatggatgaagctgtgctggcactgcggaacctggcacgccagtgcagtgactcttcggccatggaatccctgaccaagcacctatttgctatcctcggaggctcggaaggaaaactaactgttgtagcccagaagatgagcgtcctctcagggattgggagcgtcagtcatcacgtggtgtctggaccttccagtcaggtcctgaatgggatcgtggctgagctgttcatcccgttccttcagcaggaagttcatgaagggaccttggtacacgctgtctcagtcctggctctctggtgtaaccgattcactatggaagtgcccaagaagctcactgaatggttcaaaaaagctttcagccttaaaacctccacatctgcggtgaggcatgcctacctgcagtgcatgttggcctcttaccggggtgacacgctgttgcaggccctggacttactgcccttgctcatccagacagtggagaaggcagcctcccaaagcactcaggttcccaccatcaccgaaggggttgccgcagccttgttgctcttaaagttgtcagtggctgactcacaggctgaggccaaactgagcagtttctggcagttgattgtggatgagaaaaagcaggttttcacttctgagaaattcctggtcatggcttcagaggatgccctgtgtactgtgttgcatcataacagagagacttttccttgaccacccgcatagactcactggcaacaaagttcagcagtaccaccgggctctggtggcggtgctcctgagccgcacctggcacgtccgcaggcaggctcagcagacagttcggaagctgctgtcctctcttgggggctttaagctggcgcacggactcttggaggagctgaagactgtcctcagttctcacaaggtgctgcccttagaggctttggtgactgatgctggagaggtgactgaggcaggcaaggcctacgtgcctccacgggtcctgcaggaggctctgtgtgtcatctccggtgtgccagggctcaagggtgatgtcaccgacactgaacaactggcccaggaaatgctgatcatctcccaccacccatccttagttgccgtgcagtctggactttggccagcacttcttgccaggatgaagatcgatcctgaagcctttatcaccaggcacctggatcagatcattcccaggatgaccacacagagtcccctaaaccagtcctccatgaatgccatgggctccctttccgtcctgtcgccggaccgggtcctcccacagctcatcagcaccatcactgcctccgtgcagaaccctgcactgcgcctggtgacgcgggaggagtttgccattatgcagacccctgctggggagctgtatgacaaatccatcattcagagtgcccagcaggacagcataaaaaaggccaacatgaagcgagagaacaaagcttattccttcaaagagcagatcatcgagctggagctgaaggaggagataaagaagaagaaaggcatcaaagaggaggtgcagctgaccagcaagcagaaggagatgctgcaggcccagctagacagggaggcgcaggtccggaggcggctgcaggagctggatggggagctggaggcggcgcttggactgctggacatcatcctggccaagaacccgtccggcctgacccagtacatccctgttttggtcgactcttttctgcccttgctgaagtctcccctggctgctcccaggatcaagaaccccttcttgtccttggctgcctgtgtcatgccctctaggctcaaggctttgggcactttggtgagccacgtgaccctgcgcctgctgaagccagagtgtgtcctggataagtcctggtgccaggaagagctgtcggtggctgtgaagagggcggtgatgctgctgcacacccacaccatcaccagcagggtgggcaagggggagccaggtgctgcgcccttgtccgcgccagccttctccttagtcttcccgtttctgaagatggtgctgacggagatgccccaccacagtgaggaggaggaggagtggatggcccagattcttcagatcctcactgtccaagcccagctgagggcctcccccaacaccccacccgggcgggtggacgagaatggcccggagttgctgcctcgcgtggccatgctgcgtcttctgacttgggtgatcgggacgggctcgcctcgcttacaggttctggcttcagacaccctgaccaccctgtgtgccagcagcagtggtgatgatggctgtgcctttgcagagcaggaggaggtggacgtgctgctctgtgccttgcagtccccgtgtgccagcgtgcgggaaaccgtgctccgggggctgatggaactccacatggtattgccagcacctgatactgatgagaagaatggcctgaaccttctgcggagactctgggtggtcaagtttgacaaggaggaggagatccggaagctggctgagaggctctggtcaatgatgggcctagacctgcagccagacctctgctccttgctgattgacgacgtgatctatcatgaggcggctgtaaggcaggcaggggccgaagccctctcccaagcagtggcacgttaccagcggcaggcggcggaggttatgggcaggctcatggagatttaccaggaaaagctctaccggccgcccccagtgctggatgctttgggacgagttatttcagaatctcctccagatcagtgggaagccaggtgtggcttggcgttggccctcaacaagctctcccagtatttggacagctctcaggtgaagccactctttcagttttttgtccctgatgccctcaatgaccgacacccagatgtccggaagtgcatgttggatgcagccctcgcaacgctcaacactcatgggaaggagaacgtcaactcgctgttgccagtattcgaggagttcctgaagaacgcgcccaatgatgccagctacgatgctgtgcgacagagtgtggtggtcctgatgggctctctggccaagcacctggacaagagtgaccccaaagtgaagcccattgttgccaagctcatcgctgccctctccaccccctcccagcaggtccaggagtccgtagccagctgcttgccacccctcgtgccagccatcaaggaggatgctggagggatgatccagaggcttatgcagcagctgctggagtcagacaagtacgcagagcgcaaaggggccgcgtatggcctggcgggcctggtgaagggcctgggcatcctctcgctgaagcaacaggagatgatggcggcactgactgatgccatccaagataagaagaacttccgccggcgagagggagccctctttgccttcgagatgctctgcaccatgctggggaaactttttgagccgtatgtggttcacgtgctgccccatctgctcctgtgctttggggatggaaaccagtatgtgcgtgaggctgcagatgactgtgccaaggctgtgatgagcaacttgagtgctcacggggtgaagctggtgctcccctccttactggctgccctggaggaggaatcgtggcggaccaaagctgggtcagtggagcttcttggggcaatggcgtactgtgctcctaagcagctgtcatcctgtctacccaacattgtgcccaagcttacggaggtgctgaccgactcccatgtcaaagtccagaaggctggacagcaggcgctcaggcagatcggctccgttatcaggaacccggagatcctggccattgctccagtcctcctggatgccctgacggatccctccaggaagacccagaagtgcttgcagaccctgctggacaccaagtttgtccacttcattgatgccccatccctggccctcatcatgcccattgtccagagagccttccaggaccgttccacggacacgcggaagatggcagcccagattattggcaacatgtactccctgacagaccagaaggacttggctccgtacctgcccagcgtgacgcctggcctgaaagcatcgcttttggaccctgtgcctgaggtgcggaccgtatctgcaaaggcccttggggccatggtgaagggcatgggggagtcgtgctttgaggacttgctgccgtggctgatggagacactgacctatgagcagagctctgtggatcgctcaggcgctgcacaggggttggctgaggtcatggccggtttgggggtggagaagttggagaagttgatgccagaaatcgtggctacagccagcaaagtggacattgcaccccatgtccgagatggctacattatgatgtttaactacctgcccatcacctttggagacaagtttactccttatgtggggcccatcatcccctgtatcctcaaagctcttgctgatgagaatgagtttgtgcgtgacaccgccctgcgcgcgggccagcgggttatctccatgtacgctgagacagccatcgccctgctgctgccccagctagagcaaggcctctttgatgacctttggagaatcaggttcagctctgttcagctccttggggatctcctgtttcacatctcaggagtcactgggaagatgaccacagaaactgcctctgaggatgataactttggaactgcccagtccaacaaggcgatcatcactgccctgggggtagagcggcggaaccgggtgttggcagggctgtacatgggccgctcagacacccagctggtggtgcggcaggcgtccctgcatgtctggaagattgttgtctccaataccccccgcaccttgcgtgagatcctacccactctctttgggctcctgctgggtttcctggccagcacgtgtgcagataagagaacgattgcagcgagaacattgggagatcttgtgcggaagttaggggagaaaatcctccccgagatcatccccatccttgaggaaggcctgaggtctcagaagagcgatgagaggcagggtgtgtgcattggcctaagtgagatcatgaagtccaccagccgggatgccgtgctgtatttctctgaatccctcgtgcccacggcaaggaaggctttgtgtgacccactggaggaggtcagagaggcggcagccaagactttcgagcagctgcattccaccatcggccaccaggctctggaggacattctcccatttttactaaagcagctggatgacgaggaggtgtcagagtttgccttggatggtctgaagcaagtcatggctattaagagtcgtgtggtgctgccctaccttgtgcccaagctgacaacgccacctgtcaacacccgggtgctggctttcctttcgtcagtggctggtgatgccctcacccgtcatcttggcgtgatcctcccagcggtcatgctggccctgaaggaaaagcttgggaccccagatgagcagctggagatggccaattgtcaggctgtgatcctctccgtagaggatgacacagggcaccggatcatcatcgaggatctgctggaggccacccgcagccctgaggtgggcatgaggcaagctgctgccatcatcctcaacatctactgttcccgctcaaaggctgactacaccagccacctgcggagcctggtctcgggcctgatccgcctcttcaatgactccagccctgtggttctggaggagagctgggatgccctaaatgccatcactaagaagctggatgctggcaaccagttggcactcattgaagagctgcacaaggaaatccggctcatagggaacgagagcaaaggcgagcatgtgccaggattctgcctcccgaagaagggagtgacctccatccttccagtgttgcgggaaggagtcctgactggcagccctgagcagaaggaggaggcagccaaagccttaggcttggtaatccgcctgacctcggctgacgccctgaggccctccgtggtcagcatcactggccctctgatccgcatcctgggggacaggttcagctggaatgtgaaggcggctctgctcgagacactcagcctcttgttggctaaggttgggattgccctgaagcccttcctgccccagctgcagaccactttcaccaaagccctgcaggactccaaccggggggtgcgcctgaaggccgcagatgctctggggaagctcatttccatccacattaaggtggaccccctcttcacagagctgctcaatggcatccgcgccatggaggacccaggtgtcagggacaccatgctgcaggccctgaggtttgtgattcagggagcaggggccaaagtggatgccgtcatccggaaaaacatcgtctcactcctgctgagcatgctgggacacgatgaggacaacactcgcatctcctcagccgggtgcctaggggaactgtgtgcctttttgactgaagaggagcttagtgccgttctacagcagtgcttgctggcggacgtgtccggcattgactggatggttcggcacgggcggagcctggcactttccgtggctgtgaatgtggctcctggcagactttgtgccggcagatatagcagtgatgttcaggaaatgatcctgagcagtgccacggcggacaggatccccattgcggtgagcggggtccggggcatgggctttctcatgagacaccacatcgagacaggcggagggcagttgccggccaaactttccagcctgttcgttaagtgtctgcagaacccatccagcgacatcaggctggtggctgagaagatgatctggtgggcaaataaggacccactgcctcccctggacccccaggccatcaagcccatcctgaaggctcttcttgacaacaccaaggataagaacaccgtggtcagggcctacagcgaccaggcaattgtcaacctcctcaagatgcggcagggtgaagaggtgtttcagtccctctccaagatcctggatgtggccagtttggaggtgctgaacgaggttaaccgaaggtccctgaagaagctggccagccaggccgactccacggagcaggtggacgacaccatcctgacatgagaggcctgggccagcagcagcattgccgctccacatctttgctcaatgttttcatttttgaaaatacatttgttccaatggggagcttggaagatggcgttcccagaaagtattttaatatcaatagaccacagccaaagccttaaatcaaacccacacacaactgaaaattgcctcctccatctctcaccttttcctgtggagaagagaaggaaaagcacacgcatgcgcctcagcaaatggcagcccaggagctgtttgtccagtttagcatggctaggtctggaactataatagcagggtcagactgtgggttcctcttctcctgtgcttgagctctggtttgagagctggcgctaccaacctttttcctatatcccgagtggggcacagacggtggatctctgcccagtgtggtgtgtctggcttggcttttcaatattgtgaggtctgaatggatctgacccctgtcagatgaaaatgattcacagctctggcagttcccaagtctggggaggggtataggtttgaaaggctgtttgaaagaggaatgtttaataaaggctttgatttaatcttgaaaaaaaaaa

SEQ ID NO: 2558 - DNA, 2209 bp, Homo sapiens
  misc_feature (1)...(2209): n = a,t,c or g
gagaagggagaagcaggatcccctggtgctccggggcaggaatggaaacacggggaagaanccctggaatccccaggatttccctggaaaccgaggattaatgggcccaaaagggagaaattgggcctcccaggacagcaaggaaaaaaaggagccccagggatgccctggtttaatgggaagcaatggctcaccaggccagcctggaacaccgggatctaagggaagcaaaggtgaacctggaattcaagggatgcctggggcttctgggctcaagggagaaccaggagcaacgggttccccaggagaaccaggatacatgggtttacccgggattcaaggaaaaaagggggacaaaggaaatcaaggtgaaaaaggtattcagggtcaaaagggagaaaatggaagacagggaattccagggcaacagggaattcaaggccatcatggtgcaaaaggagagagaggtgaaaagggagaacctggtgtccgaggtgccattggatcaaaaggagaatctggggtggatggcttgatggggcccgcaggtcctaaggggcaacctggggatccaggtcctcagggacccccaggtttggatgggaagcccggaagagagttttcagaacaatttattcgacaagtttgcacagatgtaataagagcccagctaccagtcttacttcagagtggaagaattagaaattgtgatcattgcctgtcccaacatggctccccgggtattcctgggccacctggtccgataggcccagagggtcccagaggattacctggtttgccaggaagagatggtgttcctggattagtgggtgtccctggacgtccaggtgtcagaggattaaaaggcctaccaggaagaaatggggaaaaagggagccaagggtttgggtatcctggagaacaaggtcctcctggtcccccaggtccagagggccctcctggaataagcaaagaaggtcctccaggagacccaggtctccctggcaaagatggagaccatggaaaacctggaatccaagggcaaccaggccccccaggcatctgcgacccatcactatgttttagtgtaattgccagaagagatccgttcagaaaaggaccaaactattagtgtctgatgcctcattcagcagcctaggcatggtgctttttctgtggtcttttgcatctcaggaagataaccaacagtaatcccttgaaaagaaacttaagtacctcggcgtttttattttttttttcttatggaaaaaaatataaaagatcacatatactgattttaaaggctcctcagtcatttggagcccttggattagcagcattaattaaatctcaagggtttcttgtaaagtccatttatgttaatcaaagttgaatataaaaatccaccattgcctgttagccagtcagttttagtcactgtgaaatatttcacattcagcctccatgcagtagagatttgagtttaatttcatgtccatgtgactttcatgtttcctatctcatagctcatgctactacataagccaaaacatgtatctcatcattggaagtaagatcagggctgatattcacctgggatagacagtattggtgaactactcatttactacagtgtctcagccttgataaagggcagtggattgcctgttgttcggtgttgtgaatagcacctctgaataagattagagtgtttcttaattcatttcaaactctaaaattagattaatggtggtgctaagaaagagtattaattactttgggaatggtcaaaattaacattaaaaacattttagacaaaaagtttcattgtacattcaaagaaaatgtaagtttggaagtactaaaagactattttatacttgttgattaatcggaatgtttgttgtatgccttcattttccatttcacttatatgtgtatgtccatatatgttaattttcattgtagcaaagctaatggaaataaagctaatgctctagttgaaagaaaaggaaaactccctgaaatcctagaatgtcttgttatttttagctgactgtaaaatattatgaacagtctttgtgtattgtgcttaatgcttttgtaagaaacagaatttgaaatatttcatccttgtcatgctcaaaattttgttacatgcttgttattcagagtataataaagttttgtacaggcctgaaaaaaaaaa

SEQ ID NO: 2559 - DNA, 840 bp, Homo sapiens
tttttttttttgagtaactagtttggtttattctgcatcctgcatccccggatgaagcaaacttttgtctttttccatctggaactcttaaagtggtgagatcatcaaaaggattgactgaagcagcaagcagaaaagcaccttcattcacaagatgcaactggtgagtgctgcaggggccatgcaggtggctacagcttgcaaccatccagccaccgtgccagggtatcggagtactggcagtaccgggaccaggtgggccatgctcccatcccttcttttccttttacaatggtcttggcacatttaattgtcttctctaaattaggattcagtaaagcggaacatgacatatggcagcggttcctgccatggtcgccacaccagtcactgccacgcatctgaaagaggccaaagccagtgtagccctcacgtgtgttctcgtagatggccacttgggttgaacttgctctcgaagtaggccaggcacacccagttctcaaggctatagcgctcaaaataatccaggcctccatcgtggagtttcttagccactgtgcaacggcccaagatgtaagcaccacttggaaccaccaggtagccaaggagggagagaaccacggatgccttcatcttctccaggctcctggcaggtcagggcaacggtggccagatgagtgggtggagtcacagggacactggttctctgaagggaaagaagggcacagtccaccagcccttccaaaggctggcttttggtgcctttccaaggggaggggaagaacagccactgcagcagcttcgacgtgtgttgcagggaagttgctccacctacatttg

SEQ ID NO: 2560 - DNA, 3327 bp, Homo sapiens
  misc_feature (1)...(3327): n = a,t,c or g
gtcctgccgcttggccgcggggcgcctggctcagtggcttctgcgggcttcgaggagcgggatgttgcgggctgggtggctccggggcgcggcggcgctggcgctgctgctggcggcccgagtggtggcggcgttcgagcccatcaccgtgggcctagccatcggggccgcgtcggccatcaccggctacctgtcctacaatgacatctactgccgcttcgccgagtgctgccgcgaggagcggccgctcaacgcttcggctctcaagctggatttggaggagaagctgtttggacagcatctagccacggaagtgattgttcaaggcgctgactggcttcaggaacaacaaaaatcccaagaaaccactgaccctttccttacacggctgggctggcacaggcaagaattttgtcagtcaaatgggggctgaaaatcttcacccaaaaggtctgaagagtaactttgtccacctgtttgtatcgactctgcacttccctcatgagcagaagataaaactgtaccaggaccagttacagaagtggatccgcggtaatgtgagtgcatgtgcgaactctgttttcatatttgacgagatggataaattggcaccccgggatcattgaaagcaatcaagccgtttctagactactacgagcacgttgaacgagtgtcttaccggcaaagccatcttcatctttctcagcaatgcaggcggggaccttataactaagacggctcttgacttttggcgggccggaagaaagagggaagacattcagctgaaggacctggaacctgtactgtctgtcggagtcttcaataataaacacagtggcctgtggcacagtggactgatcgacaaaaacctcattgattactttatccccttcctgcctttggagtacagacatgtgaaaatgtgtgtgagggccgagatgagggcccgtggttctgccatagatgaagacattgtcacaagagtggcagaggaaatgacgttttttccccagagacgagaaaatctactcagacaagggctgcaagactgtgcagtcgcggctggatttccactgagctcctatccagatggggtaggagacagctgggaggctctgcacgccagaggccttgcctttcagaagaaccctgaagaccgctttggggttttgcctgtttgcaccttagacttttgggtatagaatcttttttttgagaagaggtctcactccgtcatccaagctggagtgcagtggtgcaatcctcaactcactgcaacctcccgctcccggtttgagtgattcaccattgcctcagcctcccgagtagctgggattacaggcatgagccactgtgcccagctgggatatagaatctaagagttgattgtggaaaacacgtgaatctattgcgcgcatttgtcatttagcaagatggcagcagtccagctgttctttgcagctggagatgaacttttaaaaatccccttcacacttaatgtactgaccgagacagaagtacctgaaaacagctgtgcatggcaggcccggcaatagcttctgacccacagcacccgcgcctcagaagctacggtcacaactaaaggagtccagggacttgctgcaggctggggggcactgggtggttctcaccagcaggctgcggggcactgtgttctcattggccaaaaacatccttttgctctgtctcgttctttacacagagttcactgacttgaagtatactcagttaaaatcggggctggaggtgcagacggtgtctgaccggaggatgtggccgtgcccgccgagcactcttgatctgagctgacctgtgtgtgtgtgtgggggggggtggggccttcacctaagacctctgcagcagacctggacagacaggcccctcccgcctgtccatcgctctagctgctaatacagccctggctgtggaatccttcaccgtctcagctggtatcagccccagcctgccttgtgccatatctcagcttggatctctgctagagtccccccaaccatatatcatagagttgaatcacaatgagaccgttggctttgaatttgagtcgttggttcccatggtgagatgcttgttaagactttatacttgggtcaatctctcactttattttgtagaaccatttgaaatcctaggatgtgcttgttctggaaggatgacatgggcccagactgaacaagtcagcttgatgatcttaaatgatggaagtataggacgttgcttattttaaaacaagggaaggacacaaaatggaatgactgcttagtcctttctcagatactcttaaaacaattttttattgttaaatttgtggtaatacatggtcacaaccgtggatcaaacaaggtcagtctaaagtggcaggtcctaggtgtgacctgataccaccaccctttgtggcagcaccgggctggactgccctgatccctgggacgtgagacttagcttccagccagtgtgaatcattgtatctgtctcataatcacagcacagctgcagacacaacaacgtgcagcattttttacataaaaatatggtagaattaatttatgacatggaaatgccttacgtggtatcacacttagtcttgaaaaaaacaccaaggtgacgtttaaaatttttagtacatatcctcaaattggagctaagttatacttcttttataaccttttgggcatctggtcgagagaagacaagattttctctatttacagtgatgcaataaatatgtttgccacctttggactgccgttactgatttgtaacttgaaaaggctatggttgatcatgaccccgcctcccccacctcccttataagatgtggacgagagctttattgacctactgactataaaatagtaaattctagattttatcatgtgaaatgccacttgctaactttttctagtttatttggttccaaagttcagaatgaatttcagcagcacagctgtgagactcaccatatccgggacaggcgggtgggcagtcagcgcgatacagaagcaatatttaccttaaaggctcttccccagacaaatagaagttaaattagctgatggatatttcatcaaagagatggactttctcccaaaattaacgtgggaggaaattgaggtactggtaaagtaaaactcacctctgacagcctgaacctgagctcaggtgaggaaacctaaccattgaaactggtaaatannnnnnnnnnnnnnnnnnnnnnnnnnnnnnnnnnnnnnnnnnnnnnnnnnnnnnnnnnnnnnnnnnnnnncccggctcgagcggccggaattc

SEQ ID NO: 2561 - DNA, 946 bp, Homo sapiens
  misc_feature (1)...(946): n = a,t,c or g
attcggcacagggcagatcttggggccgcttctaccggcagatcaaaagacatccggggatcatcccgatgatcggcttaatctgcctgggcatgggcagcgctgcgctttacttgctgcgactcgcccttcgcagccccgacgtctggtaaagctgggacagaaagaacaacccggagccctggaaccgcctgagccccaatgaccaatacaagttccttgcagtttccactgactataagaagctgaagaaggaccggccagacttctaagccaggctgggctgccagtgccatgcaagccacagccagccagcccatccacttcttccactcctccccgcaggccccaaggcatcactccggccaccctgtcccgctactgcttacacaggccgggttcccacgcagaggggaggctgctccacccctactctcctcccttgctcccagcagcggaagcgcctctgacccttggcttgagtcccacgtgggggaggaggaggcaggcagcaccagcaggggtccaccaagagcccagaccagcccctctgccctcctacccgggcctcgaagggtgtggcacaggctacgtgttgagcgtggcctacgtgagccaacaagaagcaggggcctctgagtgccaagcgacgtggcgggctccacgttagcccaggctctgagagccagcccagggncgggcgctgctcagcttgggctggtcccagggcctgcccaggctggggcacctttgcctcctgaggcgcagcgcactcctcccctgcccaagcctactgccttcccgctgccgccagtaccccctccagccccacacctgggcctccccctgccactcccctcccttgctcccctctgtccccagggatcaaacagaagccgccgtgggcaaaatacaatttcatttaacgaaattgaaaaaaaaaaaa

SEQ ID NO: 2562 - DNA, 626 bp, Homo sapiens
atcagccactgcagctccctgagcactctctacagagacgcggaccccagacatgaggaggctcctcctggtcaccagcctggtggttgtgctgctgtgggaggcaggtgcagtcccagcacccaaggtccctatcaagatgcaagtcaaacactggccctcagagcaggacccagagaaggcctggggcgcccgtgtggtggagcctccggagaaggacgaccagctggtggtgctgttccctgtccagaagccgaaactcttgaccaccgaggagaagccacgaggtcagggcaggggccccatccttccaggcaccaaggcctggatggagaccgaggacaccctgggccgtgtcctgagtcccgagcccgaccatgacagcctgtaccaccctccgcctgaggaggaccagggcgaggagaggccccggttgtgggtgatgccaaatcaccaggtgctcctgggaccggaggaagaccaagaccacatctaccacccccagtagggctccaggggccatcactgcccccgccctgtcccaaggcccaggctgttgggactgggaccctccctaccctgccccagctagacaaataaaccccagcaggccgggaaaaaaaaaa

SEQ ID NO: 2563 - DNA, 626 bp, Homo sapiens; identical to SEQ ID NO: 2562

SEQ ID NO: 2564 - DNA, 2350 bp, Homo sapiens
atacgtggctgccgtctgtccccgctgaggaggtgcagcagccggagatggcggcggtgctgaacgcagagcgactcgaggtgtccgtcgacggcctcacgctcagcccggacccggaggagcggcctggggcggagggcgccccgctggctgccgccaccgctgccaccgccctcgccacctggatccggtcgcggcccgggcgcctcaggggaacagcccgaagcccggggaggcgggcggctgggggcgcggcggaggaggcgcggcggctggagcagcgctggggtttcggcctggaggagttgtacggcctggcactgcgcttcttcaaagaaaaagatggcaaagcatttcatccaacttatgaagaaaaattgaagcttgtggcactgcataagcaagttcttatgggcccatataatccagacacttgtcctgaggttggattctttgatgtgttggggaatgacaggaggagagaatgggcagccctgggaaacatgtctaaagaggatgccatggtggagtttgtcaagctcttaaataggtgttgccatctcttttcaacatatgttgcgtcccacaaaatagagaaggaagagcaagaaaaaaaaaggaaggaggaagaggagcgaaggcggcgtgaagaggaagaaagagaacgtctgcaaaaggaggaagagaaacgtaggagagaagaagaggaaaggcttcgacgggaggaagaggaaaggagacggatagaagaagaaaggcttcggttggagcagcaaaagcagcagataatggcagctttaaactcccagactgccgtgcagttccagcagtatgcagcccaacagtatccagggaactacgaacagcagcaaattctcatccgccagttgcaggagcaacactatcagcagtacatgcagcagctgtatcaagtccagcttgcacagcaacaggcagcattacagaaacaacaggaagtagtagtggctgggtcttccttgcctacatcatcaaaagtggaatgcaactgtacccaagtaatatgatgtcagtttaatagacaggccaaaacacacactgacagctccgaaaaagaactggaaccagaagctgcagaagaagccctggagaatggaccaaaagaatctcttccagtaatagcagctccatccatgtggacacgacctcagatcaaagacttcaaagagaagattcagcaggatgcagattccgtgattacagtgggccgaggagaagtggtcactgttcgagtacccacccatgaagaaggatcatatctcttttgggaatttgccacagacaattatgacattgggtttggggtgtattttgaatggacagactctccaaacactgctgtcagcgtgcatgtcagtgagtccagcgatgacgacgaggaggaagaagaaaacatcggttgtgaagagaaagccaaaaagaatgccaacaagcctttgctggatgagattgtgcctgtgtaccgacgggactgtcatgaggaggtgtatgctggcagccatcaatatccagggagaggagtctatctcctcaagtttgacaactcctactctttgtggcggtcaaaatcagtctactacagagtctattatactagataaaaatgttgttacaaagtctggagtctagggttgggcagaagatgacatttaatttggaaatttctttttacttttgtggagcattagagtcacagtttaccttattgatattggtctgatggtttgtgaactcttgctgggaatcaaaatttccttgagactctttagcattcatactttggggttaaaggagattcctcagactcatccagcccttgggtgctgaccagcagagtcactagtggatgctgaagttacatgagctacatgttaaatatttaaagtctccaaaataaaacaccccaacgttgaccttacccggctgatggttagccccttgctgcctgctccatgtgtcttatgagagcccgtagttacagggtcctctaatttgaaatccataagttaacaagtctatatcaggtgcagctggctttgattaaaggccatttttaaaacttaaaaactcaacacctcacagattataatagaaaaagaaatggcctcagtttgatctcgttcagaatgacccagattgtttctgctttgggtgcagctgtttagttcagagttatattacagagaattattttctgagataatcttaaactagaatgttcaaaactaattgataattgaagtatcaagatacgtagaacacctcagagatttttcttcaggaacttccacaaactttgaatccttggatt

SEQ ID NO: 2565 - DNA, 4670 bp, Homo sapiens
gtcccccagataccaccatctacgttgaacccatcactgaggaacgtgctgcaagaactctgtaccgcattgaactgttacggaaagtccgagagcaagtgctcaagtgccctcagctgcatgaacgcctccagctgtgcaggcccagcctctacctcccagtctggtgggagtgtgggaagcatgatctagacctgctcatcggcactgccaaacatgggctgaaccgcactgactgttacatcatgaacgacccccagctgtccttcctggatgcctatagaaactatgcccagcataaaagatctggcacccaggcaccaggaaatctctgttgcctttaccagaccaactccaagttatatgaatctcttacatattctcaaatgagtaggacttcagagtcccttgaaaatgaacctgaaaatctagtgagagtagaaagcagagatgatcatctcagcctgcctgatgtgacatgtgaaaactttatttctaaagttcaggatgtcatttccatcaaccatgatgaaagtctgctgcctgagtccttagagagcatgatgtatggtaagaaggtgctcagccaagaaccaagctcttttcaggagagcccaagtaccaatactgaatctagaaaagatgttattaccatctcaataagcaaagatgggaactgccagtctggtggccctgaggcagaaatagcttctggccctacttttatgggtagcttagaagcaggaggagtagctcaagcaaacatcaaaaatggaaaacatttgttgatgtctatttcaaaggaaggggagctctgctgcagtgaggcaggacagagacctgaaaacattggccagctggaagccaagtgtttagcttccccttccttgaatccaggaaatgaaagtgggtttgtagatatgtgcagtcttagtgtctgtgactccaaaagaaacctgtcatcagatcagcaattaattgatttattggaaaacaaaagcttagaaagtaaattgattttgagtcagaaccacagtgatgaggaggaagaagaggaggaaaccgaggaggaaaacttagccatggcagtaggcatgggggaaaggccagaggtattgcatctcacggagcccactactaacatctcaagggaaaagaaccaaggcttccaagatgaaaccaagaaaggaagcttagaggtggcaaaccagactcctgggctacagagggctttccccgctccagcagcctgtcagtgccactgcaaacacatggagaggtggatgcatggcctcgagaatgatgaatttgaaatcgagaaacccaaggcttatatcccagatctgttcaaaagtaaaaccaatactatcgccatggagggtgaacccactgctattccatcacagccgtttaaagtgaagcatgagcttttaaaagaaccttggaaagaaagtgcagaggggcaaaacgttttccccacatatcctcttgaaggaagtgagctcaaatcagaagacatggattttgagaataaagatgattatgatagagacggaaactgccatagtcaagattatccagggaagtactctgaagaggagagcaagagctcaacatcgggcatcacaggagacattggggatgagctacaggaggctcgagctcccactattgctcagctgctacaggagaaaactctctattccttctctgagtggccaaaggaccgcgtgataattaaccgcctagataatatctgccacgtggtgttaaaggggaagtggccctctagccagcagtatgagccctcaggcacactgcccaccccggtattaaccagcagtgctggttctcgaaccagcctctcagagccggaagcagcagaacacagcttcagcaacggcgcaacattggtcggcccagatccacaaggagagcttcttagctccagtattcacaaaggatgaacaaaagcacaggcgtccctatgagtttgaggtggagagggatgcaaaggctcggggcctggagcagttctctgccacccacgggcacacccctatcatcctcaatggctggcatggggagtcagctatggacctctcctgctcatcagaggggtccccaggagccacatcccctttcccagtgagcgccagcacccctaagattggggctatcagttcacttcagggagcccttggcatggacttgtctgggattctgcaagctggcctgatccatcctgtgactggacagattgtcaatggaagcctcagaagagatgatgcagccacgaggaggcggagagggaggcggaaacatgttgaaggagggatggacctcatctttttgaaggagcagacacttcaggcgggaatcttggaagtccatgaagacccagggcaggccaccttgagcaccacacaccctgaggggccagggcctgccacctcggctcctgagccagctacggcagccagcagccaagccgagaaatccattcccagcaagagtctgcttgactggctaaggcagcaggctgactactccttagaagttcctggctttggggcaaatttttcagacaaaccaaagcagaggaggccacgctgtaaagaacctggaaaattagatgtcagctccctgagcggggaagagagagttcctgccatccccaaggagccaggactgagggggtttcttccagaaaacaagttcaatcacactctggctgagcctattcttcgagatacgggcccccgcaggagggggaggcggcctcggagcgaactcctgaaggctccttccattgtggcagactctccctctggaatggggccactgttcatgaatggactgattgctgggatggacctggtaggacttcagaacatgagaaatatgccaggcatccccctcaccgggctggtggggtttccagctggctttgccacgatgccaacaggtgaagaggtcaaaagtaccctgagcatgctgcccatgatgctgccaggcatggctgctgtgccccagatgtttggtgttgggggactcctcagtccacccatggcaaccacctgcacttccactgccccggcgtctctatcaagcacaacgaaaagtggtacggcagtgactgaaaagactgcggaagacaagccgagtagccatgatgtgaaaacagacactttagctgaggacaagcctggtccaggtccattttctgatcagtctgaacctgcaataactactagtagtcctgtggcttttaacccatttctcatcccaggagtatctcctggactcatttacccatccatgttcctctcccctggtatgggcatggctctgccagccatgcagcaggccagacactcggaaatagtaggtctggagagccagaagaggaagaagaagaagacaaagggggacaaccccaactcccacccagagcctgctcccagctgtgaaagggagcccagcggtgatgagaactgtgccgaacccagtgcccctttgcccgcagagagagaacatggggcacaggctggggagggggcactcaaagactccaacaacgacaccaattagaacttttttcatttaagaaattattgtgacttgtaagtttcttatcccataaaggtttggtacttccctcacttcacctccataagaacctgtgtttccataagtaagattacgtacctgatttcctgtctgagaactatggtaacagatgttaatagttgcagggtctcaccacttcattagataagtgttgtctacctagtctaggaggcacagaattctcattctgttatccagttcattccagcaatcatagttaatacagtacttggtgacacgccctacccccttctcttccaagtttcccactcacttgaggaggaaaaatggcaaaagaaagctgtctagggttttaccattgaagggtggaagaacagagacaaagaggagctctttttctgtgagctgggttgcacaggaagaatgtcacagggaaccaaaaagcacagaaaaaggaagtgctggtgcatatttttgagttaaaatatttccctattttatcatgattactaagtgagtagtatagacagaagtatataactaatggttgaaaatacatatattcatttctttataaaaaacaaaaaccttaccggtagtaatataatttcccccttggtggtttttcagacacctgcagcaagaagaaatactgactgactaggcattattttctatacatccctctcaccagtgaaaagattcctcttgctgcgagaaagctttacccaccatgagttattgctgtcgacgggggtggggcaaggacccgcgctccgtagagctacacgctgcttcacaagcacacggctagcgctctgctctcacctggttcgcttacagatttctctagccattaatttgcctctctgtgtttaaagagcaccaggaccgaatggattttcacttcaggctttccttcaccaagaataaggttctttctggagcctgcaagaagacagttgcccaacactttgacacttgctagtaggtcctttgatcaagagtgtctgaggctgtcaaatgtgtgccaccctttataatacagctatgaaaagttacttctccattaattt

SEQ ID NO: 2566 - DNA, 447 bp, Homo sapiens
  misc_feature (1)...(447): n = a,t,c or g
ntttgaatccgtancgccgcacgaccggnccnnnnctttctctcgacccacgcgttcgggcaccaccagtgtccctcagccattctcagaagaggtcttcatctttctttagcaccagaaactggccaaggacaacataggccttgtcaaagcacccttcctccagcttcttgtccataacttcaccaatcccggccaggctccctactggcttttcccccacggactctgccacaaagtctcggtgcttttgggaggttgcaatcttgttcaggtttaattgtcagcttcagttcccataatggttcctcctgccacctggctgctcctgcctatacctcaagccactagaactttcccctgtaccacaatttatttaaccaattttatatttagtttttatggacatttgtttccagaatttcctgttaaataaaaccgtaacat

SEQ ID NO: 2567 - DNA, 4580 bp, Homo sapiens
  misc_feature (1)...(4580): n = a,t,c or g
gtggactagagccagggtaaggggatctgctagaagttggtcttccgccaggactagagtttcctcgcggtatatgcctccgtggcctccggaggaccatgtcattagactttggcagtgtggcactaccagtgcaaaatgaagatgaagagtatgacgaagaggactatgaaagagagaaagagttgcagcagttactcacagaccttccccatgacatgctggatgacgacctctcctctccagagctccagtattcggactgcagcgaggatggcacagacggacaaccacatcatcctgagcaattggagatgagctggaatgagcaaatgctgcccaaatctcaaagtgtaaatggtcccagttgtcaaggtttggaaccgtataataaagtgacatataaaccttatcagtcttctgcccagaataatggctcaccagcccaggagataacaggaagtgacacattcgaaggcctgcaacaacaatttttaggagctaatgagaactctgcagaaaatatgcagattattcaacttcaggttcttaacaaagcaaaagagagacaactggagaacttaattgaaaagttaaatgaaagtgaacgtcaaattcgatatctgaatcaccagcttgtaataataaaagatgaaaaggatggtttgactctcagccttcgagaatcacagaaactctttcagaatggaaaagaaagagagatacagcttgaagctcaaataaaagcactggagactcagatacaagcattaaaagtcaatgaagaacagatgatcaagaagtccagaacaactgaaatggctctggaaagcttgaagcagcagctggtggaccttcatcattctgaatcacttcaacgagctagagaacagcatgagagcattgttatgggcctcacaaagaagtacgaagagcaagtattgtccttacaaaagaatttggatgccacagtcaccgcacttaaagaacaggaagacatttgctctcgtctgaaagatcacgtgaaacaactggaaaggaatcaagaagcaatcaagttagaaaagactgagatcattaataagttgacaagaagtctagaggagagtcaaaagcagtgtgcccacttgttgcagtccgggtcagtacaagaggtggctcagctacagttccagctgcagcaagcacagaaggcacatgctatgagtgcaaacatgaacaaggctttgcaagaagaattaacagaactaaaagatgaaatttctctctatgaatctgctgcaaaactaggaatacatccaagtgactcagaaggagaattaaatatagaactcactgaatcgtatgtggatttgggtattaaaaaggtcaactggaaaaaatccaaagttaccagcattgtacaagaagaagacccaaatgaagagctttcaaaagatgagttcattctgaagttaaaggcagaagtacagcgtttgctgggtagcaactcaatgaagcgtcatctggtgtctcagttacaaaatgacctcaaagactgtcataagaaaattgaagatctccaccaagtgaagaaggatgaaaaaagcattgaggttgagactaaaacagatacctcagaaaaaccaaagaatcaattatggcctgagtcttctacttctgatgttgtcagagatgatattctgctgcttaaaaatgaaattcaagttttacaacaacaaaatcaggaacttaaagaaactgaaggaaaactgagaaatacaaatcaagacttatgtaatcaaatgagacaaatggtacaagattttgaccatgacaaacaagaagctgtggataggtgtgaaaggacttatcagcagcaccatgaagccatgaaaactcaaatacgtgaaagcctattagcaaagcatgctttggagaagcagcagctctttgaggcttatgagagaactcatttgcaactgaggtctgagttggataagttgaataaggaggtgactgctgtgcaggaatgttacctagaagtgtgcagagagaaggataatctagaattgactctcaggaagaccactgaaaaggagcaacagactcaggagaagatcaaagaaaaactcattcaacagcttgaaaaggagtggcagtctaagctggatcaaactataaaggcaatgaaaaagaagaccttagattgtggcagccaaactgaccaagtaaccaccagtgatgttatttccaagaaagagatggcaattatgatagaagagcagaagtgcacaatccagcaaaacttagaacaagagaaggacatagccatcaagggggctatgaagaaactcgaaattgaattggaactcaaacattgtgaaaatattaccaaacaggtagaaatagctgtgcaaaatgctcatcagcgatggctgggagaactaccagagctggcagagtatcaagcacttgtgaaggcagaacagaaaaagtgggaagaacagcatgaggtctctgtgaacaaaaggatatcatttgctgtttctgaagctaaagagaaatggaagagtgagcttgaaaatatgaggaaaaatatacttcctggaaaggaattggaagagaagattcattctcttcagaaggaacttgagttaaagaacgaagaagtccctgtggtcatcagggctgagttagctaaggctcggagtgaatggaacaaagaaaagcaagaagaaatccacagaatccaagaacaaaatgagcaagattaccggcaatttttagatgatcaccgaaataaaattaatgaggtgcttgcggcagctaaagaagactttatgaaacaaaaaactgaactacttcttcagaaggagacagaattacaaacttgtctagaccagagtcgtagagaatggactatgcaggaagccaagcggatccaactggaaatctatcagtatgaggaagacatcctgactgtacttggggttcttttaagtgatacccaaaaggagcacatcagtgattctgaggacaagcagcttttggaaatcatgtcgacttgttcttcaaaatggatgtctgtgcaatattttgaaaaactaaagggctgcatacagaaagcatttcaagatacacttcctctgcttgtagaaaacgctgacccagaatggaaaaagagaaatatggccgagctctctaaggattctgccagccagggcactggccaaggagaccctggacctgctgctggacaccatgctcagcccttggccttacaagcaacagaagcagaagctgataagaaaaaggtccttgaaattaaggatttatgctgtggacactgcttccaagaacttgaaaaggcaaagcaggaatgtcaagatctgaaaggaaaactggagaaatgctgtaggcatcttcagcatttagaaaggaagcacaaagctgtagtggaaaaaattggagaagagaataataaagttgttgaagaattaatagaagaaaacaacgacatgaagaataaattggaagaattgcaaacactttgtaaaacaccaccaaggtcattgtcagcaggggccattgaaaatgcttgcctgccatgcagtgggggagccttggaagaacttcgtgggcagtacattaaagctgtaaaaaaaattaaatgtgacatgcttcgttatattcaggagagtaaggaacgagctgcagaaatggtaaaagcagaggtactgtgagaacgtcaagaaaccgcccgaaagatgcgcaaatattatttgatttgcctccaacagattttgcaggatgatggaaaagaaggggctgagaaaaagattatgaatgctgctagcaaacttgctacaatggcaaaattactggaaacacctatttctagtaagtcccaaagcaaaactacacagtcaggtatgtcaaagtgagtcgccaaatggtttttctatcttttcttctttagctatttaatattttcagtatgaagaaggcagggaaggtaaggagtgagagttaatttgtgaagttttgtatgttttacttaaactagaagtttacgcaaaaagagtacacagtttccaatttaagtaggcagactgagcatgcccatcagtttcctattgctgcttccatccctcgaaatgatagaaaagattttaaacagccaaataaagaatgagacaaagaagaaattataagtgggttttaaaaagttgcagtgggccaggcatcatggctcacacctgtaatcccagcactttgggaggctgaggtgggaggatcccttgatcccaggaatttgaggttgcagtaagctatgattgtgccactgtactccagcctgggtgacagagtgaggccctgtctcaaaaaaaaaaaaagggggggggctttaaaaagaaaaagtttttatccccggggggggcagattaaaatttttttttaggggtccccaaattgaatttcgggggccctgttttaaactgtggagagagggaaaaccccgggttttccccaattaagcctgttaaacacaaacattnttaacaccgcanggatttgtgttgggtgtcaagataatc

SEQ ID NO: 2568 - DNA, 769 bp, Homo sapiens
acttcagaaaatttctgtttgggagttagctttttcatcttgtgtctggcttcagaacctgggcaagcactaccggaagccttcctattcccagctctcggtagatccaggatccactgctcgtcccagttctccagctgacagatcatctcaggtttgggaaactgaaatcctactcatggggaagtaaatgggatgtggccgttagtgagttacagagacatggcccggggctcagtggcaagcagagataaggccaataatcaaaagcggtggtgagaatagagattggcacaatctttgtaaatatctggcagtctttattgaaagcctgaacaatgttcatacctttggctgtggtcatttcactcttagaaatatagcctaaagtacaattgcaaccaagatgaatgtgccagagacgttcagcacagtggtattgcagcatcaaactggaaataaaccagcaagaccatgttcctgtagttctccaacatcacatctcggtagaggtccttctgaccccagttgaggtggccccactcctctctggtgaagtacatcgccacatcctcaaacgagagcagctccttccccctggctggtgggaacatggcttccacggcctggtcttttgcaaggggtgggatcctggacgtctggctgagctgctgacggctccgaatctccgccaagccgcctccaccaggggctgggctctccttctcgggttcccgggcctgacccgaggtctgtctggtccgcgccc

SEQ ID NO: 2569 - DNA, 1959 bp, Homo sapiens
agaccccgcgggccagcgccgcgaccccttcccagcgctcctcgcgctgtgtgcggcgcgtcctctcgccggtgacccggtgtgcgtggggtcgaggcgccgggcggagtggctccgggccgaaacgccatgcggaggggcgagcgcagggacgccggaggtccgcggcccgagtccccggtgcccgcgggcagggcctcgctggaggagccgcctgacgggccgtctgccggccaagccaccgggccgggcgagggccgccgcagcaccgagtccgaggtctacgacgacggcaccaacaccttcttctggcgagcccacaccttaaccgtgctcttcatcctcacctgtacgcttggctatgtgacgctgctggaggaaacacctcaggacacggcctacaacaccaagagaggtattgtggccagtattttggttttcttatgttttggagtcacacaagctaaagacgggccattttccagacctcatccagcttactggaggttttggctctgcgtgagtgtggtctacgagctgtttctcatctttatactcttccagactgtccaggacggccggcagtttctaaagtatgttgaccccaagctgggagtcccactgccagagagagactacgggggaaactgcctcatctacgacccagacaatgagactgacccctttcacaacatctgggacaagttggatggctttgttcccgcgcactttcttggctggtacctgaagaccctgatgatccgagactggtggatgtgcatgatcatcagcgtgatgttcgagttcctggagtacagcctggagcaccagctgcccaacttcagcgagtgctggtgggatcactggatcatggacgtgctcgtctgcaacgggctgggcatctactgcggcatgaagacccttgagtggctgtccctgaagacgtacaagtggcagggcctctggaacattccgacctacaagggcaagatgaagaggatcgccttccagttcacgccgtacagctgggttcgcttcgagtggaagccggcctccagcctgcgtcgctggctggccgtgtgcggcatcatcctggtgttcctgttggcagaactgaacacgttctacctgaagtttgtgctgtggatgcccccggagcactacctggtcctcctgcggctcgtcttcttcgtgaacgtgggtggcgtggccatgcgtgagatctacgacttcatggatgacccgaagccccacaagaagctgggcccgcaggcctggctggtggcggccatcacggccacggagctgctcatcgtggtgaagtacgacccccacacgctcaccctgtccctgcccttctacatctcccagtgctggaccctcggctccgtcctggcgctcacctggaccgtctggcgcttcttcctgcgggacatcacattgaggtacaaggagacccggtggcagaagtggcagaacaaggatgaccagggcagcaccgtcggcaacggggaccagcacccactggggctggacgaagacctgctggggcctggggtggccgagggcgagggagcaccaactccaaactgacctgggccgtggctgcctcgtgagcctcccagagcccaggcctccgtggcctcctcctgtgtgagtcccaccaggagccacgtgcccggccttgccctcaagctcgtgtgggcgctcgtccacaaacactccgtggctgagaggcagcggatccaggcagcgatgctgagccacctcctccgagccttcctttcacacagaccaccccggaggacacgtggatgatggggtcagagatcactgagcctcgctcaagggggcctggaacccgggtgctggggtcatgctgcctccgtggctccaaggtgagggtcatcttcacgagcaaagagaaccaataaagtgacaacgaacgtcaaaaaaaaa

SEQ ID NO: 2570 - DNA, 2261 bp, Homo sapiens
tttcgacgagttttctgcgcttccttctccctctctccagacgtcgtggtcgttcggtcctatgtcgcgccgggccctccggaggctgaggggggaacagcgcggccaggagcccctcgggcccggcgccttgcatttcgatctccgtgatgacgatgacgcggaagaagaagggcccaagcgggagcttggtgtccggcgtcccgggggcgcagggaaggagggcgtccgagtcaacaaccgcttcgagctgataaacattgacgatcttgaggatgaccctgtggtgaacggggagaggtctggctgtgcgctcacagacgctgtggcaccagggaacaaaggaaggggtcagcgtggaaacacagagagcaagacggatggagatgacaccgagacagtgccctcagagcagtctcatgcaagtggcaaactccggaagaagaaaaaaaaacagaaaaacaagaaaagcagcacgggagaagcatcggaaaacggactagaagatatcgatcgcatcctagagaggattgaggacagcactgggttgaaccgtcccggcccagctcccctgagctccaggaagcacgttctctacgtggagcacagacacttgaatccagacacagaactgaaaaggtattttggtgcccgggcaatcctgggggagcaaaggccacggcagagacaacgtgtgtaccccaagtgcacatggctgaccacccctaaaagcacctggccccgctacagcaaaccaggtctgtccatgcggctgctggaatcaaaaaaaggcctctccttctttgcgtttgagcacagtgaggagtaccagcaggctcagcacaagttcctggtggccgtggagtctatggagccgaacaacatcgtggttctgctccagacgagcccttaccacgttgactcactcctgcagctcagcgatgcctgccgctttcaagaggatcaggagatggctcgagacctcgtagagagagcgctgtacagcatggaatgtgcgttccaccccctgttcagtctcaccagtggggcctgccggctggattaccgcagacccgagaacaggagcttctacctggccctctacaagcagatgagcttcctggagaagcgaggctgcccgcgcacggcgctggagtactgcaagctcatcctgagtctcgagccggatgaggaccccctctgcatgctgctgctcatcgaccacctggccttgcgggcccggaactacgagtacctgatccgcctcttccaggagtgggaggtgggtgcgagcctggctcatcggaacctgtcccagctccctaattttgccttctctgttccactggcgtatttcctgctgagccagcagacagacctccctgagtgtgagcagagctctgccaggcagaaggcctctctcctgatacagcaggcgctcaccatgttccctggagtcctcctgcccctgctcgagtcttgcagtgtgcggcccgacgccagcgtttccagtcaccgcttctttggacccaatgctgaaataagccagccccctgccctgagccagctggtgaacctgtaccttgggaggtcacactttctctggaaagagcccgccaccatgagctggctggaggagaacgtccacgaggttctgcaagcagtggacgccggggacccagccgtggaagcctgtgagaaccggcggaaggtgctctaccagcgtgcacccaggaatatccaccgccatgtgatcctctctgagatcaaggaagccgtcgctgccctgcccccggacgtgaccacgcagtctgtgatggggtttgatcctctgcctccttcggacacaatctactcctacgtcaggccagagaggctaagtcctatcagccatggaaacaccattgctctcttcttccggtcactgttgccaaactataccatggagggggagaggcccgaggaaggagtggctgggggtctgaaccgcaaccagggcctgaacaggctgatgctggctgtgcgcgacatgatggccaacttccacctcaacgacctggaggcgccgcacgaggacgacgcttagggggagggggagtgggactgagcgtccgcagaggtgaccgaaaagccgtatgatgatgttcccgatttctctgttggtcggagtcggccagttgcctgaagtagggaagctgagtgtgtcgctccctggtccactgtttctcctataaatgtaaatgggtcacgcaaaaaaaaaa

SEQ ID NO: 2571 - DNA, 2261 bp, Homo sapiens; identical to SEQ ID NO: 2570

SEQ ID NO: 2572 - DNA, 3710 bp, Homo sapiens
gcacgagggaagaagaggatgactcagagatctcagggtacagcgtggagaatgccttcttcgatgagaaggaagacacctgtgctgccgtgggggagatctctgtgaacaccagtgtggccttccttccatacatggaaagtgtctttgaagaagtatttaaactgctggagtgccctcacctgaatgtgcggaaggcagcccatgaggctctgggtcagttttgctgtgcactgcacaaggcctgtcaaagctgcccctcggaacccaacactgctgctttgcaggctgccctggcccgagtcgtgccatcctacatgcaggcagtgaacagggagcgggaacgccaggtggtgatggccgtgctggaggccctgacaggggtgctccgcagctgtgggaccctcacactgaagccccctgggcgcctcgctgagctctgtggcgtgctcaaggctgtgctgcagaggaagacagcctgtcaggatactgacgaggaggaggaagaggaagatgatgatcaggctgaatacgacgccatgttgctggagcacgctggagaggccatccctgccctggcagccgcggctgggggagactcctttgccccattctttgccggtttcctgccattattggtgtgcaagacaaaacagggctgcacagtggcagagaagtcctttgcagtggggaccttggcagagactattcagggcctgggtgctgcctcagcccagtttgtgtctcggctgctccctgtgctgttgagcaccgcccaagaggcagaccccgaggtgcgaagcaatgccatcttcgggatgggcgtgctggcagagcatgggggccaccctgcccaggaacacttccccaagctgctggggctcctttttcccctcctggcgcgggagcgacatgatcgtgtccgtgacaacatctgtggggcacttgcccgcctgttgatggccagtcccaccaggaaaccagagccccaggtgctggctgccctactgcatgccctgccactgaaggaggacttggaggagtgggtcaccattgggcgcctcttcagcttcctgtaccagagcagccctgaccaggttatagatgtggctcccgagcttctgcgtatctgcagcctcattctggctgacaacaagatcccaccagacaccaaggccgcactgttgctgctcctgacgttcctggccaaacagcacaccgacagctttcaagcagctctgggctcactgcctgttgacaaggctcaggagctccaagctgtactgggcctctcctagactgcaggctgcagccagtccagagagaatagagcctgcccaggccttaagaccacctctcagcccagttcagttctgccttaccaaagattctgagactcatacccatttggagccagccccacttgctgccttacagggctgtccctgaggctggatctgttacaaatgagtcatgacatcatactgtaataaaagcagcttgttttctgcttgaacaatagctctgagagcaagaaggctggaaatgcacattcagaaatgaggtaagcaggacccagtgaggcacgacgtggtttactagaagtggccggtttcctggcagctttgtaaatggactctaacctcagtggaatctgggccccggctggatcaggaggcgaccatatggcttttcttgtttcacgtgaagaatctgttgcgctgagagcaccaggagcaggtagaagacccgggcagccatcctgcgggggctgagaggtgacaccaggctgctgaagtcgggctccctgttagcctgcagctccagtgccactgccctgtgcactgcttccagtgagagcagctcgagctctgggggcagcaccaaaggcatctccatgggcacctcagggagttcaggcaccacgggcaatgcaggagcttctggcgcctccacctcaggccaggcccaccgttcttctggtgggatgaggctgatgcgggacttctcctcttcagctgcctctagggagatctctaaagacaccataaggggaacactgggctccagggcctccctcgggacctcaatctcacttggaacttcaatctttctcctttcctcctcagcggctgcctcctcaggcagctctcgcctgagggcttttgggggtggctgggcacaatgggtccagagacccagtagttcagggggtagccagccagagagagttggggttctgaacaactccgcagggcctctgatggtcctctcgggcggctgcaccatgggacattcccagcagtgggctctggtttgcagttgttcctggaatttctccggggagatctgagtctccttgtcccagaacagtaaccggcgacgacggcggcggcgaggaggtggggggactgggggcctcctctctgggctgggtggggctggcagacgcagctcctccgggggggtcacctccatgagtagggccccaggttcccagcctgtcagcctcagctcctcaggacccagtgcctctcccattccttccaccctgaggggaaatgggcaagagaaatgaggagacccttcccagcactgacaccctacctggtctaggagttcttgcccttactctgcaggagctggaggtgggagccgcgggatttctaacaagatagcttcttcttcctctgcgatcagcaggtccagttctcggcggctgacctctgggagctcccgttcaccctcaatctccagcatccgtatgggctctgcctccaggatcgtgatggcctcaggtggcagcacagtgaccggaatcctctctggctccctgggctctgtaggaacttcaggagggatctcttcaactctctctgggattgcagcctctaagaggtgtcgaatctgagggatatcgaaaggactaggaagtctgggatccacagacatcatcccaaaaaagggatctggagcatcttctagggtctccatcatggccaggtggttaggaagcagcaggctgggtagctcagtctccatatctattcggatctgcagctgggcacggtggaggcgctccaagatgtgctggatgtcctccacgaggtactggcattgttgagaatagacgcggatcacaccgatctgaagttgggctgagagatagagggagaagcggggccgcggcaggccgggctgcgggggttgcactcgtaccagcacgtaattgaggatttcctcgcaggttttcaccacattcaccctcaggtattcgcgcttcaccaaccggctgccgcgagtcgccgccagccagatggtggcaaagcagccggtgtggcgctgaagcacgttgggatagtagaacattgtccctctggtctttcaccctcgattccaccagatccccgttcggatctgagtcggaattctttagggcacagaattcccaacaccaaggataactgagacgcaggagatgggcgcccctctctgtggaccctcagtggatccgcacgccacgtgatggcgtcaaacttgagacttctgggttgggttccaggttggagatgcagagctccgaggggacgtccgggccggaatccagagcaggtcccgagggagcacggtgtcctccacagcaggcctcggtcctcgagcgctgggagcgatgtcaggcccctgggccttgcactggcttgggcggccgc

SEQ ID NO: 2573 - DNA, 3710 bp, Homo sapiens; identical to SEQ ID NO: 2572

SEQ ID NO: 2574 - DNA, 3387 bp, Homo sapiens
  misc_feature (1)...(3387): n = a,t,c or g
attacgcgaacaaatcctttccgcaagagctgagggacctgggtgcaacgcattctggaaattgtagtctctgggcgctcccggctgaacacctccctgcggtctgtgcgagaaagagccagaagcccccaggggagggcgaagaggagggcggtggagtacgctctgcgcgcggtgcgccatggaacgggtagttcgcggtgcgcgccccatcgcgctcccagatggggaaccggactactctacccgagaggccgcgcgagcggggcgagggcaagccggccggggcctcgaacaaatcaaatcgaagcaaagaaactgccggctttcaaaatcctcctcctccgccatcatccgccgcggtgcggagagcaggtggtgctggaagcgcgtgaggccgggagctcgagagagctaacagactagccggctggacatctggaccgctggatccggaggtggcgaccccggcctgacccggaccctaaatccgtccccgccccagagggcggaggcgcgcgctcgattcccccaacgcggcggcgccgcctgtttacgtctgcagatctccaggggagcccaccagcctagtcaacatggcctcggaagacattgccaagctggcagagacacttgccaagactcaggtggccgggggacagctgagtttcaaaggcaagagcctcaaactcaacactgcagaagatgctaaagatgtgattaaagagattgaagactttgacagcttggaggctctgcgtctggaaggcaacacagtgggcgtggaagcagccagggtcatcgccaaggccttatagaagaagtcggagttgaagcgctgccactggagtgacatgttcacgggaaggctgcggaccgagatcccaccagccctgatctcactaggggaaggactcatcacagctggggctcagctggtggagctggacttaagcgacaacgcattcgggcccgacggtgtgcaaggcttcgaggccctgctcaagagctcagcctgcttcaccctgcaggaactcaagctcaacaactgtggcatgggcattggcggcggcaagatcctggctgcagctctgaccgaatgtcaccggaaatccagtgcccaaggcaagcctctggccctgaaggtctttgtggctggcagaaaccgtctggagaatgatggcgccactgccttggcagaagcttttagggtcatcgggaccctggaggaggtccacatgccacagaatgggatcaaccaccctggcatcactgccctggcccaggctttcgctgtcaaccccctgctgcgggtcatcaacctgaatgacaacaccttcactgagaagggcgccgtggccatggccgagaccttgaagaccttgcggcaggtggaggtgattaattttggggactgcctggtgcgctccaagggtgcagttgccattgcagatgccatccgcggcggcctgcccaagctaaaggagctgaacttgtcattctgtgaaatcaagagggatgctgccctggctgttgctgaggccatggcagacaaagctgagctggagaagctggacctgaatggcaacaccctgggagaagaaggctgtgaacagcttcaggaggtgctggagggcttcaacatggccaaggtgctggcgtccctcagtgatgacgaggacgaggaggaggaggaggaaggagaagaggaagaagaggaagcagaagaagaggaggaggaagatgaggaagaggaggaagaagaggaggaggaggaggaagaagagcctcagcagcgagggcagggagagaagtcagccacgccctcacggaagattctggaccctaacactggggagccagctcccgtgctgtcctccccacctcctgcagacgtctccaccttcctggcttttccctctccagagaagctgctgcgcctagggcccaagagctccgtgctgatagcccagcagactgacacgtctgaccccgagaaggtggtctctgccttcctaaaggtgtcatctgtgttcaaggacgaagctactgtgaggatggcagtgcaggatgcagtagatgccctgatgcagaaggctttcaactcctcgtccttcaactccaacaccttcctcaccaggctcctcgtgcacatgggtctgctcaagagtgaagacaaggtcaaggccattgccaacctgtacggccccctgatggcgctgaaccacatggtgcagcaggactatttccccaaggcccttgcacccctgctgctggcgttcgtgaccaagcccaacagcgccctggaatcctgctccttcgcccgccacagtctgctgcagacgctgtacaaggtctagactcaaagcctctcccatcccttggcctggaccagtgagctggggagggactcggatgaactgaggcgcagcctacgccattgccttggacaggactctggccacaggcagggcgggtctgtgtcccatgtgtcctgtcagtcccctgagtatgtgtgtgggtgtggcgcatgtgcaggtctgtgcctcctgtcgggatttgggttttaacgtcttctgctggcccagccctgctctgttgtggggagttggcccccaggggaaagggctgtgagctgctccgccattaaactcacctccacctgagggcgctctgctgatctccgcctgggccctgatggccgtccccacccacctgccttccggcccggctccctggcggagccagaacccaaggagttgcccgcgtgctgtccttcccctctgtgttgtgattgggttgtttcctgccctgcctggggctgcttctcgtcaccaagccctggtcctgcggcagctgtcacccctaccatccataccactgtgctgaccgctcagcctgaagagcagagaatgccatgggtgggactgtgggggtcggatcgtggggttgttggcagagggcaaccctgggccccacaccgtgtggacaggcagacaccagattgtccaggagcaggagctgctgggactgcgctggccccggacctagtgggccttctcctggctgctgagatgtcgtctgtgactggcctggctggagggggagtgttgacaacccaaagctgttctccagtctggggagggagaggcagggtccccaatgtccgagctgcatctggacgctgctcttaaaggacctcctggggcaggggagcggtagggtctggactgggcagatgctgtatgacctccctgagcacccgtgactgccccatgctttcccctttgtgctctgtgtgtgtctgggctgtgcccgggggcttcacaaataaagtcgtgtggcagcttcagagactcaaaagggggggggggggggggggngaaa

SEQ ID NO: 2575 - DNA, 3387 bp, Homo sapiens; identical to SEQ ID NO: 2574
  misc_feature (1)...(3387): n = a,t,c or g

SEQ ID NO: 2576 - DNA, 1359 bp, Homo sapiens
tttcgtccgggagctgccacgtccgagacctggagcagccaccgccgcaatcatggtgtcagtaattaacactgtggatacctcccatgaggacatgattcacgacgcccagatggactactatggcacccgcctggcaacctgctcatcagacaggtccgtcaaaatctttgatgtgcgcaatggagggcagatccttatcgccgacctcaggggtcatgagggtcctgtgtggcaagtggcctgggctcaccccatgtacggcaacatcctggcatcgtgctcctatgaccggaaagtcattatctggagagaggaaaacggcacctgggagaagagccacgagcatgcgggacacgactcctcagtgaactcggtgtgctgggccccccatgactacggcctgatcctggcctgtgggagctcggatggggccatctccctgctgacttacaccggggaaggccaatgggaagtaaagaagatcaacaacgctcacaccattggctgcaatgccgtcagctgggcccctgctgttgtacctggaagcctcatagaccacccatcggggcagaaacccaattacatcaagaggtttgcatcaggtggctgtgacaacctcatcaagctgtggaaggaggaggaggacggccagtggaaggaggagcagaagctagaagcgcacagtgactgggttcgagatgtggcctgggccccctccatcggcctgcccaccagcaccatcgccagctgctcccaggatggtcgtgtgttcatttggacctgtgatgatgcctcaagcaatacgtggtcccctaaattgttgcacaagttcaacgatgtggtgtggcatgtgagctggtccatcacagccaacatcctggctgtctctggtggagacaataaggtgaccctgtggaaggagtcagttgatgggcagtgggtgtgcatcagtgatgtcaacaagggccagggctccgtatcagcatcagtgacagagggccagcagaacgagcagtgacaagacaggtggggcctggctccccacccgccagctccaggactgccccttcctgggccaactaaccaaacaactgggaagagcccccaactccaacaggattattttcccaggaggagttacagatgcagccacagattgatcatctgccttaacgtgatcggagatgctttgtaatctactgtccagctgaaagcactcatgttacgaggaagaaactacaagtgatgttcaaatctattttgggtcatttttatgtacctttgggttcaggcattatttggggggttttgtttccaaaggaactaaataaagtcatattgcttataaaaaaaaaa

SEQ ID NO: 2577 - DNA, 539 bp, Homo sapiens
gtgctgtaatttcactcttgcttagcctgtgtagctcaaggatgtatttattgccctaggcgtaagaatgtgctcacgtttcttaagtaatgtaggtgtgcctcacccatggggcttcactttctctctgtttattgccagtagtggtctctgttctgttttcttcagtttctcccccttgcattgttgtctaagatggctgtcctgtcttttgtccacttcccctccactccccgtaccttcctttaatcagcttccgccactgcctgaggccactcagctctggtcccactggaggccctgtctcccccaggggtccttctgcttcctgttcacctctgatcccccagccctgccatggccaagctgatgaggatgggggagggggaggcagggggaatcttaatttcctgcaccgaagctttgctgtccacagcactgggcagcagctgcctccctggagtgttgtgtgagaccttgatgctgtctttcttcccaaggcctttggcaaggtagaagtcatctccttgactctccat

SEQ ID NO: 2578 - DNA, 2171 bp, Homo sapiens
aactttctcaaatgacttagatttaatcatcggaagcaaactaaatggaaaccttacaatagagaagaattacatgtcagtgtcttttggaaaactgagctgggacagaaagggactgggggctgccccccaacctgatcccttctgaacaaagacgtccacagtgttcctggcactctggctcaggaaaaggggagactctgctggttctgtgcattgaagtagccttgcctagcactcactcctggccagcatcaggagccccgccttgccggctctggtcatcgcctttctttttgtggcctgaaacgatgtcatcaattcgcagtagcagaactgccgtctccactgctgtcttataagtctgcagcttcacagccaatggctcccatatgcccagttccttcatgtccaccaaagtacccgtctcaccatttacaccccaggtctcacagttctcctgggtgtgcttggcccgaagggaggtaagtagacggatggtgctggccccacagttctggatcagggtacgaggaatgacctctagggcctgggcaacagccctgtatggccattgttccacaccagtcatggccttggatttttctgtcaaggcatgggccacagccatctcggaggccccaccccctggcaccagctgagggtccaggagaacattgcgacacacttgcatggcatcctgaaagttgcgttctacttccgagagaatctctttgctagccccccggaggagaatggtgcaggccttggggtctttgcagtcagtgatgaaagtaaagtattcatctccaattttcttgatttccaacaggcctgctcctgttccaacatcatcttctctcagttcctctggtcggctgactatccgggccccacaggctctagcaatgcgattattgtctgtcttccggactctgcggatggctgtgatattggcccgcataaggtagtgctgagctaaatctgagatgcccttttcagtgatgaccacatcgggcttcagttggataatgtcctcacagagctgctggatgtactcttcctccatctggagaattcgggtgaagtcctcctctcgtgtaatctcaatgtcagtctggctttctcctttcttgtattccagagaagaatccagcagcacaatgcgagggttcttgatatagcgccgcatacgtggatgggtcacatccttgttaatcatgactccacgcaagacacaggagtcttcaatgatgcctccaggtatcttttccactcttgcatatttttttatgtcaatctctttccgaccattctcctcaaactgtaccatcttgacagcatccagggcaatgttgcaagccaaagatgaccaccgactgatggctttggtagtaatagagctgttgatgatgttcagcatcatatcactgtcactgatgtcgactgggatacttattttctttagggtgctgatcatatcatccaatgccttgcggtaagcactgatcaccactgttgggtgcatctgctgctccaggaagtgctcagctacagacagcatttcccctgcaagaataattactgatgtggtcccatctccaacctcttcatcctgggtccggctaatttcgatcatggacttggccgctggatgctggacttgaatctctcgaagaatggcattgccatcattggtcatcacaatgcctcccattgggtccaaaagcatcttcatcatggacttgggtcccaaacatgttcggatgatatctgcaatagtcttggcagcattgatgtttccagattgaacttttcttccggattcacgctttgtgttctggctgagcacgagcactggacttggccgctggatgctggacttgaatctctcgaagaatggcattgccatcattggtcatcacaatgcctcccattgggtccaaaagcatcttcatcatggacttgggtcccaaacatgttcggatgatatcttggcagcattgatgtttccagattgaacttttcttccggattcacgctttgtgttctggctgagcacgagcactggacgatggcccatcatggcgacgcgatgcagagccgggtacccagagctgggggaaccggcagaaccttctggagagagaaccagacagaagcccagaaaa

SEQ ID NO: 2579 - DNA, 1603 bp, Homo sapiens
ctttttttttcatgtgaggtatttattttgcagccattcagttcagctgtccagtatcaggttaccaaagacaaattttcaagctcccggttaatccccaccaaagtttctactgttcggctacttcaggatggctaacatttggagagaagaggatcccccaggtagtctgtacataattcagagagaggacatcagaattttccatggttctatttcaggtattaaggtaccacagtgaagcatgtcatttgactgtggtggcaaagggacggcactgagcatgcctaacctattccccggcatttcagtccaatcagcgcatgctcgcaatgatcatccatgggtgaaaaggaagagctgaaagacacatgtgctgagcaacatttaatttctgcttgttaaacgggtgattaggcgccagtgtggcaccatccagacactgggaatttgtgccactccatcagttctgctggctctgctcattctgctttcctgcagtggatgccacttcccaaagaaccatgctccaaaaaacaaaagagaatttcctcattagctggacttggctgcagcaactgtttggtttggagtagctgtagttgttgggagatggtccatctctggtgcatcaaaaaagtatgccaagcagcccacagaaagcagcatatggagcaacacaattgtcacaattgtggccaatgcaacgcgtcggttatcctcacgaacagctggccaaaatgtcattgccaagagagatcctgagatgcccagggcaatcatgactagaatccaacgaacagctttgtgggggataatccacagtattgcggtggggatataaatgaagagggaatatccatagacacacacaatctccagaaatgaataggagacgatgttcataactttgctgtttctccacatgaggaaaccccagagtgcaagaggaaccagccaggcataggcatagatgatggtagctgctatggacacttttcggaattcgggcacataatggtacgtcttctctcccagatggatcaagaagttggaaagattcccactaattgctatggcaaagaccaacgtggcacatatccaaaaggggccatagagatctggattgctgcggatatataacctcacaaagtttttcccgggtattggcaaaagagatcctttaattctgtcaaagacctggtaggtgtccacatcaaagaatgtttggtagtattcaaatgtccagaagggggagcttttcttctgtccagcaagtaactcagttttgtcagagtcatcatttcccagtaactcatcatcttcttctcttcctgagcctcttggggatcctggctgatgttttggggtttcaccaggatcctcaatgtttactgtggtggcatctgggtttgctgtcagagaagtggctgcattgccaaattcttcaaattgcaagtcatctactgctgccattcggccagtgagtcttctcccaattatgaggaagaaaatttgcagggttctcgcggggttaggcgtcccccgggtcccgagaaggctcgggcctcagttgctccgcgccggtttcggtccagcccag

SEQ ID NO: 2580 - DNA, 1714 bp, Homo sapiens
aattcccgggtcgacgatttcgtcgcgcacctgcagcgcccgctgctcggccctgcatcctgcctgggcatcctgcgcccggccatgacggcgcactcattcgccctcccgggcatcatcttcaccacgttctggggcctcgtcggcatcgccgggccctggttcgtgccgaagggacccaaccgcggagtgatcatcaccatgctggtcgccaccgccgtctgctgttacctcttctggctcatcgccatcctggcgcagctgaaccccctgttcgggccccagctgaagaatgagaccatctggtacgtgcgcttcctgtgggagtgacccgccgcccccgacccaggtgcccagctctcggaatgactgtggctccactgtccctgacaaccccttcgtccggaccctcccccacacaactatgtctggtcaccagctccctcctgctggcacccagagacccggacccgcagggcctgcctggttcctggaagtcttcccagtcttcccagccagcccgggccctggggagccctgggcacagcagcggccgaggggatgtcctgctccaatacccgcactgctctggagtttgccctctttcccaaggagatgctgctggggagctggtatgggtggggtctttccctttacagacggggcagatgccaggactcagcccatcctgaggaggacacgtgtcctcatggagagggtgctccggcccaggcgggggagtcggtgcccagtcagcagctctgccaccatcctgctgggaactgggggggcctctattgggttataggcaaggccttttctctggcatggaattgttaattttctgacacgtctagatgtgaaatttctgaaaatgttgaagcagagaaacattcacacacaaaaagcaacatagtcatgtgggtccagatggcctcagtcctagatgttggcaccctttgctgtgtctcctcagagtatcctgttccgcctcctgccacctggacctccctcagtggatgtcttccctcccccgaccccagcctgtcagtccgagcacagtgcaggtttggctctgacttgggcctttggctgcagtgggggtggatttcagagcctctcatggcagcatctaagtgaccagagctgggatgagagaggggaaggggcaatgtgagtggcgctatgggacgggccagccctgctcctgagccagccccgccctctgccccctggccctgggctctgtgctagggatggtgaagaatgggggcgtgccagcctggcaggagtgggaagcaacacgcaggggtcccggacctctccagccttgccctcacgcttacccgagctcccagtgtggttagcacagagctcacccaccttgcctggctcccagctggggcctgtcctcactggtgctccaggggaagaaacgacagcctcacttctgtatggactgctgatgtggcctgccatcctgttcagcgggcattgtctttggagcagcaggagaataggatgcctctcactcacatgccagttcctggctggccagctgctcagggctcaggctggggcctcccattgacatcctccccctacactccctctctgagcctccgtcgcccctcctgttgggtaagggtgttgagtgtgacttgtgctgaaaacctggttcatatataataaataatggtgatgaaaaaaaaaa

SEQ ID NO: 2581 - DNA, 2145 bp, Homo sapiens
gtttgtgacggacttcccggcgcggtctatggctgcgacttctctaatgtctgctttggctgcccggctgctgcagcccgcgcacagctgctcccttcgccttcgccctttccacctcgcggcagttcgaaatgaagctgttgtcatttctggaaggaaactggcccagcagatcaagcaggaagtgcggcaggaggtagaagagtgggtggcctcaggcaacaaacggccacacctgagtgtgatcctggttggcgagaatcctgcaagtcactcctatgtcctcaacaaaaccagggcagctgcagttgtgggaatcaacagtgagacaattatgaaaccagcttcaatttcagaggaagaattgttgaatttaatcaataaactgaataatgatgataatgtagatggcctccttgttcagttgcctcttccagagcatattgatgagagaaggatctgcaatgctgtttctccagacaaggatgttgatggctttcatgtaattaatgtaggacgaatgtgtttggatcagtattccatgttaccggctactccatggggtgtgtgggaaataatcaagcgaactggcattccaaccctagggaagaatgtggttgtggctggaaggtcaaaaaacgttggaatgcccattgcaatgttactgcacacagatggggcgcatgaacgtcccggaggtgatgccactgttacaatatctcatcgatatactcccaaagagcagttgaagaaacatacaattcttgcagatattgtaatatctgctgcaggtattccaaatctgatcacagcagatatgatcaaggaaggagcagcagtcattgatgtgggaataaatagagttcacgatcctgtaactgccaaacccaagttggttggagatgtggattttgaaggagtcagacaaaaagctgggtatatcactccagttcctggaggtgttggccccatgacagtggcaatgctaatgaagaataccattattgctgcaaaaaaggtgctgaggcttgaagagcgagaagtgctgaagtctaaagagcttggggtagccactaattaactactgtgtcttctgtgtcacaaacagcactccaggccagctcaagaagcaaagcaggccaatagaaatgcaatatttttaatttattctactgaaatggtttaaaatgatgccttgtatttattgaaagcttaaatgggtgggtgtttctgcacatacctctgcagtacctcaccagggagcattccagtatcatgcagggtcctgtgatctagccaggagcagccattaacctagtgattaatatgggagacattaccatatggaggatggatgcttcactttgtcaagcacctcagttacacattcgccttttctaggattgcatttcccaagtgctattgcaataacagttgatactcattttaggtaccaaaccttttgagttcaactgatcaaaccaaaggaaaagtgttgctagagaaaattagggaaaaggtgaaaaagaaaaaatggtagtaattgagcagaaaaaaattaatttatatatgtattgattggcaaccagatttatctaagtagaactgaattggctaggaaaaaagaaaaactgcatgttaatcattttcctaagctgtccttttgaggcttagtcagtttattgggaaaatgtttaggattattccttgctattagtactcattttatgtatgttacccttcagtaagttctccccattttagttttctaggactgaaaggattcttttctacattatacatgtgtgttgtcatatttggcttttgctatatactttaacttcattgttaaatttttgtattgtatagtttctttggtgtatcttaaaacctatttttgaaaaacaaacttggcttgataatcatttgggcagcttgggtaagtacgcaacttacttttccaccaaagaactgtcagcagctgcctgcttttctgtgatgtatgtatcctgttgacttttccagaaattttttaagagtttgagttactattgaatttaatcagactttctgattaaagggttttctttcttttttaataaaacacatctgtctggtgtggtatgaatttctgaaaaaaaaaaa

SEQ ID NO: 2582 - DNA, 1977 bp, Homo sapiens
tttcgtgtagacgaggacgccaacagcagcggagaaacgtttctctttcctctcagtttgcgcacaccatggcggcccctgcccagcagactactcagcctggcggcgggaagcgcaaaggcaaggctcagtatgtgctggccaagcgcgctcggcgctgcgacgctggcgggccccgtcagctagagcccgggctacagggcatcctcatcacctgcaatatgaacgagcgcaagtgcgtggaggaggcctacagcctcctcaacgaatacggcgacgacatgtatgggccagaaaagtttacagacaaggatcagcagccctctggaagtgagggagaggatgatgatgcggaggctgccttgaagaaagaagttggtgacattaaggcatctacagagatgaggttaagaagattccagtcagtggaaagtggagcaaataacgttgtcttcatcaggacacttgggatagagcctgagaaattggtgcatcatattctccaggatatgtacaaaaccaagaaaaagaagactcgagttattttgcgaatgttacccatctcaggcacatgcaaggcttttttagaagatatgaaaaaatatgcagaaacatttttggaaccctggtttaaagctccaaacaaagggacatttcagattgtgtacaaatctcgaaataacagtcatgtgaatagagaagaagttatcagagaattggcaggaatagtgtgcaccctcaattcagaaaataaagtggatctcaccaatccacagtacacagtggtagtagaaatcatcaaagctgtctgttgcctgagtgttgtgaaagattacatgttgtttagaaaatacaatctccaggaggtggtgaagagccctaaggatccgtcacagcttaactcaaagcagggaaatgggaaagaagctaaactggaatctgcggacaaatcagaccaaaacaacacagcagaaggaaaaaataaccagcaggtaccagagaatactgaggagctggggcagacaaaaccaacgtctaatccacaggtggtaaatgagggaggagccaaacctgaacttgcaagtcaagccacagaaggatccaagtcaaatgaaaatgacttctcataggaagtcatttggtgttggagctgacagtccagtgtcgcaattttggaaggcaagatgtgagagagacgagaaccattttaggcatagaactacagacatttctgaaaaggttggtgatgaagaacttcagtcttctgagtatacttcagtatactagtgcaacaagggacacaaagaaattctgtcttaataaagaaagctacttctcaagggtattatgtggactcagtccaagctctcctgtcccattgtgcattgtctgtgacatgcaacttacaaaactagcaattgtaacaataaatcacagccacttgacaagaaaggatattcattattttcaaatggcttttggactatcaaaaacagtaaggcttttgttcagaaatcacctttagtcaaaaggtttaagaagcaaattatttagtagcagaacttatctcaggaaaggaaaatatgcatggttggtgagaatctaataacattaaaatgctggggcaagatgcagtacaaagttgaagagactttattctcaataagttgatttactgatgatatgtcatatgatgcaaaaaagggtttggggccattaactgaaaaatagcagcttctctatccaggatgatgagtcaacaggtttcactaatatttgtccatgctgtagcatttgtaagatttgtaaatgatgaaattcaaagaaaactttttctattgctaggagcctgccagaacaaaggccaatatataatgttgtgacatcatatctgataaccagaggtctggtatctacactcctggtgccccatcagtggttgtctccataagtcattttgcgttattaaaaaaaaaa

SEQ ID NO: 2583 - DNA, 3716 bp, Homo sapiens
tttcgtgggtccgtgtggcagctttgtgcagggggtgggatggggtcagtagcctgctgtgaagtgccgtccagacggggtgatctgagtccccagcctgggtgatggcaacggggtggcctggctgtctgccctgagccctcaccaggcctctcctggttttcgtgagccaaagagccgctgccattttactttggggagaggcagaaatgtgcctaatgatttccttctcttgctggccttctagggcaagaaagactcctccccgtggacctgccccttccacccaccactccagctgttttttgttattcgaaacacaagacagctgggggacttccatctggccaagatcaaggttcggaattactggacagctgatggcgatcttgacattggtgccaagaacgtgaagctttacgtcaacagaaacctcatcttcaatggcaagttagacaaaggagatagggaggccccagctgaccacagcatcctggttgaccagaagaacgagaagagcgagcaactagaggaggccatgaacgctcactcggaagaaagcaaaggcacccatgagatggctggtgccagcggggacaaggagcttggtctcggttgctcaccgccagctgaaacattagcggatgcaaagctttcttcacaaggaaatgtgtctggcaaaagaaagaattctactaattgcaggaaagacagtttgtcccagttagaggaatatttgagactgtcggcagtccccacttcgatgggtgacatgcccagtgctcctgccacttccccacctgtgaagtgccctcctgtccatgaggagccctctctcatccaacaactggaaaacctcatgggcagaaaaatctgtgagccacccgggaaaaccccatcctggttacaaccttctcccaccggcaaggacaggaagcagggaggcaggaagccaaaacccctctggcttagtcccgagaagcccctggcctggaagggcaggctcccatcagacgatgtcatcggtgagggtcctggagagaccgaggccagggataaaggcctacggcatgagccagggtgggggaccagccggagtgtcaacaccaaggagagaccccagagggcaaccaccaaagtccacagtgatgactcagacatctttaaccagccccccaacagagagcgccctgctagtgggaggaggggctcaaggaaggatgctggcagcagtagtcatggggacgaccagccagccagcagagaagacacctggtcttccaggacgccgtcacggtcaaggtggcgcagtgagcaggagcacacacttcacgagtcatggagctccctcagtgccttcgaccgctcccaccggggacgcatctccaacacggagctcccgggggacatcctggatgagctcctgcagcaaaagagcagccggcacagcgacttgcccccctccaagaagggggagcagccagggctgtcgagagggcaggatggctactctggagagacagacgctgggggtgactttaaaatccccgtcttgccttatggacagcgcttggtcattgacatcaagtctacctggggggacagacactatgtcggcctcaacggaatagaaatattcagttccaagggtgaaccggtgcagatttcaaacataaaagcagaccctcccgatatcaatattttaccagcctatgggaaagacccccgcgtggtcaccaacctcatcgacggggtgaacaggacccaggatgacatgcatgtctggctggcccccttcacgcggggcagatcccactccatcaccattgacttcacgcacccttgccacgttgccctgatcagaatttggaactacaataaatctcggatacattccttccgaggcgtgaaggacatcacaatgctgttagacacccagtgcatctttgaaggagaaatcgccaaggcctctggaaccctggcgggagccccagagcactttggagacacgatcttattcacaaccgatgatgacattctcgaggccatattctattctgatgagatgtttgacctggatgtggggagcctggacagcctgcaggatgaagaggcaatgaggaggcccagcacggccgacggcgagggggatgagcggcccttcacccaggctggcttgggggctgatgaacggatcccggagctagagctcccatccagttcccctgtcccccaagtcaccacgccagagccaggcatctaccacggaatctgccttcagctgaatttcactgcctcctggggagacttgcactacctggggctcactggcctggaagtggtgggcaaggagggccaggcgctgcccatccacctgcaccagatctctgcttcccccagagacttaaatgagctccccgagtactctgacgactcccggaccctggacaagttaattgatggcaccaacatcaccatggaggatgagcatatgtggctgatccccttctcgccggggctggaccatgtggtcacgatccgcctggacagggccgaaagcatcgcaggcctgcgcttctggaactacaataaatctcccgaggacacctatcgcggggccaagattgtccacgtctccctggatggcctgtgcgtctccccgccagagggctttctcatccggaaggggccaggcaactgccactttgattttgctcaagaaatcctcttcgtggactacctacgggctcagctgctgccccagccggccaggaggctggacatgagaagcctggagtgtgcaagcatggactacgaggcaccgctgatgccctgtggcttcattttccagtttcagcttctcaccagctggggcgacccctactacatcggcctcaccggcctggagctgtatgacgagcgaggagaaaaaatccccttgtcggaaaacaatattgcggccttccccgacagcgtgaactccctggagggtgtgggcggggacgtccgcaccccagacaagctcatcgaccaagtgaacgacaccagtgatggccggcacatgtggctggctcccatcctgccgggcctggtgaaccgggtttatgtgattttcgatctgcctaccaccgtgtcaatgatcaaactgtggaattatgcgaaaacaccccatcgaggggtgaaggagtttggcctcctggtggacgacctgcttgtgtacaatgggatcctggccatggtgagccacctggtggggggcatcctgcccacatgtgagcccaccgtgccctaccacaccatcctcttcaccgaggacagggacatccgccaccaggagaaacacaccaccatcagtaatcaggccgaggatcaagatgtccagatgatgaatgaaaaccaaatcattaccaacgcgaaacggaagcagagcgttgttgacccagccttacgtcccaaaacctgcatcagcgagaaggagacgagacgacggcgctgctgactggtgaaggagggagagctggtcctcccactatggtgggctccgtcagcagccccactcagtgcctgcgtccctcaccctcagtcccaggagctggaagcgaaccacagtgttgaggggagcccgctgggaagaggggactcgggaggacagccctggatactaccagagtgacagatggctgtggctgcagggcaaagagatcccctgcagtttg

SEQ ID NO: 2584 - DNA, 1993 bp, Homo sapiens
gcaattcggagctagaatattcgcctggatatgagaggcaccaggatgagcacagggaggaaccctcagtgctgcgtctagattctgcaggggaggtttgctgggaccttggctccacccagccagcgaaatggcagccacactcgatttgaaatcaaaggaggagaaggatgctgagttggacaagaggatcgaggctcttcggcggaagaatgaggccctcatccggcgctaccaggagattgaggaagaccgtaagaaagctgaacttgagggagtcgcagtcacagctccccgaaagggccgctcagtggagaaggagaacgtggcagtggagtcggagaagaacctgggtccttcccggaggtctcctgggacccctcggcccccaggggccagcaaggggggccggactcctccacagcagggaggccgggccggcatgggccgagcatcgcgcagctgggagggcagccccggggagcagcctcgaggaggaggagctgggggccgtggccggaggggccggggccgaggttcacctcacctctctggagctggagacacctcaatctctgaccgtaaatccaaggagtgggaggagcggcgcaggcagaacattgagaagatgaatgaggagatggagaagatcgccgagtatgagcgcaaccagcgggaaggggttcttgaacccaacccagtgcggaacttcctggacgacccccggcgacgcagcgggcccctggaggagtctgagcgggaccgccgggaggagagccgccggcacggccgcaactgggggggccccgacttcgagcgggtgcgctgtggccttgagcacgagcggcagggccgccgagctggcctgggcagtgctggagacatgacgttgtccatgacgggccgggagcggtcggagtacctgcgctggaagcaggagagggagaagatcgaccaggagcggctgcagaggcaccgcaagcccactggccagtggaggcgcgagtgggatgccgagaagaccgatgggatgttcaaggatggcccagtccctgcccatgaaccatcccaccgctatgatgaccaggcctgggcccggcccccgaagccccctacttttggggagttcctgtcccagcacaaagctgaggccagcagccgcagaaggagaaagagcagtcggccccaggccaaggcagcgcccagggcctacagtgaccatgatgaccgctgggagacaaaagaaggggcagcatccccagcccctgagactccacagcctacttcccccgagacttcccccaaggagacacccatgcagccacccgagatcccagctcctgcccaccggcctcctgaagacgagggggaagagaatgagggggaagaggatgaagaatgggaggacataagtgaggatgaggaagaggaggagatcgaggtggaagaaggtgatgaggaggaaccagcccaagaccaccaagccccagaggctgcccccaccgggatcccctgcagtgagcaggcccacggagtccccttcagtccggaggagcccctgctggagccccaggcccctggcacgccttccagccctttctcaccacccagcggccaccagcctgtgtccgattggggtgaagaggtggagctgaattctccccggaccactcacctggctggcgccctctccccgggtgaggcctggccttttgagagtgtatgaagctggctgcctgtgtgtgtgtgtgtgtgtgtgtgtgtgtgtgtgtgtgtgcgcgcgcgcgcgcgcgcgcgcgcgctagaggggtgtggctggtgggggacccttggggctgggccctgggacccagtgtgccccacagccctgtcagctgagggggtagcgcagcccatgctcttctgtactgtcatgcccgtctctggaatgtccactcccagagcctgccccagcccttcgagccccctccccaataaagaattcacatcctcc

SEQ ID NO: 2585 - DNA, 2709 bp, Homo sapiens
atgggccgcgtaggccgggcaggcgtccagctgggacgccgccgcaccacgtgggctgcagagcgcacggggcaggcagctgccggtggcccagggcgggcgctgcgcggccagcgtccggatttgcgatcaggcggcgcggcggacagcccggcggcggggcggggggagttatattgcggggtccttcctcgctcaccctggttcctctcggagcggagacggcaaatggcggacttcgacacctacgacgatcgggcctacagcagcttcggcggcggcagagggtcccgcggcagtgctggtggccatggttcccgtagccagaaggagttgcccacagagcccccctacacagcatacgtaggaaatctacctttcaatacggttcagggcgacatagatgctatctttaaggatctcagcataaggagtgtacggctagtcagagacaaagacacagataaatttaaaggattctgctatgtagaattcgatgaagtggattcccttaaggaagccttgacatacgatggtgcactgttgggcgatcggtcacttcgtgtggacattgcagaaggcagaaaacaagataaaggtggctttggattcagaaaaggtggaccagatgacagaggcttcagggatgacttcttagggggcaggggaggtagtcgcccaggcgaccggcgaacaggcccccccatgggcagccgcttcagagatggccctcccctccgtggatccaacatggatttcagagaacccacagaagaggaaagagcacagagaccacgactccagcttaaacctcgaacagtcgcgacgcccctcaatcaagtagccaatcccaactctgctatcttcgggggtgccaggcctagagaggaagtcgttcaaaaggagcaagaatgagcctgcggttgggagggaatggggcgtggggggttagagcaggaccacagcctggtgagtccccgggcagccgtcctgcagccgccactcctgcgcctgccattggcctcctcacagcggaaacacagcttgtgagtgcatgtcagctgttaacaagtggtttttagtacattctgggctttgctgtatctatctagtgcctgtttgtgcgtttttttctttcttccgctgcttccccattttccttctgtcctttttctcctgctccttgttttcccagcagcacatggggttcctcggaggagcagaggtggccgccgtgggggggcgtttgggctgcggtgctgcgtcatttttcctttgctttctctttactttagacactggcccaactccaggcgtttcctttcattccctcagtgcttctcttctgacctgcatgttgagttctgtattgctggggcttccaacaaaaaccagagtcactgacagagggaacagcagagaccttgttggtattcagctgtgatggatatagagaatcagaggcaccttgttttcacaactaggataaaaatatctgcagggtcctttccattcctatttagagggagtcctggctccatgaccccctcccgagtggactgtccaagcagataggctcacacgagaaacagtgaggctgaaagggggggctatggaagagcggtagggagtccacggagaagatgcagtgaatgcttgcatgcattcacacgtgtgtgtgtcccagctagttcactcctttcgccgtgcgtggtggaggctggcctctctggctgggtgcagtgaatggccagcgggtttcttttctgctgggccaaggcgctttgggggtggagggggtggtgctggtgctgcactgggctgactgcggcgctgacgcagcgtttccccccatccctgttgcctgtgtgttgtgtggatctgttcctagtataggcaacataatgagatactgtgcttcccacctccccttcagttcagagccaaaatgggtctagaatctggcactttactcatttcctttgataaattgtactatgcagagctgtcaggaaccttcagatagcagtagaggactgcagctgtctaggtctgcggccacatcttggggacacactggactgttcccatgtgcagggttcagcagttatgtgggagtgctaggggttaggcttttgagcttgaacgcctgcgtgtgaacagatgaaaaatccttcagtacccaagtcccagtctgtcctatggggagcagtttgggggcggccggcagcaggagcctgggaaagaggccctcgccaggtgatggcagggccagggtggcctggggcacccagcggaatgtgcttagtatttggtcaccagccgtcatcctgggcttttcctactgtgtcttgttacaaggcctcagcaatccacagaactctctctccttccttccacctgtcagcttctctgcttctgagataagaaccatttgtgtaacaccaacacttaacttcagaaagacatgcattatgtggtgtaatcaaacccgatgctttcagatgacctacttacatcttcaatgtggataagataaagaacaaaacacatgcatctaaactgctgggcaatccagttgacttttaaatgtaagaatggaattccaaacacttaacacattcagctatatgacagaaagtaaatctatggatatggtattttgtgaatgatcttttaaataaaagaaaaccttacgtaaaaaaaaaa

SEQ ID NO: 2586 - DNA, 2709 bp, Homo sapiens; identical to SEQ ID NO: 2585

SEQ ID NO: 2587 - DNA, 449 bp, Homo sapiens
cggacgcgtgggcggacgcgtgggtagcgccatttttttggaaacctctgcgccatgagagccaagtggaggaagaagcgaatgcgcaggctgaagcgcaaaagaagaaagatgaggcagaggtccaagtaaaccgctagcttgttgcaccgtggaggccacaggagcagaaacatggaatgccagacgctggggatgctggtacaagttgtgggactgcatgctactgtctagagcttgtctcaatggatctagaacttcatcgccctctgatcgccgatcacctctgagacccaccttgctcataaacaaaatgcccatgttggtcctctgccctggacctgtgacattctggactatttctgtgtttatttgtggccgagtgtaacaaccatataataaatcacctcttccgctgttttagctgaagaattaaatcaaaaaaaaaa

SEQ ID NO: 2588 - DNA, 1632 bp, Homo sapiens
gccaatcggaaccgcaccggaaggttcgggtagacccacccgtccgcgacagacctccgccacatcctccacctctcttggtccagcgagcgttgccgggccagggtcaagcggagggctccgacggcgcggacggagcgaagcgccgagccatggcgcaccaaacgggcatccacgccacggaagagctgaaggaattctttgccaaggcacgggctggctctgtgcggctcatcaaggttgtgattgaggacgagcagctcgtgctgggtgcctcgcaggagccagtaggccgctgggatcaggactatgacagggccgtgctgccactgctggacgcccagcagccctgctacctgctctaccgcctcgactcacagaatgctcagggcttcgaatggctcttcctcgcctggtcgcctgataactcccccgtgcggctgaagatgctgtacgcggccacgcgggccacagtgaaaaaggagtttggaggtggccacatcaaggatgagctcttcgggactgtgaaggatgacctctcttttgctgggtaccagaaacacctgtcgtcctgtgcggcacctgccccgctgacctcggctgagagagagctccagcagatccgcattaacgaggtgaagacagagatcagtgtggaaagcaagcaccagaccctgcagggcctcgccttccccctgcagcctgaggcccagcgggcactccagcagctcaagcagaaaatggtcaactacatccagatgaagctggacctagagcgggaaaccattgagctggtgcacacagagcccacggatgtggcccagctgccctcccgggtgccccgagatgctgcccgctaccacttcttcctctacaagcacacccatgagggcgacccccttgagtctgtagtgttcatctactccatgccggggtacaagtgcagcatcaaggagcgaatgctctactccagctgcaagagccgcctcctcgactccgtggagcaggacttccatctggagatcgccaagaaaattgagattggcgatggggcagagctgacggcagagttcctctacgacgaggtgcaccccaagcaacacgccttcaagcaggccttcgccaagcccaagggcccagggggcaagcggggccataagcgcctcatccgcggcccgggtgaaaatggggatgacagctaggaggctggagcagggccggccacgtgtggactgtggggctgcccaccttccgctccctgccaccatcctccttcctgggctccaggaaagtgtttctgggaggtcaggagggctggcagctgaacgcacttgcagcgtccgagggccaccgggctggcattttgtgacccttccctgttgctgtccctgcatctcgtctgtgtgcccagggtgtccggggaccctgcctggctggcttaagggggctgggtcaggggcctggcatgaacctggcctcccggggagctgagactagggtcccagcacagcccagaaacctttggccacaagaagtggggtcagtcagggctggggcaggggtcactgcagtttgggatggttgaatgctgtattttctaaagaataaaatatttttaaatcaaaaaaaaaa

SEQ ID NO: 2589 - DNA, 1869 bp, Homo sapiens
cccacgcgtccgctctggcgcctggttccgcgcgccggagcgcgctagccgcattgcgagccgaacccgggagctggcgccatggtgctgttgcacgtgctgtttgagcacgcggtcggctacgcgctgctggcgctgaaggaagtggaggagatcagtctgctgcagccgcaggtggaggagtccgtgctcaacctgggcaaattccacagcatcgttcgtctggtggccttttgtccctttgcctcatcccaggttgccttggaaaatgccaacgccgtgtctgaaggggttgttcatgaggacctccgcctgctcttggagacccacctgccgtccaaaaagaagaaagtactcttgggagttggggatcccaagattggtgccgcaatacaggaggagttagggtacaactgccagactggaggagtcatagctgagatcctgcgaggagttcgtctgcacttccacaatctggtgaagggtctgaccgatctgtcagcttgtaaagcacagctggggctgggacacagctattcccgtgccaaagttaagtttaatgtgaaccgggtggacaatatgatcatccagtccattagcctcctggaccagctggataaggacatcaataccttctctatgcgtgtcagggagtggtacgggtatcactttccggagctggtgaagatcatcaacgacaatgccacatactgccgtcttgcccagtttattggaaaccgaagggaactgaatgaggacaagctggagaagctggaggagctgacaatggatggggccaaggctaaggctattctggatgcctcacggtcctccatgggcatggacatatctgccattgacttgataaacatcgagagcttctccagtcgtgtggtgtctttatctgaataccgccagagcctacacacttacctgcgctccaagatgagccaagtagcccccagcctgtcagccctaattggggaagcggtaggtgcacgtctcatcgcacatgctggcagcctcaccaacctggccaagtatccagcatccacagtgcagatccttggggctgaaaaggccctgttcagagccctgaagacaaggggtaacaccccaaaatatggactcattttccactccaccttcattggccgagcagctgccaagaacaaaggccgcatctcccgatacctggcaaacaaatgcagtattgcctcacgaatcgattgcttctctgaggtgcccacgagtgtattcggggagaagcttcgagaacaagttgaagagcgactgtccttctatgagactggagagataccacgaaagaatctggatgtcatgaaggaagcaatggttcaggcagaggcagaggaagcggctgctgagattactaggaagctggagaaacaggagaagaaacgcttaaagaaggaaaagaaacggctggctgcacttgccctcgcgtcttcagaaaacagcagtagtactccagaggagtgtgaggagacgagtgaaaaacccaaaaagaagaaaaagcaaaagccccaggaggttcctcaggagaatggaatggaagacccatctatctctttctccaaacccaagaaaaagaaatctttttccaaggaggagttgatgagtagcgatcttgaagagaccgctggcagcaccagtattcccaagaggaagaagtctacacccaaggaggaaacagttaatgaccctgaggaggcaggccacagaagtcggtccaagaaaaagaggaaattctccaaagaggagccggtcagcagtgggcctgaagaggcggttggcaagagcagctccaagaagaagaaaaagttccataaagcatcccaggaagat

SEQ ID NO: 2590 - DNA, 2310 bp, Homo sapiens
cccacgcgtccgcaaagatggcggcggcccctgcggctggagcgatctgggcaacggctgcggctaaagctgcagccgggcccacgggggggctgcacgggggtagtagggggtggccctgaactggggcctggccctggctggcctctcccgccgcctcactgggggacaggtactggggatacgatggctgattcgatagatctggttcctgccctcagtgcgtatactgctccccactttcgttgatgtggtagtggtgatgactgagccaaccacctaatgtggaaatgagaggacagcaagattgtgggtccagcctgtggtgtccacaatgccccaggcctctgagcaccgcctgggccgtacccgagagccacctgttaatatccagccccgagtgggatccaagctaccatttgcccccagggcccgcagcaaggagcgcagaaacccagcctctgggccaaaccccatgttacgacctctgcctccccggccaggtctgcctgatgaacggctcaagaaactggagctgggacggggacggacctcaggccctcgtcccagaggcccccttcgagcagatcatggggttcccctgcctggctcaccacccccaacagtggctttgcctctcccatctcggaccaacttagcccgttccaagtctgtgagcagtggggacttgcgtccaatggggattgccttgggagggcaccgtggcaccggagagcttggggctgcactgagccgcttggccctccggcctgagccacccactttgagacgtagcacttctctccgccgcctagggggctttcctggaccccctaccctgttcagcatacggacagagccccctgcttcccatggctccttccacatgatatccgcccggtcctctgagcctttctactctgatgacaagatggctcatcacacactccttctgggctctggtcatgttggccttcgaaacctgggaaacacgtgcttcctgaatgctgtgctgcagtgtctgagcagcactcgacctcttcgggacttctgtctgagaagggacttccggcaagaggtgcctggaggaggccgagcccaagagctcactgaagcctttgcagatgtgattggtgccctctggcaccctgactcctgcgaagctgtgaatcctactcgattccgagctgtcttccagaaatatgttccctccttctctggatacagccagcaggatgcccaagagttcctgaagctcctcatggagcggctacaccttgaaatcaaccgccgaggccgccgggctccaccgatacttgccaatggtccagttccctctccaccccgccgaggaggggctctgctagaagaacctgagttaagtgatgatgaccgagccaacctaatgtggaaacgttacctggagcgagaggacagcaagattgtggacctgtttgtgggccagttgaaaagttgtctcaagtgccaggcctgtgggtatcgctccacgaccttcgaggttttttgtgacctgtccctgcccatccccaagaaaggatttgctgggggcaaggtgtctctgcgggattgtttcaaccttttcactaaggaagaagagctagagtcggagaatgccccagtgtgtgaccgatgtcggcagaaaactcgaagtaccaaaaagttgacagtacaaagattccctcgaatcctcgtgctccatctgaatcgattttctgcctcccgaggctccatcaaaaaaagttcagtaggtgtagactttccactgcagcgactgagcctaggggactttgccagtgacaaagccggaagtcctgtataccagctgtatgccctttgcaaccactcaggcagcgtccactatggccactacacagccctgtgccggtgccagactggttggcatgtctacaatgactctcgtgtctcccctgtcagtgaaaaccaggtggcatccagcgagggctacgtgctgttctaccaactgatgcaggagccaccccggtgcctgtgacacctctaagctctggcacctgtgaagccctttaaacacccttaagccccaggctccccgtttacctcagagacgtctatttttgtgtctttttaatcggggaggggggagggggtggttgtagctccattattttttttattaaaaaatacccttccacctggaggctcccttgtctcccagccccatgtacaaagctcaccaagcccctgcccatgtacagcccccagaccctttgcaatatccctttttgtgaattaatttttttaaaaaaaaaa

SEQ ID NO: 2591 - DNA, 5054 bp, Homo sapiens
agggaattggacagcctggctgacttgccggagcggattaaaccaccatatgcaaacggactttcaacatcccatcttaggtcatcttctgtagaagatgttaaactaattataagcgaggggagacctaccatagaagttcgaagatgtagcatgccttctgtcatttgtgaacataccaaacaattccaaacaatatcagaagagagcaatcaaggtagcttattaactgtgccaggagatactagtccttctcccaaacctgaggtattctcaaatgtgcctgaaagagacctttcaaatgtatctaacatacattccagttttgcaacttctccaactggagcttcaaacagcaagtatgtttcagctgatagaaatctcatcaagaatactgccccagtgaacactgtaatggacagtccagtgcatttagagccatctagtcaggttggtgtgatccagaataaatcatgggagatgcctgttgatagactagagacattaagcaccagagactttatctgcccaaattctaacatacctgatcaagaatcctctcttcagagtttttgtaattctgaaaataaggtattgaaagaaaatgctgattttttatccctgcgccagactgaactgccaggaaactcttgtgctcaggatccggcatcctttatgcctccacagcagccttgctctttccccagccaatcactttcagatgctgaatcgatttctaaacatatgtctttgtcatatgttgctaatcaagagccaggtattttacaacaaaaaaatgcagttcagattattagttctgctttagatactgataatgaatctacaaaagatacagaaaatacttttgtcctaggagatgttcaaaaaacagatgcctttgtcccagtgtactctgacagcactattcaagaagcatcaccaaactttgagaaagcttatactttacctgtgttaccatcagaaaaggactttaatggaagtgatgcctctacccagctaaatacacattatgcatttagcaaactaacttacaagtcttccagtggccatgaagttgagaatagcacaactgatactcaggtcatttcacatgaaaaagaaaacaaactggagagtttggttttaactcatttgagtaggtgtgattctgatttatgtgaaatgaatgcagggatgccaaaaggaaacctaaatgaacaagatccaaaacattgtcctgaaagtgaaaagtgtttgctttccatagaagatgaggaatctcaacaaagcattttatcaagtctggaaaaccattcacagcagtcaactcaaccagaaatgcataaatatggtcagttagttaaagtagaattagaagaaaatgccgaagatgataaaactgaaaaccaaatccctcaaagaatgactagaaacaaagcaaatacaatggcaaatcaaagcaaacagattcttgctagctgtacactattatcagaaaaagacagtgaatcctcatctcctagaggaagaataagattaactgaagatgacgatcctcaaattcaccatccacggaaaaggaaagtgtcacgtgtacctcagcctgtgcaagtgagtccctctttactacaagcaaaagagaaaactcagcaatctctggcagccattgtagattctctaaaactagatgagattcagccatacagttcagagagagcaaatccatattttgaatacttgcacataaggaaaaaaatagaagaaaaacgcaaattactgtgtagtgtgattcctcaagcacctcagtactatgacgaatatgtaacatttaacggatcatatctcctggatggaaaccccttaagcaagatttgtattcccacaattacaccaccaccttcactgtcagatccacttaaagagctttttcgacaacaggaagttgtaaggatgaaactacgtttgcaacacagtattgaaagggaaaaactcattgtatccaacgaacaagaagttttgcgagttcattacagagctgcaagaacattggcaaatcaaacactgccatttagtgcttgtactgttttgctggatgccgaagtatacaatgtaccattggactctcagtctgatgacagtaaaacttctgtgagggatcgctttaatgcaagacaattcatgtcttggttacaagatgtggatgataaatttgacaaattaaagacctgtcttttaatgaggcaacaacatgaagctgcggctttaaatgctgtccagaggttagaatggcagctcaaactccaggaacttgatcctgccacctataaatctatcagcatttacgaaatccaggagttttatgttccccttgttgatgttaacgacgactttgaattgactcctatatagcagtcagtacttcctgatggtattgtcctaaactggtgatgctcaagcattatactgtggaatactgccttttgacaaaaatactcatgcctttacaattgttagtaaagttcgattatagttggttatgtagtaaacactgtcattttataaaaaatgagaattattttggatcttagatccaaacacagtttctaatagaaaactattatttatattgggaaaggtaactattgcattagagcatgttggcagactggtaggtatttaaaaagttgagaatctgctaacagcgctggaagttgttagcgctctaagtaataagataaccactagtattcaaatctctttcaggttttattaaaaaatatatatcaataaactaaaaggttcaattcctaccaaatagtttctaatgtgggagaaaaacttggcacaaaatttcttcagtttattatctgtaaattgtacagttttctttttgaaagttttaatattgtcttcctttttaataacttattttatacatattgtgcagatgtaaatcttgtaattaatggtcaaactggtataaagggattggtaagtcaaaacattgtacaaagaaataccctgtaaaactggttttgtctcatgttttattggaccaaaggttgtgggtttgtatgggagtgtagtaagtagtgtgtacaggtagaaaacttttaaatacagcatgcaggtgtttcagttagcttgttttcatcaccataactgcaaaggatgtggcttagttgtattgcatgcttcctataatttaactctccataattgatgcctgcagtagtgtaaggcatttcatactagtctcctctagtagacctgtgacttactgtgttggacatattatttagacttagtcatacaaagaaacttagctcttttttcatctcacagtaaagcctatttccccaggaaaaaaaataaatgcctttgaatgaaaattctgaaattgtaaatgtctattttaatattcacctatgacagaatctgtgaatatatgtaaatacgtttaataaattttattggtcatgttaaatcattgtaaaacttttttacattgcttaatgttttaagcttaatagcctttgcacttttaaaataaaaaccaagtatgcaaatcaaagatatttggtagtcaaaataagtaaaagaaatataggaatattccagtcaatctctgaaatgtttatgaaaaacaggttaatatgttgtatttttttccttgtatcaagatgcaaaacataatttgcaaaattttataattgaaataaaacttggtatgctgttttataataaattagcaatatactttaaaaaaaatccagtttctcctataacatgatgtaaattaaatattcaggaatatttcaggtctgaaatctgctgctgaacttgttagacatttttgaaaggaaaattaggttagcgtacaatttatcataaatatatgaggtaaaatttgcaaaactttccacagtactttcttgaattataatactgaatgttttctgttccgatagagaaaagtgaagcaaatatgtgaggaatgaagtgatctagtgcaagttggtaattccagctaatgggagagaatgtaaatgtgcaaaggtacatattaagcttagggatttttgaatttttacgtcagtttatattttaattcttactgtacttggcatgcgcaataaagcagcacatgtaaaaaaaaaaatacacagtgcaaggactttattataaaggttggatgtagttttccttaaaaatttaggtgagagattttggccttttttattggataaattgggccagaaaggcagggtagatttcgaagcactggttctgttgaagttaagtttattaagcctgggaacattaaaagctaatttataaaagcaatactttttaatatgaaaacttactgcaaagtttgtttatacttttgcctaaaaaggaaattggatgggatactgtggcaaatcataaaaaaccagataattgaactttgaagttatagaaaatcagagaggggtaagtttatagggcattttgttctgatggttcaaccagaggtctgggaaatagcactgttggcccaaacagaacaggcttttagaagataaaagcgacaagaaggaatctggtgaattttagtcatcccagctttttagtcttaaccacagttctcactctcttaaatggtacctcaaaaagctggagcctctctgccatgattatgcttctacaaatttcttttataaagagactcaaagctaatgatagcttaaaagaaaagttaatgccttctcattggaaatgtataatcaaataagtagttaagggcttttggtattaaagatattctgaagctctgaaatgctagaaaaaaatttggaatggagtatatgcctgaaaaggttttggattcagaaagaaaaaggatggttagtttaatcagtgattctttttaaactcttcaaatatcatgaacaagatactaaattgtacctaaggatttgtatttctttacaatttgttctaaatatctgtttaatgactagttgatatttgtgcatgttatttaataaagagttatatttttatag

SEQ ID NO: 2592 - DNA, 1615 bp, Homo sapiens
ctgattacgcttagcttggcacgacggggcgcgctggcccctggggacgccgagggcggctgcgacgcgccgagaggccgcggctctcccacctgtcaccctggcccttctctgcttggatggtgtcttcctctcctcagccgagaatgacttcgtccaccggatccaggaggaactggaccgctttctgctgcagaagcagctgtcaaaggttcttcttttccccccactctccagtcgcctccggtacctgatccatagaacagcagagaattttgatctcttgagcagcttctccgttggggagggctggaagaggaggacggtcatctgtcaccaggacatcagggtacccagttcggatggcctctctggcccctgccgcgctcctgcctcctgccccagcaggtaccacggtcctcggcccatctccaaccaaggagcagctgcggttccccgaggtgcccgggctggccggtggtatcgtggacgcaagcctgaccagcctttgtatgtgccccgggtgctgcgcaggcaggaagaatgggggctgacctctacctcggtgctcaagagagaggccccagctggcagggacccagaagagcctggagatgttggtgctggagaccccaactctgatcagggactccctgtgctgatgactcagggaacagaggacctaaagggcccaggacaaaggtgtgagaatgagccactgctggaccctgttggccctgagcctctggggcctgagagtcagtcagggaagggagacatggtggagatggccacacggtttgggtccaccctgcagctagacctggaaaaggggaaggagagtctgttggagaagaggctggtggcagaggaggaagaggacgaagaggaggtggaagaggatggccccagcagctgctcggaggacgattacagtgagctgctgcaggagatcacagacaacctgacgaagaaggagattcagatagagaagatccatttggacacgtcctccttcatggaggagctgcctggagagaaggaccttgcccacgtggtagagatctatgactttgaaccagcgctcaagacggaggacctgctggcaacgttttctgagttccaagagaaggggttcaggattcagtgggtggatgatactcacgcactcggcatctttccctgccgggcctcagctgcggaagccctgacccgggagttctcggtgctcaagatccggcccctcacgcagggaaccaagcagtcaaagctcaaagccttgcagaggccaaaactcctgcgtctggtgaaggagaggccacagacaaatgcgactgtggcccggcggctggtggcccgggccctgggactccaacacaaaaagaaagagcggcctgctgtccggggtccgctgccgccctgaggcctggagacccaactggcctggatctgcgtcccgacggtagctggcgcccccaacaccataagccttcacagacgccagagcagccccgcaccaccctcgagcttcaccatggggtgtggtgggctttagtttagtcccagaaatggagaaaaaataaaaactcacgttgttctaatgtgaaaaaaaaaa

SEQ ID NO: 2593 - DNA, 2056 bp, Homo sapiens
  misc_feature (1)...(2056): n = a,t,c or g
cggagctccaggtctcctcttcactactctgtgtcctgtgctcctacaggcccagcctctgtggccctgtgacctgcaggtattgggagatccacagctaagacaccaggacccctggaagcctagaaatgggaccattgcaatttagagatgtggccatagaattctctctggaggagtggcattgcctggacactgcacagcggaatctatataggaatgtgatgttagagaactacagtaacctggtcttccttggtattgttgtctctaagccagacctgatcgcccatctggagcaaggaaaaaaacctttgactatgaagagacatgagatggtagccaacccctcagggccagttatatgttctcattttgcccaagatctttggccagagcagaacataaaagattctttccaaaaagtgatactgagaagatatgaaaaacgtggacatggaaatttacagttaataaaaaggtgtgaaagtgtagatgagtgtaaggtgcacacaggaggttataatggacttaaccagtgtagtacaactacccagagcaaagtatttcaatgtgataaatatgggaaagtctttcataaattttcaaattcaaatagacataatataagacatactgaaaaaaaacctttcaaatgcatagaatgtggcaaagcttttaaccagttctcaacccttataacacataagaaaattcatactggagagaaaccctacatttgtgaagaatgtggcaaagcctttaagtactcctctgcccttaatacacataagagaattcatactggagagaaaccatacaagtgtgataaatgtgacaaagcctttattgcatcctcaacccttagtaaacatgagatcattcatactggaaagaaaccctacaagtgtgaagaatgtggcaaagcttttaaccaatcctcgacacttactaaacataagaaaattcatactggagagaaaccctacaaatgtgaagaatgtggcaaagcttttaaccaatcctcaacacttactaaacataagaaaattcatactggagagaagccctacgtttgtgaagaatgtggcaaagcctttaagtactcccgtatccttactacacataagagaattcatactggagagaaaccatacaagtgtaataaatgtggcaaagcctttattgcatcctcaacccttagtagacatgagttcattcatatgggaaagaaacattacaaatgtgaagaatgtggcaaagccttcatttggtcctcagtcctaactagacataagagagttcatactggagagaagccctacaaatgtgaagaatgtggcaaagcctttaagtactcctctacccttagttcacataagagaagtcatactggagagaaaccctacaaatgtgaagaatgtggcaaagcctttgttgcatcctcaacccttagtaaacatgagatcattcatactggaaagaaaccctacaagtgtgaagaatgtggcaaagcttttaaccagtcctcatcccttactaaacataagaaaattcatactggagagaaaccctacaaatgtgaagaatgtggcaaagcttttaaccagtcctcttcccttactaaacataagaaaattcatactggagagaaaccctacaaatgtgaagaatgtggcaaagcttttaaccagtcctcaacccttattaaacataagaaaattcatactagagagaaaccctacaaatgtgaagaatgtggcaaagcttttcacctatccacacaccttactacacataagatacttcatactggagagaaaccttatagatgtagagaatgtggcaaagcttttaaccattctgcaaccctttcttcacataagaaaatccattctggagagaaaccatacgagtgtgataaatgtggcaaagcctttatttcaccctcaagccttagtagacatgagataattcatactggggagaaaccctagaagtgtgaagaatgtngcaaagcttcaagtggtcctcacaccttactatacactgagag

SEQ ID NO: 2594 - DNA, 1725 bp, Homo sapiens
agaataaactttttatttctacaagattaatttctctatagtgacccagacttaggtgagggtagttaatttagtgtaaaatatatgtataaatgtaaacaaataaacgtatgtacatatatatctgtctataaatcatctcaactcttataacatagtactgtgatatcatccagtaattgtattgtatttcaaagaagtatggtcaccgagtgaaaagaaaaaggttaggagttgttgtcttaaatgtattactaattcccagatattcttttgaacctatgaatactgatgatttttctccatgcaagaatatttttcagttaccatcatatttttgaaaacaatgtaacatttataccagccaaatcaaatgtaataatcaacataacatatacaaactctagtaaaatgtattttatttagttgtaatatccatctctaattgtttcgaaataaaaatttccatggtcttaacttgaactgtatgttactttcttttagaatatcctttttttcattaaaataatttctaaaccactctatgtgttcaaccttctgtttaacactaagatatgggtttttggaaaggccacaagtcaccagctccatgaagtggcgaattggtccttgttttggaaagctctccaggtgtttctccagaaatatatgttcatgaaattctgaaccatcatcatcaaaacctgcttcattgttaattgggaactcccatagtttcccctcttttgtccactggatcagctcttcaaatccattctgaaggggttgttcatttactgtggctaactgcttagcaaattccacatcccaaagtgaaggtgatgtgtctgtttcaggtgcttctttagtaactgccatcatgtcaaaaatattaagtcttttccctgtgaatatatttttcctttttttaagatcatcggtcttctcctggccaggataattgtcatagccttcatcaaactgaatccgaagctctggtcttgaacgaactctagctgtagcagatctggcaactttcatatctgatattatgttactgaaactaattttaggtcgctttgcatctctctgtgcccttgactcttcctcatgctgctggagctggctcagcagctctgacttggttgtttgcttatcaaaagggagagaatctgccacagcagatgcagctgccaccaactcaggactcaggggctcaattctcttctttggagcatattctgtagctcttcgaagcctgccaagtgtagcttccaaacttttaagtggtcttcttttggggggctttgttgttcgtacatttactgtgcttaattcaactttcatgcccttaataatgcctaacaagtcttttttcgtattttccttttcactgtcttggctctctgaagtctccttggaagtctcctcagttcgaacagactgcttatctttcttgctacagatcacactgttagtgccaaaatatctttggatgttattttttgtccgggccaacagcgctgaactgcggtacctgactgttccgtgccgaacagtgagtagcataatcgcagccgctgatgtctccgggcttccagaggacaaagggtggcgggaaagggggcgaagaggtaggaacgtcgagactctaggaaacatcgccgagacacgaaatgaaccaagaacacaactgaaatggtgcgtcccgcgtcgacgcggccg

SEQ ID NO: 2595 - DNA, 1725 bp, Homo sapiens; identical to SEQ ID NO: 2594

SEQ ID NO: 2596 - DNA, 3720 bp, Homo sapiens
acccaaagcccccggggataaaatttttataaatcaaaccccggaaacaaaactttccaaccgccaggatatgcaggttgttttaccccttttaccctttaaaatttttttttttccctaaagcctttaatttttgtagggaggttggcccaatatgtcccccccccaaaataagggttctttcccaaaattcccaggtaggtttttattcggccccctataaggaaaaaacttttaccttgccagcccgggtaaactttgggccccccaaggattctttaaaacggcccccccttttttttttttttgaagtaattatttaatgacacaggaaaataacatgttatgaaacaagctggttacaagtagtaggtagatgacttaatttttgataaaaaaattaaaaagcatgaacatgcatataaaaattagattatgtacaaaataccaacagtatttacttctgctcagtaattaaatattcttccctttgtttttggtctttttaaaaaaacattatttcctgaaaaaaaaaaatccagaaaaacatggatcgtgggagaggaattatttaaacacccgggggaattaggggaccccaggaaggctaaggccgggggggctcaggcaggtcaagggttggaagtctcaggaacaggtcccgacccagggtgatggtgggccaagcccaggaattgggaaggattgttcttttcttttcctactgggaatgttctttaccagttttctctatattcgatgttagcacacttatttaatgggatccccatgattaactgggcacaacagcaaaatgatgcctagcaactttggcctttgaactgcctacaaaatgtactatcttgtagttatatactgtaacaaaacacactagaaatcaagtgctcctacaacgaaaaactcatctgactaaatcactgattttgctgtttttttttctaactttgttccattttcaatcttcacagcaaatgtattttttgtttcagggcctggaagaggtatttttttctcagaaagaagctaacattaatgtgtgctgggcaccgtctgacagcttggctctaactccaagtaagttgcccttgtcttctaagtactctacagagtgcaaaggcttaccaaatccaaaccaccttgaattaaacaaatctaaaataacctgagactcttttctgcaccaccaccagctgcccagtacactaggtcaccttttacagcagtgagcacagcaatccatgccacaaaaatcttcacaaaacaagaaggaaagatacaaaaagaattatattaaaatggtaacatacacttgtatgagggagggatatttaaaattaaaatattatcatcacaagaaacaccagatattccttgctctgcccttgggcaaccaagaaacttaaagcctgttttatatcccagaaataaaagagagacgtgatagaagtaacagtgctcagtgcttgcaacccaagtcaatttatactcttgttaggtaagtccaaattctaaagtctacaaaaatcctgttaaatcaaggggaaaaaaaattcattttaggacaaagttattcaagatgaaaggaaggcatgtgttcagtgagagaactgcctgctgtcagatgatttcttgctaatgtgtttaaagattttggatttctcaactttcttggttttctggtagccaaatccaccaccacctcctcgctttttctgcttgccttcattactgttgacgttcagatcaacgaagggaggcaccttgaaaccaaatgacagagcaacctgaggcaaatttaggttattaacattaaagatctgtttcagagaatgggaatcataggctcgtatgtatgacttatatgcttcctgggctgacttatgaagaaagtaattcttttcaatcaatttctcaagctgagactgaatgtcagaaattttagaccaggaaaagtcaaattcacttaatggaaccttggattgtttcaagtaacgaagaaaacccaattcttctgggcgcaaaatgagcaaggcatgccctctcccatttaggcctctggctgttctacccacacgatgaatatattccttagggtcatccggagggtcatactgaacaatccagtcgacttcaggaatgtctagtcctctcgctgccacatccgtacacaatagtgttcccgaatctgcattgcagaactggaagaatgtggttgtacgcttattttgcttttgctttccatgaatggccaagacgggcaaatcaatgtagttcagcaactcatagtggtatttcacagacatacaagatgaaaagaagaccataagcttcttctttcggttcttcttaaggaatgtaaagagcagaaggaatctcttttcagaaggacaaacaacatatccctgttcaagaccatccactgttgcattcgctttatcatcatcaacgccaacatacaatggctcctttttcagagaaatccttgccaggtcttcaacttttcgagtttgggtggcagaaaagagcatagtctgtctacgtgttggcaaaagtttaataatttgctttaattcctcttcaaaccccacatccaagatacgatcagcttcatcaataaccagacactgcaggtttttatacataaatcctggggtattctgcatatggtccagcagacggcctggtgtggccacaatgatgttgatcccattaccaagtttctgtgcttcagcagatctgttactgccacccattatcaagccataggtatgcacgtggtgagtcatcagctccttaagaacaccaaaggtttgcatggctagttctctagtaggtgagagaataaggactcctgttccattcctgggcatgaaccttaacttaacaatgagttcaactgcagggatgagaaaagccagggttttaccactgcctgtttttgcagctgctagaagatccctgccttccagaagtggtctgatacttttatgctgaatttcagtcatgtttgtaaaacccatttcttttattgccttcagagtgttttcattgacaagattacatagagaagcaaacgaagtatcctcaaaagctcctgtcagtcccaggggcagactgggcacctcactctcatcttcatcattatctggcttctccacattattttctgtttctttagtagtctcggcactttcttcttcagatttccctttgttttcagtttttgcttttttcgtatcaggctcagcatcattcaccatttttctctttttcttctttttcttttttgattctgaattggaagactgcattgctgcttctccattggttaatacagtggatttctggggagactttgtaacttttatatttcccactgcttcttgagacatgcctccattttgagtttctgataagcccacattcatgggcttttgttttgattttttaacctttctacttcccattgtttcttcagatacatctccattttgagtttccgatagggtcagatttgaggccccctgaaactttaggttccgctgccgcaatttgaggttccgcttctcgatcttcttacgcaggagtttcatcggcaggtgtgacattctgcccaacaagtgcctagaataaggcgccacacagtacagctactcagttctcaggctgacagttacttcccttccgccgcacgtggtc

SEQ ID NO: 2597 - DNA, 662 bp, Homo sapiens
gtttcttaaaagacaaatctgactgtgtaggtgcatttgtataaaaaatataactccccattgcctctgggataaagtcttatctcagtttacatatattcttgataacctctccaactttatgtctcaccacccccactcacttcgtaattcgtgccttatcagaatggacctgttatactggcagttcaccatatataccattacattttgtttctcccatctctcaggtagacttacactttcggcccagcacatcagtcatcgcccttgcttgctttcctattcactcctgttctggaaggtgcaccaccttttcttggaaggcttcccttgctctcccaggctagatgagatgtccttccatcagttcccacagcaccctgtgcatgtatctgttgtgcacttaccaatagtatacaagggatctatgacccaagtctctccccactagcttgtaagctcctcacagacaggaaccatgttttgtctttgtactccagtgcctagtatataagagatactcaataaataaatatttgtcaaatcaactaattgattccttgtgacctaattctagagaatgggaagaaggcctgttattttgttggcctttatgggtctttaggaaagctctccaagcttggcatttgtcagggtgg

SEQ ID NO: 2598 - DNA, 1218 bp, Homo sapiens
gcacgaggggctgtgggaataagatggcggggaagaagaatgttctgtcgtctctcgcagtttacgcggaagattcagagcccgagtctgatggcgaggctggaatcgaggcggtgggcagcgcggctgaggagaaaggcggattggtatctgatgcctatggggaggatgacttttctcgtctagggggtgatgaagatggttatgaagaagaagaagatgagaacagtagacagtcggaagatgacgattcagagactgaaaaacctgaggctgatgacccaaaggataatacagaagcagaaaagcgagacccccaggaactcgtggcctccttttctgaaagagttcggaacatgtcgcctgatgaaatcaagatcccgccagaaccccctggcagatgttcaaatcacttgcaagacaagatccagaagctttatgaacgaaagataaaggagggaatggatatgaactacattatccaaaggaagaaagaatttcggaaccctagcatctacgagaagctgatccagttctgtgccattgacgagcttggcaccaactacccaaaggatatgtttgatccccatggctggtctgaggactcctactatgaggcattagccaaggcccagaaaattgagatggacaaattggaaaaggccaaaaaggagcgaacaaaaattgagtttgtgacgggcaccaaaaaaggcaccacgaccaacgccacgtccaccaccactaccactgccagcacagctgttgcagatgctcagaagagaaagagcaagtgggattcggctatcccagtgacaacgatagcccagcccaccatcctcaccaccacagccaccctgccagctgttgtcacggtcaccaccagcgccagcggctccaagaccaccgtcatctctgctgtgggcaccattgtgaagaaggccaagcagtgacctgaggggccacccctagggatttgaaaggaccgtgcagcccagtgacccactgcccagtgggaggcgccactttgtatatttcaggactgggacctactccccaagatgccacctgagaggagcttctgtttggcattccagatggaaggacaggcagcacgggagccaggcgctgtggacagggtctgtccacgcaccacctggggtctgccgcctattaaaagtgccgtattcttacctcttggcatctcagatgcaaaaaaaa

SEQ ID NO: 2599 - DNA, 1218 bp, Homo sapiens; identical to SEQ ID NO: 2598

SEQ ID NO: 2600 - DNA, 1139 bp, Homo sapiens
ttcccgggtcgacgatttcgtccagggcggacaggctgggcgcacccgtgctcgcgcaccccaagatggctgagaggcaggaagagcagagagggagcccgcccttgagggcggaaggcaaggccgacgcggaggttaagctcattctgtaccattggacgcattccttcagctctcaaaaggtgcgcttggtaattgctgaaaaggcattgaagtgcgaggaacatgatgtaagtctgcccttgagtgagcacaatgagccttggtttatgcgtttgaactcaactggagaagtgcctgtccttatccacggggaaaacataatttgtgaggccactcagatcattgattatcttgaacagactttcctggatgaaagaacacccaggttaatgcctgataaagaaagcatgtattacccacgggtacaacattaccgagagctgcttgactccttgccaatggatgcctatacacatggctgcattttacatcctgagttaactgtggactccatgatcccggcttatgcaactacaaggattcgtagccaaattggaaacacagagtctgagctgaagaaacttgctgaagaaaacccagatttacaagaagcatacattgcaaaacagaaacgacttaaatcaaagctgcttgatcatgacaatgtcaagtatttgaagaaaattcttgatgagttggagaaagtcttggatcaggttgaaactgaattgccaagaagaaatgaagaaaccccagaagagggccagcaaccttggctctgcggtgaatccttcaccctggcagacgtctcactcgctgtcacattgcatcgactgaagttcctggggtttgcaaggagaaactggggaaacggaaagcgaccaaacttggaaacctattacgagcgtgtcttgaagagaaaaacatttaacaaggttttaggacatgtcaacaatatattaatctctgcagtgctgccaacagcattccgggtggccaagaaaagggccccaaaagttcttggcacgacccttgtggttggtttgcttgcaggagtgggatattttgcttttatgcttttcagaaagagacttggcagcatgatattagcacttagacccagaccaaattatttc

SEQ ID NO: 2601 - DNA, 3616 bp, Homo sapiens
cgccggcactcgcccggctcgcccgctttcgcacccagttcacgcgccacagctatatgtccccgagccgcgcgggcgcccgcgacgctactcctcgccctgggcgcggtgctgtggcctgcggctggcgcctgggagcttacgattttgcacaccaacgacgtgcacagccggctggagcagaccagcgaggactccagcaagtgcgtcaacgccagccgctgcatgggtggcgtggctcggctcttcaccaaggttcagcagatccgccgcgccgaacccaacgtgctgctgctggacgccggcgaccagtaccagggcactatctggttcaccgtgtacaagggcgccgaggtggcgcacttcatgaacgccctgcgctacgatgccatggcactgggaaatcatgaatttgataatggtgtggaaggactgatcgagccactcctcaaagaggccaaatttccaattctgagtgcaaacattaaagcaaaggggccactagcatctcaaatatcaggactttatttgccatataaagttcttcctgttggtgatgaagttgtgggaatcgttggatacacttccaaagaaaccccttttctctcaaatccagggacaaatttagtgtttgaagatgaaatcactgcattacaacctgaagtagataagttaaaaactctaaatgtgaacaaaattattgcactgggacattcgggttttgaaatggataaactcatcgctcagaaagtgaggggtgtggacgtcgtggtgggaggacactccaacacatttctttacacaggcaatccaccttccaaagaggtgcctgctgggaagtacccattcatagtcacttctgatgatgggcggaaggttcctgtagtccaggcctatgcttttggcaaatacctaggctatctgaagatcgagtttgatgaaagaggaaacgtcatctcttcccatggaaatcccattcttctaaacagcagcattcctgaagatccaagcataaaagcagacattaacaaatggaggataaaattggataattattctacccaggaattagggaaaacaattgtctatctggatggctcctctcaatcatgccgctttagagaatgcaacatgggcaacctgatttgtgatgcaatgattaacaacaacctgagacacacggatgaaatgttctggaaccacgtatccatgtgcattttaaatggaggtggtatccggtcgcccattgatgaacgcaacaatggcacaattacctgggagaacctggctgctgtattgccctttggaggcacatttgacctagtccagttaaaaggttccaccctgaagaaggcctttgagcatagcgtgcaccgctacggccagtccactggagagttcctgcaggtgggcggaatccatgtggtgtatgatctttcccgaaaacctggagacagagtagtcaaattagatgttctttgcaccaagtgtcgagtgcccagttatgaccctctcaaaatggacgaggtatataaggtgatcctcccaaacttcctggccaatggtggagatgggttccagatgataaaagatgaattattaagacatgactctggtgaccaagatatcaacgtggtttctacatatatctccaaaatgaaagtaatttatccagcagttgaaggtcggatcaagttttccacaggaagtcactgccatggaagcttttctttaatatttctttcactttgggcagtgatctttgttttataccaatagccaaaaattctccttgcctttaatgtgtgaaactgcattttttcaagtgagattcaaatctgccttttaggacctggctttgtgacagcaaaaacccatctttacaggctcctagaagctgaaggttagagcattataaaatgaagagacagacatgattactcagggtcagcaacctagtgagttaggaaaaaaaattaacataggggccctattaagggggaaagccaactatgtttaagtttacgtgtccaaattttaatggaaattttttactaacaattttaaaccatatttttcttccttcatatccatttctaatccatcaaacagcttatgtttacataaaattttatcattcacaaggaagttttaagcacactgtctcatttgatatccacaacttatttttggtaggaaagagagatgtttttcccacctgtcagatgaaaaaactgaagctcaaaaagggttgacttgaccatacagctaatgctgacagatccaagacctagacctaggtcttttgaactcaagtccagcattctcaactatatcaagttactgttcagaatacttaatatctcctctcttcataattatcaatagccccaagctcatggatgacaaatctctgctttatttcttgtctctattttttcactttatagctcctgttataataggcaagtttaatgggtataaacacagggatacccatcctctcttggcaagcacccatgtggcctttggatgaggtcagggtggcaaggctgtagtagataatgagaaaggccagaggctgcaaaagacagtccaaaggacacgagagaaaggaaggggaagaacaggactccaggactgttttatattatagaaaagcaagagctaaagagcatttacacatgttaaacagatacttgttaagcatagtgcctgacacacggcattagctgttattttatgagattccatcagctctgcctctgtcctctttcttctaacatgaaggtatcatgagaagagaaccttctaacataagctgtaattctaaacctgcacttgtccctctccagcaagaggctagcactgaattcattctactcatactacacacccagttatggaatgtccagagttctcgaagaaaataaatgactttaggaagaggtatacattttttaagtcgctctgcctccaaatctgaacagtccctgtaaatcattcttaagcccaagatatgagaacttcgctggaaaagtgggaccctctgagtggggggtccagaaattccccatgctgatggaattgccctatgccccaagggacccaattccttaaccgtgggggagtggaccccaccatggggccctgctccagctctgccataggtaattccaggaaatggggaggcttccacccttaaaaaccagtgtgccaaatggccagctagaggtttggatagggaagtatggtttggttccctagtgtttaccaaatattaagtactcttgatacaaaatatacttttaaacttcataacctttttataaaagttgttgcagcaaaataatagcctcggttctatgcatatatggattagctataaaaaatgtcaataagattgtacaaggaaaattagagaaaggcacatttagggtttattttttacacttggccagtaaaatagggtaaatcctattagaattttttaaagaactttttttaagtttcctaaatctgtgtgtgtattgtgaagtggtataagaaatgactttgaaccactttgcaattgtagattcccaacaataaaattgaagataagctcaaaaaaaaa

SEQ ID NO: 2602 - DNA, 1566 bp, Homo sapiens
ttttttttttttgcggtgaactacagaatttattaaataagaaagctatcaattcggaacaggaggaaaaaaaagttttaaaaaaaatctataggaaaatagtcaaaaaagcatttagtgctcatcgccgtccctctgaggggggccgtcagaaaggcaactgggacctgacagacccgggcacatacttgaaattcctgaattctaacctgcattgtacaaaatgccacttgaaacgtccaccagaacccccagccaaagaggcacatctggacagcttcacagcacggaacgtgtgaccttggtccccgtgggtcccggaggaggacagcagcagccacgcggtggcccctgcgcactcaggccatgactgcagggaccacccactggggccacaagagtgacccgggagccagagggagccctgagcatcggcggaaggcacaggtccctgcccggggtggccatctcagaggcacatttagtgtttgttctacttatgaaatcaaggacaaccaattgtacttatcttacaactgatgttctgggatgggactggaaaacattgattccagaaccactctttttcttaaaatcactggcttttatgacaatgtcttccaagagctcattagaatctataagatcgcaggaatttcgccaagaagggctgcatagaaaccacagagacaactcggccagggctgctcccattgtggtggccaagaactggctgagggcacgacactggactcttgcgatcaacactttactctgggtgaagactgcatatttaaggacacaactgcacatttagatcgagcggtggtgacctcagggtatacacggagcttcatgctgagaacacccaggggtcctcaagagtcttcctcctcgtctttaacttcagaaattctgtctatagatttaaggatttcggcaacaagattcagtgtctcagctccggaaaccagttgctcgatggaagcctgtgcactgttcatgaccacccggaggttctgcagggccacgtcggcgttctgcttcaccacggtcaggctggcaccctggccgcaccgcagggcttcattctctcgctggaagttggagacctgcgcctggagcaaactgatttcctgttttagtttcacgacgtggttttctgcctttacagcccgtttggtcatcagctccaggttctgctccacctgctgaaccaccgactccaggtcgtggtagtcgctttcctccttgatcatttttgcttctaacttccgctcaagcgtcctcaccatttctgtttgagcttcagagaagctctgaacctcattcagctttcttctcagcttagaattttcatctttcagctgtggagagagaacatccttattagaaagtcagcatgtctggctcaaaagggcgtgtgcttctgcggtgtggctccagagcctcctgataagcagagatgctgggtcagtgcagcatccacctgcagccactacagagggagaccacagacggaggcaggcacttttcaaagacctgtggtcacagatgccagttaat

SEQ ID NO: 2603 - DNA, 3280 bp, Homo sapiens
cctgaggcgagtctgggctcagcctagagctctccggcggcggcgcagcttcagggcagcgcgggctgcagcggcggcggcggttagggctgtgtagggcgaggcctcccccttcctcctcgccatcctactcctccctcctcgtcatcctcccccttcgtcctcctcgccttcctcctcctcgtcaggctcgacccagctgtgagcggcaagatggcggcgcccaggccgccgcctgccaggctgtcgggcgtcatggtgccggcgcccatccaagacctggaggccctgcgcgcgctcacggcgctcttcaaagagcagcggaaccgagaaacagcacccaggactatcttccaaagagttctggatatcctaaagaaatcttctcatgctgttgagcttgcctgcagagatccatcccaagtggaaaacctggcttccagtctgcagttaataacagaatgcttcaggtgtcttcgcaatgcttgcatagagtgttctgtgaaccagaattcaatcaggaacttggatacgattggtgttgctgttgatttgattcttctgtttcgtgaactgcgagtggaacaggaatctctgttgacagcttttcgctgtggcctgcagtttttaggcaacattgcctcacggaatgaagattcccagtctattgtttgggtgcatgctttcccagaactgtttttgtcttgcttaaatcatccggacaaaaaaattgttgcctactcttcaatgattttgtttacatcccttaatcatgaaagaatgaaagaactggaggagaacctcaatattgcaattgatgtcatagatgcttaccaaaaacatcctgaatcagaatggccgttcttgattattacagacctctttctgaaaagcccggaattggtacaagccatgtttcccaaactgaacaatcaagaaagagttacactgttagaccttatgatagccaagataacgagtgatgagccactcaccaaggatgacatccctgtgtttttgcggcatgctgagttgattgcaagcacctttgtggatcagtgcaagactgtgctcaagctggcctctgaggagcctcctgatgatgaggaggcactggctacaattaggcttctcgacgtcctgtgcgaaatgactgtgaatactgagctgctcggctatctgcaggttttccctggcttgctggaaagagtgattgatcttttgcgggtgattcatgtagctggaaaagaaaccacaaacatcttcagtaattgtggttgcgtgagagcagaaggtgacatctccaatgtggccaatgggtttaagtctcatctcattcgtctgattggaaatctgtgttacaagaataaagataaccaagacaaggtaaatgagctggatggtatcccgttgatcctggacaactgcaacatcagtgacagtaacccctttctgacccagtgggtgatatatgccatccgaaaccttaccgaagacaacagccaaaaccaagatttgattgcaaagatggaggaacaggggctggcagatgcatccctacttaaaaaagtgggttttgaagttgaaaagaaaggcgaaaagctgatcctgaaatctactagagacacccctaagccatgaatgaactacatccaaatacctgaatttttggaatctgtttcatggatttttcatcttctaccgtatgtgaaattgcaagtgtttgaagatttataagtacaaatttgggaacatacaaatcttttaggtagtagagtttaacgtgtataagctaaaagtgaaagtaactgagtgttctcttgtttctttgcattaatgtaactgtgtggtttgcctttgtccccctggatagaacgtgcatttaaagaatatattgtacttactgtgacagcagataataaaccagtctcttggagggcacaacccttatttgacaaaacttggatgttggcttgactgtgtttgtcccttcagatggcaagtcagcatcattctttatattcctcttctcattgggttttctgaactctggcaggccggttgaagtagtttctcactgtgattaattctagcaatctcttttcacccctctgcctttccaaaacattgacaagactcatttccagttaattaattcgagaaccctccctcttcattttgggtactgggctgtcttgtcactgagccctatccctttggaatgtggcagggagtgaggttggtgagagaacatgtgggcacttaactcttcatgttccagttcatcccagaagtagacatcccaggacccattctgtgtcaaggtgaatgcctgtgtcctccccagcttcatgcctctgtcatgggggaaggaatagcttatgttctgctctggtgcagtgccgtagattaaaggtacatttctatcttctttgatttaaaaagcaccagtctcataaaggtgccactcagttttagccatgtcttcactgaaattgcaaaagtacttttagggagcaggagtttatttgacatctagttatctgtctgtctgttcatctatctatctgtctgctgtatgagaggtaggactggattaaatgaccactgaactcactgaatccagatcattcatatcatcaacaaaagctctagggggaggtcacgttgtgaatgcttaaaacatattattttcttcaacaaccatatcgctaaactaatatatccagagattttgcacaattcgtgttgaaccttccaaaacaaaaataaagacctgtccaaaagttttgacaaaaatactgattgctcccaaataaagtgcttctaagctttgtgtagacatagtttaactgatttgtaaaaatagcttaagcatgttgagaatgaagtaaaagttttcccatgtgctgtctaatgtactctgtgtaactctgaagacacatcagcttctaggattgcagcaatctatgaataacattttttctctcatttatgactttccatcagtaaagaagccattgcagaatttaaaattacacaaaggagtcattctctcctgggacataaagagttaaagctctgtcctctaaatagaagcctggccaaagggagaaaacagtgggagtcccttttcccttttaacaagtttgcaatagacacttctttttttcctgtctcaatggatgtgtgcacaccagtggaatcgcacaaacttgtcggtatgagctatataataacaaacacaaataaataaaagggagccttgtgagaatacaaa

SEQ ID NO: 2604 - DNA, 1856 bp, Homo sapiens
ctgatagccctcggaaccgcttcgaaatcctcggtagacccacgcgtacgcccacgcgtccgggcccgcgccccgccatggaggacctggatgccctgctctctgacctggagactaccacctcgcacatgccaaggtcaggggctcccaaagagcgccctgcggagcctctcacccctcccccatcctatggccaccagccacagacagggtctggggagtcttcaggagcctcgggggacaaggaccacctgtacagcacggtatgcaagcctcggtccccaaagcctgcagccccggcggcccctccattctcctcttccagcggtgtcttgggtaccgggctctgtgagctagatcggttgcttcaggaacttaatgccactcagttcaacatcacagatgaaatcatgtctcagttcccatctagcaaggtggcttcaggagagcagaaggaggaccagtctgaagataagaaaagacccagcctcccttccagcccgtctcctggcctcccaaaggcttctgccacctcagccactctggagctggatagactgatggcctcactctctgacttccgcgttcaaaaccatcttccagcctctgggccaactcagccaccggtggtgagctccacaaatgagggctccccatccccaccagagccgactggcaagggcagcctagacaccatgctggggctgctgcagtccgacctcagccgccggggtgttcccacccaggccaaaggcctctgtggctcctgcaataaacctattgctgggcaagtggtgacggctctgggccgcgcctggcaccccgagcacttcgtttgcggaggctgttccaccgccctgggaggcagcagcttcttcgagaaggatggagcccccttctgccccgagtgctactttgagcgcttctcgccaagatgtggcttctgcaaccagcccatccgacacaagatggtgaccgccttgggcactcactggcacccagagcatttctgctgcgtcagttgcggggagcccttcggagatgagggtttccacgagcgcgagggccgcccctactgccgccgggacttcctgcagctgttcgccccgcgctgccagggctgccagggccccatcctggataactacatctcggcgctcagcgcgctctggcacccggactgtttcgtctgcagggaatgcttcgcgcccttctcgggaggcagctttttcgagcacgagggccgcccgttgtgcgagaaccacttccacgcacgacgcggctcgctgtgcgccacgtgtggcctccctgtgaccggccgctgcgtgtcggccctgggtcgccgcttccacccggaccacttcacatgcaccttctgcctgcgcccgctcaccaaggggtccttccaggagcgcgccggcaagccctactgccagccctgcttcctgaagctcttcggctgacagcccgctcggctcgccgtctcccccggaggccgcgccctcccggaaaagccgggtcctccagaccccgagggccttgctctcagagcgggaggccccacccactggagagccccgcccctaaggtactatgagtcctcaggggtcaagttcagaaacggcccagccagacctaaacccacacgcccacaaagtggattgcacacagacaagaactcccgtgcgggcctccactctattcccacccttgagggagcccccttactgggggagggtccttgcaattccagcgaatcggaggccaggccaggacgtccttgctccctgcaccctcactgttctgtgcactttttctacctacataaacacacgcattccacctcaaaaaaaaaa

SEQ ID NO: 2605 - DNA, 7018 bp, Homo sapiens
ttttttttttttaatgagactgtgctattcactgttcttttaggaatctctggctccccacaaacactattttgtgaagacatgctccagaccactgtgtatgccaatatctctttctccccagagcactgctgacacccctacacaaattaatgtccccatctctactgatacatctgataggtacaaacgatgtgtccgtgatgactggtggggctcatgtaatccccacctaagaaaagtagaaagtgcaacttatcttttaggttaataagtgctgagagatggaggtttttccttctcattttgatggagatgcctagaaaacctcgcctgacactctttgtccaacgcaggatagagaacatagcaacagaaagggaatttgatccggaagaattttactacctattggaagcagcagaaggccatgccaaagaaggacagggtattaaaaccgacattcccaggtacatcattagccaactgggactcaataaggatcccttggaagaaatggctcatttgggaaactacgatagtgggacagcagaaacaccagaaacagatgaatcagtgagtagctctaatgcctccctgaaacttcgaaggaaacctcgggaaagtgattttgaaacgattaaattgattagcaatggagcctatggggcagtctactttgttcggcataaagaatcccggcagaggtttgccatgaagaagattaataaacagaacctcatccttcgaaaccagatccagcaggcctttgtggagcgggatatcctgacttttgcagaaaacccctttgttgtcagcatgtattgctcctttgaaacaaggcgccacttgtgcatggtcatggaatatgtggaagggggagactgtgctactttaatgaaaaacatgggtcctctccctgttgatatggccagaatgtactttgctgagacggtcttggccttggaatatttacataattatggaattgtacacagggatttgaaaccagacaacttgttggttacctccatggggcacataaagctgacagattttggattatctaaggtgggactaatgagcatgactaccaacctttacgagggtcatattgagaaggatgctagagagttcctggataaacaggtctgtggcacacctgaatacattgcaccagaagtgattctgaggcagggttatggaaagccggtggactggtgggccatggggattatcctctatgaatttctggttggatgcgtgccattctttggggatactccagaggagctatttggacaagtcatcagtgatgagatcaactggcctgagaaggatgaggcacccccacctgatgcccaggatctgattaccttactcctcaggcagaatcccctggagaggctgggaacaggtggtgcatatgaagtcaaacagcatcgattcttccgttctttagactggaacagtttgctgagacagaaggcagaatttattccccaactggaatctgaggatgacacaagttattttgatactcggtctgagaagtatcatcatatggaaacggaggaagaagatgacacaaatgatgaagactttaatgtggaaataaggcagttttcttcatgttcacacaggttttcaaaagttttcagcagtatagatcgaatcactcagaattcagcagaagagaaggaagactctgtggacaaaaccaaaagcaccaccttgccatccacagaaacactgagctggagttcagaatattctgaaatgcaacagctatcaacatccaactcttcagatactgaaagcaacagacataaactcagttctggcctacttcccaaactggctatttcaacagagggagagcaagatgaagctgcctcctgccctggagacccccatgaggagccaggaaagccagcccttcctcctgaagagtgtgcccaggaggagcctgaggtcaccaccccagccagcaccatcagcagctccaccctgtcagttggcagtttttcagagcacttggatcagataaatggacgaagcgagtgtgtggacagtacagataattcctcaaagccatccagtgaacccgcttctcacatggctcggcagcgattagaaagcacagaaaaaaagaaaatctcggggaaagtcacaaagtccctctctgccagtgctctttccctcatgatcccaggagatatgtttgctgtttcccctctgggaagtccaatgtctccccattccctgtcctcggacccttcttcttcacgagattcctctcccagccgagattcctcagcagcttctgccagtccacatcagccgattgtgatccacagttcggggaagaactacggctttaccatccgagccatccgggtgtatgtgggagacagtgacatctatacagtgcaccatatcgtctggaatgtagaagaaggaagtccggcatgccaggcaggactgaaggctggagatcttatcactcacatcaatggagaaccagtgcatggacttgtccacacagaagttatagaactcctactgaagagtgggaataaggtgtcaatcactactaccccatttgaaaacacatcaatcaaaactggaccagccaggagaaacagctataagagccggatggtgaggcggagcaagaaatccaagaagaaagaaagtctcgaaaggaggagatctcttttcaaaaagctagccaagcagccttctcctttactccacaccagccgaagtttctcctgcttgaacagatccctgtcatcgggtgagagcctcccaggttcccccactcatagcttgtctccccggtctccaacaccaagctaccgctccacccctgacttcccatctggtactaattcctcccagagcagctcccctagttctagtgcccccaattccccagcagggtccgggcacatccggcccagcactctccacggtcttgcacccaaactcggcgggcagcggtaccggtccggaaggcgaaagtccgccggcaacatcccactgtccccgctggcccggacgccctctccaaccccgcaacccacctccccgcagcggtcaccatcccctcttctgggacactcactgggcaattccaagatcgcgcaagcctttcccagcaagatgcactccccgcccaccatcgtcagacacatcgtgaggcccaagagtgcggagccccccaggtccccgctgctcaagcgcgtgcagtccgaggagaagctgtcgccctcttacggcagtgacaagaagcacctgtgctcccgcaagcacagcctggaggtgacccaagaggaggtgcagcgggagcagtcccagcgggaggcgccgctgcagagcctggatgagaacgtgtgcgacgtgccgccgctcagccgcgcccggccagtggagcaaggctgcctgaaacgcccagtctcccggaaggtgggccgccaggagtctgtggacgacctggaccgcgacaagctgaaggccaaggtggtggtgaagaaagcagacggcttcccagagaaacaggaatcccaccagaaattccatggacccgggagtgatttggaaaactttgctctgtttaagctggaagagagagagaagaaagtctatccgaaggctgtggaaaggtcaagtacttttgaaaacaaagcgtctatgcaggaggcgccaccgctgggcagcctgctgaaggatgctcttcacaagcaggccagcgtgcgcgccagcgagggtgcgatgtcggatggcccggtgcctgcggagcaccgccagggtggcggggacttcagacgggcccccgctcctggcaccctccaggatggtctctgccactccctcgacaggggcatctctgggaagggggaaggcacggagaagtcctcccaggccaaggagcttctccgatgtgaaaagttagacagcaagctggccaacatcgattacctccgaaagaaaatgtcacttgaggacaaagaggacaacctctgccctgtgctgaagcccaagatgacagctggctcccacgaatgcctgccagggaacccagtccgacccacgggtgggcagcaggagcccccgccggcttctgagagccgagcttttgtcagcagcacccatgcagctcagatgagtgccgtctcttttgttcccctcaaggccttaacaggccgggtggacagtggaacggagaagcctggcttggttgctcctgagtcccctgttaggaagagcccctccgagtataagctggaaggtaggtctgtctcatgcctggagccgatcgagggcactctggacattgctctcctgtccggacctcaggcctccaagacagaactgccttccccagagtctgcacagagccccagcccaagtggtgacgtgagggcctctgtgccaccagttctccccagcagcagtgggaaaaagaacgataccaccagtgcaagagagctttctccttccagcttaaagatgaataaatcctacctgctggagccttggttcctgccccccagccgaggtctccagaattcaccagcagtttccctgcctgacccagagttcaagagggacaggaaaggtccccatcctactgccaggagccctggaacagtcatggaaagcaatccccaacagagagagggcagctcccctaaacaccaagaccacaccactgaccccaagcttctgacctgcctggggcagaacctccacagccctgacctggccaggccacgctgcccgctcccacctgaagcttccccctcaagggagaagccaggcctgagggaatcgtctgaaagaggccctcccacagccagaagcgagcgctctgctgcgagggctgacacatgcagagagccctccatggaactgtgctttccagaaactgcgaaaaccagtgacaactccaaaaatctcctctctgtgggaaggacccacccagatttctatacacagacccaggccatggagaaagcatgggcgccgggtgggaaaacgaaccacaaagatggcccaggtgaggcgaggcccccgcccagagacaactcctctctgcactcagctggaattccctgtgagaaggagctgggcaaggtgaggcgtggcgtggaacccaagcccgaagcgcttcttgccaggcggtctctgcagccacctggaattgagagtgagaagagtgaaaagctctccagtttcccatctttgcagaaagatggtgccaaggaacctgaaaggaaggagcagcctctacaaaggcatcccagcagcatccctccgccccctctgacggccaaagacctgtccagcccggctgccaggcagcattgcagttccccaagccacgcttctggcagagagccgggggccaagcccagcactgcagagcccagctcgagcccccaggaccctcccaagcctgttgctgcgcacagtgaaagcagcagccacaagccccggcctggccctgacccgggccctccaaagactaagcaccccgaccggtccctctcctctcagaaaccaagtgtcggggccacaaagggcaaagagcctgccactcagtccctcggtggctctagcagagaggggaagggccacagtaagagtgggccggatgtgtttcctgctaccccaggctcccagaacaaagccagcgatgggattggccagggagaaggtgggccctctgtcccactgcacactgacagggctcctctagacgccaagccacaacccaccagtggtgggcggcccctggaggtgctggagaagcctgtgcatttgccaaggccgggacacccagggcctagtgagccagcggaccagaaactgtccgctgttggtgaaaagcaaaccctgtctccaaagcaccccaaaccatccactgtgaaagattgccccaccctgtgcaaacagacagacaacagacagacagacaaaagcccgagtcagccggccgccaacaccgacagaagggcggaagggaagaaatgcactgaagcactttatgctccagcagagggcgacaagctcgaggccggcctttcctttgtgcatagcgagaaccggttgaaaggcgcggagcggccagccgcgggggtggggaagggcttccctgaggccagagggaaagggcccggtccccagaagccaccgacggaggcagacaagcccaatggcatgaaacggtccccctcagccactgggcagagttctttccgatccacggccctcccggaaaagtctctgagctgctcctccagcttccctgaaaccagggccggagttagagaggcctctgcagccagcagcgacacctcttctgccaaggccgccgggggcatgctggagcttccagcccccagcaacagggaccataggaaggctcagcctgccggggagggccgaacccacatgacaaagagtgactccctgccctccttccgggtctccaccctgcctctggagtcacaccaccccgacccaaacaccatgggcggggccagccaccgggacagggctctctcggtgactgccaccgtaggggaaaccaaagggaaggaccctgccccagcccagcctcccccagctaggaaacagaacgtgggcagagacgtgaccaagccatccccagccccaaacactgaccgccccatctctctttctaatgagaaggactttgtggtacggcagaggcgggggaaagagagtttgcgtagcagccctcacaaaaaggccttgtaacggggagggcccaggggcaggactgtggagacccgtcctgaacgggcgactgtgtcttgactacctttcaaaaccagcactgtgtgggaatgtccgccaggcagagctcggagcctcattgagacaggggagagagaaagacaaagaggggaccttcttccagatgccttcccagttgtaaccggtaaaactgttaccagatagtgtttgtacaaaaaaaaaa

SEQ ID NO: 2606 - DNA, 1137 bp, Homo sapiens
cccgggcgaccacgcgtccgaaaaatgaagtccaggactatgtcagtgtagaatacctgtctccccacatgggtggaactgatcctttcaagtatagctatccaccactagtagatgatgacttccagaccccactgtgtgagaatgggcctattaccagtgaggatgaaacttcaagtaaagaagacatagaaagtgatggcaaagaaacattggaaacaatttctaatgaagaacaaacacctcttcttaaaaagattaacccaaccgaatctacttccaaagcagaagaaaatgaaaaagttgattcaaaagtgaaagctttcaagaaaccattgagtgtatttaaaggccccttactacacatcagcccagcagaagaactgtactttggaagtacagaatccggagagaagaaaaccttaatagtgttgacaaatgtaactaaaaatatagtggcatttaaggtgagaacaacagctccagaaaaatacagagtcaagccaagcaatagcagctgtgacccgggtgcatcagtggatatagttgtgtctccccatgggggtttaacagtctctgcccaagaccgttttctgataatggctgcagaaatggaacagtcatctggcacaggcccagcagaattaactcagttttggaaagaagttcccagaaacaaagtgatggaacataggttaagatgccatactgttgaaagcagtaaaccaaacactcttacgttaaaagacaatgctttcaatatgtcagataaaaccagtgaagatatatgtctacaactcagtcgtttactagaaagcaataggaagcttgaagaccaagttcagcgttgtatctggttccagcagctgctgctttccttaacaatgctcttgcttgcttttgtcacctctttcttctatttattgtacagttaaagaagtggtgccgggtaggaaccacggttccttcgtccattagttggaaaaagtaacagacctaaaactctaccaagctactaaaaacattgcacatctgtgcttcctaaaaggaaatatgcagcacgtggaggggaacacatacatgtcttgaaaataaactgctagaataaagaaatgctggagaaattgaaaaaaaaaa

SEQ ID NO: 2607 - DNA, 1001 bp, Homo sapiens
ccagggggcaacaggagcagcagctcttcttgcaggaggtgcatttgcactttttgcacttgcaggagccggcgcaggcgcaggagccaccagcctcgcaggagcagttggggtccattgcaagccgaggtgagactggagttcccaagcgagaagagaagaggcagtggaacacgtggagggcgtggagggagcacaggggtggccagcgtagggtccagcacgtggggtggtaccccaggcctgggtcagacagggacatggcaggggacacaggacagaggggtccccaactgccacctcacccaccggaattcatttagtagcaggcacaggggcagctccggcacggctttctcaggcctatgccggagcctcgagggctggagagcgggaagacaggcagtgctcggggagttgcagcaggacgtcaccaggagggcgaagcggccacgggaggggggccccgggacattgcgcagcaaggaggctgcaggggctcggcctgcgggcgccggtcccacgaggcactgcggcccagggtctggtgcggagagggcccacagtggacttggtgacgctgtatgccctcaccgctcagcccctggggctggcttggcagacagtacagcatccaggggagtcaagggcatggggcgagaccagactaggcgaggcgggcggggcggagtgaatgagctctcaggagggaggatggtgcaggcaggggtgaggagcgcagcgggcggcgagcgggaggcactggcctccagagcccgtggccaaggcgggcctcgcgggcggcgacggagccgggatcggtgcctcagcgttcgggctggagacgaggccaggtctccagctggggtggacgtgcccaccagctgccgaaggccaagacgccaggtccggtggacgtgacaagcaggacatgacatggtccggtgtgacggcgaggacagaggaggcgcgtccggccttcctgaacaccttatgctggt

SEQ ID NO: 2608 - DNA, 1856 bp, Homo sapiens
  misc_feature (1)...(1856): n = a,t,c or g
ccgcgctttttgcccgtgaagcgccggtgacgcttgagattggttttggcatgggggcgtcgctggtggcaatggctaaagatcgccctgagcaggacttcctcggcattgaagtgcattcaccgggcgttggtgcgtgcctggcttctgcgcatgaagaaggtttaagcaacctgcgcgtgatgtgtcacgatgcggttgaagtgctgcataaaatgattcctgacaattcattgcgcatggtgcagctctttttccctgacccgtggcacaaagcgcgccataataaacgccgtatcgttcaggtgccgtttgccgaactggtaaaaagcaaactgcagctggggggcgtattccatatggcgaccgactgggaaccttatgcggaacatatgcttgaagtgatgtcttctattgacggttataaaaacctgtcagagagcaatgattacgtaccgcgtccggcatcacgtccggtgacgaaatttgaacaacgtggtcatcgtcttggtcacggagtatgggacttaatgttcgagagggtgaaataatggcaaagaaccgtagccgtcgtctgcgtaaaaaaatgcacatcgacgaattccaggaattaggattttcggtggcatggcgattcccggaaggtacatcggaagaacagattgataaacccgttgatgattttattaacgaggttatcgacccgaacaaactggcctttgacggcagcggttatctggcctgggaaggtctgatctgcatgcaggaaatcggcaaatgcaccgaagaacatcaggcgattgtgcgtaagtggctggaagagcgcaaactggatgaggtacgcaccagcgaacttttcgacgtttggtgggactaagaaagcatacgggcgatgacaaatgcaaaactgcctgatgcgctacgcttatcaggcctggaaagatgcacgatcgagtaggcgggataaggtgtttacgccgcatccggcatggaaaacgcgtactttgttatcaatctggggccagcaaatgctggcctgattttttcttgagggaagactatgatgcgcaaaatgctgctggcggcagcactttcagtgacggcaatgaccgctcacgccgactaccagtgcagcgtcacgccgcgtgacgatgtgattgtcagcccgcaaaccgtgcaggtgaagggcgaaaacggcaatctggtgatcacgccagacggcaacgtgatgtataacggtaagcaatattccctgaatgccgcccagcgcgagcaggcgaaggattatcaggctgaactacgcagcacgctgccgtggattgatgaaggcgcgaaaagccgcgtcgagaaagcccgtattgctctggataaaattatcgttcaggagatgggcgaaagcagcaaaatgcgcagccgtctgaccaaacttgatgcgcaggtgaaagagcagatgaaccgcattattgaaacgcgcagcgatggcctgacgtttcactataaagccattgatcaggttcgcgccgaaggccagcaattagtgaatcaggcaatgggtggaattttacaggacagcattaatgaaatgggcgcgaaagcggtgctgaaaagcggcggtaacccattacagaatgtgctgggaagcctgggggggctgcaatcctcaatccaaaccgagtggaaaaagcaggaaaaagatttccagcagtttggcaaagatgtttgtagccgcgttgtgactctggaagatagccgcaaagccctggtcgggaatttaaaataatcctctattttaagacggcataatacttttttatgccgnttaattcttcgttttgttacctgcctctaactttgta

SEQ ID NO: 2609 - DNA, 1837 bp, Homo sapiens
gtttatcctttgaaaaagtagatattcagactgacaatgatttgacaaaggaaatgtatgaaggaaaagagaatgtatcatttgaacttcaaagagacttttcccaggaaacagacttttcagaagcctctcttctagagaaacaacaggaagtccactcagcaggaaatataaagaaggagaagagcaacaccattgatggaacagtgaaagatgagacaagccccgtggaggagtgtttttttagtcaaagttcaaactcatatcagtgtcataccatcactggagagcagccctctgggtgtacaggattggggaaatccatcagctttgatacaaaactcgtgaagcatgaaataattaattctgaggaaagacctttcaaatgtgaagaattagtagagccctttaggtgtgactctcaacttattcaacatcaagagaacaacactgaggaaaagccttatcagtgttcggagtgtggcaaagctttcagcattaatgagaaattaatttggcatcagagacttcacagtggggagaaacccttcaaatgtgtggagtgtgggaaaagcttcagctacagttcccattatatcacacatcagacaatccacagtggggagaagccctatcagtgtaagatgtgtgggaaggccttcagtgttaatggaagcctaagtaggcatcagagaatccatacgggagagaagccctatcagtgcaaggaatgtggaaatggcttcagctgtagttctgcatatattacacatcagagagtccacactggagagaaaccttacgagtgtaatgactgtgggaaagcgttcaatggtaatgcaaaattaattcaacatcagagaatccatactggagagaaaccttatgaatgtaatgaatgtggaaaaggctttaggtgcagctcccagcttaggcagcatcagagcatccacacaggagaaaagccctatcagtgtaaagagtgtggaaaaggcttcaataataatacaaaactcattcagcatcagagaatccacacagcttctctggctgagcagctcttcaaagcatctgggaaccaccccaactggggatgctgcctgaccatcagctccccggggccgagtgtgtatggccccaagatgaacatgaggggagccccaaattcaaggctggctggtggcagagagaaacgcacccaggacacagacttcgggcagtgctccttcctcccttcacactctccctcctgctttgaaccgtggaatgtgacagattacgactcgagctggtaccgacagaagcaggttctcagtggtgtatggtcctcacccctgtccattctcaagcttcccaggaccctcatccggatctccatccacatacaagagatggatactcctggggagatgctgatgacaggcaggggcagccttggacccaccctcaccacagaggctccagcagctgcccagccaggcaagcagggcccacctgggaccgggcgctgcctccaagcccctgggactgagcccggagaacagacccctgaaggagccagagagctctccccgctgcaggagagcagcagccccgggggagtgaaggcagaggaggagcaaagggctggggccgagcctggcacgagaccaagcttggccaggagtgacgacaatgaccacgaggttggggccctgggcctgcagcagggcaaaagcccaggggcgggaaaccctgagcctgagcaggactgtgcagccagggctccggtgagagctgaagcagtaaggaggatgcccccaggcgccgaggctggcagcgtggttctggatgacag

SEQ ID NO: 2610 - DNA, 454 bp, Homo sapiens
  misc_feature (1)...(454): n = a,t,c or g
catcgagatcataggcatcngcgnggacntnccgncgncgcgccgccatgatggacaccagccgtgtgcagcctatcaagctggccattgtcatcaaggtcctgggcaggaccggatctcagggacagtgcacgcaggtgcgcgtggaattcatggacgacacgagccgatccatcatccgcagtgtaaaaggccccgtgcgcgagggcgacgtgctcacccttttggagtcagagcgagaagcccggaggctgcgctgagcttggctgctcgctgggtcttggatgtcgggttcgaccacttgggcgaagggaatggtctgtcacagtctgctccttttttttgtccgccacacgtaactgagatgctcctttaaataaagcgtttgtgtttcatgtcttgaagccaacgtgcaacgatgaaagagtacctgtccaaacttattctcttttcg

SEQ ID NO: 2611 - DNA, 972 bp, Homo sapiens
ttttttttttatttttttatttttttttcacgcttaattcactttatttttcttgtataaaaaccctatgttgtagccacagctggagcctgagtccgctgcacggagactctggtgtgggtcttgacgaggtggtcagtgaactcctgatagggagacttggtgaatacagtctccttccagaggtcgggggtcaggtagctgtaggtcttagaaatggcatcaaaggtggccttggcgaagttgcccagggtggcagtgcagccccgggctgaggtgtagcagtcatcgataccagccatcatgagcagcttcttaggcacaggtgcggagacgatgccagtgcccctgggtgcagggatgaggcgtaccagcacagagccgcagcggcctgtcaccttgcaagggacagtgtggggcttgccgatcttgttcccccagtagcctctgcgcacggggacgatggagagcttggccaggatgatggccccacggatggcggtggccacctccttggagcacttaacacccagaccgacgtggccattgtagtccccgatagcaacaaatgccttgaacctggtgcgctggccggcacgggtctgcttctgcactggcataatcttcaaaacctcatccttgagagaggcccccaggaagaaatcaatgatctctgattccttaatgggcagggagaagagatagatctcctccagggacttgatcttcatgtccttgaccaagcggcccaacttggtgacgggcatccactccttatcctcggccttgcctccgcgagctccgcggcctcggccccggccccgtccacggccgcgaccccggccccgaatgccactgccgaaacctccgcggaagccaccgcggttccccatcccagggccaccagggcctccgggcccccccgctgcaccggcgtcatccgccatttggtgttttgtccccacgcgtccg

SEQ ID NO: 2612 - DNA, 3368 bp, Homo sapiens
tttcgtgcggctcgcggttcctccaccgcctccgccgccgcatcctccgcttgtgctaccgccgcgggcgctgggccgctctgctggtccggcatgagaccgtgagacgagagacgggtcggggccgccgacatgtttggccgctcgcggagctgggtgggcgggggccatggcaagacttcccgcaacatccactccttggaccacctcaagtatctgtaccacgttttgaccaaaaacaccacagtcacagaacagaaccggaacctgctagtggagaccatccgttccatcactgagatcctgatctggggagatcaaaatgacagctctgtatttgacttcttcctggagaagaatatgtttgttttcttcttgaacatcttgcggcaaaagtcgggccgttacgtgtgcgttcagctgctgcagaccttgaacatcctctttgagaacatcagtcacgagacctcactttattatttgctctcaaataactacgtaaattctatcatcgttcataaatttgacttttctgatgaggagattatggcctattatatatcgttcctgaaaacactttcgttaaaactcaacaaccacactgtccatttcttttataatgagcacaccaatgactttgccctgtacacagaagccatcaagtttttcaaccaccctgaaagcatggttagaattgctgtaagaaccataactttgaatgtctataaagtgtcattggataaccaggccatgctgcactacatccgagataaaactgctgttccttacttctccaatttggtctggttcattgggagccatgtgatcgaactcgatgactgcgtgcagactgatgaggagcatcggaatcggggtaaactgagtgatctggtggcagagcacctagaccacctgcactatctcaatgacatcctgatcatcaactgtgagttcctcaacgatgtgctcactgaccacctgctcaacaggctcttcctgcccctctacgtgtactcactggagaaccaggacaagggaggagaacggccgaaaattagcctgccggtgtctctttatcttctgtcacaggtcttcttaattatacatcatgcaccgctggtgaactcgttagctgaagtcattctgaatggtgatctgtctgagatgtacgctaagactgaacaggatattcagagaagttctgccaagcccagcattcggtgcttcattaaacccaccgagacactcgagcggtcccttgagatgaacaagcacaagggcaagaggcgggtgcaaaagagacccaactacaaaaacgttggggaagaagaagatgaggagaaagggcccaccgaggatgcccaagaagacgccgagaaggctaaaggtacagagggtggttcaaaaggcatcaagacgagtggggagagtgaagagatcgagatggtgatcatggagcgtagcaagctctcagagctggccgccagcacctccgtgcaggagcagaacaccacggacgaggagaaaagcgccgccgccacctgctctgagagcacgcaatggagcagacccttcctggatatggtgtaccacgcgctggacagcccggatgatgattaccatgccctgttcgtgctctgcctcctctatgccatgtctcataataaaggcatggatcctgaaaaattagagcgaatccagctccccgtgccaaatgcggccgagaagaccacctacaaccacccgctagctgaaagactcatcaggatcatgaacaacgctgcccagccagatgggaagatccggctggcgacgctggagctgagctgcctgcttctgaagcagcaagtcctgatgagtgctggctgcatcatgaaggacgtgcacctggcctgcctggagggtgcgagagaagaaagtgttcaccttgtacgacatttttataagggagaagacatttttttggacatgtttgaagatgagtataggagcatgacaatgaagcccatgaacgtggaatatctcatgatggacgcctccatcctgctgcccccaacaggcacgccactgacgggcattgacttcgtgaagcggctgccgtgtggcgatgtggagaagacccggcgggccatccgggtgttcttcatgctgcgttccctgtcactgcaattgcgaggggagcctgagacacagttgccgctgactcgggaggaggacctgatcaagactgatgatgtcctggatctgaataacagcgacttgattgcatgtacagtgatcaccaaggatggcggcatggtccagcgatccctggctgtggatatttaccagatgagtttggtggagcctgatgtgtccaggcttggctggggagtggtcaagtttgcaggcctattgcaggacatgcaggtgactggcgtggaggacgacagccgtgccctgaacatcaccatccacaagcctgcgtccagcccccattccaagcccttccccatcctccaggccaccttcatcttctcagaccacatccgctgcatcatcgccaagcagcgcctggccaaaggccgcatccaggcaaggcgcatgaagatgcagagaatagctgccctcctggacctcccaatccagcccaccactgaagtcctggggtttggactcggctcctccacctccactcagcacctgcctttccgcttctacgaccaggggcgccggggcagcagcgaccccacagtgcagcgctccgtgtttgcatcggtggacaaggtgccaggcttcgccgtggcccagtgcataaacgagcacagctccccgtccctgtcctcacagtccccaccctccgccagcgggagccccagcggcagcgggagcaccagccactgcgactctggaggcaccagctcgtcctccaccccctccacagcccagagtccagcaggtattggccacgtgactcagtgatatggggacatttggagaaccccgtgatccctcaccattaccaaaacccctgacctccaggtcctccttgtcacagcacttgaaggatgctgccgctcaggtgatctgcacatgaagcctctagagattcctctaacttgatgttccctcccaggctgggtcagctcccagatggggaagaattgctcctttttcaggccggtccccaccgaagctgtcactgactgcagagctgatgggcagcaggcgggctgcacctaaacccaccctatcatcacctccacagtcttaggtgtcacaaggaggggtctcccaaggggattgtttgcagtctaggaaaagaatcgcgttcctgctgatttttttttttcctctgtaacataccagttttgtccttaaaaaaaaaa

SEQ ID NO: 2613 - DNA, 571 bp, Homo sapiens
tatttccatattaaatgttataaagtgaaggtctggctgcattgataatgtgccctctgctgatggaatgtgcttctgccctcttggcaggcttcctgtggatcctaggtgataaaagccgtccagagtatttcttcattatcatcgtcatcttatgtttacattattctccttgtcactgagaactccagaccccagtctataggaaacggttcccacattgttgaaatatggctggtggtacagggagtagttctgaacgctgagcatggcctcatttggaatattttatgcaatgaaagtgccggtgagaatttagacagcaaagcttaccggtatgaagcagaaaaaggcaaaataaagaggcgtatgtatggacattgcattcatgcatttgtgcccaatggtgttgaattctccttacaccttaatgaaagagtaaaaatgttgaggaggacgtggagctgccaattggcaggtgtcagagaaatctacaagcagataaaacaggggctccgagggtgtaaatggtgggatttgaaggaaggtgagtacaaagatgatgctgggg

SEQ ID NO: 2614 - DNA, 1199 bp, Homo sapiens
tttcgtccgcggacgaagaaggcgacggccatgtacttggagcactatctggacagtatcgagaaccttccctgcgaacttcagaggaacttccagctgatgcgagagctggaccagaggacggaagataagaaagcagagattgacatcctggctgcagagtacatctccacggtgaagacgctgtctccagaccagcgcgtggagcgcctgcagaagatccagaacgcctacagcaagtgcaaggaatacagtgacgacaaagtgcagctggccatgcagacctacgagatggtggataaacacattcgaaggcttgatgcagacctggcgcgctttgaagcagatctgaaggacaagatggagggcagtgattttgaaagctccggagggcgagggttaaaaaaaggccggggtcagaaagaaaaaagagggtcccggggccgaggcaggaggacatcagaggaagacacaccaaagaaaaagaagcacaaaggagggtaagaggctttcccctctttttcccaaaagaacgaatacccatagcctgtatcccggatgtaggaacactgatggaagctgacccgagtgaagtgcaccccgtgtgccgggtggtattctgattcttacgctgcgcgcctgtcgtcagcctgtcctcaccgcagcctttgagggggtgccgttgtcaggggcattttcagtgtcgcagggacctgcccaggctttagggctgctgtggtgcggctgggctgcacctggagtcttgattccagtgcctgtcctcttagccacagtgtgtgctgccccactagggacaggaggatggtgagcatcgtgttgttgacagaggccaatgtagaccactctttaagtagctagatttctgtatatctgtcagttattttatgtgtcaacatatagtgtgcatatattcattgttaattatgtggccacatttattaaatagacatgtcatttaacttgaagttttttgagatactttatttaaagcattctcccactgacaccctccctgccaaaggtgttgtataccctccaaagagatcgtagcattacctcagaggagtggcatttagagtaaagagaaaatgctcaaatgccacgtagcctctgtccagatgatctctcagagggagggtcaaagagtaaaagttttgggcacgaatggcgaaacgaaa

SEQ ID NO: 2615 - DNA, 5778 bp, Homo sapiens
gaaaaccatcactgcccttgccttctcccctgatggcaagtacttggtcactggagagagtgggcacatgcctgccgtgcgggtttgggacgtggcagagcacagccaggtggccgagctgcaggagcacaagtatggtgtggcttgtgtggccttctctcctagcgccaagtacattgtctctgtgggctaccagcatgacatgatcgtcaacgtgtgggcctggaagaaaaacattgtggtggcctccaacaaggtgtccagtcgggtgacagcagtgtccttctctgaggattgcagctactttgtcactgcaggcaaccgacacatcaaattctggtatctcgatgacagcaagacctcaaaggtgaatgccactgtgcccttgctgggccgctcagggctgctgggagagctacggaacaacctattcactgatgtggcctgtggcagaggaaaaaaggcggacagtaccttctgcatcacgtcctcagggctgctgtgcgagttcagtgatcgaaggcttttggacaagtgggtggagctgagggtctaccccgaggtgaaggatagtaaccaggcctgcctgccccccagttcctttattacctgctcctcagacaacaccatccgcctgtggaacacagagagctccggggtgcatggctccaccctccaccgaaacatcctcagcagtgacctcattaaaatcatctatgtggatgggaacacccaggccctgctggacacagagctgcctggaggagacaaagctgatgcatccctgttggatccccgcgtgggcatccgctcggtgtgtgtcagccccaatggacagcatctagcatcaggggaccgtatgggcacacttagggtgcacgaacttcagtccctgagtgagatgctgaaggtggaggcccatgactctgagattctgtgcctggagtattctaagccagacacaggtctgaaactgctagcatcggcgagccgggaccggctgatccatgtgctggatgccgggcgggagtacagcctacagcagacgctggacgaacactcatcctccatcactgctgtcaagtttgcagccagtgatgggcaagtccgcatgatcagctgtggagcagacaagagcatctacttccgcactgcgcagaagtctggagatggagtgcagttcacacggacacaccacgtggtgcggaagacgaccctctatgacatggatgtggagcccagctggaagtacacggctatcggctgccaggaccgaaatattcggatatttaacatcagcagtggaaagcagaagaagctgtttaaagggtcacagggtgaggacggcacactcattaaggtgcagacagacccctcagggatctacattgccaccagctgttctgacaagaatctctccatttttgacttctcctcaggcgagtgcgtggccaccatgtttggccactcagagattgtcactggcatgaaatttagtaatgattgtaaacatctcatctctgtgtctggggacagctgcatatttgtgtggcgcctgagctctgagatgaccatcagcatgaggcagcgtctggccgagttgcgccagcgtcagcggggcggcaagcagcaaggaccatcctctccccaaagggcttctggacccaaccggcaccaggccccatcaatgctgtctcctggaccggctctctcatcagacagtgacaaggagggagaagatgaggggactgaagaagaacttccagcactgcccgtccttgccaagagtaccaagaaggcactggcctcggtccccagcccagctttgccccgaagcctgtcccactgggagatgagtcgggcacaggagtccgtggggttcctggacccagctcctgcagccaacccaggacccagaagaagagggcgctgggttcagccaggtgtggaactgagcgttagatccatgctggatctgcggcagctggaaacactggccccaagcctgcaggaccctagccaggactcgctggccatcatcccatctggtcccaggaagcatgggcaggaggcccttgagacttcactcactagccagaatgaaaagccccctcggcctcaggcttcccaaccttgttcctatccccatattatccgattattgtcacaagaggaaggggtctttgcccaagatctggaacctgcacccattgaagatggtattgtctacccggagccgagtgacaaccccaccatggataccagtgagttccaagtgcaggctccagcccggggaactctgggaagagtgtacccaggcagcaggagctcagaaaagcacagccctgacagtgcctgctctgtggattacagcagcagctgcctttccagcccggagcaccccactgaagactctgagagcacggagcccctcagtgtggatggcatctcctcagaccttgaagagccagctgagggtgatgaagaagaggaagaagaggagggaggcatgggcccctatgggctacaggagggcagcccccagactccagaccaggagcagtttctaaaacagcactttgagactctggccagtggagctgctccaggggccccagtgcaggtcccagagaggtcagagtctcggagtatctcttcacgattcctgttgcaagtacagacccgcccactcagggaaccatccccatcctcctcaagcctggcactgatgtcgagaccagcccaggtgccacaggcatctggtgagcagccgagaggcaatggtgccaatccccctggagcacccccggaggtggaaccgtcctctggcaaccccagcccccagcaggcagcctctgtgctgttgccacgatgccgtctcaaccctgacagcagctgggctcccaagagagtggccacagccagccccttttctggactccagaaggcccagtctgtgcacagtctggtgccacaggaaagacatgaggccagtctgcaggccccttcaccaggcgcactgctgtctcgggagatcgaagctcaggatggtctgggctccctgcccccagctgatggccgtccgtctcggcctcactcctatcagaaccccaccaccagttccatggccaagatatcccgcagtatctctgttggggagaacctgggcctggtggctgaacctcaagctcatgcccccatccgagtctcaccactcagcaagctggccctgcccagccgggctcacctggtcctggacatccccaaaccactgcctgaccgtcctaccctggctgcattctctcctgtcaccaaaggccgggcccctggcgaggcagaaaagcctggcttcccggtgggcctaggaaaagctcacagtacaactgagagatgggcctgtttgggggagggcaccactcccaagcctaggacagagtgccaggctcatcctgggcccagcagcccctgtgcccagcaactgccagtcagcagcctcttccaaggccctgaaaacttgcagcccccaccccctgagaagactcccaaccccatggaatgcaccaagccaggggcagccctgagccaggactcagagccagcggtgagcctggagcagtgtgagcagctggtggcagagctccgcggcagcgtgcgccaggcagtgcggctctaccactcggtggctggctgcaagatgccctcagcagagcaaagtcggattgcccagctcctcagagacaccttctcttcagtgcgacaggagctggaagctgtggctggggcagtgctgtccagcccaggcagcagccctggggctgtgggagccgagcagacacaggccctgctggagcaatactcagaactgttgcttcgagccgtggaacggcgtatggaacgcaaactctgagttctggaagcctgtcccaagtgaatgaatgctccagcgattccaaactgcagcccctctgcccctcaccaaaacctgcggggctgcttggagtggaaagcagggagcagtgttcagaggcaaagcagccttcccagccgctcctcgtggggggcctgtatttattaatttatttccctgactgttgcctcacttccttggaactcctgcctccacagcccctccagtggcagggacaggtcttgggtctttgtcatcttggtgctgtgagaggtaggagggcagcctgccccatctaggaatctgggaagggctggccctctcttagaagccatttgaaattactgcagggattagctccctgtggtggagcatacacagggtactctggggtcgaggtgagaggtgatgtggtattcagtgcccgtcagccaactgtgggccttcacctctacctgcacttcccctctcacaccagctgcactcccgtggctgccagagcagggtggttttccccaatacctggagctcagaaaggcagagccatctggccctccagggtgtccccagccatcaggagacttgagttggtatttggacctgagcccgcacattccactcccattctccctccaagaggggcccagcattgtatttccctgtgaccccttactctcctggccagaacttgagccagctgtgggatgttgctgcaggacagtaagccctcacctgggcaaacatgaagctctggcctcctttcctcagccccttgttcttccctgtcctccaccctggaccccagccggctgctggagcccagaggccaccttctccctgcatcctgaatgatgcttagtcagaagcctgtgttggaacatccctcgtttacggggcgctggcctacctcctgaggacctcagccacagatgagatcacacgcatgcacgtgcacacatgtacacacacacacctacctgcacagcacgctgttgagtgttggttgctagagtatccggctggctgctgtgtgcctggtttcctcacatcctgcctcagcttcaccaccctggcttatgtggcacacctatcagggagcagaaaaggggtgcagtacactaagtgaacccagattctggattcttggtgtccacagcctagctgatacgagatagcccataggacacctggtttaggtagaaggagcctcctcaaaggcagtgctgggcacccacgggtgtgctggatactggagtttgagaggagggaggtgctggggccaaaggagacactagaaaagtggtagatgggacaggtaagtggcagaggtgaggggataagttagaatgtaaaagggcagtaattaggggtgagggaaaggagataggggaccctaggaggtagagtgggaccatgtcgtgaggcagttgaagagttgaggaaaggtttttctgggccctactgctcccctctgctgcaggtaagtcagagcagctttaccacagcttcaggccacgagagccccttcacccgccctgctgcgccataggcagaggcttataaagaaatgggttctgggccaggtgtggtggctcaagcctgtaatcccagcactttgggaggccgaggcgggtggatcacctgaggttaggagttcgagatcagcctggccaacatggtgaaaccctgtctctactaaaaataaaaaaattagctgggcgtggtggtgggcgcctgtaatcccagctactcgggaggtttaggcaggagaatcgcttgaaccctggaggtggaggtggaggttgcagtgagccgagatcgcgccattgcactccaacctaggtgacaaagctacacgccatctcaaaaaa

SEQ ID NO: 2616 - DNA, 1688 bp, Homo sapiens
cagaatatttaaaatacaaagattgcctgttttcaaacactattgaataagagggtgagatatttcttaacaacaacaacaacaaaaaaaaacaggttgttttgaatgtgatgagccagccaggagatagaatactacctgcccttagggttgggggctgtccccacaaaacttgatacttcagaaaccctttttattgacccacaagcagatatttgaattacttcttactttattgctccaggattctggatgggctgcatttactgtgtgaaggataaaaatcattagcctggattctgatttctataaattgccattaaaagctttttttcccctaagaactgaaatgtgctcaccagccaaaacattttaacttgtaaattttgagggcagttaaccaaacctgtgactaatcatatctcctcctaccccccatttccaaggacatttgttactcagatacttgttatactaatacttgaacttgtaccttatggtatttgctatcttttaactagtcatgatattcttatactttagttacacttttggaatttgatacaaggttgagtggggtgtgtgggtgtatgtatgagtgaaacagttctcaaaagaatgtaagaaaaaccatccttataaaattgtgacttttcaaaaacatagtctttgtcatttatagaattaacaagctgctcagggtatattttatagctgtagcactgatatctgcattaataaatactgtcgaaacacaatggacctaagtataaaacttccctgaaaaatcatctaatacttttattattaatatcagtggcaaaggtttaagcctgaggaaaaaagcgtacctctacgtattgacaactttgagttctgtagataacaagcagatttgggtctcctgtgattggctaatggtctccatctcccagcagacttaattcaggttttgcttctgctacatcccgccagtaaggaagcagcaaaggtagagaagagacctttttctctatcaaaggccagagatgcgagaacaaaaattcattcccctttggagacaaatgtagtccatctgataaataagatgagaagtcctggctgtcctgcatcagggtccacaggtcaagtacgtcagtcccacagtcttgggccacttgtaaacacgcattggcatattcaccaacaacagagttcaggcgatttagtttgcaaccttgtatgatgcactgttcttcccaggctgtttcacaaagtggggtcggcgtgatgagaatgactcgattctcagggatgtccacggacttcaggtactgcaccatgctctttaggttcgcagcgtactcctccaggggaatgtgctgcttgggattctcatcttttagtgcactgtcattggccccaaagaaaattgtaactgctactgggatgtccaaactgtttcctttcctgattaatcttggaaggataattttggcccacctggtattgtaacctgaaaatccacgattcagaacatcacattttctgaccagcctgtcagccagcgatgctccccatccaccctgctggaaggaaaactgggtgatggagtccccgaagagcaacaagcgaggccagagcagggcactcccgcagcccgcggcctcgcacagcgccatggagcacgaaatcgtcgacccgggaat

SEQ ID NO: 2617 - DNA, 1083 bp, Homo sapiens
attcattttgcccagaaagttcctgcttcagagctgaaggtaagtacattttccactaattcctcagcttgctaagtgcttttggaccatgaatagagcagctaggaacaaatctgagaagaggtactattcagaattcctccaaatagctcatctttttaattatgggctttcatccttcctaagggagtttattatttttctaattaaactactacaatgaaggctattacctttttgtctagctaaaacaatctttcctattaatgaatttattggcttctctagtactcttcaaattgtcattgagctctattcaaggactacagccagttttttcctaatagaattaggggtgaaacaaatcatgcttctattatcacttctggagttagcccttcacctgatcagcttgtctaggtgtaagagtgcgggggttttagcgccacaaagacgtgggcatgcggcagcttcctgaacctcaggcattggtgtctaagcaactccaccatccacacgtgtgacgttacagttctgggagatgcacgcacactttctgtggctttctcaaccactagctcagtcagcctccaccttcctaggcagcaacacggggtgcaggataaacaataactaaaagcatactgattatcacatactcctgcaaagtgtttgcacccagaaagcatgcagtcactgccatcatgaggggctcacacctttctttggctggctctgtcggggggcacatgttacctataaaagaggcccaggcattcgattaaacagctcttctttataattcagtttgcctaaactggcttcaaaaaactgtccccaatacttacttaccccccccccttctactccccatatacccacttcccgggccccttggaaactacttctacatgcttgccaaagtcaaaagggtaggattggcagtggttccagggggcccaacgccagcctggacgaaacagaggagagcgtctctctgatctctcaccccgctccgcgggtgcggacggtcgtcgcagatgtcacacgacgctcgcaacgacgcggccgcatctggtcgcg

SEQ ID NO: 2618 - DNA, 1283 bp, Homo sapiens
caagctccagagactacaataattcacttgccctaggttccaaagccagcaagtggaaaacggagactggaattccgcccgcaggactccaaagcctgtgcagcaacaccccactcccccggcaggatcaccagcaggacgcgcgggagccagaaagtaagatccgtacctccaaggctcccatgggcccaagcctccgcatcaacagactgggagggattacgtggggtcccagggccggctctgaggcgggaaaactttctggaggcggcggcctcaggccggagcgggcgcacaccgactggaggggtcggattcagggatgtgggtggaccgcatttccccatcttccccgccgcgcacttcctctggtgcaatctccacaccccgcgccggcccgcctgcaacgcgccctggcactcaccggtgggcgaaatttccccgcctccacgtgagagccagctccgccgtgacccggaagtccacttcgagtcgccggcccaccctctcgggttccggcttcttccgggtcgcggccttccggcgaacgcggttaccgtggaaaccgcggccatggcggcaccgcggcaaatccccagccacatagtgcgcctcaagcccagctgctctacagactcgtcgttcacccggacgccggtgcccaccgtgtctctcgcgtcccgcgagctgcctgtctcgtcgtggcaggtcaccgagccgtcaagcaagaatctgtgggagcagatctgcaaggagtatgaagctgagcagcctccctttccagaaggatataaagtcaaacaggagcctgtgattacggttgcgccagtagaggaaatgctttttcatggcttcagtgcagagcactattttccggtttcccatttcaccatgatctcacgtacaccctgtcctcaagataaatcggaaacaatcaacccaaaaacatgttctcccaaagaatatttggaaactttcatctttcctgttctgcttcccggaatggctagcctgcttcaccaagcgaagaaagaaaaatgttttgaggttgttctccagatgaccccttcgggagggaaagcctgtgtttggggtcacttacccagttccagccacaccatctagttgtgcacatacatgcgctgccatctgtctggccacttggactccggagagcttttccgccttgcttggcctcctgcctgaccttctcctgtgcagtttggcatccaccaggtttcttgggtcttcagcttctgtttattacatgcactgattaaagc

SEQ ID NO: 2619 - DNA, 860 bp, Homo sapiens
ccgatgtcgtgcctcccggccacgctcgctgtagtgaaggagcgttgcagcctggggctcgtttgggtgatttccctcggcggtggaggtcgctcctaatagaggcggcggcggatcacccgaacagccttcaggcgacgtactgtaagacgatattactttaatcatcttcacatcagtatttatggaatagccacaggtgcctcatcctttagtaggagttaattatacatttactggccgagtaaacatctccgaatgtattttttttagataaggaaataaaacatttccaataaagctgaagtctcatcccacccatccgttatcagtcactccatggattcctttgggcaacccagaccagaagataatcagtcagtactcagaagaatgcaaaagaaatactggaaaactaaacaggtctttatcaaagcaacaggaaaaaaagaggatgagcacttggtggcgtctgatgctgaactggatgctaaacttgaggtttttcactctgttcaagagacatgcactgaacttctgaagataatcgagaaataccagctaagactcaatggtatgaaatcatagttatctatctgataattcccatttaaaataaatattagcattttttaaaatgaaagatttaatgtaaaaacaattttgtgaatagcttcttatggcaaaatatgaatatttacagctacctgttctcaaaggccccagtattctctcttctttcctcagttaatcaaatcctctgacccagatttattttttgctgatattttttttctttgagacagggtctttctctgcactccagcctaggcaacagagcaagactccgtctcaaaaaa

SEQ ID NO: 2620 - DNA, 2560 bp, Homo sapiens
cgtgcccaatctgatgctttgagaaactgtccgccggcacgtaccggcccggaattccagggtcgacgatttcgtcccgcggcaactgcacaggttcggtgacagccgagacgccgagtgtttcccgcagccggccggggtccaggtcggaaatgtagccagtggggccgccaggcttcagtgtcatttgaggacgtgactgtggacttcagcaaggaggagtggcagcacttggaccctgcccagagacgcctgtactgggatgtgacactagagaactacagccacctgctctcagtggggtaccaaattcccaagtcagaggctgccttcaagttggagcaaggagaggggccatggatgctggagggggaagccccacatcagagctgttcaggtgaggctattgggaaaatgcagcaacagggaattcctggaggaattttcttccactgtgagagatttgatcaacccataggagaagattcattatgttctattttagaagaactgtggcaagataatgaccagctagagcaacgtcaggaaaaccagaataaccttttaagtcatgtgaaagtattgattaaggagaggggctatgaacataaaaacattgaaaaaataattcatgtgactaccaagcttgttccttcaattaaaagactccataactgtgacacaattttgaagcatactttaaactcacataatcataatagaaacagtgcaacaaagaaccttggcaagatttttggaaatggtaacaatttcccccatagcccttcctctactaagaatgagaatgctaaaacaggagcaaattcctgtgaacatgaccactatgaaaaacatctcagccacaaacaagctcccacccaccatcagaaaattcatcctgaggagaagctttatgtgtgtactgaatgtgtaatgggcttcactcagaagtcacatctgtttgagcatcagagaattcatgctggagaaaagtcccgtgaatgtgacaaaagcaacaaagtcttcccccagaaaccccaggttgatgtacatccaagtgtttatacaggagaaaaaccctatctgtgtactcaatgtgggaaagtctttaccctcaaatcaaacctcattacacatcaaaaaattcataccgggcagaaaccctacaaatgcagtgaatgtggaaaagcctttttccagagatcagacctctttagacatctgagaattcatacaggagaaaaaccttatgaatgcagtgaatgtggaaaaggcttctcccagaactcagacctcagtatacatcagaaaactcataccggagagaaacactatgaatgcaatgaatgtgggaaggctttcacaagaaaatcagcactcaggatgcatcagagaatccacacgggagagaaaccttatgtatgcgctgactgtgggaaggccttcatccagaaatcacatttcaacacacatcagagaattcatactggagaaaagccgtatgaatgcagtgactgtgggaaatccttcactaagaagtcacaactccatgtgcatcaaagaattcacaccggagagaaaccctatatatgtacagaatgtggaaaggtcttcactcacaggacaaacctcaccacacatcagaaaactcatactggggaaaaaccctatatgtgtgctgaatgtggaaaggcttttactgaccagtcaaatctcattaaacaccagaaaactcacactggagagaaaccctataagtgcaatggctgtggaaaagccttcatatggaagtcgcgcctcaaaatacatcagaaatctcatattggagagagacactatgaatgcaaggactgcgggaaagccttcatccagaaatcaacactaagcgtgcatcagagaatccatacaggagagaaaccgtacgtttgtcctgaatgcgggaaggcctttatccagaaatcgcacttcattgcgcatcatagaatccatactggagagaagccttatgaatgcagcgactgtgggaaatgcttcactaagaagtcacaactccgtgtgcatcagaaaatccacacaggtgagaagcccaatatatgtgctgaatgtggaaaggccttcactgaccgatcaaatctcataacacatcagaaaatccacactagggagaaaccctatgaatgtggtgactgcgggaaaaccttcacctggaagtcacgcctcaatatacatcagaagtctcatactggagaaagacactatgaatgtagtaaatgtgggaaagctttcatccagaaagccacactaagtatgcatcagataattcatacaggaaagaaaccttatgcttgtacagaatgtcagaaggcctttactgacagatcgaatctcattaaacaccagaaaatgcatagtggagaaaaacgctataaagccagtgactgagaaagtcttcacctggaaatcacaactgggtatgcatcaggtatctaatagcagggaggaggaaggcctgttgctgcaatcattgtacagggggaaatgggtatgagagactgaggct

SEQ ID NO: 2621 - DNA, 686 bp, Homo sapiens
  misc_feature (1)...(686): n = a,t,c or g
tttcgttcagaatgtctgggcgaggtaaaggtggcaaggggctgggtaagggaggcgccaagcgccaccggaaggtgctgcgggacaatatccaaggcattacaaagccggcgattcgccgtctcgcccgacgtgggggcgtcaagcgcatttctggtctcatctacgaggagacccggggagtcctcaaagtcttcctggagaacgtgatccgtgacgcggtgacttacacggagcacgccaagcgcaagaccgtcacggccatggatgtggtgtacgcgctgaaacgccagggtcgcaccctttatggtttcggcggttgagctgtccccacagcttctctacagactccaaaaggcccttttcagggcccccaaactgtcacagaaagagctgttaacacttcctagataacgnnnnnnnnnnnnnnnnnnnnnnnnnnnnnnnnnnnnnnnnnnnnnnnnnnnnnnnnnnnnnnnnnnnnnnnnnnnnnnnnnnnnnnnnnnnnnnnnnnnnnnnnnnnnnnnnnnnnnnnnnnnnnnnnnnnnnnnnnnnnnngannnnnnnnnnnnnnngggaaaaannnnnnnnnnnnnnnnnnnnnnnnnnnnnnnnnnnnnnnnnnnnnnnnnnnnnnnnnnnnnnnnnnnnnnnnnnnggggggggattttagggggggagccccg

SEQ ID NO: 2622 - DNA, 1824 bp, Homo sapiens
gttcccgtgactgcagaagctaaacttatgggctttacacagggctgtgtgacctttgaggacgtggccatttacttctcccaggaagaatgggggctccttgatgaggctcagaggctcctgtaccgcgatgtgatgctggagaactttgcacttataactgcgctggtttgttggcatgggatggaggatgaagagacacctgagcaaagtgtttctgtagaaggagtacctcaggtcaggactccagaggccagtccatccacccagaagattcaatcctgtgacatgtgtgtcccattcctgaccgacattttgcacctgaccgatttgcctgggcaggaactatacttgactggggcatgtgcggtctttcaccaggaccagaagcatcatagtgcagagaaacccttggaaagtgacatggacaaggcctcatttgtgcagtgctgcctgttccatgagtcaggaatgcctttcaccagcagtgaggttgggaaggacttcctagccccattgggcattcttcagccgcaagctattgctaactatgagaagccaaacaaaatcagcaaatgtgaggaggcctttcatgttggaataagtcattacaagtggagtcaatgcaggagagagtccagccacaaacacactttttttcaccctagagtctgcactggaaaaaggctttatgaatctagcaaatgtgggaaagcctgctgctgtgagtgctcccttgttcagctgcaaagagtccaccctggagaaaggccttatgagtgcagtgaatgtgggaaatcttttagccaaacctctcatctgaatgatcatcggagaatccacactggagaaaggccttatgtgtgtggtcagtgtgggaaatcatttagccaaagagccaccctcattaaacatcacagagttcacactggagaaaggccttacgagtgtggtgaatgtgggaaatcttttagccaaagttccaaccttattgaacattgcagaattcacactggagaaaggccttatgagtgtgatgaatgtggaaaagcctttgggtccaaatccactcttgttcgacaccagagaactcacacaggagaaaagccatatgagtgtggtgaatgtgggaaattattcagacaaagcttcagccttgttgtacaccagagaattcacactacagcaaggccttatgagtgtggccagtgtgggaaatcatttagcctaaagtgtggcctcattcagcaccagttaattcacagtggagctaggccctttgagtgtgatgagtgcggaaaatcctttagccaaagaaccaccctcaataaacaccacaaagttcacactgcagaaaggccttatgtatgtggggaatgtgggaaagcttttatgttcaaatctaaacttgttaggcaccagagaactcacactggagaaaggccttttgagtgcagtgaatgtgggaaattttttagacaaagctataccctcgttgaacaccagaaaattcacactggattaaggccttacgactgtggacagtgcgggaaatcctttatccaaaagtctagcctcattcaacaccaagtggttcacacaggagaaaggccatatgagtgtggcaaatgtgggaagtcctttacacaacactctggcctcattctccaccgaaaatctcacactgtggagaggcctcgtgacagcagcaaatgtggaaaaccctacagcccaagatctaacattgtttaactcttgaaactccaaacctgagaaaagccttagacctgcagggaatgtgccatgtctttcttcagtgttatg

SEQ ID NO: 2623 - DNA, 331 bp, Homo sapiens
gtgggctggagcgggcggagctcggcccgcggcttgcgtgagctcaggccggtcccagcgtccagagcgccggcccttcggcttcttctaggccatggcagggccgggcccaggcccgggggacccggacgagcagtacgatttcctgttcaagctggtgctggtgggcgacgcaagcgtgggcaagacgtgcgtggtgcagcgcttcaagaccggcgccttctcggagcgccagggaagcaccatcggcgtcgacttcaccatgaagacgctggagatccagggcaagcgggtcaagctgcagatctgggacacggccggccaggagcgg

SEQ ID NO: 2624 - DNA, 1211 bp, Homo sapiens
gacccacgcgtccggccaaacaccttctccttttcattgaagctttaataggaaaataatttgaaatacttttaaggcatcttaaaaacatgactttttcatcttatggaaaagcagaccaattttgcttttttttcccaacttgttctccagactgtgccaataaaatgtgttcatagcaggaaaatttggaaaatacagaaaagcactatgaagaaaacaaaatgtacccaaaatcccatcactcagataacatcactgttaatgttttgatatgtatttccagtcttttctattgagttaatttttcattttgtttttgaataaataactttcaggaaagaaattgagccttttctgccacctctgaagcctgattactgtgtgaagcaggccatgaaggccatcctcactgaccagcccatgatctgcactccccgcctcatgtacatcgtgaccttcatgaagagcatcctaccatttgaagcagttgtgtgcatgtatcggttcctaggagcggacaagtgtatgtacccctttattgctcaaagaaagcaagccacaaacaataatgaagcaaaaaatggaatctaagaatctttttgtatggaatattacttctatcagaagatgatcaagatgtttcagtccagtgcacatcagcattgctgacattttatggattctaaacttgtgttgtttcttttttaaatcaactttttaaaaaaataaagtgtaaattaaccgactagagtacttggaaaatgtgatcagtacaagtgaacttaggttgttgccaacagggtccttttaggcagaacccagaaaccagtcaaatctgtagagaagcagtgtgacatcttcaggttaccattattttttaatgagcaggaagtctagaaatgataactagactgtatgtttcatgtgtgtgatttttcagaattcccagagtttactcattcttgttattaaactctagccagttgacatcttcgcaatttcaaggactgatagtgctgtattttctcacgttttctaagtttccgttttgcaaggcctaggtgactttttcatggtgtttgtatgtttagctcttttgaaaaggaattttgaaatctccatcaactgaagtaaatgatgtctgagtgttacagtaaaggtgaccaagtctctttcttaaagtcacaatgactaaagtattagttgaa

SEQ ID NO: 2625 - DNA, 1284 bp, Homo sapiens
cggacgcgtgggctctgtgcctgctgtttcctgctgggaagaaggaaagccagtgatgctggcttgaggctgtagtgggaggcccagcggattgtgagaagccagcccgggcagtgagtgtggatggcttggcaggtgagcctgctggagctggaggaccggcttcagtgtcccatctgcctggaggtcttcaaggagtccctaatgctacagtgcggccactcctactgcaagggctgcctggtttccctgtcctaccacctggacaccaaggtgcgctgccccatgtgctggcaggtggtggacggcagcagctccttgcccaacgtctccctggcctgggtgatcgaagccctgaggctccctggggacccggagcccaaggtctgcgtgcaccaccggaacccgctcagccttttctgcgagaaggaccaggagctcatctgtggcctctgcggtctgctgggctcccaccaacaccacccggtcacgcccgtctccaccgtctgcagccgcatgaaggaggagctcgcagccctcttctctgagctgaagcaggagcagaagaaggtggatgagctcatcgccaaactggtgaaaaaccggacccgaatcgtcaatgagtcggatgtcttcagctgggtgatccgccgcgagttccaggagctgcgccacccggtggacgaggagaaggcccgctgcctggaggggatagggggtcacacccgtggcctggtggcctccctggacatgcagctggagcaggcccagggaacccgggagcggctggcccaagccgagtgtgtgctggaacagttcggcaatgaggaccaccatgagttcatctggaagttccactccatggcctccaggtaataaccttggagagagctcagccagggtctggtggctgcgggcacgggcatctcagctccactggttcctccattcagcttaaccagcgcctcccaagcagctgcctatagctggctctataactgagcctggggaagatagaggaaagtcacgtccctgccttcaagggtctcgcagacaggtggggaggcagatggtgaactgtgggtacctagaacagcagaagttcactcaagctacagaaatactagaggagggtagctcatgcctgcaatcccagtactttgggaggccaaggcaggagtattgctggaggccgggagttcgagaccagcctggccaatgtagtaacacccccgtctctacaaaaaatacaaaaataaaaaaattagttgggcaaaaaaaaaa

SEQ ID NO: 2626 - DNA, 2216 bp, Homo sapiens
cgacccacgcgtccggccgccgctgctacagccgccgccgccgctgttgccgcggcttgttattcttaaaatggcgccgctagacctggacaagtatgtggaaatagcgcggctgtgcaagtacctgccagagaacgacctgaagcggctatgtgactacgtttgtgacctcctcttagaagagtcaaatgttcagccagtatcaacaccagtaacagtgtgtggagatatccatggacagttttatgacctttgtgaactgttcagaactggaggtcaggttcctgacacaaactacatatttatgggtgattttgtagacagaggttactatagtttggagaccttcacttaccttcttgcattaaaggctaaatggcctgatcgtattacacttttgcgaggaaatcatgagagtagacagataacacaggtctatggattttatgatgagtgccaaaccaaatatggaaatgctaatgcctggagatactgtaccaaagtttttgacatgctcacagtagcagctttaatagatgagcagattttgtgtgtccatggtggtttatctcctgatatcaaaacactggatcaaattcgaaccatcgaacggaatcaggaaattcctcataaaggagcattttgtgatctggtttggtcagatcctgaagatgtggatacctgggctatcagtccccgaggagcaggttggctttttggagcaaaggtcacaaatgagtttgttcatatcaacaacttaaaactcatctgcagagcacatcaactagtgcacgaaggctataaatttatgtttgatgagaagctggtgacagtatggtctgctcctaattactgctatcgttgtggaaatattgcttcgatcatggtcttcaaagatgtaaatacaagagaaccaaagttattccgggcagttccagattcagaacgtgttattcctcccagaacgacaacgccatatttcctttgaggccttcgcccatcctgctgacccatttttctgccctcttcttaccccaattttcttgtattaccctctacaatatactttttattgagcactttgctgctgaaatgctgcctcttgccttttttttttttaaattttaaattatctaaatttattgttggtggggggtgtctatagcaaagtttttctatcaattttcccccatcccatccccaccctggactcatttgagaagacttgagaaatgtcttaatactcacactgctgcatgtagctcttgcttatttactggtctgggaaacaggatgtgtttcctttttttaaaagccaattgacagattacacctaaatactcctccttttgtatcattcagccttttgttttagtttggtaagttttaagaaatttcagcagcaaagttgttattcagtgggcacgatggactccaaatgcctcaagttatgtatacctgtcccagatgtaaacttcattgtcctttgttggatgatattttaaatggatataaaataaattggtctaaagggctgccctccttgttgtgtttttaaattttagttaaaaactgctacagcttatgactttgtactttaagataattgtattgatcttttttcagattccttgtattttttaataaagtaatcttaaataaaactcagataggttaagtgttagaaattttaaacagcttacattgttagcgtaaagttatcttttcttttttcctaatcagagttcttgaccctttggttattgagtttaaaacttcaattgaaattcaatagtatttatttttgaaaaaaatcactaaactgtgcctaaagaacataactgccatattaatgttttggtttatatcctctatagtaatagaaaaacatttaatacttgtaatgctgatgtgttaatttgataccagttgagtagaatgtgatcaatccagtttacaatctatcatgagtattattaactaaaatctatgtgcttttcaataggaatcattcttctcttgctgtaacacttgaccttaacttttagaaagtgttcatttttaaactgcaactggaaaggttgaaaagttaggactcttgtatttgtgaactgtaatctgaagcagattatttaaagtgtagaaaaagaaacaagttcttttttgcaaaggtctgtgataccatatttcagctttgtgtaagtaatttgaatatc

SEQ ID NO: 2627 - DNA, 2572 bp, Homo sapiens
tttttttttttcatgcctctaggcaagcctttattctggggctccttcatccaggaaggggctgttagttgcatctcacccaaatggaatgcgatgggaattgggggcttgagttgtttggagaaggagctgttgatcttggcaaatgaatatagctggtcgtgtggtgtcccatcaaatcccttgagtgctttggcccatggagacttagggaatggtcagaacagacccagaggtccccagatctttacaataccaaggttcaggaggtatagacagtaaggaaaaagtccatttcctattttctgtccattttcagtaaagttttttgttttgactggcttttaaaaaattacctaggaaatgggaaagcttataaacattccgtaagtgaattgttgaactgctaccccaagtggtttccttacccagtcaccacttaaccagaaatattagaatacacggttcaaccagaattcagaccaggcagataacctgcctgttgctcaagcaatcatcagagttttaaaaaacaaaattaagcaaaaaagacctttccccaaatagcatcattaccacttagctttgtacgacccattcctaggaaagccacattccacttcagagaacatgaccgcttaaggtacagttaaaacaaagtccttccctttaggtgcttactttttgttttaaattagcctctcgaaatgcttttcttgtgtcttctgctgcattcctgaaaactataacttttaaggacacagccctcacttttatagaggaggaagaaaacagcaaagaggtgtctcattagggaggcagaaggttatgaccaatgctggaggtcttcctcttccttacttgttattcaacaagatgggttctatggtgtcgcatgaggtgtgagttggaaatgaaagctgcaccacacttctcacattcatagggcttctccccagtgtgggttctctggtgcacggtgaggctcgacctctgtctgaaggccttcccacactcattacatgtgtaaggtttttctccattatgaattctctgatgaataagtaggtatgagctacatgtgaaggccttcccacattcattacacacgtaaggaagatctccactgtgaattctctggtggacaataaggcaagagagctgactgaaggctttcccacattcgctgcagtcgtaaggtttctctgcagtgtgaattctctggtgcacaataaggtgtgaaaaacaactaaaggctttcccacactctttacactcatatggcttctcaccagtatggcttcgctgatgtacaataagatttgcactctgggtaaaggctttgccacagtcgttacaggcaaagggcttctccccagtgtggatcctctggtggacaatgaggtttgagctcctagtaaatgttttcccacattcattacattcatagcatttttccgtaatgtggactttctggtgccgagcaagttgtgagctgtaactaaaggctttctcacattcattgcacttaaaagttttttctaaggagtggattttttgatgtacagtcagatttgaactctgagtgaaggctttcccacattttgagcaaacataaggtttctgtccagtgtggattctctgatgcacaacgaggtttgcactctgaatgaaggccttcccacactcatgacattcaaagggtttctctccagtgtggattcgctgatgcacaacgaggtttgcactctgactaaatcctttcccacacacgctacacgtaaaaggcttttgtccaagctgggtttttggatttttaacagcgccagaattaaggctatattttcctccagatttcttacatttctggttttcctcttctttgaagctttcaggtaagtgacagtcattcactatcacttgtctgaaatctttcttttctctctttattctctgcctctttaacatgtttcccttttcacaagcttctcctaactcaggtccttgaggatcagctttctggattctttctgatatgatgaggggtttttcagcttcctcacatatctcagtttttggaaccagtaactgtaggttcttggtttcagcacctagaaagttcatggtcccatgagtctccagtatctcactcttggccagagtccctggtaatgagtagctgccaagggttgaagcagcaggtgcctcctgagttgctttcaggactaccgccatatcccaggatatgttctgacccttttcttcctcttctgatccatcaaggcctgtctgaagaccctgcactggggcccagactttgatgttctcggagtgcacttgttggctggatgcctgacctgggaagttttcttcttcttcctcctcctttttcaccttcactgggccccatggggctagggccatggcttctctcaattctgcagtcatcttctctgctcagcaggggaactcctatagctgggcgctgccctgcagaggtcaaaccccatccaagctttatgtttcaaaagcttcttcttgagtttcttcccagggccaagatgagtactgc

SEQ ID NO: 2628 - DNA, 2246 bp, Homo sapiens
atgtttggctttgaaaatgtcaagataataggagaagcaacttctgctgactacaaggcagccaacaatgtcccagaatcttccggcgtctttccggtggtggtcgtttttgctgcctgcgagcgcgtccgcgggctgggcgtttccggctcgctgggtccgggccaggtaactggagccggaaaccggtggaggtggtgtccgcccgcagaggagcttgcctggtctcggtctgagcgtcgcccagcgatttgccaccgcacgcacgccggatcccgggctttaccgcccgcctttccaggccccgccccgcctaaagtcccatggccgaggcagcgctagtgaatacgccgcagattcccatggtaacagaagagtttgtgaaaccatcacagggccatgtgacctttgaggatattgctgtgtacttctcccaggaggagtggggcctccttgatgaagctcaaaggtgcctgtatcatgatgtgatgctggagaacttttcgcttatggcctcagtaggttgtttgcatggaatagaggctgaggaggccccttctgagcagactctttctgcgcaaggagtgtcacaggccaggactccaaagctaggtccttccatcccaaatgctcattcttgtgagatgtgtatcctggtcatgaaagacattttgtacctcagtgagcatcaggggacacttccctggcagaaaccttatacgtctgtggccagtgggaaatggttttcatttggttctaacctgcaacagcaccagaaccaggacagtggagagaaacacatcagaaaggaggagagcagtgccttgcttctgaatagctgcaaaattcctctgtcagacaatcttttcccatgcaaagatgttgagaaggattttccaaccatcctgggccttctccaacaccagaccacccacagcagacaagagtatgcacatagaagcagggagacctttcaacaaagacgttacaaatgtgagcaagttttcaatgagaaagttcatgttactgagcatcagagagtccacactggagaaaaagcttataagcgtagggaatatgggaaatccttgaactctaaatacttatttgttgaacaccagagaacccataatgcagaaaagccttatgtgtgcaatatatgtgggaaatcattcctccataaacaaacactcgttgggcaccagcagagaattcacactagagaaaggtcttatgtgtgcatcgaatgtgggaaatccttgagctccaaatactcacttgtggaacaccagagaacccataatggagaaaagccttatgtgtgcaatgtatgtgggaaatcattccgccacaaacaaacatttgttggccatcagcagagaatccacactggagagaggccttatgtgtgtatggaatgtgggaaatcttttattcattcctatgaccgcattcgacaccagagagttcacactggagaaggggcttatcagtgcagtgaatgtgggaaatccttcatatacaaacagtcacttcttgatcaccatagaatccacacgggagaaaggccttatgagtgcaaagaatgtgggaaggccttcattcacaaaaaaagacttcttgagcaccagagaattcatactggagaaaagccttatgtgtgcatcatatgtgggaaatcatttatccgctcgtctgactacatgcgacaccagagaattcacactggagaaagggcttatgaatgcagtgactgtgggaaagccttcatctccaaacaaacacttcttaagcatcacaaaatccacactagagaaaggccttatgaatgcagtgaatgtggaaaaggcttctaccttgaggttaaacttcttcagcaccaaagaatccatactagagaacaactttgtgagtgcaatgaatgtggaaaagtcttcagccaccaaaaaagacttcttgagcaccagaaagttcacactggcgaaaagccctgtgagtgcagtgaatgtgggaaatgctttagacaccgcaccagcctcattcaacaccagaaagttcacagtggagagaggccttataactgcactgcatgtgagaaggcctttatctataaaaacaaacttgttgagcatcagcgaatccacaccggagaaaagccgtatgaatgtggtaaatgtgggaaagccttcaacaaaagatattcccttgtcaggcaccagaaggtacatataacagaagagccctag

SEQ ID NO: 2629 - DNA, 3441 bp, Homo sapiens
cgtacaggacctgtttcactgcagggggatccaaaacaagccccgtggagcagcagccagagcaacagcagccgcaagacattgtttctctccctctgcccccccttccccacgcaaccccagatccatttacactttacagagcatcgtgcatcaagtcaccagggtggtccattcaagctgcagatttgtttgtcatccttgtacagcaatctcctcctccactgccactacagggaagtgcatcacatgtcagcatactggagcatagtgaaagagtctattttgaagcttcaaacttagtgctgctgcagaccaggaacaagagagaaagagtggatttcagcctgcacggatggtcttgaaacacaaatggtttttggtctaggcgttttacactgagattctccactgccaccctttctactcaagcaaaatcttcgtgaaaagatctgctgcaaggaactgatagcttatggttctccattgtgatgaaagcacatggtacagttttccaaagaaattagaccattttcttcgtgagaaagaaatcgacgtgctgttttcatagggtatttctcacttctctgtgaaaggaagaaagaacacgcctgagcccaagagccctcaggagccctccagagcctgtgggaagtctccatggtgaagtataggctgaggctacctgtgaacagtacgcagtgaatgttcatccagagctgctgttggcggattgtacccacggggagatgattcctcatgaagagcctggatcccctacagaaatcaaatgtgactttccgtttatcagactaaaatcagagccatccagacagtgaaacagtcaccgtggaggggggacggcgaaaaatgaaatccaaccaagagcggagcaacgaatgcctgcctcccaagaagcgcgagatccccgccaccagccggtcctccgaggagaaggcccctaccctgcccagcgacaaccaccgggtggagggcacagcatggctcccgggcaaccctggtggccggggccacgggggcgggaggcatgggccggcagggacctcggtggagcttggtttacaacagggaataggtttacacaaagcattgtccacagggctggactactccccgcccagcgctcccaggtctgtccccgtggccaccacgctgcctgccgcgtacgccaccccgcagccagggaccccggtgtcccccgtgcagtacgctcacctgccgcacaccttccagttcattgggtcctcccaatacagtggaacctatgccagcttcatcccatcacagctgatccccccaaccgccaaccccgtcaccagtgcagtggcctcggccgcaggggccaccactccatcccagcgctcccagctggaggcgtattccactctgctggccaacatgggcagtctgagccagacgccgggacacaaggctgagcagcagcagcagcagcagcagcagcagcagcagcagcagcagcagcagcagcagcagcagcagcagcagcagcatcagcagcagcagcagcagcagcagcagcagcagcagcagcagcacctcagcagggctccggggctcatcaccccggggtcccccccaccagcccagcagaaccagtacgtccacatttccagttctccgcagaacaccggccgcaccgcctctcctccggccatccccgtccacctccacccccaccagacgatgatcccacacacgctcaccctggggcccccctcccaggtcgtcatgcaatacgccgactccggcagccactttgtccctcgggaggccaccaagaaagccgagagcagccggctgcagcaggccatccaggccaaggaggtcctgaacggtgagatggagaagagccggcggtacggggccccgtcctcagccgacctgggcctgggcaaggcaggcggcaagtcggttcctcacccgtacgagtccaggcacgtggtggtccacccgagcccctcagactacagcagtcgtgatccttcgggggtccgggcctctgtgatggtcctgcccaacagcaacacgcccgcagctgacctggaggtgcaacaggccactcatcgtgaagcctccccttctaccctcaacgacaaaagtggcctgcatttagggaagcctggccaccggtcctacgcgctctcaccccacacggtcattcagaccacacacagtgcttcagagccactcccggtgggactgccagccacggccttctacgcagggactcaaccccctgtcatcggctacctgagcggccagcagcaagcaatcacctacgccggcagcctgccccagcacctggtgatccccggcacacagcccctgctcatcccggtcggcagcactgacatggaagcgtcgggggcagccccggccatagtcacgtcatccccccagtttgctgcagtgcctcacacgttcgtcaccaccgcccttcccaagagcgagaacttcaaccctgaggccctggtcacccaggccgcctacccagccatggtgcaggcccagatccacctgcctgtggtgcagtccgtggcctccccggcggcggctccccctacgctgcctccctacttcatgaaaggctccatcatccagttggccaacggggagctaaagaaggtggaagacttaaaaacagaagatttcatccagagtgcagagataagcaacgacctgaagatcgactccagcaccgtagagaggattgaagacagccatagcccgggcgtggccgtgatacagttcgccgtcggggagcaccgagcccaggtcagcgttgaagttttggtagagtatcctttttttgtgtttggacagggctggtcatcctgctgtccggagagaaccagccagctctttgatttgccgtgttccaaactctcagttggggatgtctgcatctcgcttaccctcaagaacctgaagaacggctctgttaaaaagggccagcccgtggatcccgccagcgtcctgctgaagcactcaaaggccgacggcctggcgggcagcagacacaggtatgccgagcaggaaaacggaatcaaccaggggagtgcccagatgctctctgagaatggcgaactgaagtttccagagaaaatgggattgtctgcagcgcccttcctcaccaaaatagaacccagcaagcccgcggcaacgaggaagaggaggtggtcggcgccagagagccgcaaactggagaagtcagaagacgaaccacctttgactcttcctaagccttctctaattcctcaggaggttaagatttgcattgaaggccggtctaatgtaggcaagtagaggcagcgtgggggaaaggaaacgtggctctcccttatcatttgtatccagattactgtactgtaggctaaaataacacagtatttacatgtt

SEQ ID NO: 2630 - DNA, 754 bp, Homo sapiens
cgtttttcgagtcacgacttcgttgcaagtgctgcgaaccacgtgggtcctgggcgcgtttcgggtgctggcggctacagccggagttcaaacctaagcagctggaagggtaagaggtgttcgggatcctgagaggaaaaagaaaggagtgtagtcgcgggagtgggttaggtgaggagttagtgaagagatgagttcagctctaagaggtggcgaggaggatcggatgggaggaggggcagggagcgcctgtggacaagtgcataccggtcggcgcacgtcccacgccacgtggactcgcctttgtcggtggccgcctttctcgtcaggccgcgacgacagggctgtgccttatttgtgtctgtcgagagcagtgccgggcacggagttggcgctctgtaagtgcttgctgaataaatgacgggtgtgtgtgtcattcattcagcaagcgctgagtgcttactgttgtgtcaccgggaccgatgtggagggacatttttagggtgtatttctggcgctttagtcctgttttctcctggacaatttatgcttgccccgcaccccatcgtgcgattctccgcaggctttgggctttgactctctctctttttttttttttggaagggccaaagggggaaaaaagaattttttttctccaaatgaccggtaagccctggggttaggacccaaaaaagctttaacccggaaaaaattaacctgggggggaggggggggcaaccccccaccaaaaaat

SEQ ID NO: 2631 - DNA, 5273 bp, Homo sapiens
cggacgcgtgggcactcacaaaccagttctcagatagtaaacagcacattgaagtgttgaaggagtccttgactgctaaggagcagagggctgccatcctgcagactgaggtggatgctctccgattgcgtttggaagagaaggaaaccatgttgaataaaaagacaaaacaaattcaggatatggctgaagagaaggggacacaagctggagagatacatgacctcaaggacatgttggatgtgaaggagcggaaggttaatgttcttcagaagaagattgaaaatcttcaagagcagcttagagacaaggaaaagcagatgagcagcttgaaagaacgggtcaaatccttgcaggctgacaccaccaacactgacactgccttgacaactttggaggaggcccttgcagagaaagagcggacaattgaacgcttaaaggagcagagggacagagatgagcgagagaagcaagaggaaattgataactacaaaaaagatcttaaagacttgaaggaaaaagtcagcctgttgcaaggcgacctttcagagaaagaggcttcacttttggatctgaaagagcatgcttcttctctggcatcctcaggactgaaaaaggactcacggcttaagacactagagattgctttggagcagaagaaggaggagtgtctgaaaatggaatcacaattgaaaaaggcacatgaggcagcattggaagccagagccagtccagagatgagtgaccgaatacagcacttggagagagagatcaccaggtacaaagatgaatctagcaaggcccaggcagaagttgatcgactcttagaaatcttgaaggaggtggaaaatgagaagaatgacaaagataagaagatagctgagttggaaagtctcacctcaaggcaagtgaaagaccagaataagaaggtagcaaatctgaagcacaaggaacaggtggaaaaaaagaagagtgcacaaatgttagaggaggcgcgacgacgggaggacaatctcaacgacagctctcagcagctacaggacagtctccgtaagaaggatgacaggattgaagagctggaagaagcactaagagaaagtgtacagataactgcagagcgggaaatggtgctagcacaagaggaatcagccaggaccaatgctgaaaaacaggtggaggagttactgatggccatggagaaggtaaagcaggaactagaatccatgaaagcaaagctgtcctccacccagcagtctctggcagaaaaggaaactcacttgactaatcttcgggcagagagaaggaaacacttagaggaagttctggagatgaagcaagaagctcttctggctgccattagtgaaaaagacgccaatatagctctcttggagctttcgtcctctaagaagaagacccaagaggaagtggctgccctgaagcgggagaaggatcgtctggtacagcagcttaagcagcagacgcaaaatcgaatgaagctaatggccgacaactacgaggatgaccacttcaaatcctcccattccaatcaaacaaatcacaagccctccccagaccaggatgaggaggagggtatatgggcatagccaatcagaggcttagttcagccattttgttcagaacgatcatccagcccctcttagaacttgaccaaaatagaagtaaattaaagttgtacattggacacctgacaaccctctgccatgaccgagaccccctgatcctccgtggactcactccaccagcttcctataacttggacgatgaccaggcggcttgggagaatgagctgcagaagatgacccgggggcagcttcaggatgagttagagaaaggtgaacgggacaatgcagaactgcaggagtttgccaacgccattcttcagcagatagcagaccattgtcccgacatcctagagcaagtggtcaacgccctggaagagtcctcttgaccctgctttatggggaagcctgaggtagtcaacccaggagccaagaaaagagaactacgaggaacaggtgcccggaaccttcttggcaccaaacactacaaacttcatcccaacttgctcacttgaagaagtgtgattccagcaccgtttctacatctgccatcttactctgcctttctgctttggatgtggtctctacactaaccttcttgatgtccagggtagataaagggtcgaatctctctgaagaactgccacctggtcatcagcagtggagaactgtgggagctggtggctctgccctgacagagagccatggagcagaggagcctctcacctcctgtcctctgacatgagaatgaaaccaggaatggacttggagttcaacaggctgagaggatgcctccaatggaccagagagctgagtgttctaatatcacaataggtgctttctcctaaaagggcaaaaaacaatctcaaaaagattagaaaaagagaaggggggaagggaagagaaaatcgactcttctttttactgtctcttctgcttactttccacatgagatgctttgtaccggggagctgtgagcaggcctcacgatggcttgggagcactcgttctcccaaggtctgagtcttcatccagccctgcctgtctgtcgcagccttcctcactctgttcctcggccagttaacaagaagatggtgtgaggtgttctctaccagtctctcctgtttgagactgttgacgttatcatactgaggtgttagatcaaatatctctaattgaagaacatgtgaggttgaaagagcaccagccagggcaacatagcgtgaccctgtctctacaaaaaattaaaaagagaacatacaaagttgacatatgagaccctgttgtccccgcctgcagctttgccccagtaacaaatgcccgttgctcttgggctggtttcccctgaacacctccaagaggctgcctgccttgccagcacccgtgtcctgagctcctgcagcccagtggctgctgaagttgtgatccctcactcaccctgctagctttgcccttgactcgtcttctctgaacctcagcctcgtgcattgcctggaaccttcttctagcataaatgaaggtttttcctcctacacacattccttcctcggttatttcattcagagaatatttatgaaatgcctactgtgtgcaagtcatccatccttgaaaaggccacttctcagtgagggagagatgtagtggattctgtgagacatacctgctggagttgaagcagtaaatagcatgtccttcccctccccgatcttaaggtgtgttttctagaaaagttccctaatggaattcatgagtttgggggtctcagtcacccgcttgcctgtaggattccatttgatgattctggatttttgctgtttgttattgcccttagaggggctctgagtatctacttgtgggtggccatttcctgacatctgcatgtacctcgtggaattcagccagcttcatgttgcaaatcagaaagctgaccccaagactgcaaatcaatgaaggtattggcattgttaaggtcgtagcgtagacaacagcagtcataaataattaggcaggaacttaacccaaatctagttctttgaccacctctaccaccagaacccagcagacactcacatctcctgataagagttgctggactcgatgtttttgttttgcattttctcctctccttccccacttactcagagaatttaaagtctgtagagtcagcacagccccatcagtccaggaacttcccaccaccagcccttgactgtcccattaactgacatggtcagatttccagctccccctactccctgctgtgaaacaatccctctccctgtgagaggaaactgtggagcgtttcttatcgaaggttaaatggactctgctcataaacctcttactgagatgcttcctgatagccaggctggccagagaggggtgcaggggttagatagtaagtggtggtcgtttgtggtcagttacctcaattctgttcattgcagtgcccgtaaaccatgtagaaagctcccagcactgaaaggcaggagtgttagcatctcgctttatccaccataacgtaaagaactgcggtgtgataacaagccttcacggggccacggtggaaccaagacagcaggcgaggccatgcctaaaacaagttggtctggcacgggcactggccagctgctctctccaagcaggtggcccagatcccacccacgtggactttctcatcaggtgcagcgcctgccactctcagccactgggtgtgtcactctcctcttcatctcagcattctccatcacttcccctccagaaaaacggatggaaggaagccctctgtgacactgcttctgagaagaagcatttccgggaccgatatcatctgtctggtctctgtgaacagcaaggaatcttcttgaccgttcttgggcactggaggctggttaggagttcagtaataaacgtggccttcgtgctgtagggcagagtggatgcagtttgtagctttcagagtgtctcattgagtctagatcattgaaccaacacttaaccaaatgtcccactcccatcacactaggacttgtcattccatgcccctctcctagtggtcatggtttcatatgggcatacaactgctactgaagttatatagccttgaaaactcagtgcaggttgcccttaattttccccaaacccctccatcggcaagtctagttgccctttagcacctaaagatctgcaccccaaaccaatgtcaccataaagagggcacgaagaagagtgggtgtgatcccaacggggttttgtaactgaagaagcccagtgtgagcttctcatcttttcatatacctctaacccccggtactcattgaatcattgatgaggtatctcaattgagatttgcaaggactttgataccatttgaaatggaaaaattttgaacgggctttaacatgtttaagaaatatggatggggccggccacagtggctcacgcctgtaatcccagaactctggaaggctgaggcaggcggatcacctgagatcaggagttcgaggccagcctggccaagatggcaaaaaccccgactctactaaaaatacaaaattagccaggcgtggtggcgtacgcctgtaatcccagctactcaggaggcaggagaatcgcttgagcctgggaggcagaggctgcggtgagccgagatcgtgtcactgcactccagcctgggtgacagagactccattt

SEQ ID NO: 2632 - DNA, 1501 bp, Homo sapiens
  misc_feature (1)...(1501): n = a,t,c or g
cggacgcgggggcggtttttgggtctgttacccaaagaatgataaaggtggttttatttcaagaagtcgatcaaaaagaaagccccagcgctctagagctcagctgacgggaaagggggtgcgcagcctcgagtttgagagctacccggagctccaagacaggggtgcgtgcgacgacctgggacgctggaaacccggagctgcgcgctgggcggaaaggactcctagtgggcccggctganaaggcggaggtggcgcgcgaggggcgggctcgtgccaacgctggcctgggccgaggccactggtgcatatgttcccgggagggataagccagacctgccaacctggaagaggaatttccgctctgccctcaaccgcaaagaagggttgcgtttagcagaggaccggagcaaggaccctcacgacccacataaaatctacgagtttgtgaactcaggagttggggacttttcccagccagacacctctccggacaccaatggtggaggcagtacttctgatacccaggaagacattctggatgagttactgggtaacatggtgttggccccactcccagatccgggacccccaagcctggctgtagcccctgagccctgccctcagcccctgcggagccccagcttggacaatcccactcccttcccaaacctggggccctctgagaacccactgaagcggctgttggtgccgggggaagagtgggagttcgaggtgacagccttctaccggggccgccaagtcttccagcagaccatctcctgcccggagggcctgcggctggtggggtccgaagtgggagacaggacgctgcctggatggccagtcacactgccagaccctggcatgtccctgacagacaggggagtgatgagctacgtgaggcatgtgctgagctgcctgggtgggggactggctctctggcgggccgggcagtggctctgggcccagcggctggggcactgccacacatactgggcagtgagcgaggagctgctccccaacagcgggcatgggcctgatggcgaggtccccaaggacaaggaaggaggcgtgtttgacctggggcccttcattgtaggctccctggggcccccagatctgattaccttcacggaaggaagcggacgctcaccacgctatgccctctggttctgtgtgggggagtcatggccccaggaccagccgtggaccaagaggctcgtgatggtcaaggttgtgcccacgtgcctcagggccttggtagaaatggcccgggtagggggtgcctcctccctggagaatactgtggacctgcacatttccaacagccacccactctccctcacctccgaccagtacaaggcctacctgcaggacttggtggagggcatggatttccagggccctggggagagctgagccctcgctcctcatggtgtgcctccaacccccctgttccccaccacctcaaccaataaactggttcctgctatgaaaa

SEQ ID NO: 2633 - DNA, 912 bp, Homo sapiens
  misc_feature (1)...(912): n = a,t,c or g
tttttttaccccattgtagaagaggaataatttatttctataaggattttaataatgttccctaagtaattagtaatcaagattttcttcaaattcaaattaacaaatatgtttgttaatctaaataatatacatatttatgtatttatatatgtatatattttaatctttctgtaattcagtctttaactgtgaacttttacatgatggaagcagtgaaggactcaatgtcatagtacattttgatagtatttgataggctttttcaggtcaattaatttagttgcttgcaaatataaatcaagcttgctccagttccacaaggactccaccacagtctttaggatggagaaaaatcactggttttccatgtgctcctattttgacctcttcacttagactgcggatcttcttttttttcaaatccatcacagctgcattaatattatccacctcgatgcagatgtgatgcattcctccagccttgtttttctgcagaaaacctgcaattggactgtcacgtcccaatggatgaagcagttccatcttggtatttcccaggttgacaaaaacaacagatactccatgttcaggaagagggaccgcttcacttacctgggcccccagaatattcttataaaatgctgcagccttttccaaatctggcactgctatggctacatggttgagtcgacccaggttccacacagaacctgtcacttgatccaagggctgtgatgtggaagaagctcttactgttggaatgggagcttgaagtctggaaaaaagccctacggcattcgcggctgcagccttcagcacccgcgccattttggaaagcaacccgccacgtcaagactgaattccacggcactcaatatggtcatcgaannnnnnnnnnctngggcctca

SEQ ID NO: 2634 - DNA, 5993 bp, Homo sapiens
atgacaacattgatgagacatacggtgtgaatgtgcagtttgagtctgatgaggaggaaggtgatgaagacgtatacggggaggttcgagaagaggcatctgatgatgacatggaaggggacgaggctgtcgtgcgctgcaccctctcggctaatatgtatgttgatgaaatcttagtctggtgtgcttctgaactcaatattccagagttttttcctctggaaagtcctcacaagaaggtgggctatggattgtcaagtagaacttggttgcagggtggtggcaaagtgatcgaggctggcagagacctgctcgtagcctcaggtgaactgatgagttccaagaagaaggatttgcaccctcgggatattgatgcattttggctgcagcggcagctcagtcgtttctatgatgatgccatcgtgtcgcagaagaaggcagatgaagtattggagattttgaagacggccagtgatgatcgggaatgtgaaaatcagctggttctgctgcttggtttcaacacctttgatttcattaaagtgttgcggcagcacaggatgatgattttatactgtaccttgctggccagtgcacaaagtgaagctgaaaaggaaaggattatgggaaagatggaagctgacccagagctatccaagttcctctaccagcttcatgaaaccgagaaggaggatctgatccgagaggaaaggtcccggagagagcgagtgcgtcagtctcgaatggacacagatctggaaaccatggatctcgaccagggtggagaggcactggctccacggcaggttctggacttggaggacctggtttttacccaagggagccactttatggccaataaacgctgtcagcttcctgatggatccttccgtcgccagcgtaagggctatgaagaggtgcatgtgcctgctctgaagcccaagccctttggctcagaagaacaactgcttccagtggaaaagctgccaaagtatgcccaggctgggtttgagggcttcaaaacactgaatcggatccagagtaagctctaccgtgctgcccttgagacggatgagaatctgctgctgtgtgctcctactggtgctgggaagaccaacgtggccctgatgtgcatgctccgagagattgggaaacacataaacatggacggcaccatcaatgtggatgacttcaagattatctacattgcccccatgcgctccttggtgcaggagatggtgggcagctttggaaagcgcctggccacttatggcatcactgttgctgaactgactggggaccaccagctgtgcaaagaagagatcagtgccactcagatcatcgtctgcacccccgagaagtgggacatcatcacccgcaagggtggtgagcgcacctacacccagctggtgcggctcatcattctggatgagattcatcttctccacgatgacagaggtcctgtcttagaagctttagtggccagggccatccgaaacattgagatgacccaagaggatgtccgactcattggtctcagtgccaccctacccaactatgaagatgtagccacctttctacgtgttgaccctgccaagggtctcttttactttgacaacagcttccgtccagtgcctctggaacagacatatgtgggtatcacagagaaaaaagctatcaagcgtttccagatcatgaatgaaatagtctatgaaaaaatcatggaacatgctggaaaaaatcaggtgctcgtgtttgtccattctcgcaaagaaactgggaagacagcaagggcaatccgtgacatgtgtctggagaaggacactttgggtctgtttcttcgcgagggttctgcctccactgaagtccttcgtacagaagcagagcagtgcaagaacttggagctgaaggatcttttgccctatggctttgctattcatcatgcaggcatgactagagttgaccgaacacttgtagaagatctttttggtgacaagcatattcaggttttagtttccaccgcaactctggcgtggggtgtaaatcttcctgcacatacagtcatcattaaaggtacccaagtgtacagtccagagaaggggcgttggacagagctgggagcactggatatcctgcagatgctgggccgtgctggacggccgcagtatgacaccaagggtgaaggcatcctcatcacatcccatggggagctccagtactacctctccctcctcaaccagcagctgcctatcgagagccagatggtctccaagctgcctgacatgctcaatgcggaaattgttctgggcaatgtccagaatgcaaaggatgcagtgaactggctgggctatgcctacctatacatccgaatgctccggtcccctaccctctatggcatttctcatgatgacctcaagggagatcccttgctggaccagcgccgactcgatcttgttcacactgctgccttgatgctggacaagaacaatctggtcaagtacgacaagaagacaggcaacttccaggtgacagaacttggccggatagcaagtcactactatatcaccaatgatactgtgcagacctacaaccagctgctgaagcctactctgagtgagattgagcttttccgagtgttctccttgtcctcagagttcaagaacatcactgtaagagaggaggagaagctggagctgcagaagttgctggagagagtgcccatccctgtaaaggagagcattgaggaacccagcgctaagatcaacgtgcttctccaagccttcatctcacagctgaaactcgaaggctttgcgctgatggctgacatggtgtatgtgacccagtcggctggccggttgatgcgtgcaatcttcgaaattgtcctgaaccgaggttgggcacagcttacagataagaccctgaatctctgcaagatgattgacaagcgcatgtggcagtccatgtgtcctcttcgccagttccgaaaacttcctgaggaagtagtgaagaagattgagaagaaaaacttcccctttgagcggctgtatgacttgaatcataatgagataggtgaacttattcgaatgccgaagatggggaagaccatccacaagtatgtccatcttttccccaagttggagttgtcagtgcacctgcagcctattacacgctctacgctgaaagtagagctgactatcacaccagatttccagtgggatgaaaaggtccatggttcgtcagaggcattttggattctggtggaggatgtggacagcgaggtgattctgcaccatgaatattttctgctgaaggccaagtatgcccaggatgagcacctcatcacattctttgttccagtctttgaaccactacctcctcagtacttcattcgagtagtgtctgatcgctggctctcttgtgagacgcagctacctgtctccttccggcatctgatcctaccagagaagtacccacctccaactgaactgttggacctgcagccattgcctgtgtctgctctgagaaacagtgcttttgagagcctttaccaagataaatttcctttcttcaatcccatccagactcaagtatttaataccgtgtacaacagtgatgataacgtgtttgtgggggcccccacgggcagcgggaagactatctgcgcggagtttgccatccttcggatgctgctgcagaattctgagggacgctgtgtctacattacccctatgaggctctggcaggagcaggtatacatggactggtatgagaagtttcaggacaggctcaacaagaaggtcgtgctgctgacgggggagaccagcacagacctgaagctcctgggcaaaggcaacatcatcatcagtacccctgagaagtgggacatcctctctcggaggtggaagcagcgcaagaacgtccagaacattaacctctttgtggtggatgaggtccaccttattgggggcgagaatgggcctgtcttggaagtgatctgctcccggatgcgctacatctcctcccagattgagcggcccattcgcattgtggcacttagctcctcactctccaatgccaaggatgtggctcactggctgggctgcagtgccacctccaccttcaacttccatcctaatgtgcgccctgtacctttggaactgcacatccagggcttcaacatcagtcacacacagactcgcctgctctctatggccaagcctgtgttccatgctatcaccaaacactcacccaagaagcctgtcatcgtttttgtcccatctcgtaagcagacccgcctcactgcaatagacatcctcactacctgtgcagcagacatccagcggcagaggttcctgcactgcaccgagaaggacctgatcccttacctggagaagctcagtgacagcacactcaaagagaccctgttaaatggggtgggctacctgcatgaaggcctgagccccatggagaggcgcctggtagagcagctcttcagctccggggctatccaggtggtggtagcttctcggagtctctgctggggcatgaatgttgctgctcatctagtgatcatcatggatactctgtactacaatggcaagatccatgcctatgtggattaccccatctatgatgtgcttcagatggtgggccatgccaaccggcccctgcaggatgatgaggggcgctgtgtcatcatgtgtcagggttctaaaaaggattttttcaaaaaatttttgtatgagccattgccagtagagtctcacctggaccactgtatgcatgaccacttcaatgctgagattgtcaccaagaccattgagaacaagcaggatgctgtggactacctcacctggacctttctgtatcgcagaatgacacagaaccccaattactacaacctgcaggggatatcccatcgtcatctgtctgaccacctgtcagagctggtggagcagaccctcagtgacctggagcagtccaaatgcatcagtattgaggacgagatggatgtggcccctctgaacctgggcatgattgctgcctactattacataaactacaccaccattgagctcttcagcatgtctctgaatgctaaaaccaaggttcgaggacttattgagatcatttccaatgcagcagagtatgagaacattccaatcaggcatcatgaagacaacctcctgcgccagttggctcagaaggtcccccacaagctgaataaccccaagttcaatgatccacatgtgaagaccaatctgctgctgcaggctcacctgtcccgcatgcagctaagtgctgaactacagtcagacacagaggagatccttagtaaggcaatccggctaattcaggcctgtgtggatgtactctccagtaatgggtggcttagtcctgctctggcagccatggaactggcccagatggtcacccaagccatgtggtctgaggactcttacctgaggcggttgccccctttcccttcggggcttttcaaacgttgcacagataagggagtggagagtgtttttgacatcatggagatggaggatgaagaacggaatgcattgcttcagttgactgacagccagattgcagatgtggcccgcttctgtaaccgctacccgaatattgaactgtcctatgaagtggtggataaagacagcatccgcagtggcggaccagttgtggtgctagtgcaactggagcgagaggaggaagtcacgggcccagttattgcacctctcttcccacagaaacgtgaagagggctggtgggttgtgattggagacgccaagtccaacagcctcatctccatcaagaggctgaccctgcagcagaaagccaaggtgaagctagactttgtggccccagccacaggtggccgccacaataccctgtacttcatgagtgacgcatacatgggatgtgaccaggagtataagttcagtgtggatgtgaaagaagctgagacagacagtgattcagattga

SEQ ID NO: 2635 - DNA, 5993 bp, Homo sapiens; identical to SEQ ID NO: 2634

SEQ ID NO: 2636 - DNA, 1204 bp, Homo sapiens
ttttttttttttaggtttttcaataccttctttattatgtctataaaattatatgtagcattggaaatgttattgaatatgacaccaacaacgtgctattggattttttaaattttgacttcttttaaagaaggggataacaatctgtggaaaatgcttttactcgtatcatgccaatatactgcaaggagtatttcaaaataatataaaagtaattcacagacttagattaagtgaagatcaaatgaccccaaaatttttcttccttagtttttcacagcaactgctaaagtccataagctgatttttccaagaaaattattctaataattttgagtgttcaatccgtgcaatggtccagtcaggctttactccttgtgtgaactccctctgaaactcatagcttgcactaagaagttgtttagtttccacattctgattccccaacttaacctggaatacactggctcctcttaaagtttcactggggatgttggcactggttagataccaaaagcacatcaggatgttaacaaacttccttcctttctcatcatagtaaatggagatgtctcctgttgatgtaaatacaatttcatctatgttagcagcaagggcatttttatggttgtcaggtagtgaagtaaccttttctttcaatgcatgtagcacctctttggccacaagttcttccaacagatcaaatttacactgtgacagcaacttggatacatgagcaaaagcctgcttcgctccctcggagaactctgtgatgctgaactctttgtcgaaataggcccagataaggaaggccttaattcgagtcctaacccagttgatggggttggagaatcccaggacgatcatcttggttttctggtgctgctggggcttctcctccgtgctgtagctgcgctgagggcaggcagggaaagaagcgaaggctgcggggagtcccgggctgctgagcactggccaccgggagccctgggcaggtagcgccgaggctgccaaggccctagcgcttcgtggaaataacgccgctcccaagccgaggcgacagcggcagaagtagcaaagtgtggccgacggcagcctcacctcggccacagcaggagtccggagtcggacggccccgcagggcagcgaccgagagtgcaggaactggggtagcaaacgagcggccagcgccatttttatgacg

SEQ ID NO: 2637 - DNA, 3387 bp, Homo sapiens
atccagttcacgcagtcgtcattccagtatctcacctgtcaggcttccacttaattccagtctgggagctgaactcagtaggaaaaagaaggaaagagcagctgctgctgctgcagcaaagatggatggaaaggagtccagctacgaaagaagtggctcttacagcgggcgatcgcccagtccctatggtcgaaggcggtccagcagccctttcctgagcaagcggtctctgagtcggagtccactccccagtaggaaatccatgaagtccagaagtagaagtcctgcatattcaagacattcatcttctcatagtaaaaagaagagatccagttcacgcagtcgtcattccagtatctcacctgtcaggcttccacttaattccagtctgggagctgaactcagtaggaaaaagaaggaaagagcagctgctgctgctgcagcaaagatggatggaaaggagtccaagggttcacctgtatttttgcctagaaaagagaacagttcagtagaggctaaggattcaggtttggagtctaaaaagttacccagaagtgtaaaattggaaaaatctgccccagatactgaactggtgaatgtaacacatctaaacacagaggtaaaaaattcttcagatacagggaaagtaaagttggatgagaactccgagaagcatcttgttaaagatttgaaagcacagggaacaagagactctaaacccatagcactgaaagaggagattgttactccaaaggagacagaaacatcagaaaaggagacccctccacctcttcccacaattgcttctcccccaccccctctaccaactactacccctccacctcagacaccccctttgccacctttgcctccaataccagctcttccacagcaaccacctctgcctccttctcagccagcatttagtcaggttcctgcttccagtacttcaactttgcccccttctactcactcaaagacatctgctgtgtcctctcaggcaaattctcagccccctgtacaggtttctgtgaagactcaagtatctgtaacagctgctattccacacctgaaaacttcaacgttgcctcctttgcccctcccacccttattacctggagatgatgacatggatagtccaaaagaaactcttccttcaaaacctgtgaagaaagagaaggaacagaggacacgtcacttactcacagaccttcctctccctccagagctccctggtggagatctgtctcccccagactctccagaaccaaaggcaatcacaccacctcagcaaccatataaaaagagaccaaaaatttgttgtcctcgttatggagaaagaagacaaacagaaagcgactgggggaaacgctgtgtggacaagtttgacattattgggattattggagaaggaacctatggccaagtatataaagccaaggacaaagacacaggagaactagtggctctgaagaaggtgagactagacaatgagaaagagggcttcccaatcacagccattcgtgaaatcaaaatccttcgtcagttaatccaccgaagtgttgttaacatgaaggaaattgtcacagataaacaagatgcactggatttcaagaaggacaaaggtgccttttaccttgtatttgagtatatggaccatgacttaatgggactgctagaatctggtttggtgcacttttctgaggaccatatcaagtcgttcatgaaacagctaatggaaggattggaatactgtcacaaaaagaatttcctgcatcgggatattaagtgttctaacattttgctgaataacagtgggcaaatcaaactagcagattttggacttgctcggctctataactctgaagagagtcgcccttacacaaacaaagtcattactttgtggtaccgacctccaaaactactgctaggagaggaacgttacacaccagccatagatgtttggagctgtggatgtattcttggggaactattcacaaagaagcctatttttcaagccaatctggaactggctcagctagaactgatcagccgactttgtggtagcccttgtccagctgtgtggcctgatgttatcaaactgccctacttcaacaccatgaaaccgaagaagcaatatcgaaggcgtctacgagaagaattctctttcattccttctgcagcacttgatttattggaccacatgctgacactagatcctagtaagcggtgcacagctgaacagaccctacagagcgacttccttaaagatgtcgaactcagcaaaatggctcctccagacctcccccactggcaggattgccatgagttgtggagtaagaaacggcgacgtcagcgacaaagtggtgttgtagtcgaagagccacctccatccaaaacttctcgaaaagaaactacctcagggacaagtactgagcctgtgaagaacagcagcccagcaccacctcagcctgctcctggcaaggtggagtctggggctggggatgcaataggccttgctgacatcacacaacagctgaatcaaagtgaattggcagtgttattaaacctgctgcagagccaaaccgacctgagcatccctcaaatggcacagctgcttaacatccactccaacccagagatgcagcagcagctggaagccctgaaccaatccatcagtgccctgacggaagctacttcccagcagcaggactcagagaccatggccccagaggagtctttgaaggaagcaccctctgccccagtgatcctgccttcagcagaacagacgacccttgaagcttcaagcacaccagctgacatgcagaatatattggcagttctcttgagtcagctgatgaaaacccaagagccagcaggcagtctggaggaaaacaacagtgacaagaacagtgggccacaggggccccgaagaactcccacaatgccacaggaggaggcagcaggtaggagcaacggtgggaatgccctctgaggaatgcagtgatgtccatcagtcacctctcacccagagcctggcaaattcagtctctttcacagaacctaaagccaagccaggttcagtgggaaatcccacctgtccaaacactgtgtgagacaccagaattagaggcctgcaagcctgcttccttcatccccaatgcccagatgggacaggtcaccagcctcctgtgtctacccccacctttcttgcttgctggcctcctctctctgcagtgcctctctcatccctgcaatccagacagcacatgcagcagctcatatgtgaaaaacaagacccagagaggggaaatcatttgaatcctgtcctgggattgctttgtgttcctggatttggagaatttctgggaacacaggagaaggaat

SEQ ID NO: 2638 - DNA, 393 bp, Homo sapiens
gagatggcattgtaaacgccagagcgagggtctgcctaccccgagactgctgctgttcggagacctgcaggtgaatgccccatcaccatgtctgacctggaggcaaaactttcaactgagcatttgggggataagataaaagatgaagatattaaactcagggttattggacaggatagcagtgagattcatttcaaagtgaaaatgacaacacctctcaagaaactcaagaaatcgtactgtcagagacagggcgttccagtgaattccctcaggtttctctttgaaggtcagagaattgctgataatcatactccagaagaactgggaatggaggaagaagatgtgattgaggtttatcaggaacaaatcggaggtcattcaacagtttag

SEQ ID NO: 2639 - DNA, 1831 bp, Homo sapiens
gcccccgcccgccccgggccctgatggactgaatgaaggctgcctacaccgcctatcgatgcctcaccaaagacctagaacgtgcgccatgaacccggagctgacaatggaaagtctgggcactttgcacggcgcgcgcggcggcggcagtggcgggggcggcggcgggggcggcgggggcggcggcgggggcccgggccatgagcaggagctgctggccagccccagcccccaccacgcgcgccgcggcccgcgtggctcgctgcggggccctccgccgcctccaaccgcgcaccaggagctgggcacggcggcagcggcggcagcggcggcgtcgcgctcggccatggtcaccagcatggcctcgatcctggacggcggcgactaccggcccgagctctccatcccgctgcaccacgccatgagcatgtcctgcgactcgtctccgcctggcatgggcatgagcaacacctacaccacgctgacaccgctccagccgctgccacccatctccaccgtgtctgacaagttccaccaccctcacccgcaccaccatccgcaccaccaccaccaccaccaccaccagcgcctgtccggcaacgtcagcggcagcttcaccctcatgcgcgacgagcgcgggctcccggccatgaacaacctctacagtccctacaaggagatgcccggcatgagccagagcctgtccccgctggccgccacgccgctgggcaacgggctaggcggcctccacaacgcgcagcagagtctgcccaactacggtccgccgggccacgacaaaatgctcagccccaacttcgacgcgcaccacactgccatgctgacccgcggtgagcaacacctgtcccgcggcctgggcaccccacctgcggccatgatgtcgcacctgaacggcctgcaccacccgggccacactcagtctcacgggccggtgctggcacccagtcgcgagcggccaccctcgtcctcatcgggctcgcaggtggccacgtcgggccagctggaagaaatcaacaccaaagaggtggcccagcgcatcacagcggagctgaagcgctacagtatcccccaggcgatctttgcgcagagggtgctgtgccggtctcaggggactctctccgacctgctccggaatccaaaaccgtggagtaaactcaaatctggcagggagaccttccgcaggatgtggaagtggcttcaggagcccgagttccagcgcatgtccgccttacgcctggcagcgtgcaaacgcaaagagcaagaaccaaacaaagacaggaacaattcccagaagaagtcccgcctggtgttcactgacctccaacgccgaacactcttcgccatcttcaaggagaacaaacgcccgtcaaaggagatgcagatcaccatttcccagcagctgggcctggagctcacaaccgtcagcaacttcttcatgaacgcccggcgccgcagcctggagaagtggcaagacgatctgagcacagggggctcctcgtccacctccagcacgtgtaccaaagcatgatggaaggactctcacttgggcacaagtcacctccaaatgaggacaacagataccaaaagaaaacaaaggaaaaagacaccggattcctagctggggcccttcactggtgatttgaaagcacaattctcttgcaaagaaacttatattctagctgtaatcataggccaggtgttcttcttttgtttttaatggctatggagtccaagtgcaagctgaaaaattaatctcttagaaccagacactgttctctgagcatgctaagcatcagaaacccaaatggggccg

SEQ ID NO: 2640 - DNA, 3215 bp, Homo sapiens
  misc_feature (1)...(3215): n = a,t,c or g
tttcgtagcggcggcgcggcgactgaagcgcgcgaaaagctgaggcggcaacgtcggggacggctgcgcgggacggctctgtaggaaggaacttggttccccctccctcagcttccgccccaaaagcagaagtagaaagtaatgaaaaggacaacagacctgaggaagaagagcaagtaatacatgaagatgatgaaagaccttctgagaaaaatgaattttctagacgaaaacgttctaaatcagaagacatggacaatgtacagtctaaacgtcgtcgatatatggaagaagaatatgaggcagaatttcaagtaaagattacagccaaaggagacattaaccagaaacttcaaaaggttatacagtggttgctggaagaaaaattgtgtgcgctgcagtgtgctgtatttgataagactttggcagaattgaaaacacgagtggaaaagattgaatgtaacaagaggcataaaacagttctcactgaactacaggccaagatagccaggttaaccaaacgctttgaagcagccaaagaagatcttaagaaaagacatgaacatccacccaacccaccagtatcaccaggaaaaactgtaaatgatgtcaacagcaataataacatgtcttacagaaatgcaggcacagtgagacagatgctggagtccaaaagaaatgtaagcgagagtgcaccaccatcctttcaaactcctgtgaatacagtatcttcaaccaatcttgtcactcctccagcagttgtcagtagtcaacctaaattgcagactccagtgacttcgggttccctcacagcaacgtcagttcttcctgcacccaatacagctactgtagttgctactactcaggtgcctagtggaaatccccagcctacaatctctttacagcctttgccagtgattttgcatgtacctgttgcagtatcctcccagcctcagcttctacagagccatccagggactttggtgactaatcaaccatctggcaatgttgaattcatttctgtgcaaagcccacctacagtgagtggtcttaccaaaaatccagtatccttgccatccttgccaaatcccactaaaccaaacaacgttccttctgtgcccagtcctagtattcaaaggaaccctactgccagtgctgcaccattgggaacaacacttgctgtgcaggctgttccaacagcacactctattgtacaagccacaaggacttctttacccacagtgggcccatcaggactctatagtccatcaactaatcgaggtcctatacagatgaaaattccaatttctgcatttagtacttcgtctgctgcagaacagaacagcaataccaccccaagaattgaaaaccagacaaacaaaacaatagatgcttctgtcagtaagaaagcagctgatagcacatcacagtgtggaaaagccactggcagtgattcaagtggtgtcattgatctcacaatggatgatgaagagagtggagcttcacaagaccccaaaaaactaaatcacactcctgtatcaaccatgagttcttctcagcctgtgtcacgaccattgcaacccatacaaccagcaccgcctcttcaaccatctggggtgccaacaagtggaccatctcagaccaccatacacttactacctacagctccaactaccgtgaatgtaacacatcgtccagtaactcaggtgaccacaagactccctgtaccaagagctcctgcaaaccaccaggtggtttatacaactcttcctgcaccaccagctcaggctcccttgcgaggaactgttatgcaggctcctgctgttcggcaggtcaatccccaaaatagtgttacagttcgagtgcctcaaacaaccacatatgttgtaaacaatggactaaccctgggatcaacaggacctcagctcacagtgcatcaccgaccaccacaagtgcatactgagcccccacgccccgtgcacccagcacccttaccagaagctccacaaccacagcgtctgcccccagaagctggcagcacatctcggccctcagaagccacactggaagttagccacgcgttcagagtcaaaatggccatagtactggtcatggagtgtcctggaggtggatcgaagctgtgccactgttgatagctaccatctctatgcttaccatgaggaacccagtgccactgtgccctcacaatggaaaaagattggggaagtcaaggcacttcccttgcccatggcatgtactctcacccagtttgtatctggtagcaaatactactttgcagtacgagccaaggatatttatggacgttttgggcctttctgtgatcctcagtcaacagatgtgatctcttctacccagagcagttaaaccttggagcctttatattttcctcttttaaaatttccaccttttggtcttgtttttaatcttgtgcatgataccccatgtaaaatccaccttgtgcaagatttcttggacagatgtgtgtatacactacatttgtttataaccagaagcaaaataaactcagcccacaaagctagaatatttatcctggacagtttaaaatatggggtttggaaatgtaaatgtgtaccttgctttagttttgaggctggggaatatgtgtgggtgtttatgtgtgtttttccttatgtaggtgttattgcattggagtctcccattttcattctcaaatttacctcttaaagtacgaagtaagtagatcaaaggatttgagatgtgtaactggcatgattctgcttttgaaggatctatagtatcattttagttaagtgggtcaaacagaatcaaaacaaaacccaaagaaataaaaaacaaaatggctaaatagtttaaaataggttaattcgaacacaggaaaggatctatttgttgtttcttttgtctggtctcctgagttgttaattaggtgaaaaaagatctgcaatggccccctccctttcctaatctggcttttacatttattttgtgccttaaagattaactacaaagataaacatggccaaaaataaataaataaatatggccatatgtccgntgttgcttagtcttcccttgcagccttttacccttgatttctccttcatctctaccaaatatagcacaactcctcaagtaattttttttttttgaaatggagttttgctcttgttgcccaggctggaaaggcgggg

SEQ ID NO: 2641 - DNA, 1251 bp, Homo sapiens
ggagagaagcagcttcggctgcagcaaaccacgcaggtccttcttgatcatctagaactgaccgctccgccttgccaggagtctgcagaaccacgtggctagcctgcctgaagttctcacctctccaggaaggcggggggtttctaatggctgcagctgcgctgggggctgggggctcccgctgggactccacttccgtggatgtctaagcttcacctttcttgcgcccgcaggggcatgactcaggtgaaagggagccattttctcagacccctggcctcatgcagcccttcagcatccccgtgcaaatcacacttcagggcagccggaggcgccaggggaggacagcctttcctgcctcagggaagaagagagagacagactacagtgatggagacccactagatgtgcacaagaggctgccatccagtactggagaggaccgagccgtgatgctggggtttgccatgatgggcttctcagtcctaatgttcttcttgctcggaacaaccattctaaagccttttatgctcagcattcagagagaagaatcgacctgcactgccatccacacagatatcatggacgactggctggactgtgccttcacctgtggtgtgcactgccacggtcaggggaagtacccgtgtcttcaggtgtttgtgaacctcagccatccaggtcagaaagctctcctacattataatgaagaggctgtccagataaatcccaagtgcttttacacacctaagtgccaccaagatagaaatgatttgctcaacagtgctctggacataaaagaattcttcgatcacaaaaatggaacccccttttcatgcttctacagtccagccagccaatctgaagatgtcattcttataaaaaagtatgaccaaatggctatcttccactgtttattttggccttcactgactctgctaggtggtgccctgattgttggcatggtgagattaacacaacacctgtccttactgtgtgaaaaatatagcactgtagtcagagatgaggtaggtggaaaagtaccttatatagaacagcatcagttcaaactgtgcattatgaggaggagcaaaggaagagcagagaaatcttaagacggtggccaaattaaagtgctggccttcagatgtctgtgatttctgcaactgaggacctaattatgcctgtctgcaaactaataatgtaaaaggtaataattaaagtatcatattttcatgtgggaaaaaattt

SEQ ID NO: 2642 - DNA, 1258 bp, Homo sapiens
acctctagtccagcgtggtggaattcagtgccctgagcgtctccatggcctgcctgagcccctcgcagctccagaagttccaacaggatggattcctggtgctggaaggattcttgtctgcggaagagtgtgtggccatgcaacaaaggattggcgagatagtggctgaaatggatgttcctctccactgccgcacagaattctccacccaggaagaggagcagcttcgagcccagggcagcacagactatttcttgagcagtggtgacaagattcgattcttctttgagaaaggcgtttttgatgagaaaggaaatttcctggtccctccggagaaatccatcaacaaaattggccacgctctgcacgcccacgaccccgtcttcaagagcatcacacactccttcaaggtgcagaccttggccagaagtctgggcctccagatgcccgtggtggtgcagagcatgtacatctttaagcaacctcactttggcggtgaagtctcccctcatcaggacgcctccttcctgtacacggagcccctgggccgggtgctgggcgtgtggatcgcagtggaggatgccacgctggagaacggctgtctctggttcatccctggctcccacaccagtggtgtgtcaagaaggatggtccgggcccctgttggctcagcgcctggtaccagcttccttgggtcagagccagcccgggataacagcctctttgtgcccaccccagtgcagagaggggccctggtcctcatccatggagaagtggtacacaagagcaagcagaacctctctgaccgctcgcgccaggcctacactttccacctcatggaggcctctggcaccacctggagcccggagaactggctccagccaacagctgaactgccctttccccaactgtacacctaaaggctctcgcagggcaggagccctcgcccctcccgggtgaagctgtgggctgtaaacaccagtgccttgctcagcctcctggttgcaacagggaggtcttgtctcccctcctgggctttcctcctgccctgtgggcagcagcctaggctgggtcaggggcttccctaagatcttcacctctctgcctccctactgccccaacatagccttgaggaggcttctcagccaccaaagggttctggccccttctcactctcctctcctctcagatggaactctggttattatggtgttagttatcgaataaaaacgacttcagaatgcaaaaaaaaaaaaaa

SEQ ID NO: 2643 - DNA, 987 bp, Homo sapiens
cggacgcgtgggctgccacctcattattttgcattgaagatacattgccagctactgcagccgaggaactaagagttgctaatgaattatgaatggaagtgatcattcatctccagttgtcttcctctttctgtgattgaaacccagatttggagctgagtcagctttgagcagacaagaatgctaatgcttaagagccacagcttgttctcggctctctccctgcatgaatcaacagcagtcccaggacaggcagagaccatcaggagcttaaccttcacacagagagagactccagatctcagagagcagtgctcaagattccaagacagaaccctgggattttctactggatatttcttccttcaaggagtcacagtgcttcacatgggtcaaggcaaagacaggtctcctgccaaggcacccaagatgaaatcttgaaaatgagaaacacatttgctgaactgaagaattcattagaggctctcagcagtagaatggaccaggcagaggaaagaattgggacccaggctggagtgcagtggcgtgatcatggctcactgcagcctcaacctcctgaattcaagcaatgctttcacctcagtctcccaagtagctgggactacagggcgtgcctttcttagagcaatcctggtgccactaaaagctgcattttcaatatgagataaaaatgtattttacaaaaagtgcaaggtcttcatgtctgctggcattgctgcaacagtggcttgtgtgagagatcactttttacggcaatacccaatttattggagagacaaactgctcaagcaaggatgattagcattctatggcattttaaaaggatacttgcaatgcttgaccttaccacaatagcaacaggaggtagctacaaaattattacaatagtagagtatggtaccacagttaattttatgtagctataatttaatactgcatctttaatgttgttcacatttctctgga

SEQ ID NO: 2644 - DNA, 962 bp, Homo sapiens
cggctgcaagcacctgctccaaaactcctggtatgacccacgcgtccgagaggccgatcgcgtcgggcagcgggcgcggcggccccgcgcagccatggactggctcatggggaagtccaaagccaagcccaatggcaagaagcccgctgcggaggagaggaaggcctacctggagcctgagcacaccaaggccaggatcaccgacttccagttcaaggagctggtggtgctgccccgcgagattgaccttaacgagtggctggccagcaacaccacgacgtttttccaccacatcaacctgcagtatagcaccatctcggagttctgcacaggagagacgtgtcagacgatggccgtgtgcaacacacagtactactggtatgacgagcgggggaagaaggtcaagtgcacggccccacagtacgttgacttcgtcatgagctccgtgcagaagctggtgacggatgaggacgtgttccccacaaaatacggcagagaattccccagctcctttgagtccctggtgaggaagatctgcagacacctgttccacgtgctggcacacatctactgggcccacttcaaggagacgctggccctggagctgcacggacacttgaacacgctctacgtccacttcatcctctttgctcgggagttcaacctgctggaccccaaagagaccgccatcatggacgacctcaccgaggtgctatgcagcgggggccggcggggttccacagtgggggcagtggggatggggccggcagcgggggccccgggagcacagaaccacgtgaaggagagatgagccccccgggccggacaggggcacacgtgtgcaaagagacggtggtgtgtgatctctcctgcataagcgtgagcacacatgtgctgggcacgcgtgtggcgaggacttgcagggccccggactgacctggtgtgtggctgcataaggcacg

SEQ ID NO: 2645 - DNA, 2544 bp, Homo sapiens
aaggattttagttgagggactcatttttagttgtttaaatgtatagttcaccaattgattagatgattggcaaatttcaagtgaactccctaggctagaacctcatgcctaaggataagaataaacataataactttaagtattttcagtaagaatggcgttctctttgtgaaaccaacttcttccctgctctggaagaaggaatatttttgtagctgtgaattcggcaacttgtcctatgtggtagggtgttttattgtgtctactgactaggaaaaagaaaagttgggacagcgcggagagaaaaaataaaaggctgtggaatttttatcagtgtttaaatcccttcacttttcacccagcacttagagcaagagaaacatgaattgagaagacgatttgagaaccgagaaggggagtgggaaggccgagtgtcagagctggagagtgatgtgaagcagctacaggatgagttggagaggcagcagattcatctgcgggaagcagatcgagaaaaatcacgggctgtccaggaactgtcggaacagaaccaaaggctattggatcagctcagcaggaaaattaagacttggatttactattctacctcagcccttcttgtatattgaaaataaaactaccaactcttcagttaccggaggaaaaagaacttctctgatatcatccctcagcactgatgttctcatgggagcagtgccgtgtctgcatggtctcctctgtttcaggcatcagaagttgagagacaactctccatgcaggtccacgccctcagagaagactttcgggagaaaaactcatcaaccaaccagcacattatccggctggagagccttcaggccgagatcaagatgctgtcagatcggaaacgggagctggagcatcgtctcagcgctactttagaggaaaatgacctgctccaagggaccgtggaggagctacaggaccgggtgctaatcctggagaggcagggccatgacaaggacctacagctgcaccaaagccagctggagcttcaggaggtgcgtctctcctgccgacagctgcaggtgaaggtggaagaactcactgaggagaggagtctgcagagctctgccgccaccagcacatccctcctgtcagagatcgagcagagcatggaggctgaggagctggagcaggagcgagagcagctgacactgctgagtgtggagatgactgccctaaaagaggagagagaccgactcagagtcacttctgaggacaaggagccaaaggagcagcttcagaaggccatcagggaccgcgacgaggccattgcaaagaagaatgctgtggagctggaacttgccaagtgcaggatggatatgatgtctctgaacagccagttgctggatgccattcagcagaaactgaacctctcgcagcagctggaagcttggcaggatgacatgcacagggtcattgaccggcagctgatggacacgcacctgaaagaacggagccagccggctgctgccctctgcaggggccacagcgctgggcggggggatgagcccagcatcgctgaaggcaaacgactcttctcattcttcaggaaaatttaagttgggaggagtcaggccaccaaagatgggtggactggaggcagctggaaaggcggtgcaggcaaggcctcccctgcagcttgcacctcagcagctgccctgcccctcatgctagggccccatgggtccgggagggcctgctccctttcgtcggtggggatggagacctagaggtgggggcctgccttggccactgaaggcttcccttggcccaccgcctggagaagcccaggcgtgggcttctccaggaccacgtgcttgagcagggttaggccacctcccagaggggccccttggtgttgggctttgcagctcacacccaacagatcgcagcccacccccaggcactgctgcctccttgattttagcaaatggggaacagaaggaatggaggcccttctctgcatgcctcaggaggcctgagccccaggggcctagacctgtgggggcagcgggccaggcctgagcctccattccttccccagcccctggcccagggtcaaaggagagatggcagcccctcccccgcatgcatgcacctcagctggcaggaggccaagcctctggccgcagggtctaagagccggggcttacccaagctcagctgaggccacccgagccccagggaggaagaaggccctgtccccctgtcgccactgctctccctcccagccttcagtctctgccccttagcagggcctggccaggcagagtgttatcaccagtcatctgcaggctttagccattccagccctttcccctgctcagggctggggttggacggggtctcctcctcccacagcgcccacctccacccctcacatacatacataatttcttggcctagcaaacaagtccaggccactgaatggcaccagaggggtctgtggtcagccaccccaccttgagggcagcacaggcaccacggggtggaggagag

SEQ ID NO: 2646 - DNA, 423 bp, Homo sapiens
gggggacgaagccgggggtggctgtttgctccggtccgactcccctcggagctgccctttggtaccggggctgggcttggactctgggctcgcagcggaggcaacgcccccgtcgagggctgcccgcggagatttcactttcttttccgccgaggcgttatcgctggccgcgtttggcgccacctcgtcgtcgaacaccgcgtcgtccctggcagcgctctcagggagctcggcgtccgcgccgggggagtcggtggatttctgcgaccccctccgcctccccgacctacggccgctggacctcttctccatgtcgtcccagtcaccgcaatcttccgctctgggagtaatcacgaccggctcgtccacttgtgccccctcagtcttactcaagtagatgtccaaagttagcaccttagcagg

SEQ ID NO: 2647 - DNA, 2108 bp, Homo sapiens
ttttttttttttggggtctcagttcactctttccttgtttattaaatatcaacttttcctgcctaatgggctgaggttcattttcccattcctcaaggtaagggtagactacctaggaacttattgcatctttaggccagctggcttagtgctacccatctgaacccccagattactacccaagtcttccttttgccccttcctgccctaacagcaagtaccaggccagtcccttccccagcaaatgccaggggcttcatgtgaagaggaactggccacaaggctgaggggaggaggagaaactgtttctgcaggaaggacagcagtgcctccaggctcttgggcatcttcacatgtttctagataaggacaagctcaactcttggagcctcttggtaaggcagaagaaaggaggcagggagtatggcctgggcttcagataccgctgttctggatggatccacagatgacgaaggcaaggttcctgggacctggagtcacacagggccatagccaagccttttcactagaagggcaggcagtgcccattcatcttgtcagaggcaacctcagctgtggacccgaatggagtgagcaaagggagtccaggcctccactctgctctagagatggcagtgtccaggctcctgattcccaggaagcagggaagctaaaggaaacctggaaaggcactctggagcagcaggatggtcacaataataagcccgacacacagcaggagcaggagccacacaggaacactccgccgtgagggcaacagatgcagctggcaacgactgtccacagccacagagaacagggcagtttcatgggacccaaggagctctggaccacgacccttctcaggtagaaaggccacatccgtcaccacaatgccatgggcctccctcacgtagtagaggcactggagagagaaagctatgtagatggcaacagagccagtgactgtgcccaggcctaggaaggtgccggattcactgacatcgaggcaggagacgacttcatggccacaggacttggtccgaaggggcaagaagttggagccatcccaggctgtgaggtagcagggagggggctggcgcaggcgcttgtggggaatttgcactgtgaagagtcgcaggccagcaggctggtctggaacctgcccaaacctgcaggcctggtagcggtaaggtgtgctggaaaaggtgggtccattttcttgccagtgcagctgtgtcaccagctgatccttctgccacacagaggccttaaggtcccggcccacggttaccaacttgccatcaggccctaaagccaggtcttcaatctccccttcgtgggctttgaactccagaaccttctccaggctgggcaccttccagacacggacgtagccatctgttcctccagtggcaagcagggtattatcgtggttgaagcacacaactttctgcagtggatcggagctaaagtctgtctgcaccgcctgcaaattctctaccctgagttctagcccctcgtgctgggtttccgctccacatttcttctctgctggggctgctcccttcctttgtcgaggcccctgctccttggaaccggccttctctgccttgttgccctgctgttgatgtgcctggaagcgcaggagctgacagtgggcatcctgccctgcagcaaggatgtcaccagccagtgccaagttcatggtggcccgtgtctctgtgtcatgggagtgcagcaaggaggcactcaagcgcccattaatcagctctagctgcagaaagtgcacgccattctttatgcctgtcttggcggcgcctcctccgcccgcagcgatgagcagcccagtgctggggtcgacctgaagcgcgtacaacgggaacggagcccggtacagctctggcgcccggcgccggcccatcccgcccggcgcgcgttcactgcccgcaccgcggcacccaggacatgccgcgccgggccttcgactactgccccggcggctggtgaactcggccccgtcgccgccgggagcactccctacccctctcacaccggggagttgccaaaaccctgaccatcagcaggaagccgagcctcagctcggc

SEQ ID NO: 2648 - DNA, 1851 bp, Homo sapiens
atgtctctggtgggtggtgggtctgcagcaagtggattagcagcaggaaggctggcagcagctggagacacagcaaggactgcagcaacagctggggcggcaacaggtggtcctgtagcaggtggtctggcagcaggtgggacggcagcaaggcagacaatagctggactcattgcaggtttggctacagcagctggacccaccacaggttggctggcaacagggtgtgctgcagcatctggtcacacaggatggttggcagcaggtggatctacaaatggtttgacagcatgttgggtggcagcaaggctggcagcagctggacccacagcaggtgggctggcaagaggtgttcctgcagcaggtgggctggcagcaggtaggctggcagcaggtggtcctgaagcagatagtttgatagcaagtcgggtgacagcaaggctgacagcaactggacccacaaataggctgacagcagctggacccacagctggtttggccacagcagctggacccacagcaggtgggctggcagcagggtgtgctgcagcaggaaggctggcagcagctggccacacaagtgggctggcagcaggtggtcctgcagcaggtgttttgacagcaagttgggtggcagcaaggctggcagcagctgggcacacagcaggagggctggcaacagggtgtgctgctgcaggtggtcacagtggtgggcttccagcaggttgtcctgcagcaggtggtcctgcagcatgtaggctgacagcaaggggaacagcagtgggtcatggtgtcaggggtgaagggtgggctcctgttcagagaggtgtggttaagacctctgccaagagatctgctgccatcccagctgctgccagaccacctgctgcaagaccgcttgctgctgccgcagcttctaacctccaccctctgacaccatggttaactcttgttgtggctctgtctgctctgaccagggctgtgatcaaggcctctgccaagagacctgctgccgccccagctgctgccagaccacctgttgctgccccagctgtgttgtatccagctgctgccgcccatcctgctctcagactacctgctgccagaccacttgctgtcgccccagctgctgccacccagtctgttgtcagaccacctgccgccccagctgtggtgtgtccagctgctgccgcccactctgctgtcagaccacctgccaccccagctgtggtatgtccagctgctgccgtccactctgttgtcagaccacctgccgccccagctgtggtgtgtccagctgctgccgtccactctgctgtcagaccacctgctgccgtgcaacttgctgccgccccagctgctgtggatcctcttgttgaacctcatattggactatcaaccatgagccagtcaccatcccatgatatgaaaagaactgctgccgtcccagctgctgccagaccacctgctgcaggaccacctgctgccgccccagctgctgtgtgtccagctgctgcagaccgcagtgctgccagtctgtgtgctgccagcccacctgctgcagccccagctgctgccagaccacttgctgcaggaccacctgctgccgtcccagctgctgtgtgtccagctgcttcagaccccagtgctgccagtctgtgtactgccagcccacctgctgccgccccagctgtggccagaccacctgctgcaggaccacctgctaccgccccagctgctgtgtgtccacctgctgccgcccaacctgctctagtggctcttgctgctgatgccctcacctatactcacctgcctttattaaccagcattcttgatatgatccacctgtga

SEQ ID NO: 2649 - DNA, 3039 bp, Homo sapiens
ttttttttttttgagacgaggtggaggggcgggggttctcgctatcttgctcaagctgatctcgaactcctgggttcgatcaatactcagacaatcttggcaggcgcaggaggaccaaattctagtgaatgagatcgagtctctcggctctttcccttccatgttttctttttgattggccctcgacgatcctcagtgacgcctcccgcaccgcctcacccgagagtcagccgccctcgcttttccgtgcgcacgcgcagtatcccgattggctctgccctagcggattgacgggcaggttagccaatggtctcgtaatataggtggagcgagccctcgaggatgtccacgacccggcctctcgctgaatattcatgagggaggcgggtcgaccccgctgcacagtccggccggcgccatgaagtgagaagggggctgggggtcgcgctcgctagcgggcgcggggggtcttgaagatggggtcatcggtgggcgcgcctgggtccccaagggggcgaggggagggtgaaggggtgggacgggggcagccgcagggagcagcagtgatagcgaggagacactgagggggccccgaggctcctgaggacctgagggttaccgggggcgccgggcccgtcacccttctctgggctcgacgaccgggcactgtggaggcgggagaggggctgaggggacgggaactgacccagcagcccctgccgccaggctcaacgtggacgggctcctggtctacttcccgtacgactacatctaccccgagcagttctcctacatgcgggagctcaaacgcacgctggacgccaagggtcatggagtcctggagatgccctcaggcaccgggaagacagtatccctgttggccctgatcatggcataccagagagcatatccgctggaggtgaccaaactcatctactgctcaagaactgtgccagagattgagaaggtgattgaagagcttcgaaagttgctcaacttctatgagaagcaggagggcgagaagctgccgtttctgggactggctctgagctcccgcaaaaacttgtgtattcaccctgaggtgacacccctgcgctttgggaaggacgtcgatgggaaatgccacagcctcacagcctcctatgtgcgggcgcagtaccagcatgacaccagcctgccccactgccgattctatgaggaatttgatgcccatgggcgtgaggtgcccctccccgctggcatctacaacctggatgacctgaaggccctggggcggcgccagggctggtgcccatacttccttgctcgatactcaatcctgcatgccaatgtggtggtttatagctaccactacctcctggaccccaagattgcagacctggtgtccaaggaactggcccgcaaggccgtcgtggtcttcgacgaggcccacaacattgacaacgtctgcatcgactccatgagcgtcaacctcacccgccggacccttgaccggtgccagggcaacctggagaccctgcagaagacggtgctcaggatcaaagagacagacgagcagcgcctgcgggacgagtaccggcgtctggtggaggggctgcgggaggccagcgccgcccgggagacggacgcccacctggccaaccccgtgctgcccgacgaagtgctgcaggaggcagtgcctggctccatccgcacggccgagcatttcctgggcttcctgaggcggctgctggagtacgtgaagtggcggctgcgtgtgcagcatgtggtgcaggagagcccgcccgccttcctgagcggcctggcccagcgcgtgtgcatccagcgcaagcccctcagattctgtgctgaacgcctccggtccctgctgcatactctggagatcaccgaccttgctgacttctccccgctcaccctccttgctaactttgccacccttgtcagcacctacgccaaaggcttcaccatcatcatcgagccctttgacgacagaaccccgaccattgccaaccccatcctgcacttcagctgcatggacgcctcgctggccatcaaacccgtatttgagcgtttccagtctgtcatcatcacatctgggacactgtccccgctggacatctaccccaagatcctggacttccaccccgtcaccatggcaaccttcaccatgacgctggcacgggtctgcctctgccctatgatcatcggccgtggcaatgaccaggtggccatcagctccaaatttgagacccgggaggatattgctgtgatccggaactatgggaacctcctgctggagatgtccgctgtggtccctgatggcatcgtggccttcttcaccagctaccagtacatggagagcaccgtggcctcctggtatgagcaggggatccttgagaacatccagaggaacaagctgctctttattgagacccaggatggtgccgaaaccagtgtcgccctggagaagtaccaggaggcctgcgagaatggccgcggggccatcctgctgtcagtggcccggggcaaagtgtccgagggaatcgactttgtgcaccactacgggcgggccgtcatcatgtttggcgtcccctacgtctacacacagagccgcattctcaaggcgcggctggaatacctgcgggaccagttccagattcgtgagaatgactttcttaccttcgatgccatgcgccacgcggcccagtgtgtgggtcgggccatcaggggcaagacggactacggcctcatggtctttgccgacaagcggtttgcccgtggggacaagcgggggaagctgccccgctggatccaggagcacctcacagatgccaacctcaacctgaccgtggacgagggtgtccaggtggccaagtacttcctgcggcagatggcacagcccttccaccgggaggatcagctgggcctgtccctgctcagcctggagcagctagaatcagaggagacgctgaagaggatagagcagattgctcagcagctctgagtggggcgggtggggccataaacggttcctggtga

SEQ ID NO: 2650 - DNA, 565 bp, Homo sapiens
ggaggaggaggagaggtcggagccgtctccaggagcccttagagaccgagtcccggcggcgacggcggggcagcgcaccggcaggcggattcattccacttaaaacctgaaaacattggaccacacaaagtcttactgatttcaggtaaaaacaataattgaagatgtccagcaaaacagcaagcaccaacaatatagcccaggcaaggagaactgtgcagcagttaagattagaagcctccattgaaagaataaaggtttcgaaggcatcagcggacctcatgtcctactgtgaggaacatgccaggagtgaccctttgctgataggaataccaacttcagaaaaccctttcaaggataaaaaaacttgcatcatcttatagtggaatagagaaacagctcctcgcctctttccaacaacgcaaattatgagcagctccttgaagagatttaccttcagcttatttggtaaccactgctaataactaaaatgttctcagcttggaataatggactctgaagtctctattttccaagttgtcctttctccttaaaataccctttt

SEQ ID NO: 2651 - DNA, 510 bp, Homo sapiens
gtgaacggagctttcgcagctggagaaggctcatccacctgcagacatggggcgcagaaagtcaaaacgaaagccgcctcccaagaagaagatgacaggcaccctcgagacccagttcacctgccccttctgcaaccacgagaaatcctgtgatgtgaaaatggaccgtgcccgcaacaccggagtcatctcttgtaccgtgtgcctagaggaattccagacgcccataacgtgtatccttggaaacctgggctttttccagagggtggggagggggctggagtccggaccctgctcatctggcccactgtgtgccctggtgcagggccaaagccgtccagaggaacaggtgccacctagtgatttctgtggggtgagaagatgcagggcagggttccaatgccaatgatcgcccttgacctatgtgggccagatctgtcagaacctcgggatgtgtacagtgattgcatagactcctgccatgcggccaatcagtaacgacacagagga

SEQ ID NO: 2652 - DNA, 511 bp, Homo sapiens
ctggttcaaaagcagctaaaccaaaagaagcctccagacagccctgagatcacctaaaaagctgctaccaagacagccacgaagatcctaccaaaatgaagcgcttcctcttcctcctactcaccatcagcctcctggttatggtacagatacaaactggactctcaggacaaaacgacaccagccaaaccagcagcccctcagcatccagcagcatgagcggaggcattttccttttcttcgtggccaatgccataatccacctcttctgcttcagttgaggtgacacgtctcagccttagccctgtgccccctgaaacagctgccaccatcactcgcaagagaatcccctccatctttgggaggggttgatgccagacatcaccaggttgtagaagttgacaggcagtgccatgggggcaacagccaaaataggggggtaatgatgtaggggccaagcagtgcccagctgggggtcaataaagttacccttgtacttgtaaaaaaaaaa

SEQ ID NO: 2653 - DNA, 1248 bp, Homo sapiens
gcacgagcgggctcggtggttgggtccgcggcggctcggggtccgcccgcgggctgccggtgcgagcgggcggcccggctcccctcctcccccgcccgccgccgccgctgtgattgggtggaagatggcgctggccggatggaaatcctaatgacagtctccaaattcgcctccatctgtaccatgggcgccaatgcttcggcattagagaaagagattggtccagaacagtttccggtcaatgagcactattttggattagtcaattttgggaatacctgctactgcaattcagttcttcaagcactttatttttgtcgtccatttcgggaaaaaggtcttgcgtataagagtcaacctaggaaaaaggagagccttcttacatgcttagcagatctcttccatagcatagccactcagaagaaaaaggttggagtaataccccctaagaagttcatcacaagattacggaaagaaaatgagctttttgacaactacatgcaacaagatgcccatgaattcttaaattacctactaaatacaattgctgatattttacaagaagagagaaagcaggaaaaacaaaatggtcgtttacctaatggtaatattgataatgaaaataataacagcacaccagacccaacgtgggttcatgagatttttcagggaacattaactaatgaaaccagatgtcttacttgtgaaactataagcagcaaagatgaagattttttagacctttctgttgacgtggaacaaaatacatcaattactcactgcttaaggggtttcagcaacacagaaactctgtgcagtgaatacaagtattactgtgaagagtgtcgcagcaaacaggaagcacacaaacggatgaaagttaaaaaactgcccatgattctagctctacacctgaagagatttaaatatatggatcaacttcatcgatatacaaaactctcttaccgggtagtttttcctttagaacttcgtctgtttaacacttcaggtgatgccaccaatccagacagaatgtacgaccttgttgctgttgtggttcactgtggaagtggtcccaatcgaggccattatattgcaatagttaagagtcatgatttttggttgttgtttgatgacgacattgtagaaaaaatagatgcacaagctattgaagaattctacgggttgacatcagatatctcaaagaactctgagtctggttacatccttttctatcagtctcgggac

SEQ ID NO: 2654 - DNA, 1649 bp, Homo sapiens
cccgttgtgaccggccggaattcccgtttcgacgatttcgtccgaccgcagggcctctacggaccttactagaaaaatgaaacctgatgaaactcctatgtttgacccaaatctactcaaagaagtggactggagtcagaatacagctacattttctccagccatttccccaacacatcctggagaaggcttggttttgaggcctctttgtactgctgacttaaatagaggtttttttaaggtattgggtcagctaacagagactggagttgtcagccctgaacaatttatgaaatcttttgagcatatgaagaaatctggggattattatgttacagttgtagaagatgtgactctaggacagattgttgctacggcaactctgattatagaacataaattcatccattcctgtgctaagagaggaagagtagaagatgttgttgttagcgatgaatgcagaggaaagcagcttggcaacttgttattatcaacccttactttgctaagcaagaaactgaactgttacaagattacccttgaatgtctaccacaaaatgttggtttctataaaaagtttggatatactgtatctgaagaaaactacatgtgtcggaggtttctaaagtaaaaatcttgtaagaaaattgtcaaaggggctaatgctacaaggctacactcttcctagagttgaaatattttgttgctgcagccgagtgacctccataaatactggactgaaaaaacattgtaatactacaagtataatgacatttagaagattactttgggctggtgggacatgctgtgaatttagattacaaatgaatattataaaggggatgatttttaaccaaaggaatatatttttaacttgaatcttttcttgcattgtatttttctaaaagtttggcttcctttcttggtagtcaagagtatgggtaataaggagttatatgtctgctatctgtgttgctcatttaaaaaaagtatacattgaataaggctgtttatcacatgcataaaattaaatatttttgtttcaaagaaacatctcaatacacttaggggtgtattgtttcccacatattaagtcagggtggataaattagttattataactaaacatagtatagtccaacattcgttgatcccaatacaggcaaacaacctggtcaaccttttgaagtagaagaaatgaaaattacttgacaagattaaaagtaaaacaatttaaatgttttactgaaagtttatatagtatagtctatgtagataaaaagtaccacttgtcttttctgtgaattatgactattcatttgttaaaaatacctaagagcaattatagtgggacatctaaggtcctctgtaaacagtgaattagcaaacctcagcctatgtgtttctaccctgatttttttcttttcatgggtatctgaagcctgtaagttttttcaaaaatggagtatcacaaaattgagtgaaacacaatacttaatgtattgtactagattgccaaattcataaaatgttaatggaagctttttgatgtgattataatggcactattctggtcattatcctattttgattttatttaattttttaaagttgaagaattaaatattttaatggttctgaaaaaaaaa

SEQ ID NO: 2655 - DNA, 1253 bp, Homo sapiens
cccacgcgtccggcttctccgcccgagccgttcgcggagctgccgggggctccttagcacccgggcgccggggccctcgcccttccgcagccttcactccagccctctgctcccgcacgccatgaagtcgccgttctaccgctgccagaacaccacctctgtggaaaaaggcaactcggcggtgatgggcggggtgctcttcagcaccggcctcctgggcaacctgctggccctggggctgctggcgcgctcggggctggggtggtgctcgcggcgtccactgcgcccgctgccctcggtcttctacatgctggtgtgtggcctgacggtcaccgacttgctgggcaagtgcctcctaagcccggtggtgctggctgcctacgctcagaaccggagtctgcgggtgcttgcgcccgcattggacaactcgttgtgccaagccttcgccttcttcatgtccttctttgggctctcctcgacactgcaactcctggccatggcactggagtgctggctctccctagggcaccctttcttctaccgacggcacatcaccctgcgcctgggcgcactggtggccccggtggtgagcgccttctccctggctttctgcgcgctacctttcatgggcttcgggaagttcgtgcagtactgccccggcacctggtgctttatccagatggtccacgaggagggctcgctgtcggtgctggggtactctgtgctctactccagcctcatggcgctgctggtcctcgccaccgtgctgtgcaacctcggcgccatgcgcaacctctatgcgatgcaccggcggctgcagcggcacccgcgctcctgcaccagggactgtgccgagccgcgcgcggacgggagggaagcgtcccctcagcccctggaggagctggatcacctcctgctgctggcgctgatgaccgtgctcttcactatgtgttctctgcccgtaatttatcgcgcttactatggagcatttaaggatgtcaaggagaaaaacaggacctctgaagaagcagaagacctccgagccttgcgatttctatctgtgatttcaattgtggacccttggatttttatcattttcagatctccagtatttcggatattttttcacaagattttcattagacctcttaggtacaggagccggtgcagcaattccactaacatggaatccagtctgtgacagtgtttttcactctgtggtaagctgaggaatatgtcacattttcagcggc

SEQ ID NO: 2656 - DNA, 1007 bp, Homo sapiens
ttttttttttttaaatattttaaaattttctttatttcagaactgcctttatgtacagacatcatttaaaaaatgcacatacaatggagattttccaaggaacaggagctggaaataaaatttaaggacattattagaactgaaattgtcccagagaagttctgaggatcaggattccttaaatgtccttgataacctcttcaagttcttcctttgtgaacatgtggaaattctggccaggctgcactgtggctagctcaatgtttgttgcattcagcttctcctccattacttgtttgaggatgatgagtgaagacttgatggcttctttcaaagtcatagacttgtggtaaacttcttgcaaggagctctgggcaccctctgaagcagagccaattgctcgagcatcacactgtacaaaggtcccagatgggtccatatgaaacagctggggtcctttctcatcaactcctccaaataataatgctactccaaagggacgagacatggcacctggatctgcatcttcttctccaaactgcaaagccagattggacacagcttgggtcacactctccactgtcattgtctcattgtaggtgaaccagtggttctgtgtctccactctggctttatcaattaaagtcttagcatcagcaattagcccactcatggcacaacctatgtgagcatcaatctctacaattttctcaatgctgctgggctccatcagtggggaagtaattctcttctccacagctaggcacacaccctctgatgtctggatcccaatggctgtagaaccaagcttgatagcctcaatggcatattccacttgaaataatcttccttcgggagaaaaagtattcacgcccctgtcgtactcagaccgggtaagaaacatggcgagggtaggaggaggcagcggctacgcggggattctgaggaccaacacgactccaccggcacccaactcaccggcagccaactcacccacacggccgcag

SEQ ID NO: 2657 - DNA, 2165 bp, Homo sapiens
gcccactggccagggagggcgccgcgcggaggcgcgttcgtgtctcctgtcaaaagccatgctcgggaggtctgggtaccgggcgctgcccctgggtgattttgaccgcttccagcagtcgagcttcggctttctgggctcgcagaagggctgcttgtccccggagcggggcggcgtggggacaggggccgatgtaccccagagctggccctcctgcctctgtcatggcctcatcagtttcctggggttcttgctgctgttggtcaccttccccatttctggctggtttgccctgaagattgtgcccacctacgagcggatgattgtgttccgcctgggccggatccgcaccccccagggacctggcatggttctgctcttgcccttcattgactcctttcagagggtggatctgaggacacgagccttcaacgtccctccctgcaagctggcctctaaggacggggctgtgctgtccgtgggagccgatgtccagtttcgcatctgggacccggtgctgtcggtgatgactgtgaaagacctgaacacagccacacgcatgacagcccagaacgccatgaccaaggccctgctcaagaggccgctgcgggagatccagatggagaagctcaagatcagcgaccagcttctgctggagatcaacgatgtgaccagggcctgggggctggaggtagaccgcgtggagctggcggtggaggccgtgctccagccgccccaggacagcccagctgggcccaacctggacagcaccctccagcagctggccctgcacttcctgggaggaagcatgaactcaatggcaggaggtgccccgtccccggggccagcagacaccgtggagatggtgagtgaagttgagccacctgcccctcaagttggtgccaggtccagtccgaagcagcctctggcggaggggctactgactgctctacagcccttcctgtctgaggccctggtcagccaagtcggggcctgctaccagttcaatgtcgtcctgcccagcggcacccaaagcgcctacttcctggacctcactacaggacgaggaagagtgggacacggggtgcctgatggcatccctgatgtggtggtggagatggccgaggcagacctgcgggccctgctatgcagagagctgcggcccctgggggcctacatgagtggacggctgaaggtgaagggcgacctggctatggccatgaagctggaggctgtcctcagggccttgaagtagcagccttggctgactttccagagcccagtcccaagcctggcaccaagcctgaggggcctcttggaggaggaggtgttcatctgcaccacagagagttgaggccctaacaaatttcaggcccagccaagagcccatgaatggaggctgcaggaggctgagtccggctgccatgcacgtctcccctacagtggttctctggacaaggctttgtccatcccggtccccagctgagtgcccagcgctgagctgggtgcacggtgtgattccaggaggagagccaggcctgccctgccctgctggcttcctgactggagagacaggacccacagaaacagcctgacagcagctggtttggtccttgtgtgagggaccaagcatgtggcccaggctctaagctctgcggggattggagagggatggggagggaagggaaggcagctccaagaagaggtccctgtggcgaagttacctggggatcctggctggcccaccttcctggctgcagtccaggcccgtgctggcgggattgggcatgggaaggagcagggcctgctgcttccctggcgctgctcccaaagatttctgactcatctgccagctccgtcctgcatgcctggcgagctggggcccagggcagcatgaaggagagccctgcgttctgtgcttcttaccagaggtttgcaagcctcagacaaataaatgtggtgtttacaatgtaaaaaaaaaaaaaagggggggccgttttaaaggatccaattttacgtccgcgggcttgcaaggtaatattttttttttggggcccccaaaattaaattccccgggccggggtttaacaacgggggggggggaaaacccggggggttccccaatttaatcgctttggagaaaatccccttttccccgggggggg

SEQ ID NO: 2658 - DNA, 930 bp, Homo sapiens
cggcgtggtgaaatagatatggcgaccgagggggatgtggagctggagttggagactgagaccagtggaccagagcggcctccggagaagccacggaaacatgacagcggtgcggcggacttggagcgggtcaccgactatgcagaggagaaggagatccagagttccaatctggagacggccatgtctgtgattggagacagaaggtcccgggagcagaaagccaaacaggagcgttagtctttcaggggcagccaactttaccagttctttcctccccgggtccccagacaaaaataaaaaccattattaagcctttataccgttcttcaaatttatcaccaattcctgcagatctaggcgccacaactttactcttgttagcagaaggcctcctggcaacacctgctgccaagactccaggggaaaggagtattagtgggagtttttattttcaatcaagggtttatcaagatttatttacagggcacttctgggaatgacccttcctgggagtttatggtgttggttgagaatgaggactaatatatttaaatatttttgcagggagaaagaactggcaaaagtcactatcaagaaggaagatctggagctaatagtgagtggtagtgcctaactagtgtatgcggaggggaggctattctgcttaatttgggttgtttcctgaaacaagcggagtcagtatatttggtggcacattaatgcctgggaacctatgtaacatgatttttttctgcagatgactgagatggagatatctcgagcagcagcagaacgcagtttgcgggaacacatgggcaacgtggtagaggcgcttattgccctaaccaactgatgcgtgctttctcaaatatacctactggattaatttatggcaataaaatttttttttgtcttacaaaaaaaaaa

SEQ ID NO: 2659 - DNA, 1612 bp, Homo sapiens
cccacgcgtccgcccacgcgtccgggccacacgcctcagccagccccggcaagggcctatcaggggtgggtcggggcatccgagcgggtttgacggaaggagcggcggcgacggaggaggaggatggaggcggtggtgttcgtcttctctctcctcgattgttgcgcgctcatcttcctctcggtctacttcataattacattgtctgatttagaatgtgattacattaatgctagatcatgttgctcaaaattaaacaagtgggtaattccagaattgattggccataccattgtcactgtattactgctcatgtcattgcactggttcatcttccttctcaacttacctgttgccacttggaatatatatcgatacattatggtgccgagtggtaacatgggagtgtttgatccaacagaaatacacaatcgagggcagctgaagtcacacatgaaagaagccatgatcaagcttggtttccacttgctctgcttcttcatgtatctttatagtatgatcttagctttgataaatgactgaagctggagaagccgtggttgaagtcagcctacactacagtgcacagttgaggagccagagacttcttaaatcatccttagaaccgtgaccatagcagtatatattttcctcttggaacaaaaaactatttttgctgtatttttaccatataaagtatttaaaaaacatgaattgagtttctgtagatttctagttctcaactttagcctgaacgccaacacttgaaggtgtttttcatcctctgtatgttgaaggtggttatttgtatgtaggaacaggactgccatcccagctttgcatgccaaagaaataaagaacacactttaaagggcaaactgaagagatgagcgagcaaaggtgcccttcaggtctactgaaaagttagagtacaaaacaacactgttgatctggacaaaagaagaaaaattaccctttttgcttgtgttgtgacaacttcatttaatatggtttaaagatttatgagactgtcagctaaaagtcttttcacaagaatgtcaacagagaatggcatctcaaaatatatatatttctttgcacaatttgtgaaaccttataagccattttccccaggtacaatgtagttcctgctgatagaaaggaaatattttgtcaagagctttcatttaaaagctactacctccacaatcacccccaaacccagaaaatccccactggctcttgccagtctggttttcgtattgcagttattccaattgtatttgatctccctgataacgtattttcatgggtttgggtagaagatgctaatcagattagaagcaggaatagttatttgctgtctgtgaaattgagccttttggtgcgccacgtggtgccagatcaacacttctatccctctgcactgaccacgttgtgaactgggagacccaaatgcaagccatttcatggacatagcaatatacaaccaaactctgttccttggagttatattgtaaactcttgcaggtgggagagcagttcacctccttagctctgtttgccagctcttacagggtaaaataaacctgggcaatttatcctcaaaaaa

SEQ ID NO: 2660 - DNA, 2981 bp, Homo sapiens
gggctggggtgtgtttatttgggtatatacaatgagtcatggattaaaattgcttccagcggatagatacctaggtgttccacagcattactgaacaagctgtcgtcatttccccattacctcagaagacccccttaattacttacttatattaactgtagaacgtatttatgcataccaggctctacctctgggctttctattctgttccagagacccagtaccagaatatttaaatcactgtggcgttaaatacgttttaatatctgatagggccagtttctgcgcattgcacatttttttttcccctttcaggaacgtgttcaggcccgcggcagggggcgggatcgcgcctcctcctcggctctggttccagccgagcctctcggacgcagagatggaaatcccgaagctgctcccggctcgcgggacactacagggcggcggcggcggcggtatccccgcgggtggcggccgagtccaccgaggccctgactcgccggctggccaggtccccacgcgccgcctcctgctgccccggggcccccaagatggcgggcccgggcggcggcgcgaggaggccagcacggcatcacggggccctggcccaagcctgttcgcgccgaggccccatcaacctagcggcggcggcggcggcggcggcgacgacttcttcctggtgctgcttgacccggtgggtggcgacgtggagaccgcgggctccggtcaggccgcagggcctgtgttgagggaggaggccgaggagggcccggggctccaggggggcgagagcggcgcgaatcccgcggggcccactgcgctaggcccccgctgcctgtccgcggttcccactccggccccgatctccgcccccggccccgccgcggccttcgcgggcacagtcactatccacaaccaggacctgctgttgcgctttgagaacggcgtcctcaccctggccacgcccccaccacacgcctgggagccaggggccgctcctgcccagcagcccgggtgtctgatcgccccgcaagctgggttcccgcatgccgcgcacccgggtgactgcccagagctgccgccagacctcctgctagctgagccggccgaacccgcgccagctccggcgcctgaggaggaggcggagggcccggccgccgccctgggcccccgcggaccgctgggctccggcccaggcgtggtgctgtacctgtgccccgaggcgctgtgcgggcaaaccttcgccaagaagcaccagctgaagatgcacctgctgacgcacagcagcagccagggccagaggcccttcaaatgccccctgggtggctgcggctggaccttcaccacctcttacaagctcaagaggcacctgcagtcgcacgataaactgcggcccttcggctgccctgcggagggctgtggcaagagcttcaccaccgtgtacaacctcaaggcgcacatgaagggccatgagcaggagaactcgttcaaatgtgaggtgtgcgaggagagcttccccacgcaggccaaactcggcgcccaccagcgcagccacttcgaacccgagaggccttaccagtgcgcgttttctggctgcaagaagacatttatcacagtgagtgctctgttttcccataaccgtgcccatttcagggaacaggaactgttttcctgctctttccctggctgcagcaagcaatatgacaaggcttgtaggctgaaaattcacctgcggagtcacaccggtgagagacctttcctttgtgactttgatggctgtggctggaactttaccagcatgtccaaactcttaaggcacaaaaggaagcacgacgatgaccggaggttcatgtgccctgtggaaggctgtgggaaatctttcacgagggccgaacatctgaaaggccacagcattacccacctgagcacaaagcctttcgtgtgtcctgtggcaggctgctgtgccaggttctctgctcgcagtagcctctacattcactccaagaaacacctgcaggatgtggacacttggaaaagccgttgcccgatctcctcttgtaataaactcttcacatccaagcacagcatgaagacgcacatggttaaaaggcataaggtgggccaggatctcttagctcagctagaagcagcaaattctcttacacccagcagtgaacttaccagccagagacagaatgatctcagtgatgcagagatagtgtctctcttctctgatgtacctgacagtacttctgctgcattgctggacacagcattggtgaactctggaatcttgactattgatgtggcttctgtgagctcgactctggcagggcacctccctgctaataataataattccgtagggcaggctgtggaccctccgtccttgatggccaccagcgaccctcctcaaagtctggatacctctctcttttttggaacggcggccactggttttcagcagagctccttaaatatggatgaggtctcaagtgtaagtgtggggccattgggatctctggactctttggccatgaaaaactccagtccagagcctcaggctttgacacccagcagtaagctaacagtggacacagatactctgactccttcgagcaccctttgtgaaaacagtgtctcagaactactgacaccagccaaagcggagtggagcgtacatcctaactctgacttctttggacaggagggagaaacccagtttggattccccaatgcagcaggaaaccatggttctcagaaagaaagaaatcttatcactgtgactggcagctcatttttggtatgaagcaactctattcattccttgccatgtggctaacttttattacagtcaattttgaggatattctggactaaatatttaagtgcagtccatttctttttggtttgcaaaaagagcacagccctggactatgagtttggagatctaaattctgatcttgagtctggaactgaca

SEQ ID NO: 2661 - DNA, 2249 bp, Homo sapiens
  misc_feature (1)...(2249): n = a,t,c or g
ggaattcctgccaagggctccctgaatggtgtccacacagcgaggaagccacgcttgattcttttatccaggacattctccacactctgccggtcctaactcaggcagcagcataactggtgactcggctgaggccatgccagcccccatgcactgtggcaggaccaggtgttcatgactgactctatgctggagcttctggaatgtgggcgtgcccgggtgctggagcagtgtgcccgctgcatccagggtggctggaggcgacaccggcaccgagagcaggagcggcagtggcgggccgtcatgctcatccaggcagccattcgttcctggttaactcggaaacacatccagaggctgcatgcagctgccacagtcatcaagcgtgcatggcagaagtggagaatcagaatggcctgccttgctgctaaagagctggatggtgtggaagaaaaacacttctctcaagctccctgttccctgagcacctcgccgctgcagaccaggctcctggaggcaataatccgcctctggcccctgggactggtcctggccaatacggctatgggtgtaggcagctttcagaggaaattagtggtctgggcttgcctccagctccccaggggcagccccagtagctacactgtccagacagcacaagaccaggctggtgtcacgtccatccgagcgctgcctcagggatcgataaagtttcactgcagaaagtctccactgcggtatgctgacatctgccctgaaccttcaccctacagcattacaggctttaatcagattctgctggaaagacacaggctgatccacgtgacctcttctgccttcactgggctggggtgatccttggtgcctttgtttccacaaggccttttcctgccccctgccttgccaaagacatttaatcagcacacagctgccagactattcccacagtgctccaaatgcacatgaacaacagtgacggctccagccttcgacccagagccccgtgcccagtgcgtcagtgggcctggggttccaggctacatcaagcactgatggtgtcagggctggtagttaccaaatcagggttaagaaacatcagggccacatttcactaccttcacagatcaaactcagcagcagtcatgactgtctgtcactacactggggatcccaattccacataagcacttttggaagaaaacagccaaagttggcctaaaattggcgctggaatttgggctgggaaaaatcttgtggttatttcctttaaaaaggaacaaaactttagtatttaattagttgatttatttaatgtaatttcaaacaattaaattatgaataatgcaatgtacagtagaatcacgttttgattttattaacactgaccaagtttaactccatatgaagtgtaagcttgatatcgtttatgatgtctatcaactgtaccaaaagtaaaacatttaaaaacaatcatctgaatgtcaagttttctctccataaaggacttgccaccttaaggaccccaagtctgcctgaaacatgagccacatcaatgccggtaaaggcctgcatgacctaatctgcatcctggaaacctcttttgcctgagctccccagccccaaactagctggtctgggagagggagcaggcaggttccaggagtcaagcacacgcttgagcaagcagcacaataatccatcttaagactcctcattctgggatggctccacaattcctaaacagcagtctgcaaactccacaaacaaaggctcttgcatgtaagctctcatgagctttgctttgtcttctccctgatcgaggttgaccatcaactgcctgaggtgtggattgagcaataagcttcttaatgttgcagattcccctaaattctttaaattctgcaaagaaactctgtcttcttcctcatcactattgagaaaatcagctatagagtcatcatcatctttgttttccacaggctttacggttttggtaggaagagctgatcttatttttttctcaacaggacgagtttcagggttgcactgttctttgtgcttccggaagcagactaccgagcagtagggcacgcggcaggctggacagcggtatttgggcttctccaagcagatcacgcagacgacggtgctacatttgagcgacgccatggttttgtggaaggagactgttcactgcgccgccgcgcgcgaattccaccacactgagtatggacatcgatanngacctc

SEQ ID NO: 2662 - DNA, 1948 bp, Homo sapiens
tatctttggtcttcagggctttgaccgccctcctcccaggctcggagaggcggtggcagccggcactgcacccagatggactgagagcgcggcggcgggaaggcggcggcggcggcggcagcagcagcagctgcaagagccctcgcagcctcggggcaggacccacgtccacacccgagagcccctccctgggatgactctggggacgacgacgaggctaccaccccagccgacaagagcgagctgcaccacaccctgaagaatctttccctgaagttagatgacctcagcacgtgcaatgacctcatcgccaagcacggcgccgcactccagcgctccctgacagagctggacggcctcaagatcccatctgagagtggggagaagctgaaggtggtgaatgagcgggccaccctcttccgcatcacatccaatgctatgatcaacgcctgcagggacttcttggaactagcagagatacacagtcggaaatggcagcgggcactgcagtatgagcaggagcagcgcgtgcacttggaggaaaccattgagcagctggcgaagcagcacaacagcctcgagcgggccttccacagtgcccctggccggccggccaacccctccaagagcttcattgagggtagcctcttgactcccaaaggagaggacagtgaggaagatgaagataccgagtactttgatgccatggaagactccacatccttcatcaccgtgatcaccgaggccaaggaagacagcagaaaagctgaaggtagcaccgggacaagttccgcggactggagctcagcagacaatgtactagatggtgcctcgctcgtgcccaagggttcatccaaagtcaagaggcgagtccgcattcccaacaagcccaactacagccttaacctctggagcatcatgaagaactgcatcggccgggagctctccaggatccccatgccggtgaacttcaatgagcccctgtccatgctccagcggctgacagaggacctggagtaccaccacctgctggacaaggcagtgcactgcaccagctcagtggagcagatgtgcctggtggccgccttctctgtgtcctcctactccaccacagtgcaccgcatcgccaagcccttcaaccccatgctgggggagaccttcgagctggaccgcctcgacgacatgggcctgcgctccctctgtgagcaggtgagccaccaccccccctcagctgcgcactacgtgttctccaagcatggctggagcctctggcaggagatcaccatctccagcaagttccggggaaaatacatctccatcatgccgctaggtgccatccacttagaattccaggccagtgggaatcactacgtgtggaggaagagcacctcaactgttcacaacatcatcgtgggcaagctctggatcgaccagtcaggggacatcgagattgtgaaccataagaccaatgaccggtgccagctgaagttcctgccctacagctacttctccaaagaggcagcccggaaggtgacaggggtggtgagtgacagccagggcaaggcccattacgtgctgtccggctcgtgggatgaacaaatggagtgctccaaggtcatgcatagcagtcccagcagccccagctctgacgggaagcagaagacagtgtaccagaccctgtcagccaagctgctgtggaagaagtacccgctgccggagaacgcggagaacatgtactacttctcagagctggccctgaccctcaacgagcacgaggagggcgtagcgccaaccgacagccgcctgcggcccgaccagcggctgatggagaagggccgttgggacgaggccaataccgagaagcagcggctggaggagaagcagcgcctgtcgcggcgccggcggctggaggcctgcgggccgggcagcagctgcagctcggaggaag

SEQ ID NO: 2663 - DNA, 5007 bp, Homo sapiens
tcagcccaggtggagctgtggagaaggaatctctgggaaagctgacccactggagatgcttgtgtctctaccagctgtgaactagccagtgctctgtcccatctggatgccagccacctcacagagaacctgcccaaagctgcatcagagctggggcaacaacccatgactgaactggacagctcctcagacctcatctcttccccagggaagaagggggccgctcatcctgaccccagcaagacctctgtagacacagggcaagtcagtcggccagagaatcccagccagcctgcatcgcccagggtcaccaagtgcaaggccaggtctccagtcaggctcccccatgagggcagcccctccccgggggagaaagcagcggctccccctgactacagcaagactcgatcagcatcggaaaccagcacaccccacaataccaggagggtggctgccctcaggggagcgggacctggagcagagggaatgacaccagctggtgctgtcctgccaggagaccccctcacatcccaggagcagagacagggagctccaggtaaccacagtaaggctctggaaatgacaggaatccatgcacctgaaagctcccaggagccttccctgctggagggagcagattctgtgtcctcaagggcaccgcaggccagcctctccatgctgccatccactgacaacaccaaagaagcatgtggccatgtctcggggcactgctgcccgggggggagtagagagagccctgtgacggacattgacagcttcatcaaggagctggatgcttctgcagcaaggtctccgtcttcccagacgggggacagtggctctcaggagggcagtgctcagggccacccaccagccggggctggaggtgggagctcctgccgtgccgaaccagtcccggggggccagacctcctccccgaggagggcctgggctgctggtgcccccgcctacccacaatgggcctcccagccttcggttttagattcaattaatcccgacaaacattttactgtgaacaaaaactttctgagcaactactctagaaattttagcagttttcatgaagacagcacctccctatcaggcctgggtgacagcacggagccgtctctgtcatccatgtatggcgatgctgaggattcttcttctgaccctgagtcactcactgaagccccacgagcttctgccagggacggctggtcccctcctcgttcccgtgtgtctttgcacaaggaagatccttcggagtcagaagaggaacagattgagatttgttccacacgtggctgccccaatccaccctcgagtcctgctcatcttcccacccaggctgccatctgtcctgcctcagccaaagttctgtcattaaaatacagcactccgagagagtcggtggccagtccccgtgagaaggtcgcctgcttgccaggctcatacacttcaggcccagactcttcccagccatcatcactcttggagatgagctctcaggagcatgaaactcatgcggacataagcacttcacagaaccacaggccctcgtgtgcagaagaaaccacagaagtcaccagcgctagctcagccatggaaaacagtccgctgtctaaagtagccaggcattttcacagtccgcccatcattctcagctcccccaacatggtaaatggcttggaacatgacctgctagatgacgaaaccctgaatcaatacgaaacaagcattaatgcagctgccagtctgtcctccttcagtgtggatgtccctaagaatggagaatctgttttggaaaacctccacatctctgaaagtcaagacctggatgacttgctacagaaaccaaaaatgatcgctaggaggcccatcatggcctggtttaaagaaataaataaacataaccaaggcacacatttgaggagcaaaaccgagaaggaacaacctctaatgcctgccagaagtcccgactccaagattcagatggtgagttcaagccaaaaaaagggcgttactgtgcctcatagccctcctcagccgaaaacaaacctggaaaataaggacctgtctaagaagagtccggcagaaatgcttctgactaatggtcagaaggcaaagtgtggtccgaagctgaagaggctcagcctcaagggcaaggccaaagtcaactctgaggcccctgctgcgaatgctgtgaaggctggggggacggaccacaggaaacccttgatctcaccccagacctcccacaaaacactttctaaggcagtgtcacagcggctccatgtagccgaccacgaggaccctgacagaaacaccacagctgcccccaggtccccccagtgtgtgctggaaagcaagccacctcttgccacctctgggccactgaaaccctcagtgtctgacacgagcatcaggacatttgtctcgcccctgacctctcccaagcctgttcctgagcaaggcatgtggagcaggttccacatggctgtcctctctgaacccgacagaggttgcccaaccacccctaaatctcctaagtgtagagcagagggcagggcgccccgtgctgactccgggccggtgagtccggcagcgtctaggaacggcatgtccgtggcagggaacagacagagtgagccgcgcctggccagccatgtggcagcagacacagcccaacccaggccgactggcgaaaaaggaggcaacataatggccagcgatcgcctcgaaagaacaaaccagctgaaaatcgtggagatttctgctgaagcagtgtcagagactgtatgtggtaacaagccagctgaaagcgacagacggggagggtgcttggcccagggcaactgtcaggagaagagtgaaatcaggctctatcgccaggtcgcagaatcatccacaagtcatccatcctcactcccatctcatgcctcccaggcagagcaggaaatgtcacgatcattcagcatggcaaaactggcgtcctcctcctcctcccttcaaacagccattagaaaggcagaatactcccagggaaaatcaagcctgatgtcagactcccgaggggtgcccagaaacagcattccagggggcccctcgggggaggaccatctctacttcaccccaaggccagcgaccaggacctactccatgccagcccagttctcaagccattttggacgggagggtcaccccccacacagcctgggtcgctctcgggacagccaggtccctgtgacaagcagtgttgtccccgaggcaaaggcatccagaggtggtcttcccagcctggctaatggacagggcatatatagtgtaaagccgctgctggacacatcgaggaatcttccagccacagatgaaggggatatcatttcagtccaggagacgagctgcctagtcacagacaaaatcaaagtcaccagacgacactactgctatgagcagaactggccccatgaatctacctcatttttctctgtgaagcagcggatcaagtcttttgagaacctggccaatgctgaccggcctgtagccaagtccggggcttccccatttttgtcggtgagctccaagcctcccattgggaggcggtcttccggcagcattgtttccgggagcctgggccacccaggtgacgcagcagcaaggttgttgagacgcagcttgagttcctgcagcgaaaaccaaagcgaagccggcaccctcctgccccagatggccaagtctccctcaatcatgacactgaccatctctcggcagaacccaccagagaccagtagcaagggctctgattcggaactaaagaaatcacttggtcctttgggaattcccaccccaacgatgaccctggcttctcctgttaagaggaacaagtcctcggtacgccacacgcagccctcgcccgtgtcccgctccaagctccaggagctgagagccttgagcatgcctgaccttgacaagctctgcagcgaggattactcagcagggccgagcgccgtgctcttcaaaactgagctggagatcacccccaggaggtcacctggccctcctgctggaggcgtttcgtgtcccgagaagggcgggaacagggcctgtccaggaggaagtggccctaaaaccagtgctgctgagacacccagttcagccagtgatacgggtgaagctgcccaggatctgccttttagaagaagctggtcagttaatttggatcaacttctagtctcagcgggggaccagcaaagattacagtctgttttatcgtcagtgggatcgaaatctaccatcctaactctcattcaggaagcgaaagcacaatcagagaatgaagaagatgtttgcttcatagtcttgaatagaaaagaaggctcaggtctgggattcagtgtggcaggagggacagatgtggagccaaaatcaatcacggtccacagggtgttttctcagggggcggcttctcaggaagggactatgaaccgaggggatttccttctgtcagtcaacggcgcctcactggctggcttagcccacgggaatgtcctgaaggttctgcaccaggcacagctgcacaaagatgccctcgtggtcatcaagaaagggatggatcagcccaggccctctgcccggcaggagcctcccacagccaatgggaagggtttgctgtccagaaagaccatccccctggagcctggcattgggagaagtgtggctgtacacgatgctctgtgtgttgaagtgctgaagacctcggctgggctgggactgagtctggatgggggaaaatcatcggtgacgggagatgggcccttggtcattaaaagagtgtacaaaggtggtgcggctgaacaagctggaataatagaagctggagatgaaattcttgctattaatgggaaacctctggttgggctcatgcactttgatgcctggaatattatgaagtctgtcccagaaggacctgtgcagttattaattagaaagcataggaattcttca

SEQ ID NO: 2664 - DNA, 2140 bp, Homo sapiens
  misc_feature (1)...(2140): n = a,t,c or g
cgttagcccagtcaagcccagccaagcccagccaagccccgccgatcgcgggcaccggagccagccccgcagcgggagcctaacccagaggaagtggagactcctttactgcacatctgtctgctccaggccaggcactgttctaggagccaggatacagaggtggagacagaaacaaacaaaccgataactgtatacaatactctaacgtcagagggaccacagagcaccagcctgcatggaacttccttcctcactcagcttcccacgttgccagctgggacaggggagatggagtaattttgctgtggaaagacttcacgtcttgccgaatgaaagtcccgcctgtctgtcacgctgatgcccgtgcagctgtctgagcacccggaatggaatgagtctatgcactccctccggatcagtgtggggggccttcctgtgctggcgtccatgaccaaggccgcggacccccgcttccgcccccgctggaaggtggtcctgacgttctttgtgggtgctgccatcctctggctgctctgctcccaccgcccggcccccggcaggccccccacccacaatgcacacaactggaggctcggccaggcgcccgccaactggtacaatgacacctaccccctgtctcccccacaaaggacaccggctgggattcggtatcgaatcgcagttatcgcagacctggacacagagtcaagggcccaagaggaaaacacctggttcanttacctgaaaaagggctacctgaccctntcagacagtggggacaaggtggccgtggaatgggacaaagaccatggggtcctggagtcccacctggcggagaaggggagaggcatggagctatccgacctgattgttttcaatgggaaactctactccgtggatgaccggacgggggtcgtctaccagatcgaaggcagcaaagccgtgccctgggtgattctgtccgacggcgacggcaccgtggagaaaggcttcaaggccgaatggctggcagtgaaggacgagcgtctgtacgtgggcggcctgggcaaggagtggacgaccactacgggtgatgtggtgaacgagaacccggagtgggtgaaggtggtgggctacaagggcagcgtggaccacgagaactgggtgtccaactacaacgccctgcgggctgctgccggcatccagccgccaggctacctcatccatgagtctgcctgctggagtgacacgctgcagcgctggttcttcctgccgcgccgcgccagccaggagcgctacagcgagaaggacgacgagcgcaagggcgccaacctgctgctgagcgcctcccctgacttcggcgacatcgctgtgagccacgtcggggcggtggtccccactcacggcttctcgtccttcaagttcatccccaacaccgacgaccagatcattgtggccctcaaatccgaggaggacagcggcagagtcgcctcctacatcatggccttcacgctggacgggcgcttcctgttgccggagaccaagatcggaagcgtgaaatacgaaggcatcgagttcatttaactcaaaacggaaacactgagcaaggccatcaggactcagcttttataaaaacaagaggagtgcacttttgttttgttttgttctttttggaactgtgcctgggttggaggtctggacagggagcccagtcccgggccccatagtggtgcgggcactggacccccgggccccacggaggccgcggtctgaactgctttccatgctgccatctggtggtgatttcggtcacttcaggcattgactcaaggcctgcctaactggctgggtcgtttcttccatccgacctcgtttcttttctttcctatgttcttttgttcagtgaatatccctagagctcctaccatatgtcaggccctatgcctcacccttgagaacgcagtagagcatgaggtggacctggtttgctgggaaccccaggtcacccccgttttcttcctactctgtgcctggagcatcatgtccacccctgcagatccttggaaaagaaaatgtttatgttgcagggtattgcatggtcacgagtgagggcaggcccctgggggacacatctgcccacagcttgcacaggccaggg

SEQ ID NO: 2665 - DNA, 2227 bp, Homo sapiens
cccacgcgtccgggaagcggaagtgccggtggagcgcgagtaggaagtggtgagttcggagtagagatggccgcgcttgcaccgctgcccccgctccccgcacagttcaagagcatacagcatcatctgaggacggctcaggagcatgacaagcgagaccctgtggtggcttattactgtcgtttatacgcaatgcagactggaatgaagatcgatagtaaaactcctgaatgtcgcaaatttttatcaaagttaatggatcagttagaagctctaaagaagcagttgggtgataatgaagctattactcaagaaatagtgggctgtgcccatttggagaattatgctttgaaaatgtttttgtatgcagacaatgaagatcgtgctggacgatttcacaaaaacatgatcaagtccttctatactgcaagtcttttgatagatgtcataacagtatttggagaactcactgatgaaaatgtgaaacacaggaagtatgccagatggaaggcaacatacatccataattgtttaaagaatggggagactcctcaagcaggccctgttggaattgaagaagataatgatattgaagaaaatgaagatgctggagcagcctctctgcccactcagccaactcagccatcatcatcttcaacttatgacccaagcaacatgccatcaggcaactatactggaatacagattcctccgggtgcacacgctccagctaatacaccagcagaagtgcctcacagcacaggtgtagcaaagtaatactatccaaccctactccacaagactatacctgccattgatcccgcacttttcaatacaatttcccagggggatgttcgtctaaccccagaagactttgctagagctcagaagtactgcaaatatgctggcagtgctttgcagtatgaagatgtaagcactgctgtccagaatctacaaaaggctctcaagttactgacgacaggcagagaatgaagcctttgtatgacagacccatgtatttttggcatgaggaactaacagtccattactctatcttcagcctatcaggatcacagttttaaggaagacttggttttgttgaatatgacaatgaaatctgtgtgtatcagatttttattgaagcattcatcagcagcctcaaccagttttcattgtccatttactagattcaatcgtctctgagtatatagggctgatgttagcaagaccctaaaaatgtccattgaaccctgcttcaaaaaatgaaaacacacctctataaaatgtgtactgggaataagctttgtatttacatacattaggggaattttttaaaatctgtaatgtttggacaaacagatgatattactttgctataaaattataaatgtaacttttaataaagatagccagaatattctaaattagaaattacgtttttgtttccctcaagacataaaacaaatataaacattctaaactgctggatgaatctgaaaagacattaagttcaaattttaatttattctcatattaaatataactccattaaaagtttaaaatttcatgggagaaaatataataaggtaaagaggtagaatcactttcagacttaagaataatgttgatttcccaagtgctttaccttatctgttaaagcgtaagatgaattggtatttgcttcataggcagtttgactgcatgtattagagaatgaaaagaagatatttgtagtaatgcctggaaacttggtgctttaaattaaggtactcctctgctgctgtagaatggattccacacagtggatagctatgggtgattcagaatattatgtttagattcccatttgttaagtttataagttttgtggggaattatgaacttactgtgtactacctgcatttgtgctgtgtgaaaaataaatacaaggattcgtttagctaattcaacttactacaaagacaaatgtctgtttttatttgcctgctaggattgtcttttttaaaagtcatttttatttataggaatatgggtgtttctataggaagaaacaggttttttgttttttgttttttaagataaatttgacaaagttaactgaaatttatctggtccattttattcatgctactaagatgggaatctttaaacacaagggtcagcaagctttggcccatggattggccacctgttacgtaaataaagtttctttgaaacaaaaaaaaaa

SEQ ID NO: 2666 - DNA, 2162 bp, Homo sapiens
cgtctcgacgatttcgtgaaagatggcggcgactctgggaccccttgggtcgtggcagcagtggcggcgatgtttgtcggctcgggatgggtccaggaggttactccttcttcttttgttggggtctgggcaggggccacagcaagtcggggcgggtcaaacgttcgagtacttgaaacgggagcactcgctgtcgaagccctaccagggtgaggcgcccaggccatgtttcctgagagactgggagttgcaggtgcacttcaaaatccatggacaaggaaagaagaatctgcatggggatggcttggcaatctggtacacaaaggatcggatgcagccagggcctgtgtttggaaacatggacaaatttgtggggctgggagtatttgtagacacctaccccaatgaggagaagcagcaagagcgggtattcccctacatctcagccatggtgaacaacggctccctcagctatgatcatgagcgggatgggcggcctacagagctgggaggctgcacagccattgtccgcaatcttcattacgacaccttcctggtgattcgctacgtcaagaggcatttgacgataatgatggatattgatggcaagcatgagtggagggactgcattgaagtgcccggagtccgcctgccccgcggctactacttcggcacctcctccatcactggggatctctcagataatcatgatgtcatttccttgaagttgtttgaactgacagtggagagaaccccagaagaggaaaagctccatcgagatgtgttcttgccctcagtggacaatatgaagctgcctgagatgacagctccactgccgcccctgagtggcctggccctcttcctcatcgtctttttctccctggtgttttctgtatttgccatagtcattggtatcatactctacaacaaatggcaggaacagagccgaaagcgcttctactgagccctcctgctgccaccacttttgtggactgtcacccatgagggtatgggaagggagcagggcattggcctgaggcatgcagcctggagagtgttcttgtctctagcagctggttggggactatattctgtcactggagttttgaatgcagggaccccgcattcccatggttgtgcatggggacatctaactctggtctgggaagccacccaccccagggcaatgctgctgtgatgtgcctttccctgcagtccttccatgtgggagcagaggtgtgaagagaatttacgtggttgtgatgccaaaatcacagaacagaatttcatagcccaggctgccgtgttgtttgactcagaaggcccttctacttcagttttgaatccacaaagaattaaaaactggtaacaccacaggctttctgaccatccattcgttgggttttgcatttgacccaaccctctgcctacctgaggagctttctttggaaaccaggatggaaacttcttccctgccttaccttcctttcactccattcattgtcctctctgtgtgcaacctgagctgggaaaggcatttggatgcctctctgttggggcctggggctgcagaacacacctgcgtttcactggccttcattaggtggccctagggagatggctttctgctttggatcactgttccctagcatgggtcttgggtctattggcatgtccatgggccttcccaatcaagtctcttcaaggccctcaagtgaaagttttggctaaaggttggtgtaaaaaatcaagagaagcctggaagacatcatggatgccatggattagctgtgcaactgaccagctccaggtttgatcaaaccaaaagcaacatttgtcatgtggtctgaccatgtggagatgtttctggacttgctagagcctgcttagctgcatgttttgtagttacgatttttggaatcccactttgagtgctgaaagtgtaaggaagctttcttcttacaccttgggcttggatattgcccagagaagaaatttggctttttttttcttaatggacaagagacagttgctgttctcatgttccaagtctgagagcaacagaccctcatcatctgtgcctggaagagttcactgtcattgagcagcacagcctgagtgctggcctctgtcaacccttattccactgccttatttgacgg

SEQ ID NO: 2667 - DNA, 1422 bp, Homo sapiens
aggtcctgggcctatgtcaagaagtgcaaaaacaacatgtgtccaaatcggggattgcatgacgggccagagccctgctggctgcaccacgcggctggcacagtcagtgcagtccaggcccgggggctgcagccgtcccagtcccggtccaggccgcgagtcccggggctagcaaccgcccttgcatacggccccgcccataccccgcccctgtcccggattggctgggccatgcagcccccgcccccgggcccgctgggcgactgcctgcgggactgggaggatctacagcaggacttccagaacatccaggttagcgccgctgcggacgccgggtcgcccccgagccgcgtctcgctggctcagggtcaagggtcgggcagccctggatgcaaaccctccctcccagcagaggccgagggggccgcacaggagctggagaaccagatgaaagagcgccaaggcctcttctttgacatggaggcctatttgcctaagaagaatggattgtacctgagcctggttctggggaacgtcaacgtcacgctcctgagcaagcaggctaagtttgcctacaaggacgagtatgagaagttcaagctctacctcaccatcatcctcatcctcatctccttcacttgccgcttcctgctcaactccagggtgacagatgctgccttcaacttcctgctggtctggtactactgcaccctgaccatccgggagagcatcctcatcaacaacggctcccggatcaaaggctggtgggtgttccatcactacgtgtccaccttcctgtcgggagtcatgctgacgtggcccgacggtctcatgtaccagaaattccggaaccaattcctctccttttccatgtaccagagcttcgtgcagtttctccagtactactaccagagcggctgcctctaccgcctgcgggcgctgggcgagcggcacaccatggacctcactgtggagggcttccagtcctggatgtggcgggtcctcaccttcctgctgccttttcttttctttggacacttctggcagctttttaacgcgctgacgttgttcaacctggcccaggaccctcagtgcaaggagtggcaggtgcttatgtgcggctttcccttcctcctccttttcctcggcaatttcttcaccaccctgagggttgtgcaccacaagtttcacagtcagcggcacgggagcaagaaggattgaggctgggccttcccctgccggcccagaggggcttctgtcctgtgtgttgtgggaggggatgggaggcgcccctcgagtgtgcgtgtatcagggggtctcttctattctcccttgggttttatgggcgctgtgggccctgaaaggaagacctgggcccagttgccctcaattaaagagaaggcccagaggtgaaaaaaaaaa

SEQ ID NO: 2668 - DNA, 810 bp, Homo sapiens
tttttttgcaggtcaaaattcttcctttaatgtgattcatgttattttaatgacttttaggtcaaactcagattcccagttacaggtgcccttggctagttttatctgtgtaacatttgaggctgcatatgtgatcatggtcttgggtttcatctgagatgttagaagccatgtctcttgaggtacttggctcgtgcaaggacatcattgcagaagtcacagctcaggtcctggctgcttcggacatagccagcacccccactgtaggcacagagtccacctctcaggtactggtcaggggtccaggttggaaacctcctctggagttctgtgattctagtagtcagaacttcagttgtctggaaaacctgagactcactaatccaggatgtgggagcttgagagccagggtcctgcaccatgctagtcctatcgcccatgttgaccagaattttgtcaccgggagacttcctggacaagacaccagcgatcacggcaggatccatgcagtacttttggccaatggtttgcatcatgggttgatatttcaggaggtatggcatgtctatttcagccagcctttcagaagcacgaactcctaaaccaaacgcaaaaggaatgatgcagcttgttgtgacttatgctgcaacaggagctcaaggggagagagaaagaacaatccaaggatctgagtaatggtcgaggactgacaatcccagattttggtcttaaatctttagtagtggccactccctgacctgaggttagggctctcctcctgtgagcttgagtcagcgaattccaccgcac

SEQ ID NO: 2669 - DNA, 1163 bp, Homo sapiens
aatagttcgcagggactggcaggaagtgagtgacatccacttggccatggccaactgtaaaatgaccaaaagcatcaggttccctgccctggagcactgctatactggcggggaggtcgtgttgcccaaggatcaggaggagtggaaaagacggacgggccttctgctctacgagaactatgggcagtcggaaacgggactaatttgtgccacctactggggaatgaagatcaagccgggtttcatggggaaggccactccaccctatgacgtccagtttcatatggaggcctcagttgaaaactgcattattgtgagcatgaacaccgctgaccctggcagccagggcatcacacacagcctcttgctacaggtcattgatgacaagggcagcatcctgccacctaacacagaaggaaacattggcatcagaatcaaacctgtcaggcctgtgagcctcttcatgtgctatgagggtgacccagagaagacagctaaagtggaatgtggggacttctacaacactggggacagaggaaagatggatgaagagggctacatttgtttcctggggaggagtgatgacatcattaatgcctctgggtatcgcatcgggcctgcagaggttgaaagcgctttggtggagcacccagcggtggcggagtcagccgtggtgggcagcccagacccgattcgaggggaggtggtgaaggcctttattgtcctgaccccacagttcctgtcccatgacaaggatcagctgaccaaggaactgcagcagcatgtcaagtcagtgacagccccatacaagtacccaaggaaagtggagtttgtctcagagctgccaaaaaccatcactggcaagattgaacggaaggaacttcggaaaaaggagactggtcagatgtaatcggcagtgaactcagaacgcactgcacacctaaggcaaatccctggccactttagtctccccactatggtgaggacgagggtggggcattgagagtgttgatttgggaaagtatcaggagtgccatgattccaatgttttccttcttttaaattaaattcagttgctctgcttcctccaagtcctctgtatctttagaatttccgcaggtgagcactcaataacgcaagtaataaaatactgatatcaacaa

SEQ ID NO: 2670 - DNA, 1163 bp, Homo sapiens; identical to SEQ ID NO: 2669

SEQ ID NO: 2671 - DNA, 2531 bp, Homo sapiens
  misc_feature (1)...(2531): n = a,t,c or g
ctccccagggccgagtcttccggagtcagcagagagcctggatggatcacaggaggataagcctcggggctcatgtgcggagcccacttttactgatacgggaatggtggctcacataaacaacagccggctcaaggccaagggcgtgggccagcacgacaacgcccagaactttggtaaccagagctttgaggagctgcgagcagcctgtctaagaaagggggagctcttcgaggaccccttattccctgctgaacccagctcactgggcttcaaggacctgggccccaactccaaaaatgtgcagaacatctcctggcagcggcccaaggatatcataaacaaccctctattcatcatggatgggatttctccaacagacatctgccaggggatcctcggggactgctggctgctggctgccatcggctcccttaccacctgccccaaactgctataccgcgtggtgcccagaggacagagcttcaagaaaaactatgctggcatcttccattttcagatttggcagtttggacagtgggtgaacgtggtggtagatgaccggctgcccacaaagaatgacaagctggtgtttgtgcactcaaccgaacgcagtgagttctggagtgccctgctggagaaggcgtatgccaagctgagtgggtcctatgaagcattgtcagggggcagtaccatggagggccttgaggacttcacaggaggcgtggcccagagcttccaactccagaggccccctcagaacctgctcaggctccttaggaaggccgtggagcgatcctccctcatgggttgctccattgaagtcaccagtgatagtgaactggaatccatgactgacaagatgctggtgagagggcacgcttactctgtgactggccttcaggatgtccactacagaggcaaaatggaaacactgattcgggtccggaatccctggggccggattgagtggaatggagcttggagtgacagtgccagggagtgggaagaggtggcctcagacatccagatgcagctgctgcacaagacggaggacggggagttctggatgtcctaccaagatttcctgaacaacttcacgctcctggagatctgcaacctcacgcctgatacactctctggggactacaagagctactggcacaccaccttctacgagggcagctggcgcacaggcagctccgcagggggctgcaggaaccaccctggcacgttctggaccaacccccagtttaagatctctcttcctgagggggatgacccagaggatgacgcagagggcaatgttgtggtctgcacctgcctggtggccctaatgcagaagaactggcggcatgcacggcagcagggagcccagctgcagaccattggctttgtcctctacgcggtcccaaaagagtttcagaacattcaggatgtccacttgaagaaggaattcttcacgaagtatcaggaccacggcttctcagagatcttcaccaactcacgggaggtgagcagccaactccggctgcctccgggggaatatatcattattccctccacctttgagccacacagagatgctgacttcctgcttcgggtcttcaccgagaagcacagcgagtcatgggaattggatgaagtcaactatgctgagcaactccaagaggaaaaggtctctgaggatgacatggaccaggacttcctacatttgtttaagatagtggcaggagagggcaaggagataggggtgtatgagctccagaggctgctcaacaggatggccatcaaattcaaaagcttcaagaccaagggctttggcctggatgcttgccgctgcatgatcaacctcatggataaagatggctctggcaagctggggcttctagagttcaagatcctgtggaaaaaactcaagaaatggatggacatcttcagagagtgtgaccaggaccattcaggcaccttgaactcctatgagatgcgcctggttattgagaaagcaggcatcaagctgaacaacaaggtaatgcaggtcctggtggccaggtatgcagatgatgacctgatcatagactttgacagcttcatcagctgtttcctgaggctaaagaccatgttcacattctttctaaccatggaccccaagaatactggccatatttgcttgagcctggaacaggtacttggagaagggtgggaaggaatctgcaggattgcacctgcctgcccctcaaccccacccccacccagctctgatgtccccgggccagcatcctgcccccgtctcttcccaccctgggatctgcttcctgtctccacagtggctgcagatgaccatgtggggatagaggcgctgtaggagcctggtcatctctaccagcagcagcagcagcgaggttctagcccaggagggtggggtgcttcttgtagccctcagctctccagtctctgctgatgaaatgggctccaagtggcagtgccccggtcccaggtgccgngttactgcagcagtgggaccttcctgc

SEQ ID NO: 2672 - DNA, 457 bp, Homo sapiens
cccctctgtgcactcattacctgcttcctgagctccccgagaagtcatccaggacctccccgagaagccgtccaggaaacatgctctcaggggacccccatctgcctcagcctctttgtcactgcctggaccattgtccctgctgtttctcaggtaagaggctggtggcctgagggaagggctaagtttcggccgctttgtctagctgccctgcagaatccccagggctgctcagattctggaagggtccacagagctaggtgatgtctgatttccctcctgttggcaccccctcaaggacacatggcccgtctttgttgcccacagacacagcacaatcctctcacccctcagggccattcacacacactcaccaacagacgcagcattcctcacacaccacacaaaacacatgctcgtcacccacagaatcccttcacaacacacaacagaccct

SEQ ID NO: 2673 - DNA, 522 bp, Homo sapiens
gacacgcgttcgacctatcataatgcccactccctgccaacctacgtgaagagcccagctccctgccagatgacctacatcaaaagtccagctccctgccagacccagacgtgctatgtccagggtgcttctccttgccagagctattatgttcaagctcctgcaagtggctcaacctcccagtactgtgtcactgacccatgctctgctccctgttccaccagctactgctgtctggctccccggaccttcggggtgagtcccctgagacgctggattcagcggccccagaactgcaacacaggatcatctggctgctgtgagaattcgggaagctctggatgctgtggttctgggggctgtggctgcagctgtggatgtggcagctctgggtgctgctgtttgggaattatccccatgaagtcccgaagtcctgcgttgctgtgaccatgaggatgactgctgctgctaaacatacgacagctcaactccagaatgcactgccccgctacccctctggaa

SEQ ID NO: 2674 - DNA, 1537 bp, Homo sapiens
agcactggagccaacaccgccccaggatggggtataaaagggttgggaggagaggaggcttcagtctcagtggctcagccttcccagctgatctgaagctcctgtgcagcctcagccctacaccatgacctccttctacagcacctcctcatgccctctgggttgcaccatggctcctggagcaagaaatgtctttgtctctcctatcgatgttgggtgccagcctgtggcagaggccaatgctgcctccatgtgcctcttggccaacgtggcacacgccaacagagtccgtgtggggtcgactcccctgggccgccccagcctctgtctgcccccaaccagtcacactgcttgtcccttgccagggacctgtcacattcccggcaacatcggaatctgtggggcctacggcaaaaacaccctgaatggccatgagaaggagaccatgaagttcctgaatgaccgcctggccaactacctggagaaggtgcgccagctggagcaggagaatgcagagctggagaccacactcctcgagaggagcaagtgccacgagtccaccgtgtgccccgactaccagtcctacttccgtacaatcgaggagctccagcagaagatcctgtgcagcaaggctgagaatgccaggctgattgtacaaattgacaacgcgaagctggctgctgatgactttaggatcaagctggagagtgagcgctcccttcaccagctggtggaggcggacaagtgcgggacgcagaagctcctggatgacgcgaccctggccaaggccgacctggaggcccagcaggagtccctgaaggaggagcagctctccctcaagagcaaccacgagcaggaagtaaagattctgaggagtcagctgggggagaagttccggatcgagctggacattgagcccaccattgacctgaacagggtgttgggggagatgcgggctcagtacgaggccatggtggagaccaaccaccaggatgtggaacagtggttccaagcccagtctgaaggcatcagcctgcaggccatgtcctgctccgaggagctgcagtgctgccagtcggagatcctggagctgagatgcacggtgaatgccctggaggtggagcgccaagcccagcacaccttgaaggactgtctgcagaactccctgtgtgaagcggaggaccgctacggcacagagctggcccagatgcagagcctcattagcaacttggaagagcagttgtctgagatccgggccgacctggagcggcagaaccaggagtaccaggtgctgctggacgtgaaggcccggttggagaacgagattgccacataccggaaccttactcccctgcaatccctgttccacgcctgcctcctgtacttcttgtccaagctgtggccctgtcaccggtgggtctccctctggccatggagccagcatggggagatgattctgaaggcccgagttaggagattgaggctggttgcactggggtcaggagtgccctcaccttgcccagtcttccttcaagac

SEQ ID NO: 2675 - DNA, 422 bp, Homo sapiens; identical to SEQ ID NO: 707
  misc_feature (1)...(422): n = a,t,c or g

SEQ ID NO: 2676 - DNA, 952 bp, Homo sapiens
aaatttgtatttcgataaccattagtgcagtgcggtggaagtcaagatggcggcgcggacagcgttcggtgctgtgtgccggcgcctctggcagggattggggaatttttctgtaaacacttctaagggcaatacagccaaaaatggtggcttgcttctcagtaccaatatgaagtgggtacagttttcaaacctacacgttgatgttccaaaggatttgaccaaacctgtggtaacaatctctgatgaaccagacatattatataagcgcctctcggttttggtgaaaggtcacgataaggctgtattggacagttatgaatattttgctgtgcttgctgctaaagaacttggtatctctattaaagtacatgaacctccaaggaaaatagagcgatttactcttctccaatcagtgcatatttacaagaagcacagagttcagtatgaaatgagaacactttacagatgtttagagttagaacatctaactggaagcacagcagatgtctacttggaatatattcagcgaaacttacctgaaggggttgccatggaagtaacaaagttttgtttctttatttttttagacacaattagaacagttaccagaacacatcaaggagccaatctgggaaacactatcagaagaaaaagaagaaagcaagtcataaagcctcagggaggccatttttgcctaaatttgaaatgagggtgggccagatgagtatgtttaagtggagagtgcttccagctgagatgatttgagtctgtcctaactgctccattgagttctcgtgccctcatcagctgagggcagggaatggaactttaatggaagaaccacttttatctattctttttattcattgtttcagttctgatttcagcaaacatgagcaaaccactttgactgaaagcagaaagagtgaaaattctattttgttacgct

SEQ ID NO: 2677 - DNA, 414 bp, Homo sapiens; identical to SEQ ID NO: 709
  misc_feature (1)...(414): n = a,t,c or g

SEQ ID NO: 2678 - DNA, 2240 bp, Homo sapiens
aattccgggtcgacctacgcgtccgaagctataggctacccattcagctcccctgtcagagactcaagctttgagaaaggctagcaaagagcaaggaaagagagaaaacaacaaagtggcgaggccctcagagtgaaagcgtaaggttcagtcagcctgctgcagctttgcagacctcagctgggcatctccagactcccctgaaggaagagccttcctcacccaaacccacaaaagatgctgaaaaagcctctctcagctgtgacctggctctgcattttcatcgtggcctttgtcagccacccagcgtggctgcagaagctctctaagcacaagacaccagcacagccacagctcaaagcggccaactgctgtgaggaggtgaaggagctcaaggcccaagttgccaaccttagcagcctgctgagtgaactgaacaagaagcaggagagggactgggtcagcgtggtcatgcaggtgatggagctggagagcaacagcaagcgcatggagtcgcggctcacagatgctgagagcaagtactccgagatgaacaaccaaattgacatcatgcagctgcaggcagcacagacggtcactcagacctccgcaggtaaggagaccagtcccctgagggagcgtggagtgcctccccatctacagcactgcttctacattcctcctgatgacttcctgggcagccctgaactggaggtgttctgtgacatggagacttcaggcggaggctggaccatcatccagagacgaaaaagtggccttgtctccttctaccgggactggaagcagtacaagcagggctttggcagcatccgtggggacttctggctggggaacgaacacatccaccggctctccagacagccaacccggctgcgtgtagagatggaggactgggagggcaacctgcgctacgctgagtatagccactttgttttgggcaatgaactcaacagctatcgcctcttcctggggaactacactggcaatgtggggaacgacgccctccagtatcataacaacacagccttcagcaccaaggacaaggacaatgacaactgcttggacaagtgtgcacagctccgcaaaggtggctactggtacaactgctgcacagactccaacctcaatggagtgtactaccgcctgggtgagcacaataagcacctggatggcatcacctggtatggctggcatggatctacctactccctcaaacgggtggagatgaaaatccgcccagaagacttcaagccttaaaaggaggctgccgtggagcacggatacagaaactgagacacgtggagactggatgagggcagatgaggacaggaagagagtgttagaaagggtaggactgagaaacagcctataatctccaaagaaagaataagtctccaaggagcacaaaaaaatcatatgtaccaaggatgttacagtaaacaggatgaactatttaaacccactgggtcctgccacatccttctcaaggtggtagactgagtggggtctctctgcccaagatccctgacatagcagtagcttgtcttttccacatgatttgtctgtgaaagaaaataattttgagatcgttttatctattttctctacggcttaggctatgtgagggcaaaacacaaatccctttgctaaaaagacccatattattttgattctcaaaggataggcctttgagtgttagagaaaggagtgaaggagccaggtgggaaatggtatttctatttttaaactccagtgaaattatcttgagtctacacattatttttaaaacacaaaaattgttcggctggaactgacccaggctggacttgcggggaggaaactccagggcactgcaatctggcgatcagactctgagcactgcccctgctcgccttggtcatgtacagcactgaaaggaatgaagcaccagcaggaggtggacagagtctctcatggatgccggcacaaaactgccttaaaatattcatagttaatacaggtatatctatttttatttactttgtaagaaacaagctcaaggagcttccttttaaattttgtctgtaggaaatggttgaaaactgaaggtagatggtgttatagttaataataaatgctgtaaataagcatctcactttgtaaaaataaaatattgtggttttgttttaaacattcaacgtttcttttccttctacaataaacactttcaaaatgtgaaa

SEQ ID NO: 2679 - DNA, 3706 bp, Homo sapiens
gggtcgacccacgcgtccgttccaagacaccattacaaagaaagccggactcttttcttataactgagctcagccaaggaaactcttgcacaaatgtacaatactgtttggaatatggaagacctggatttagaatatgccaagacagatataaattgtggcacagacttgatgttttatatagaaatggacccaccagcactgcctcctaaaccaccaaaacctactactgtagccaacaacggtatgaataacaatatgtccttacaagatgctgaatggtactggggagatatctcgagggaagaagtgaatgaaaaacttcgagatacagcagacgggacctttttggtacgagatgcgtctactaaaatgcatggtgattatactcttacactaaggaaagggggaaataacaaattaatcaaaatatttcatcgagatgggaaatatggcttctctgacccattaaccttcagttctgtggttgaattaataaaccactaccggaatgaatctctagctcagtataatcccaaattggatgtgaaattactttatccagtatccaaataccaacaggatcaagttgtcaaagaagataatattgaagctgtagggaaaaaattacatgaatataacactcagtttcaagaaaaaagtcgagaatatgatagattatatgaagaatatacccgcacatcccaggaaatccaaatgaaaaggacagctattgaagcatttaatgaaaccataaaaatatttgaagaacagtgccagacccaagagcggtacagcaaagaatacatagaaaagtttaaacgtgaaggcaatgagaaagaaatacaaaggattatgcataattatgataagttgaagtctcgaatcagtgaaattattgacagtagaagaagattggaagaagacttgaagaagcaggcagctgagtatcgagaaattgacaaacgtatgaacagcattaaaccagaccttatccagctgagaaagacgagagaccaatacttgatgtggttgactcaaaaaggtgttcggcaaaagaagttgaacgagtggttgggcaatgaaaacactgaagaccaatattcactggtggaagatgatgaagatttgccccatcatgatgagaagacatggaatgttggaagcagcaaccgaaacaaagctgaaaacctgttgcgagggaagcgagatggcacttttcttgtccgggagagcagtaaacagggctgctatgcctgctctgtagtggtggacggcgaagtaaagcattgtgtcataaacaaaacagcaactggctatggctttgccgagccctataacttgtacagctctctgaaagaactggtgctacattaccaacacacctcccttgtgcagcacaacgactccctcaatgtcacactagcctacccagtatatgcacagcagaggcgatgaagcgcttactctttgatccttctcctgaagttcagccaccctgaggcctctggaaagcaaagggctcctctccagtctgatctgtgaattgagctgcagaaacgaagccatctttctttggatgggactagagctttctttcacaaaaaagaagtaggggaagacatgcagcctaaggctgtatgatgaccacacgttcctaagctggagtgcttatcccttctttttctttttttctttggtttaatttaaagccacaaccacatacaacacaaagagaaaaagaaatgcaaaaatctctgcgtgcagggacaaagaggcctttaaccatggtgcttgttaatgctttctgaagctttaccagctgaaagttgggactctggagagcggaggagagagaggcagaagaaccctggcctgagaaggtttggtccagcctggtttagcctggatgttgctgtgcacggtggacccagacacatcgcactgtggattatttcattttgtaacaaatgaacgatatgtagcagaaaggcacgtccactcacaagggacgctttgggagaatgtcagttcatgtatgttcagaagaaattctgtcatagaaagtgccagaaagtgtttaacttgtcaaaaaacaaaaacccagcaacagaaaaatggagtttggaaaacaggacttaaaatgacattcagtatataaaatatgtacataatattggatgactaactatcaaatagatggatttgtatcaataccaaatagcttctgttttgttttgctgaaggctaaattcacagcgctatgcaattcttaattttcattaagttgttatttcagttttaaatgtaccttcagaataagcttccccaccccagtttttgttgcttgaaaatattgttgtcccggatttttgttaatattcatttttgttatccttttttaaaagtaaatgtacaggatgccagtaaaaaaaaaaaatggcttcagaattaaaactatgaaatattttacagttttttttgtacaaaggacttggctgttaccccagggttaaaaagttcataacaaattttttttggactgttttgttgggcagtgcctgataagcttcaaagctgctttattcaataaaaaaaagaaatgaaaaagatatatgaatatgacaaagtattgctgagtccaacaatgttgttttaagactcttaaaatacgggtacctgggcaatggttaattttccataaaagaattgtgaacttcttgaaatctaggggagggggaatgtagtgaagggatgtatcaagtggggtggtgggagggggaggcaaggttatatgcactttctcatgatttacagagaagtgaataactgcaaagtgaagttgcttcttctacttcagtcttctctcactttgatttgctagttgttatcaattaatgacaattacaaacctactgtatctctaatacagtgtgactggtcaggtatttcagttcttaggaaggaagtgccaagtttgtttttgggttcctggaacagcgctcacctttgtttagaacactggtttaaagggataatcatctctgtcacattagactatccatcatgaccagcaaatactcattttaggaaaaaaaaaagcatgatctgaaaaatacttttggtggtatgttggttaccctcctagctttccatttggtttagaacataaagcaaatagacacagtcatactgtcactgctctggactgtgtggagctcgctaaagtcatggtcattgcaggaatccaagtggcagtccttctcattcattctaatcattgtatgtgcttcactacgggggggagaaggaaacgttagcatcatgtttcccatttagggcaggagtgagaggtctctcttcctgatttagatatgcaaaagctggtatgttcagtaggaactgtacatgtgttgggaggcataaagactaattagcaaccataatatggtcactaccctaatagactaaatgaaatcttgcaatttcaaaattactcctttccccaatattaagatttaccccacaagctaatatttcccgtttaaagtactaagggtgagggttttctgttactttgttttttaatgttgttccttttgaaagaatcagtcttgcagctgagtgaaaaatctgtggaatgtattatttgtcctctttacatgaaactactcatacttaagcaaaagtcagtcttatagcaaga

SEQ ID NO: 2680 - DNA, 1079 bp, Homo sapiens
ttttttttttttcaggcttccgggtctttaatggggcgggggctgggggcagttcatccaaaggtggctccgaagctgaggtcaaccttggcggctggctctgcagggcagaggaggatggtaagcggcccgtcagcatggggggatcttgataggcggaaggagagccccatgggtggcagccacagctcaaagctgaggaggagcttccctggcccagtccccagagctttcaacacaggcagggcctggggcccaggcagaagcctgcactgccctctgggtggcctccttggcaggcgcggcttccccaggtggccgggacaacaggagctgggctgggcccactgggcatccctgaccagccctgggccggccctcgggacaccgggggtacgcaccgcctactccagggccttcaccagggcctcgttggcctcgattcggatctggatctctgcccgcgtggcctcgtcagctgtccccaccagctccgcctgggccttctccaagtttgccttggctgcccccaggtccaacatgtccagcgtcacggcctcttcggccaacaactgcaccgaagagtcggcgttcactgcgatggaaccgctgctcacaaagtatttggaggtggtgccgtcctctgcatgcaccacgaccagccccggccgcaggacctgcagcgtgggcacgtgggccgccaggatgccgaaggctccggtcagcgtgggcacgtccacctgccggacgttggcaccgttgaagaacacctgcagacaacagcgtggggaatgatggcggggcaggccggccccgcgcccaccgggcactcggcctgtcctgctaagtaatgggtcagggcaggacctggcgctgatgtgaggcactgagacaacccagcgcagggatccgaagttgcagctttggtcctcaacagttgcgcctcattctactgatccgcgaaatgggaatgcaacgatccggcgacacccaggctttggccagggagatcggggagggcacccaggagacgcttatctcggggaggtgcccgggacgagggcagcgcagggctcggg

SEQ ID NO: 2681 - DNA, 3592 bp, Homo sapiens
ctcaggctcataccacacggggggtgctagtgggctgctgtgtgtttacatgagtaatggagctgccgggggaggggagttgtaagcagagcgctgagcctcgcagctcgcattcggagggaagctgacatccacaccaagtcgagacttccagggatgtggccggggagcagtcacatgctgtagctttcatgagcacaggcatcagtcaggcagatgtttgtcgactggaatggcgccaaatcttaaaggcagaccacgcaaaaagaaaccatgcccacaaagaagagattcattcagtggtgttaaggattccaacaacaattccgatggcaaagccgttgccaaggtgaaatgtgaggccaggtcagccttgaccaagccgaagaataaccataactgtaaaaaagtctcaaatgaagaaaaaccaaaggttgccattggtgaagagtgcagggcagatgaacaagccttcttggtggcactttataaatacatgaaagaaaggaaaacgccgatagaacgaataccctatttaggttttaaacagattaacctttggactatgtttcaagctgctcaaaaactgggaggatatgaaacaataacagcccgccgtcagtggaaacatatttatgatgaattaggcggtaatcctgggagcaccagcgctgccacttgtacccgcagacattatgaaagattaatcctaccatatgaaagatttattaaaggagaagaagataagcccctgcctccaatcaaacctcggaaacaggagaacagttcacaggaaaatgagaacaaaacaaaagtatctggaaccaaacgcatcaaacatgaaatccctaaaagcaagaaagaaaaagaaaatgccccaaagccccaggatgcagcagaggtttcatcagagcaagaaaaagaacaagagactttaataagccagaaaagcatccctgagcctctcccagcagcagacatgaagaaaaaaatagaagggtatcaggaattttcagcgaagcccctggcatccagagtagacccagagaaggacaacgaaacagaccaaggttccaacagtgagaaggtggcagaggaggcgggagagaaggggcccacacctccactcccaagtgctcctctggccccagaaaaagattcagccttggtccctggggccagcaaacagccactcacctctcctagtgccctggtggactcaaaacaagaatccaaactgtgctgttttacagagagccctgaaagtgaaccccaagaagcatccttccccaggcttccccaccacacaggccaccgctggcaaaccagaatgagacggaggatgacaaactgcccgccatggcagattacattgccaactgcaccgtgaaggtggaccagctgggcagtgacgacatccacaatgcgctcaagcagaccccaaaggtccttgtggtccagtcgtttgacatgttcaaagacaaagacctgactgggcccatgaacgagaaccatggacttaattacacgcccctgctctactctaggggcaacccaggcatcatgtccccactggccaagaaaaagcttttgtcccaagtgagtggggccagcctctccagcagctacccttatggctccccaccccctttgatcagcaaaaagaaactgattgctagggatgacttgtgttccagtttgtcccagacccaccatggccaaagcactgaccatatggcggtcagccggccatcagtgattcagcacgtccagagtttcagaagcaagccctcggaagagagaaagaccatcaatgacatctttaagcatgagaaactgagtcgatcagatccccaccgctgcagcttctccaagcatcaccttaacccccttgctgactcctacgtcctgaagcaagaaattcaggagggcaaggataaactcttagagaaaagggccctcccccattcccacatgcctagcttcctggctgacttctactcgtcccctcatctccatagcctctacagacacaccgagcaccatcttcataatgaacagacatccaaatacccttccagggacatgtacagggaatcggaaaacagttcttttccttcccacagacaccaagaaaagctccatgtaaattatctcacgtccctgcacctgcaagacaaaaagtcggcggcagcagaagcccctacggatgatcagcctacagatctgagccttcccaagaacccgcacaaacctaccggcaagggcctgggcctggctcattccaccacagggccccaggagagcaaaggcatctcccagttccaggtcttaggcagccagagtcgagactgtcaccccaaagcctgtcgggtatcacccatgaccatgtcaggccctaaaaaataccctgaatcgctttcaagatcaggaaaacctcaccatgtgagactggagaatttcaggaagatggaaggcatggtccacccaatcctgcaccggaaaatgagcccgcagaacattggggcggcgcggccgatcaagcgcagcctggaggatttggaccttgtgattgcagggaaaaaggcccgggcagtgtctcccttagacccatccaaggaggtctctgggaaggagaaggcctctgagcaggagagtgaaggcagcaaagcagcgcacggtgggcattccgggggcggatcagaaggccacaagcttcccctctcctcccctatcttcccaggtctgtattccgggagcctgtgtaactcgggcctcaactccaggctcccggctgggtattctcattctctgcagtacttgaaaaaccagactgtgctttctccactcatgcagcccctggctttccactcgcttgtgatgcaaagaggaatttttacatcaccgacaaattctcagcagctgtacagacacttggctgcggctacacctgtaggaagttcatatggggaccttttgcataacagcatttaccctttagctgctataaatcctcaagctgcctttccatcttcccagctgtcatccgtgcaccccagtacaaaactgtaggctcagctctgcccagcagtccaaagcggcatggccaacagagcttcactccttacccaggagtgctggcttatagagttagaagtcagtatttcttctaatctgaggctatgatcagtcccagctgtaggggcccagaggggaggtgaacatgcctgatttttgtgggacaactgtagcccacaaactgactggctggtgagtcttgactcccttccaacacagatgcccaggcacctccagatcattcacttcgcacgtgggccttgtgaagggatttgtgaatatccaggaagaacttagaggaccccatctgagttcggatggtcaggaaacaatctgggcaaaaaagaggcaggcatttcaaaggaaggggcaaggaagactggcaaacagatggcaagggatgcccctctttttcataaaactctccaaggttcaatcaatgcaatgtatagtgaaacttcaatagatctttcattttgacactattaaacaatccagagaagtaaacactgtt

SEQ ID NO: 2682 - DNA, 1920 bp, Homo sapiens
gtcggaaaatccgcgagaccacgcgtccgggttgaggacaccttgactaacctccaagggcaactaaaggatcaagaaaggcccagcacagcagaagatcagctggatctagctcctgcaggagatgtgtacaaagacaatcccagtcctctggggatgtttcctcctgtggaatctctatgtctcatcctctcagaccatttaccctggaatcaaggcaaggattactcagagggcacttgactatggtgttcaagctggaatgaagatgattgagcaaatgctaaaagaaaagaaactcccagatttaagcggttctgagtctcttgaatttctaaaagttgattatgtaaactacaatttttcaaatataaaaatcagtgccttttcatttccaaatacctcattggcttttgtgcctggagtgggaatcaaagcgctaaccaaccatggcactgccaacatcagcacagactgggggttcgagtctccactttttgttctgtataactcctttgctgagcccatggagaaacccattttaaagaacttaaatgaaatgctctgtcccattattgcaagtgaagtcaaagcgctaaatgccaacctcagcacactggaggttttaaccaagattgacaactacactctgctggattactccctaatcagttctccagaaattactgagaactaccttgacctgaacttgaagggtgtattctacccactggaaaacctcaccgacccccccttctcaccagttccttttgtgctcccagaacgcagcaactccatgctctacattggaatcgccgagtatttctttaaatctgcgtcctttgctcatttcacagctggggttttcaatgtcactctctccaccgaagagatttccaaccattttgttcaaaactctcaaggccttggcaacgtgctctcccggattgcagagatctacatcttgtcccagcccttcatggtgaggatcatggccacagagcctcccataatcaatctacaaccaggcaatttcaccctggacatccctgcctccatcatgatgctcacccaacccaagaactccacagttgaaaccatcgtttccatggacttcgttgctagtaccagtgttggcctggttattttgggacaaagactggtctgctccttgtctctgaacagattccgccttgctttgccagagtccaatcgcagcaacattgaggtcttgaggtttgaaaatattctatcgtccattcttcactttggagtcctcccactggccaatgcaaaattgcagcaaggatttcctctgcccaatccacacaaattcttattcgtcaattcagatattgaagttcttgagggtttccttttgatttccaccgacctgaagtatgaaacatcctcaaagcagcagccaagtttccacgtatgggaaggtctgaacctgataagcagacagtggagggggaagtcagccccttgattgccggtttgcaattcaccccaggaagtaaatggtccttaatcctacaactactgtaaacccagaagggaaagacagtacacactggaattgtaaagcccttgtgaattgcttaggcagaaagttttctttcttaagccttcaggaacccagaataaggcagactctgttaaagggataaatagaggtgtctgaatgtgagtgtatgcatgctgcgtgtgtctgtgtttatgtttgtttgtttgtttggggcaagaaagattctaggacaagagctaggcatgtacttctgaccaggtgggtaagcaactctaagtctgtatttgtattggtcattctcagtggaaatcccttaggccctctagtggttttcccctacctgcatattggttttcatgttttatattcactgttactatcttctgtgg

SEQ ID NO: 2683 - DNA, 1411 bp, Homo sapiens
  misc_feature (1)...(1411): n = a,t,c or g
tttcgtggacgcttggggtctggacgcaacggcggcgggagcatgaacgcccctccagccttcgagtcgttcttgctcttcgagggcgagaagatcaccattaacaaggacaccaaggtacccaatgcctgcttattcaccatcaacaaagaagaccacacactgggaaacatcattaaatcnnnnnnnnnnnnnnnnnnnnnnnnnnnnnnnnnnnnnnnnnnnnnnnnnnnnnnnnnnnnnnnnnnnnnnnnnnnnnnnnnnnnnntctgccccagagcacatcagctatgtgccccagctctcaaacgacaccctggcggggaggctcaccctgtccaccttcacgctggagcagcctctaggccagttcagcagccacaacatctctgacttggataccatctggctggtggtggccctcagcaacgccacccagagcttcacggccccacggacaaaccaggacatccctgctcctgccaacttctcccagaggggctactatctcacactgagggccaaccgggtgctgtaccagaccagaggccagctccatgtcctccgcgtcggcaatgatacccactgccaaccaacaaaaattggctgcaaccatcccctaccaggacccggcccctacagggtgaagttcctggtgatgaatgacgaaggacccgtggctgaaaccaagtggtccagcgacactcgcctgcagcaagcccaggcacttcgggctgtccccggcccccagagcccgggcaccgtggtcatcatcgccatcctgtctatcctcctggccgtcctcctcacggtcctcctggctgtgctcatatacacctgcttcaacagctgcaggagcacttccctatcaggcccagaggaggcagggagtgtgagaagatacaccacgcacctcgcgttcagcactcctgccgagggggcttcctgaggggttccagaggggcccacgtgtccctccacctcctccctggcccaggctgcagagcctgagctgggacacgccctgaagcttctggaccctgagagagattgtttcttttctttactattttttttttttttttttgagacggagtctcactctgtcgccaggctgaggcaggagaatcgcttgaacccaggaggcggtggttgtagtgagctgggatcatgccattgcagtccagcctggacagcaaagctagactccatctcaaaaaaaaaagaaaagaaaaagtaaaaaatttaaaaattagatgggcatggtgacatgtgcctgtaatcccaggtactaaggaagctgaggtaggaggatgacttgagcctaggagttcgaggctgcagtgagctctgatcgcaccactgcactccagcctgagtgacacagcaagaccctgctttaaaaaaaaaa

SEQ ID NO: 2684 - DNA, 691 bp, Homo sapiens
tgatcctggaaaattatagcaatcttgtctcagtaggtaaggagtttttttccgcacatggctatcaatagcatgcatttactagttgatgccctgtagttttctgatgtaaagcttgagattgaagtctctgagatgactgatcccatttggccaccataaaggtgctcttgccttgtcagagattggttcatttgtgcacattctttgagtagctggtgaagctgtgcctttcttccccatgatgtattcagagcccctgaaaccaagctatttagctctagtcctgtggtattttctcttaacagggtattgcattactaaaccagaagtgatctttaagatcgagcaaggagaagagccctggatattagaaaaaggattcccaagccagtgccacccagccaaatatctgtggtgtctccacgactgaaaggcagaaagttcaaactcagccctttcttttaagggttttaggagggagagcagagccaagtcttggaggcgctggacttgctgtgacacaggaaaacgagctgtgtgggttaagggatgggggatcagtatgacatgcttacgaattcgagctcggtacccaagaatacctaaggaaaaatttaacatgtgcaacatccatacactggcaattaaaagcattgttgagaaacaattaagggcccaattaaattaa

SEQ ID NO: 2685 - DNA, 1673 bp, Homo sapiens
ttttttttttttttaaagcctggattgtaaccagattttcttttttcccccttctcagctgtagatatgatatctcctttcagggccccagcttaagggcaaagtgagttaatgtgtagacaaaggcgagggacaagagagagttaacatctagacagtggaaaaagccatggtgtgtggtttctgggaaccaccaacacttgcaggtttagctttttcccagggttgactacaagaaagaaaaccatgtttttgcaagattaaaatgtggttgagtgtgcctaaattaaccatccccatttttatcatatttccaccatcacttcagggttttaagagtcagtgctcacctgggcggagctggtagtacattttgcttcttagaaagctaagtcctgggttccgtctgattttaggttccaggaacttcctgagaacacccgatcgcagagggtaattttctggagtttgttttgcagggatagctgggagtatggccaccctgctccacgatgcggtaatgaatccagcagaagtggtgaagcagcgcttgcagatgtacaactcgcagcaccggtcagcaatcagctgcatccggacggtgtggaggaccgaggggttgggggccttctaccggagctacaccacgcagctgaccatgaacatccccttccagtccatccacttcatcacctatgagttcctgcaggagcaggtcaacccccaccggacctacaacccgcagtcccacatcatctcaggcgggctggccggggccctcgccgcggccgccacgacccccctggacgtctgtaagacccttctgaacactcaggagaacgtggccctctcgctggccaacatcagcggccggctgtcgggtatggccaatgccttccggacggtgtaccagctcaacggcctggccggctacttcaaaggcatccaggcgcgtgtcatctaccagatgccctccaccgccatttcttggtctgtctatgagttcttcaagtactttctcaccaagcgccagctggaaaatcgagctccatactaaaggaagggatcatagaatcttttcttaaagtcattctctgcctgcatccagccccttgccctctcctcacacgtagatcattttttttttttgcagggtgctgcctatgggccctctgctccccaatgccttagagagaggaggggacggcacggccgctcaccggaaggctgtgtgcggggacatccgaggtggtggtggacaggaaggacttgggaaggggagcgagaaattgctttttctcttcctccctgggcagaatgtagcttttctgcttcactgtggcagcctcctccctggatccttagatcccagaggagggaagaaaatttgcagtgactgaaaacagtaaaaaaaaaaaaatttatgtatataaaagttgcattacacagtacaaaatagatggataatgtttatcctttatttttctatgtagaagtttttgaatttgtgtgtgtgcttgtgcgtgtctacacctagtattacggctgggactctccagctgtttttgttgtggttatgtttttaagagggttgaattcttccatcaggtgaacgaaaaaggcaacaaagtaataaatcagtgaatgtggccggcagctgtgtttagcccctc

SEQ ID NO: 2686 - DNA, 682 bp, Homo sapiens
  misc_feature (1)...(682): n = a,t,c or g
tggaaaacaggccttactagcatagtgaggagtgttatctttgagaacattttgagggctgacgaaagagaaagagaactcaaaagggagaataagataaagagaaaatgaggctagaaaaacatgcaggagctagaaaggtaaaggaacccctgccccttgaccttccttccctctaccctcatggtcctcttactgtccttgactttcttctctgctttaacattccattctatttgtcaactgcgtaacacaggcgtagaagtggacattgttttccagagagtctcctttttatagtttcttcctcaaccttaaaatgtctgtccttttggcacgttgtgaaggagaacactaacgtgcctaagattggaggtgacgatatctctgtgatgctgggggagaaatcacaggggcaaaaacaaaactttaggggcattgacaaagggggcccttcttaaaaaaaaagggaattctgccttttttttncatctcattctagtagtacttgaatggtccatgaaagagaggcacaggaccctcacaccatctcttttgctttaattgggatggaagcttttcaataatacttagtgggctgctgcggcctcttatgctctatggagcatcccttgggaaacagttaaaaataattagggagaccagaccagggaaggggggg

SEQ ID NO: 2687 - DNA, 601 bp, Homo sapiens
caattctgaaggtcgccaagaaggagagaacaatgtcttctttacccgtgccatacaaactgcctgtgtctttgtctgttggttcctgcgtgataatcaaagggacaccaatccactcttttatcaatgacccacagctgcaggtggatttctacactgacatggatgaggattcagatattgccttccgtttccgagtgcactttggcaatcatgtggtcatgaacaggcgtgagtttgggatatggatgttggaggagacaacagactacgtgccctttgaggatggcaaacaatttgagctgtgcatctacgtacattacaatgagtatgagataaaggtcaatgggcatacgcatttacgggctttgtcccatcgaatcccgccatcatttgttgaagatgggtgcaagtgtccgaggagatatcttccctggacctcagtgtgtgtctgcaattgagggagatgatcacactcctcattgttgaggaatccctctttctacctgaccatgggattcccagaacctgctaacagaataatccctgctcacattttcccctacactttgtcattaaaacagcacgaaaactcaaaaaa

SEQ ID NO: 2688 - DNA, 1028 bp, Homo sapiens
cattacgccaagcttggcacgaggccgaggttgaagttcatgagttcgcccagcctcagtgacctgggcaagagagagccggccgccgccgcggacgagcggggcacgcagcagcgccgggcctgcgccaacgccacctggaacagcatccacaacggggtgatcgccgtcttccagcgcaaggggctgcccgaccaggagctcttcagcctcaacgagggcgtccggcagctgttgaagacagagctggggtccttcttcacggagtacctgcagaaccagctgctgacaaaaggcatggtgatccttcgggacaagattcgcttctatgagggacagaagctgctggactcactggcagagacctgggacttcttcttcagtgacgtgctgcccatgctgcaggccatcttctacccggtgcagggcaaggagccatcggtgcgccagctggccctgctgcacttccggaatgccatcaccctcagtgtgaagctagaggatgcgctggcccgggcccatgcccgtgtgccccctgccatcgtgcagatgctgctggtgctgcagggggtacatgagtccaggggcgtgactgaggactacctgcgcctggagacgctggtccagaaggtggtgtcgccatacctgggcacctacggcctccactccagcgaggggcccttcacccattcctgcatcctggaaaagcgcctcctccgccgctcccgctcgggggacgtgctggccaagaaccctgtggtgcgctccaagagctacaacacgcctctgctgaaccccgtgcaggagcacgaggcggagggcgcggcggccggcggtaccagcatccgcaggcactctgtgtcggagatgacgtcctgccccgagcctcagggcttctccgacccgcccggccagggccccaccgggaccttcaggtcctccccggcgccccactcagggccctgccccagcagactgtaccccacgacccagccccctgagcagggcttggatcccacccgcagctc

SEQ ID NO: 2689 - DNA, 2349 bp, Homo sapiens
gcggccgccgcgagtctggtatcctgagcttcgtgagttgagcgctgctgctccgcggtggagtcaccgcaccgctcccgggatcatggtgttctacttcaccagcagcagcgttaattcatctgcctacactatttacatgggaaaagataaatatgaaaatgaagatctgatcaagcatggctggcctgaagatatctggtttcatgtggacaaactctcttcggctcatgtataccttcgattacataagggagagaatatagaagacatcccaaaggaagtgctgatggactgtgcccaccttgtgaaggccaatagcattcaaggctgcaagatgaacaacgttaatgtggtatatacgccgtggtctaacctgaagaaaacagctgacatggatgtggggcagataggctttcacaggcagaaggatgtaaaaattgtgacagtggagaagaaagtaaatgagatcctgaaccgattagaaaagaccaaagtcgagcggttcccagacctagcagcagagaaagaatgcagagatcgtgaagagaggaatgagaaaaaagcccaaattcaggaaatgaaaaagagagaaaaagaagaaatgaagaagaagagggaaatggatgaacttaggagctattcatcactaatgaaagttgaaaatatgtcttcaaatcaggatggcaatgattcagatgaattcatgtaaaaggagaaaaggagaaaaggacctttgaaagatgtgaatgtagagacaattgcagaccttttggtttcatctgtgttctgaagtataaaatacaaccaaaattctaccttcatcctacccagaaattattgattttcaagttttaaaaaaattgtaccttttttgctgacagaaaaggatcagatatgtataaaatagttgaacttgacagcatataacttaaagtgaaaatgtttttgccagaacatgtcttggtaccttgtgaaagcaggctgcccttgttcttgagatagactttaaaatgaaccagctctgaaaagtacttctgctgctctggtctatccctgaaaacagatgtcttgaaacacttttcatattcttaaaataatcttcacttctgttaagaagaacatgttggtgggtaattatgcgaatgtttccctgtccctgatttctcgattaggcgtatgggttttgaaaaagagatttttcagaagattgtcagcttcagtattcacgttccatcgtgtcatctgggtctgttagtgtagtgaccctcagtgcagtctgtcccagcgtttatgtccttgcttcctctgagcagaggcctccatcttagtatcaacatatttaaagaaattgatggtgttcatcaagctggggcctgtggcagttgttgcctgagcaccaagtaacccaagccacctatgtgacaacttctgggcccaggagtaatttctcagcattgagggtaaaataggatggagtgctctgttgatcatttgggagatgtaggttacctgatttgtgccttaggatgcagcgtgaagcagaagtccatattgcaattatgattttagaaggaactaagcattttactcacacccacagcagcaagaatgacctcctgcagcagatattccacctgtaatagcactttggaactgtgggcaaaaccaaaaggctagtgtttccatttattccatgttggtgtatggggttgaactggaaaattccctgaggcaaaactcactggccaaattttgagagggtatagaaaatgactttagagatgagtggttttgtgtatgtgtctgatgatattcagtctgatgttccgcaattttaaaagttataataaaataccatttttttaatctggaaggacattgatatatgaattcttagaatttgctattaaaaagggtagcccccattccacaagctggttttgagggtgatcttgctctaaaaaacctcattcatcataggctcagtctgacaggttctgtacggggctatcatctttctcctcctctgctaaatgcctctttcttccagctgctcactgggtcaaagggatgtcctttctcagatgtattcttgatacatctcagatgtattcgtagctgtgctccttccatacttccaaggagtccggcttctacagaattcctctgtacctcacactgcaacacatgtagatagcgcttttgaaaaatacatatatttttactatagtatgagaggtcctggggctcaaactttaaacatttcctaactcagcttacactgagttaaaatgtccaggtctctgctgaattctcttgttgaattcatagctctccaacctcctc

SEQ ID NO: 2690 - DNA, 2349 bp, Homo sapiens; identical to SEQ ID NO: 2689

SEQ ID NO: 2691 - DNA, 2579 bp, Homo sapiens
ctttcagaggcttccggaggactgagcagctagaggtgattttgcatttgcgtttcccgacgttgccacatctcaggtgaataagttctatgaagcgctcacactagtacgtggcccctcggtggtttgtcctcgaggtcgaaggtccagatgtccaggggctgccctggactccagagtggtgcggctgagcaggctgtggtcttgggtgcttgggcacctcccgtctctccctgctcagagttcttctctcctgggcagccagaaaggatcagaaccggtcacatgcagagcggcctcccgtatcccacagcagctccgttctctaatctgggtcttcagatgcggctgtgtctcccggcaccttgctggaatgtggtgcatccctcggagtccagcagcccttaggcagagctgggtgccgagcttgagtccaggagggcctcagacacctgcgatcttgcagcctgttgccctggacagtgggtgtgctgtgggtggaggatggcgccctgcctccacggaagcatccccagcttgcccctcagtcacacgaagcgtctgtccccagcctggggcatttctgagtggcctccacttggcctcttcctttttctggagcaagtatttgaactcctgcaggcgccagagatctccttacctgtttcccgctacccttctccagccaggtttctgccctcagccagattgtcctgcagtgacttgcttttggccatggagtagtggctgctcagtgcctgagattgttttagcagcagaagggaccgggtccccctgctgctggcaacacagacgcttgcttacagttctctggtcctggacacctgaggtctcggcctccccaggacggcccttccagattctcaggaccaccttgccctccctgccctgtctcctaggtgaccctggcaaagatgagagtgcacatttcgtcctgcctgaaggtccaggagcagatggccaactgccccaagttcgtccccgtggtgcccacatcacagcctatccccagcaacatccccaacaggtccaccttcgcctgcccgtactgtggtgcccgcaacctggaccagcaggagctggtgaagcactgtgtggaaagccaccgcagcgaccccaaccgcgtggtgtgccccatctgctcggcaatgccctggggggaccccagctacaagagcgccaacttcctgcagcacctgcttcaccgacacaagttctcctacgacacctttgtggactacagtattgacgaggaggccgccttccaggctgctctggccctgtctctctctgagaactgaagggaagcgcagccacccgcctgcgtctggggtcagggatgtccccgctcctgtgtcgcacctggcacctgctcgggagcgcacctcaccggactgagctcacaggaggagcctgcacccgcgcagaaggggagccggggccgagcctccgggcctgaatacgggccagccgccgaggccgccagagcagggccgcctggtcccaccggcgtcgctgggttcttcggtgcttctggccgagcaggcggcctacttgggcagggctggacgctgggacctggagctgccgccgtctcttcaaagccatgataccccctcgtgggaagaagggaccgacgcgcgagtcgcgctccgcagtcgagccgggaggaacccaggctgctgccctgcccagcccgaccctgccccggccccgcttccaccttgcgcatttggtactggcttttgtgatacttaggaaccctggcatcttttctatattatccagtgtgataatcttttcacgttttatagagcaaagacagagcagttactcttcatattgcaatatctgtgtttgactaggaataatagtatttttatggaacatttacaaaattatattttttaagaaaacaatcaaaacaagcattgggggattggggcaaggatggaaggagcagtggggcagctgccagagctcaggcgagccatggggtctgctgtggggtctgccctggccacccactgtgtgtctgggtccttgaggtttgtacgtttctctttgatgaccaggaagaaatcccagcaccccagccacaggctgtggctgctcccagcagaggcggggccggcagagaaggggcctcctccacccagagtcctggccttggcccgctgtcaccttcaaagctgactgtgccccgctgcgggaggggacggcaccccagtggtggcagagcttgggggcctgggcaggggcccgcttggcgggccgggcaacacgtcaacattcttttctgttcttggcattaattattgctgtctttttttaaaaaaaaaaagtttaaataaaatgtctcagagcatcaaaaaaaaaaaaagggggggcccttttaaaagaacccttggggggcccaaatttaacgggggttggaaagttaaaatttttttctttatggggggcgatataaaaccctccttggaatttttggaaaagaacctttttttggggggggggaaaaatgggcccacctcccttccaaaatttaaggcttt

SEQ ID NO: 2692 - DNA, 5352 bp, Homo sapiens
agaccctggggaggtggctgctcggagtttatgagacggttgcccccaccctggcgtgcctgccccggccgcggctgaggaggaggaggaggaggaggaggaggaggatgatctccagatacactcggaaggcggtgccacagagcttggagctgaaaggaataacaaaacatgctcttaaccatcatccccctccagagaagctggaggaaatttcccccaccagtgacagtcatgagaaagacacaagttcccaaagcaagtctgacatcacaagagaatcatcttttacatcagccgacactgggaattcactgtctgcttttccaagttatacaggcgcagggatatctactgaaggaagctcggacttctcctggggatatggtgaactcgatcaaaatgccactgaaaaagtccagacaatgttcacagccattgatgaactcttgtatgagcagaagttgagtgtgcataccaagagtctacaagaagagtgccaacagtggacagctagctttcctcacctcaggattctaggtaggcagataatcactccaagtgaaggttatagattgtatcctagatccccttctgctgtttccgcttcatatgaaacaaccttgtctcaagaaagagattctactatatttggtataaggggaaagaagttacatttttcatcttcttatgctcataaagcatcttccattgccaaatcctccagcttttgttctatggaaagagatgaggaagactctataatcgtctcagaaggaataattgaggaatacctagcattcgatcacatagatatagaagagggatttcatgggaagaaatcagaagcagctacagagaaacagaaattagggtatcctcccattgctccattttactgcatgaaagaagatgtccttgcttatgtgtttgacagtgtatggtgcaaggttgtgagctgcatggagcagttgacacgtagtcactgggaaggatttgcctctgatgatgagagtaatgttgcagttaccagacccgattcagaaagttcctgtgtgctgagtgaactacatcctttggtgttaccgcgagtgccacagtctaaggtgctgtacattacctcaaatccgatgagtctctgtcaagcaagcagacatcagccaaatgtgaatgatctcttggttcatggaatgcctctacagccaagaaatctctccctaatggacaagctcctagatcttgatgacaagctacttatgaggcctgggtccagtaccatcctttcaactcgaaattggccaaatcgagctgtggagtttagtacatcatctctgtcatacacagtgcagtccaccaggagacgcaatccaccaccacgaactcttcatccgatcagcacgagccattcatgtgctgaaacaccaagatctgtggaagaaatcctcagaggagcccgagtcccagtggcacccgactcgctctcctctccctcaccgacgcccctgagtcgaaataatctgctaccacctattggcacagctgaagtggaacatgtgagcactgtggggccacaaagacagatgaaaccccatggcgactctagtcgagctcaaagtgcggtggtggatgaacctaactatcagcagccacaagaaaggctccttttgcccgactttttccccaggcccaacacaactcaatcatttttgctggatacacagtatcgtcgctcatgtgcagttgagtatcctcatcaggcccgacctggcaggggatctgcaggtcctcagttacatgggtctacaaaatctcaaagcggaggcagaccagtctctcgaaccaggcagggaccataaggcaaatgagaagaatctatcaggctgcaggaaacacgagatttcatgaagcagtattcagtcatcaagtgatgcagagcttgtatagaagatcgactagaaatcatcttcatgaagagtgattttggcacaagtgaccgaagaacaaaacaccatagcagccaaaaatgacatgagtgttgtttctatctccagttactgtctctttcagcagaaattaacctatcccattggaaaggcaagtttgtacccaaagatgcaacagtgaataatacccaaatcactgctcatgttatctcttaacaatgatcagttcaatcatataggatttgatgagctcacacatacacaaaaagcagcaaatcatcagtgacaatatcactggcttcagaatacttcagcctgtgttcatttctggagagttgtactcagttttaagtcattttgctgttgaaaatctgacctcatcaaatagatgtcattcctaaaactctctttagatgtcctaccctatcagcagattaaaatggaaggggtgtgtaactaaaaacataaatgttaagcattagtataaagtaacttctgtaataaattatatcgcatattttttcagataggacagctcaaccttacgatgcctacctgatgccaggtgatgcttattttcttcctaaagtaggttactggtcatatcttttttccaaatattaaatgcaccttgccagatattctcctgcagctctaaggaaaggaaatcaatttaaaaataatttgtagaatctactattgagccaccaaagtataattccctaaaagtttaagaaaccctggcaattaattcagcataaacatatcctataaacagcaggagaggttcagctttctgattttactgtggaccttttcctaagggcattcatgaatgcagcaacagttttaactatggcttacatttattttaaatttcactaaatacaaatcttgattgtcatgccagttttagatcttattaattttcagaatggataaattcaaataatcataaattacggtaactttttattataccaaggtgttctaatgccatcatatgaagacagatgcttcaaacaacctgcattaaattatatttttaataaaattaaaatctatttttaacctatttgtaggtcacaaaccgaaaacgtgtcgtctttaccttaggaggctaaagggcttactttatggcatacgggtatatttaataggtctacaaatcaaaggatttaaacagtcccttaaaaattccatatattctcataccaactcatctacataggaaatggaaaatctctattgttctcacaaaccattaccatgagttcactattaacaactggatcaatatggcttgcctttcaaagttaaagaatcagaaaggggcctgtaagaagtcatttagcccaattccctcaccctgtgtgttttccctcaaagccagtgcaatttttttttaaccaaaaaactggacatgtttaatacatacagtttgacaaatttggatttcactctttgttttgatgtagtaactcttttataaaagggaacagattcagacaagctcagtggcccaactgaagacattcagcaattaatggcaggacttcagtaatcagtggcaggactacaacatacatctcttcatgctagggaaaccaggctctctattataaagctgaccagggctattgttttccccttttctctcatcctaaacaccattcatatttttcctaggtcacattttagtgggatcatttacaaagcccccagaacttaatcatcatgttttaccttttttattgaattatatacacctcttacaaaaatgcttgaagtaatttaacacctgtacatcagtacaaaacctggctgagtaaaatgaagagaggatctattcaagatcattaagaccaaatgtaaactgggaagtatgtggaagatagctgtccagcaagtgtctggaaggtgttctagctgggtagagagcctattctaacagacacgcacatcgcagaaagcagcatgaacagaaccacatcctagataagagttctgtgtacagaagatccatggaggcaagtgctgtcaggaaggacactgcctccctccaccctcccaaatgtcaccaccaagttccttcaggtgagacctcacacaatgtcaagtgctttctaggaaatactaagatcaggttgagagattctgcttggtctagtcaatctgaaaaattcaggctggaaagacaccttttctcaagagctgaattgacttttgccttcaaatcctgcctgcaccttgcctacgatggcatcaatttacacctaaggacctttgaagagaaaaattccattatttcttttctttcttgagagcagattttttccctcctcctttggaagatttgcagtactttgcttccatctgagccagaaaattgtccatttccttttgccgatccttttgtctgctctgtttgagaagttaaaacacaagctttcacaacattatccatagacagaaagtacctagtggttgccaggggctggaaaagtggaataactactaatgggtatggagtttttttggaatggtgaaaatgtcctacaattggtgttaataattgtaaaactttgtaaatacacttaaaaccaccaaattgtacactttaaaaggacaaatagaaggtatgcggttatgtcttaaaagaagaaaacaaaatacaacattccaaagaaaatattagcagtaggaatcagatcattaaagatgtggcaacaaactgccaagtttacctgaatggctgccttcaggctatccacgccttcatcaagccccaactcctttctgctcatttctgcttctttggcctcttcctgagcctgaaacaggaactcacatgagactcagggccaccaggaaatgcttaaaatacatactctttcccaaaagcaaatctataattctgtttcaattttatgaatatatgaatagacaaaatgaatcgaattacataactatgtcattcattaaatggcaacaatgctgacagcaagcagtagatcctctgattccaattaccatttgttttttacccaattctatttgctagaggtagtaagtactctggcactcataaatcacatgatgataaaaaggaacatgaggccgggtatggtggctcacaactgtaatccccataccttgggaggccaaggtgggaggatcacttgaactcaggagttcaagacctgcctgggtaacatagtgagacctcagttctataaaaaagaaaagaaatgagcctggtgtggtggcatgtgcttgtagtcccagctactagggaggctgaggtgggaagatggcttcagtctgagagttcaggctgcaataagctgtgatcatgcctctgcactccagcctgggtgatggagatgccatctcttagaaaaaagag

SEQ ID NO: 2693 - DNA, 968 bp, Homo sapiens
atcagcttaggtagaacagttctcggtgagggccagctacatacctggctaagcgctgcccactgcagaaaagctcatcacccgggacctgatctccaggactcagaagcacttggaggaaggcctattcacttagaagcagttaccagtgctgggcagtgtcctccaagtgccagaggagtgctgtggagaaaagaagtccatggaagccaggagatgggcaagattttgcctcttcaaggtgaatgcggcttcaaggggctatctttgtgctcctgccccacctggggcccatcctggtctggctgttcactcgtgatcacatgtctggttggtgtgagggcccgaggatgctgtcctggtgcccattctacaaagtcttattgcttgtacagacagccatctactctgtcgtgggctatgcctcctacctggtgtggaaggacctgggagggggcttggggtggcccctggccctgcctcttggcctctatgctgttcagctcaccatcagctggactgtcctggttctctttttcacagtccacaaccctggtctggccctgctgcacctgctgctgctgtatgggctggtggtgagcacagcactgatctggcatcccatcaacaaactggctgccctgttactgctgccctacctagcctggctcaccgtgacttcagccctcacctaccacctgtggagggacagcctttgtccagtgcaccagcctcagcccacggagaagagtgactgaggccctagggcatgggagaggagggacgcccagggtggggaggaagagtctgcaagcagggctgtggagttagggttcaccccaatgggaccaccctcctgggtcccctggagccgtttttccttagaaatcagagaaatgggaaagggggggaaagggatttcacacttaaataaaaaaataccaccagcaactctgaaaaaaaaaaaa

SEQ ID NO: 2694 - DNA, 2338 bp, Homo sapiens
cctgagtgctcagtcgtaaagaggaaaggcagaatttttccttgctatggctggaacaaacgcacttttgatgctggaaaacttcatagatggaaaatttttaccttgtagctcatatatagattcttacgacccatcaacaggggaagtgtattgcagagtgccaaatagtggaaaagacgagatcgaagccgcggtcaaggccgccagagaagcctttcccagctggtcatcccgcagcccccaggagcgctcacgggtcctgaaccaggtggcggatttgctggagcagtccctggaggagtttgcccaggccgagtctaaagaccaagggaaaaccttagcactggcaagaaccatggacattccccggtctgtgcagaacttcaggttcttcgcttcctccagcctgcaccacacgtcagagtgcacgcagatggaccacctgggctgcatgcactacacggtgcgggccccggtgggagtcgctggtctgatcagcccctggaatttgccactctacttgctgacctggaagatagctccagcgatggctgcagggaacactgtgatagccaagcccagtgagctgacttcagtgactgcgtggatgttgtgcaaactcctggataaagcaggtgttccaccaggtgtggtcaatattgtgtttggaaccgggcccagggtgggtgaggccctggtgtcccacccagaggtgcccctgatctccttcaccgggagccagcccaccgctgagcggatcacccagctgagcgctccccactgcaaaaagctctccctggagctggggggcaagaatcctgccatcatctttgaggacgccaacctggatgagtgcattccggcaaccgtcaggtccagctttgccaaccagggtgaaatctgtctctgtaccagcaggatctttgtccagaagagcatctatagtgaatttttaaagagatttgtagaagctaccagaaagtggaaagtcggcattccctctgatccactggtgagcataggtgctctgataagtaaagcacatttggagaaagtcagaagttacgtcaagagagctcttgctgaaggtgcccaaatttggtgcggtgagggagtggataagttgagcctccctgccaggaaccaggcaggctactttatgcttcccacggtgataacagacattaaggatgaatcctgctgcatgacggaagagatatttggtccagtgacgtgtgtcgtcccctttgatagtgaagaggaggtgattgaaagagccaacaacgttaagtatgggctggcggctaccgtgtggtccagcaatgtggggcgcgtccaccgggtggctaagaagctgcagtctggcttggtctggaccaactgctggctcatcagggagctgaaccttcctttcggggggatgaagagttctggaataggtagagagggagccaaggactcttacgacttcttcactgagatcaaaaccatcaccgttaaacactgatctttgctaatggtggagccactatggccaatgcctggctgcaggcatcagttgttcaatgtggtagatgaaaatcatggcatgaattccagctatgccttgacttggcagaaggttatctctagcttatcctcagttcttagtaactttacccactagtgaagagatactgtctattttcaatgtggactcggaaaaaaagacttataagtaggaagatagaacaatgatgccagttgtcaggctcctcccaggttatgttttcatagtgtttctttcatcatcttcattgaactcttgggaatctccagataatcagattatttcatttggtaaattttaaaaaatatgcaatcaggcacagtgcctcatgcctataatcccagcactttgggaggccaaggtgggtggatcacttgagttcaggagttcgagatcagcctaggcaacatggtgaaatcctgtctttaccaaaagtttaaaaattagcttggtgtgggtgccctctgcctatagccccagctacttgggaggctgaggtgggaggatcgcttgagcccaggcggttgaggctgcagtgagccatgatcattccactgcatttcagcctgggggatacagtgagaccttgtctttaaaaaaaaaatgctgcaaaaccaaaaataaatagccataatttgccatctttggagagattatggagataatctccttgtctattagccactagcatggctaattgatcattgattggacctcattacataagggggctgtggacgtctttggaatttgttaggggaaggctatgtggtaagctctactaaa

SEQ ID NO: 2695 - DNA, 1862 bp, Homo sapiens
cattcacaaaagaccagagggtacttggtccccagtactgacctgaaagtgcacgcatttaatactgctctgaactcaaggttaactctagcagaattaaggagtcctcgtttttttaacttattaaaggtcactctatgatccagagctggaagaactgcttctaaaaagaacgtcctaatgaaggcaggacccaaagttatttccagttcctagtcctgctttctgtagctgtaggtatcagtatagttggctaagataacaagaacagagagattggcccactctgggaaccaaatttacatgttttgcacttaagttagtcaaattcatttttaaaaattaggttatcataaagacttcagttatggaatagaaattccataactcgcaagtagaggggaatgggaggaagaattagtcaactaaaaagtgcatgtctttccaaagcaggtgtaggaggtcaagaggggctcgaggcttctggaagttttgctcctttacaggttttgatctagccacttgatgtaactattcctagtccggattcccactgagaagttggtgggccagctagtgaaaatcatacatccgtgaaagccatcctcaaagtgatccagggtcacctccacaccggcactctccaaacgcttggcatacatgatgccatcgtctctgaggacatcatgctcacacgtcagaatgtaggtctttgggaggagctgcagcactgcctggtctgcaatgagtggggcggagcgggcatccagcaactgaggaagctcctggacaatcctggcattgcctgtggtctgtacaacaggcttgtagttctttgtgaaggatgcaggcaagagggatgtccagtttagacgggccctgacagcagcagcctcttccacatcaagtgaagtgtgattgttaacgatcattgcctgcacaaagtcatagttgcctttgaagtagtccacccaatacttcaccatgacatagcggggcaggattggggtgttcacattttgctgataagatggtgtgttaaaatctaaagcttgaagaactggataaattaaagcttgtagtttgagcttattttttaggctggcatcttgagtaaactgttgtccaagggcagcagccagatttccaccagcactgtcaccagaaatgcaaattctgcctggatcaaccatatacttctgtaagacttctggcttcaggaaatactttgtggcccgtacaacatcatgaatttgctcaggaaaataaacctttggaactagcctgtattcaatggaaacaatgacagcattcaattcctcagccattgctgtacacagctcatcataatacctgatttttgcacttgccaaggcccagcctcctccgtggatataaacgacgctgcgtttcagtggctcttcgggcttcggagggccttcaaacactctgacttccacaccatcaaagtctgtgtcggtcaccttcacttgggcagaagaccacgcgctttttttgccaaaagaaacaatgataaaattcagtgccagcaggtgatggctcagtcccaggtagtggatcaggttactcagctcctctttgtacctctggtagaatttggctgtgaatctgtctggccctggaatttttttggttggtaggctattaattattgcctcaatttcagaacctgttattggtctattcagggattcaacttcttcctggtttagtcttgggagagtgtatgtgtccaggaatttatccatttcttctagattttctagtttatttgcgtagaggtgttcataatattctctgatggtagtttgtatttccatgtagggcttggtgccagccat

SEQ ID NO: 2696 - DNA, 2759 bp, Homo sapiens
tcgcgatctagaactagtcgcggcgcggctgcggctttgcctcggcgcgacagggaaaataaaagaagcaaaaacaggccctgctgtgagggaccacgaggcagtgccaggatgaaagagttggagtaacctaggtgattctgagtgaatcagtcaggaggccttcctggagggggctgaggccccagcttgtggccaccacaacgtatcaagctatctccagggttgggctcaggactcagagctgacgcagctggggtgccccttggttctggaggatgaggctcctccgcagacgccacatgcccctgcgcctggccatggtgggctgcgcctttgtgctcttcctcttcctcctgcatagggatgtgagcagcagagaggaggccacagagaagccgtggctgaagtccctggtgagccggaaggatcacgtcctggacctcatgctggaggccatgaacaaccttagagattcaatgcccaagctccaaatcagggctccagaagcccagcagactctgttctccataaatcagtcctgcctccctgggttctataccccagctgaactgaagcccttctgggaacggccaccacaggaccccaatgcccctggggcagatggaaaagcatttcagaagagcaagtggacccccctggagacccaggaaaaggaagaaggctataagaagcactgtttcaatgcctttgccagcgaccggatctccctgcagaggtccctggggccagacacccgaccacctgagtgtgtggaccagaagttccggcgctgccccccactggccaccaccagcgtgatcattgtgttccacaacgaagcctggtccacactgctgcgaacagtgtacagcgtcctacacaccacccctgccatcttgctcaaggagatcatactggtggatgatgccagcacagaggagcacctaaaggagaagctggagcagtacgtgaagcagctgcaggtggtgagggtggtgcggcaggaggagcggaaggggctgatcaccgcccggctgctgggggccagcgtggcacaggcggaggtgctcacgttcctggatgcccactgtgagtgcttccacggctggctggagcccctcctggctcgaatcgctgaggacaagacagtggtggtgagcccagacatcgtcaccatcgaccttaatacttttgagttcgccaagcccgtccagaggggcagagtccatagccgaggcaactttgactggagcctgaccttcggctgggaaacacttcctccacatgagaagcagaggcgcaaggatgaaacctaccccatcaaatccccgacgtttgctggtggcctcttctccatctccaagtcctactttgagcacatcggtacctatgataatcagatggagatctggggaggggagaacgtggaaatgtccttccgggtgtggcagtgtgggggccagctggagatcatcccctgctctgtcgtaggccatgtgttccggaccaagagcccccacaccttccccaagggcactagtgtcattgctcgcaatcaagtgcgcctggcagaggtctggatggacagctacaagaagattttctataggagaaatctgcaggcagcaaagatggcccaagagaaatccttcggtgacatttcggaacgactgcagctgagggaacaactgcactgtcacaacttttcctggtacctgcacaatgtctacccagagatgtttgttcctgacctgacgcccaccttctatggtgccatcaagaacctcggcaccaaccaatgcctggatgtgggtgagaacaaccgcggggggaagcccctcatcatgtactcctgccacggccttggcggcaaccagtactttgagtacacaactcagagggaccttcgccacaacatcgcaaagcagctgtgtctacatgtcagcaagggtgctctgggccttgggagctgtcacttcactggcaagaatagccaggtccccaaggacgaggaatgggaattggcccaggatcagctcatcaggaactcaggatctggtacctgcctgacatcccaggacaaaaagccagccatggccccctgcaatcccagtgacccccatcagttgtggctctttgtctaggacccagatcatccccagagagagcccccacaagctcctcaggaaacaggattgctgatgtctgggaacctgatcaccagcttctctggaggccgtaaagatggatttctaaacccactgggtggcaaggcaggaccttcctaatccttgcaacaacattgggcccattttctttccttcacaccgatggaagagaccattaggacatatatttagcctagcgttttcctgttctagaaatagaggctcccaaagtagggaaggcagctgggggagggttcagggcagcaatgctgagttcaagaaaagtacttcaggctgggcacagtggctcatgcctgaaatcctagcactttgggaagacaatgtgggagaatggcttgagcccaggagttcaagaccggcctgagcaacatagtgaggatcccatctctacgcccaccctccccccggcaaaaaaaaaagctgggtatgggggcttatgcctgtagtcgcagctactcaaaaggctgaggtgggaggattgcttgttccccggaggttgaagctacagtgagccttgattgtgtcactgcactccagcctgggcaacaggtaagactctgtctcaaa

SEQ ID NO: 2697 - DNA, 3685 bp, Homo sapiens
ttttttttttttgcaaaatgaaacaagtttattttctccaataacttctgtaaattacaaagacaaaatactaaaaactacagcatataagcttttcaatatttaaccagagtactcgtaataaatatgcatccggaaacaagataaaaggctacacctcgtcaggcatcctacaaaaatgtctcaagttttatatactctgcagcatttctgtgcgggggcagaaggggctgttgtgtattttctgaagtgctgtgacaaaaggtcctttcacatttctttggagcatttttgaaattgcttaactataattaaacaacttaagaaaagtaacaccaagctttaaagccatttttgctttgctgtcattggtccttatccaatacagatcaacatatcatccagcacagccaagcacccactgaggccaagcagccttgtgggacatgggccctgtcagagcaggccctactttcagttaaatactttggagagtccaggattctgtctctctccctcaacaagattaatgccataagggaagttgcaagcgtgttagaaacatttttaacctgaaagtaaagtgaacagaaatattttttttccgagacctctgctatgcacccataatattacccatatcagggtttttagcttcaaagttgaaaaacagaattggtacctaacagtcccctcctagagatcatttatgggcgctggtagagtcagggcattcaaaacattcaacgggtaaaaggaggatttgctagattcagaaatgcgctacaattctgaagacaccatggctgaaagttctaggggtgttggtggcagctcatattaggtctggcatacataactaccttttgctatagctgaaaactttaaggaaaaagttatatttttaaaaagtctcaagcatggctacctaaaaagtattttgttaatataatctactgtaatttcacttatttaggagttcagatatgaaaacatctttatgagccaataaaaatattacagagaaaaaaatacttctacaaaagttgaggttaagaactatgaggcatttcttttggctgtaaacacacagtttactgtcccttgttgaaacacaaatgtttggatttcctgagcttcacagataacagcaggaggcaagtttgcatagaaaatttgcagtatgtcaacaatttacttaaaaaaagaacttttaaggacaacttgcttttgtttttaagtttcatattttagttaatagtgctcatcaaactgaatattgataagcagggtgatgagatatataaggcagatgggaagaaaacatggaattagagtttttaaatccacaggatatcatgatgaagggttttaagcagatacttcataactagtgccatactaatttagttagaaattaaatcatgttttggaattgaaagccaaaggcaaaaagagctctcctgtgctgaatggcactgcccgagtacaggaatggaaggagcattcactgcaggaggcctcagcacatcactcggtggtgataaagccactcagccagtcagggatggaggagggggcccccctgccagcatcaggaccagacctctgggcatggctgatcccagctctggaatctgaagggatgacagggactttcacctctgctggtttgaagtctctaagcagttctgaggcgggcagtcttctcctgggagaagtcctcagaaacctttggaaagggaagaagctacgctaggccacagtgcataccacgaatgagaacaatggcagcggctgccgacaactctggatctaacacaaagacagatgacaaggggcagtgtcctgccaaggaatccactttacttcttttgagactggtttttacacatggtaaggatttgcttcagtactttctggacatcttcatccatctggccctgcacagcatacagaagatgcattctgtaaactgatatgacctcctggtgttgtttcttgcattccgccagctggttctggagctgtttgacttgctgctgcagcgcctccagctgctgactctgccttttggatgagcttgttgagtaggagagctgggagaggctgttcaaggcctccttcaatttggtgacttccttcgacatctcatttatctttttatctttatcttcctccagttttgaagagctctcagagtatcttttcatttctgcaagttcttcctgagcttgctggaatttttgcagaagttcatttacttcttgctctttggatttcaagagagtctgaatattttccttttctcttttcacctgtgagacctcacttctaatctggacaacctctgaatggaccttctctttctctttcacagattcctttaatttcgatgccaacacactcacttcactctctaaggatgactggagtttttcataggaagaccgaggtaccattgcatcagtcatagcagctttctcttctaagagttgtttctccagctttgctacttccacttccttgcttgcaaggtgttccttaagattgcttattttttcttccatctcttttgctgcagtccgcagcgtggttatcacttgcaaatgttctgtgatagagacagagttctctttttgtgcatccaccagttgtttgagctgggtcaactcattcaacacttttgaatactgagacttcatttcagacagtgcatcttctgctttagccctggacacgtttgtcaattgcatcagtttctcatgctctgctttatggatatattcagctgtgacatcctctagagatttcctcttcctgtaatcctccagctcagcctgggcttctttgtacagctgtgacagctcgctcacctgtttattgagttcatctatcatcctattcatggcttctttcatgtcctcagcttcatcactggcttcctgtgtcatctgactttttagtgtgtcttttaattacatgatttcttcttgggcttcttgggatttctcaaacaaaaatgctttctccttattcatattctcaataacagagcaatatgaacttttcatttcctcgtactcttccacaggtggcttaatcactgtacctttctccctctctaccagtttttcctctaactctctcactttctctttatttctttcactttcttctaatgcattctgcagatcctgctttagcacatttatttcctcttccgtgaccctcagctcgtggaaatgtgaataattatccatgctttcaggtgagacaagaccgagtttcatctgcttctgcacactaaggacttctttcatagcctcctcgtatttgctctgagtttctttaagtttctggctgaggtcagagctgttctctgaaatctcagtgttgtttaagcataccagttctgcccttcgggattggagttcgacctgtagctgttttctctctgcttcagagctctctaatctcttctgtagatcttgcaaaatctcttgcagttgctgaattctgacatcattgtcagtagtggatttacctaaagaatgtattaagacagatggagatgatttggagtctgggggagaggtttcaccaggttttcccagggatgggcccaagtcagtttgggtggaatggtatgagtcaaagcttaggtctgcttccgcctccttgg

SEQ ID NO: 2698 - DNA, 1992 bp, Homo sapiens
attagtccagtgcggtggaattcggaagagaaagggtctgttgtttttctctcctgtttctcgctccctctctgctgatcacaaagctgctgaccgggtcagaaagtcctgatggaaatccaccagcgctgggcaggcccctcctcctccagggagcttgtccttgcctaatttttcttcgtcctgatgagaacaaaaaagagagagagaagaaaagaaaaaccacaaacttcctttgaaaaccagcttgtagtcagggcccggagcgcatgccatagactcggcgactcaggaatcctgaagactctctgagcgacctggagcaccttggctgtgtccctgcctgccttcaccctcctccagtgcccccagtactgggcgtgagtccggaagtggccacaacccagcctggaccgtcgcttataaagctgtgtaaacctgtataagctcaggcgttgacagctggaaggcagctggcactggcagcccccttcattgcacctatctcccccatctcattgccacggctgaaccctccttctcaatcttggaacagcacccccttctttaaggtgaagctccccccgcagaaggaagtgatcacatcggatgagctcatggcccatcttggaaactgcctcctgtccatcaagccccaggagaagtcagagggacttcagcttaattttcagcagaatgtggatgatgcaatgacagtgctgcctaaactggccacaggtctggatgtcaatgtgcgattcacaggcgtctctgattttgagtatacacccgagtgcagtgtctttgacctgctaggcatacctctgtaccatggctggcttgttgatccacagcagagtcctgaggctgtgcgtgcagttgggaaactgagttacaaccagctggtggagaggatcatcacctgcaaacactccagtgacaccaacctcgtgacagaaagcctgattgcagagcagttcctggagaccaccgcggcccatctgacctaccacggactgtgtgagctgacagcagctgctaaggagggtgaacttagcgtctttttccgaaacaaccactttagcaccatgactaagcataagagtcacttatacctactggtcactgaccagggctttctacaggaggagcaagtcgtatgggagagcctgcacaatgtggatggagacagctgcttttgtgactctgactttcacctgagtcattccctgggcaaggggcctggagcagaaggtgggagtggctccccagaaaagcagctgcaggtagaccaggactacctgattgctctgtccctgcagcagcaacagccacgaggcccgctggggcttaccgacttggagctggcccagcagcttcagcaagaggagtatcaacagcagcaggcagcgcagccagtgcggatgcggacgcgggtcctgtcactgcaggggagaggagccacatctggacgcccagccggggagcgtcggcagaggccgaagcacgagtcagactgcattctgctgtagctctgccccagtgccaggctggcctgccccttcttccagaggctatggctagttggcttgctcccccgcctccacccctgagatgtgctggataacttatttatggactgttggggatgagagcaggcaacaaatgccaaggtcagacttggtaatgtccttgacctcacgtgctgctgccttctctgcctcccacccagggcaacactaggattggtgggtttctggttctcaactcccggtccctgaatagtcacacgtatgtacagactgaggctctggggtgaggtccctatccagaatgcatctcttctgcttcccatccctgctgcctggatgctcctgatcacctaggcaggcctgtctccagttgtttcagagcttaatttgggtttctatctcttatttgtaatgccttcctggggtttggaaataaaacttctggccgggaaaaaaaaaa

SEQ ID NO: 2699 - DNA, 1012 bp, Homo sapiens
cttggagataaaacaggaggagaagtttgttggtcaatgcataaaagaggaattgatgcatggagagtgtgtaaaagaagagaaggatttcctgaagaaagaaatcgtggatgatacaaaggtgaaagaagagcctccgataaatcacccggtgggctgcaagcggaaactggccatgtcaaggtgtgagacttgtggtacagaagaagcaaagtacagatgtccacgttgtatgcgatattcctgcagtttgccctgtgtaaagaaacacaaagcagaactgacatgtaatggagttcgagataaaactgcatacatttcaatacaacagtttactgaaatgaatctcctaagtgattatcgatttttggaagatgtggcaagaacagcggaccatatttctagagatgcttttttgaagagaccaataagcaataaatatatgtactttatgaaaaatcgtgcccggaggcaaggtattaacttaaaacttctacccaatggattcaccaagaggaaggagaattcaaccttttttgataagaaaaaacaacagttttgttggcatgtgaagctccagtttcctcaaagtcaagctgagtacatagaaaaaaagagtaccagatgataaaactattaatgaaatcctaaaaccttacattgatcctgaaaagtctgatcctgtaattcgtcaaaggttgaaagcctacattcgctctcagactggggttcagattttaatgaagattgaatatatgcagcaaaatttagtaagatattatgaactagatccttataaaagtctcctagacaatttgaggaacaaagtgatcattgagtatccaacattacatgtggtattgaaaggatccaataatgacatgaaagttcttcaccaagtgaagagtgaatctaccaagaacgttggcaatgaaaattgagcattttttctggaagaagaaagtgaaaacttccagacaactgcagcagactctgcattgatgggctggtg

SEQ ID NO: 2700 - DNA, 1714 bp, Homo sapiens
acctggctcgccggaaggacgacgcccagcagcgcagttgggcactatatgaggatgagggtgtcatccgctgctacctagaggagctgctgcatattctgactgatgcagaccctgaagtttgcaagaaaatgtgcaagagaaacgagttcgagtctgtcctggccttggtggcctattaccaaatggaacaccgagcatcactgcggctgctgctcctcaagtgctttggcgccatgtgcagcctggatgcagccatcatctccacgcttgtgtcatccgtgctgcctgtagagctggcgagggacatgcagacagacacgcaggaccaccagaaactctgttactctgccctcatcctggccatggtcttctccatgggagaggcagtgccctatgcacactatgagcacctgggcacgcctttcgcccagttcctactgaacatcgtcgaggatgggctgcccttggacaccacagagcagctgccggacctctgcgtgaacctgcttctggctctcaacctgcacctgccagctgctgaccagaatgtcatcatggctgccctgagcaaacacgccaatgtcaagatcttctccgagaagctgttgttgctcctgaacagaggggatgaccctgtgcgcatcttcaaacatgagccacagccaccacactctgtcctcaagttcctgcaggacgtgtttggcagcccggccacagctgccatcttctaccacacagacatgatggctctcattgacatcactgtgcggcacatcgcagacctgtcaccaggagacaagctgcgcatggagtacctctccctgatgcatgctatagtccgcaccacaccctacctgcagcaccgccaccggctacccgacctgcaggccatactgcgacgcatcctgaatgaggaggagacctcaccccagtgccagatggaccgcatgattgtccgagagatgtgcaaggaattcctggtgctgggggaggctcccagctagcaccttgctgtcctcccttccctgcagctccagtcagtgtgcaggggactcaggggcttggccctaagaatgttttgcactgacagtgggaggggataaggtggcagaaggaacctgagcaggacccccacctgaagtagaacttaagagaggggccaagtgtaggattggggaccatggtctgggagctgttctggggcagggggaatatgcaagctaaagcccctctataccctggtaggcttcctcttcagcatgcccccctcttcaccccacacccatgtgtacactcagagtcctgctgccgctccaggctggaccagacccccatccccacccctcctggtctgtatcctgggcctcagcaagccatgcccctggggtgaggggaggcatctcccaccagctctattctttgccttagctttgcagagagtgctgctcatgtcctcccctccacccgcacatgggggtcgctgcccttcactcctacccccagaggccttggccaagctgctgctttgaaagcgggatcttggagacaggccatccatcctggagcctcatggaacaggatgatggcactgagaaagccaatgaccgaatctcttttctctgtaaaaatgtagactgaaaagccatgtgtattttcctatgtgctgtagctctcctttggaaataaatcacaggcatctggaaaaaaaaaa

SEQ ID NO: 2701 - DNA, 438 bp, Homo sapiens
  misc_feature (1)...(438): n = a,t,c or g
agcatatgctattnaggttataggacgnnnnnnnnnnnnnnnnnnnnnnnnnnnnnnnnnnnggcacgtggtttatgactggaagcatgcagccaactaagcgtgggtacttcagtgtaaaattaacactgagttacaaactgaagtggtaatgttaaaatccatggttctgtggttaggggaacaagtacaaagcttacagttgcaacagcaattgcactgtcattttaatcacactcatatttgtgtaaccaacttagaatataaccaaagagtatccatgggaccttgtaaaagcccatttgcagggagcttccacatccaacatcacctttgacataggtgaattacaaaaaaaaagttcttgatttaaataagcaaactcaagagtttcagccttctttataagcctggactgaattccagcaaggcctggag

SEQ ID NO: 2702 - DNA, 845 bp, Homo sapiens
tttcgcggggcttcttcaggcggtggcggcagcagcgaaggtggcggcggcagcagcggcagcggctatggtgtggtcgctcgattctcccagtgcctggctgagtttcggacgtggttaagaaccaactggttgaggttcaatgcagacaagacggatgtgatgctgtagaaaatgtgcatcagatgtttatgtttaattggtttacagactgtctgtggactcttttcctgtcaaattaccagccatctgttgaatcttcaagtccaggaggttcagcaacatcagatgaccatgaatttgatccatcagctgacatgctggttcatgattttgatgatgaacgaacattagaagaggaagaaatgatggaaggagaaacaaacttcagctctgaaatagaagatcttgcaagggaaggcgacatgccaattcatgaacttctcagcctttatggttatggtagtactgttcgactacctgaagaagatgaggaagaggaagaagaggaagaagaaggtgaagatgatgaagatgctgataatgatgacaacagtggctgtagtggggaaaataaagaggagaatataaaggattcatcaggtcaggaggatgaaactcagtcttccaatgatgatccatcacaatctgttgcttctcaagatgcccaggaaataatccgcccacgtcgatgtaaatattttgatacaaatagtgaagtagaagaagaatctgaagaagatgaagattatattccaccataatctcctttttccagtcttctgatggaatataatcttcatcttcttcagaagactggaaaaaggagattatggtgggctcct

SEQ ID NO: 2703 - DNA, 1225 bp, Homo sapiens
cgaagtttccgaagaagtaaaatagaaagaagaccttttttgaaatgacctgtgttagtcacctctctcaggatgcgtgaggcggacacgttgaggccacctcagctgatggaagtttccgctgacatcatctctaccgttgagttcaaccacacgggagagctgctggccacaggtgacaagggcggccgggtcgtcatcttccagcgggaaccagagagtaaaaatgcgccccacagccagggcgaatacgacgtgtacagcactttccagagccacgagccggagtttgactatctcaagagcctggagatagaggagaagatcaacaagatcaagtggctcccacagcagaacgccgcccactcactcctgtccaccaacgataaaactatcaaattatggaagattaccgaacgagataaaaggcccgaaggatacaacctgaaggatgaagaggggaaacttaaggacctgtccacggtgacgtcactgcaggtgccagtgctgaagcccatggatctgatggtggaggtgagccctcggaggatctttgccaatggccacacctaccacatcaactccatctccgtcaacagtgactgcgagacctacatgtcggcggatgacctgcgcatcaacctctggcacctggccatcaccgacaggagcttcacccccagacatcgtggacatcaagccggccaacatggaggaccttacggaggtgatcacagcatctgagttccatccgcaccactgcaacctcttcgtctacagcagcagcaagggctccctgcggctctgcgacatgcgggcagctgccctgtgtgacaagcattccaagctctttgaagagcctgaggaccccagtaaccgctcattcttctcggaaatcatctccatccgtgtccgacgtgaagttcagccacagcgaccgctacatgctcacccgggaactaccttacagtcaaggtctgggacctgaacatggaggcaagacccatagagacctaccaggtccatgactaccttcggagcaagctctgttccctgtacgagaacgactgcattttcgacaagtttgaatgtgcctggaacgggagcgaccgaacatcatgaccggggcctacaacaacttcttccgcatgttcgatcggaacaccaagcgtgacgtgaccctggaggcctcgaggggaagcagcaagccccgggctgtgctcaa

SEQ ID NO: 2704 - DNA, 401 bp, Homo sapiens
aagaaggttcctgggagactgtcagaaatgagtttttcactgaacttcaccctgccggcgaacacaacgtcctctcctgtcacaggactgtgggccctctcttggattagcggcgggcataccattgctggtggccacagccctgctggtggctttactatttactttgattcaccgaagaagaagcagcattgaggccatggaggaaagtgacagaccatgtgaaatttcagaaattgatgacaatcccaagatatctgagaatcctaggagatcacccacacatgagaagaatacgatgggagcacaagaggcccacatatatgtgaagactgtagcaggaagcgaggaacctgtgcatgaccgttaccgtcctactatagaaatggaaagaaggaggg

SEQ ID NO: 2705 - DNA, 1151 bp, Homo sapiens
gctggcccatggctgagacctctctcccagagctggggggagaggacaaagccacgccttgccccagcatcctggagctggaggagctcctgcgggcagggaagtcttcttgcagccgtgtggacgaagtttggcccaaccttttcataggagatgcagctggtccttactccctgccatggggctctgccactttgccaccctggcactgatcctgctggtgctgctggaggctctggcccaggcggacacacagaagatggtggaagcccagcgtggggtcggccctagagcctgctactccatctggctcctcctggcgcctacaccccctctcagccactgtcttcagtctccacagaaacagcatcaagtgtgcggagacaggcggctgaaagccggcagcacgaactgcccgtcagagaagtgcacagcctgggccagatactcccacaggatggactcactgcagaagcaggacctccggaggcccaagatccatggggcagtccaggcatctccctaccagccgcccacattggcttcgctgcagcgcttgctgtgggtccgtcaggctgccacactgaaccatatcgatgaggtctggcccagcctcttcctgggagatgcgtacgcagcccgggacaagagcaagctgatccagctgggaatcacccacgttgtgaatgccgctgcaggccgcgtgctggtacactgtgccatgggggtaagccgctctgccacacttgtcctggccttcctcatgatctatgagaacatgacgctggtagaggccatcccagacggtgcaggcccaccgcaaatatctgccctaactcaggctttcgtccggcagctccaggttctggacaaccgactggggcgggagacggggcggttctgatctggcaggcaagccaggatccctgacccttggcccaaccccaccaagcctggcccttgggaacagcaggctctgctgtttctagttgaccctgaagatgtaaacagcaagtgggggctgaggcagaggcagggatagctggggtggtgacctcttagcgggtggatttccctgacccaattcagagattctttatgcaaaagtgagttcagtccatctctataataaaatattcatcgtcataaaa

SEQ ID NO: 2706 - DNA, 433 bp, Homo sapiens
ggttccgggtaggagctaggtgaccctcggctgctgcagggatctgcagcgactgcagccatgggggcccacctggtccggcgctacctgggcgatgcctcggtggagcccgaccccctgcagatgccaaccttcccgccagactacggcttccttcccttagcttgcaggagtccacttgtgcctgactttcactggatcgccgtggctactcctcagaatcttttggggacttctgcgctcccacgccttaaaggttagcactcctttggggcgtgttctaggcccttttgctttctcatctacatcttctcttgctggtcggttgcaccttcttccagggttctggttgccgtctatatgctggtgatatagaaacctacatctcagctgcagattcgtatatccaaccatccattcaacatctccattg

SEQ ID NO: 2707 - DNA, 433 bp, Homo sapiens; identical to SEQ ID NO: 2706

SEQ ID NO: 2708 - DNA, 2831 bp, Homo sapiens
gaccgttagtgaggcggttgctgagacagacgctgaggcgggtaggaggagcccgagccgtaagggaagccgtgatgagggccgtgttgacgtggagagataaagccgagcactgtataaatgacatcgcatttaagcctgatggaactcaactgattttggctgccggaagcagattactggtttatgacacctctgatggcaccttacttcagcccctcaagggacacaaagacactgtgtactgtgtggcatatgcgaaggatggcaagcgctttgcttctggatcagctgacaaaagcgttattatctggacatcaaaactggaaggcattctgaagtacacgcacaatgatgctatacaatgtgtctcctacaatcctattactcatcaactggcatcttgttcctccagtgactttgggttgtggtctcctgaacagaagtctgtctccaaacacaaatcaagcagcaagatcatctgctgcagctggacaaatgatggtcagtacctggcgctggggatgttcaatgggatcatcagcatacggaacaaaaatggcgaggagaaagtaaagatcgagcggccggggggctccctctcgccaatatggtccatctgctggaacccttcaagccgatgggagagtttctggatgaacagagagaatgaggatgccgaggatgtcattgtcaacagatatattcaggaaatcccttccactctgaagtcagcagtgtacagtagtcagggtagtgaggcagaggaggaagaaccagaggaagaggacgacagtcccagggacgacaacttagaggaacgtaatgacatcctggctgtggctgactggggacacgaaagtttccttctaccagctgagtggaaaacagattggaaaggatcgggcactgaactttgacccctgctgcatcagctactttactaaaggcgagtacattttgctggggggttcagacaagcaagtatctcttttcaccaaggatggagtgcggcttgggactgttggggagcagaactcctgggtgtggacgggtcaagcgaaaccggattccaactatgtggtgggcggctgccaggacggcaccatttccttctaccagcttattttcagcacagtccatgggctttacaaggaccgctatgcctacagggatagcatgactgacgtcattgtgcagcacctgatcactgagcagaaagttcggattaaatgcaaagagcttgtcaagaagattgccatctacagaaatcgattggctatccaactgccagagaaaatcctcatctatgagttgtattcagaggacttatcagacatgcattaccgggtaaaggagaagattatcaagaagtttgagtgcaacctcctggtggtgtgtgccaatcacatcatcctgtgccaggagaaacggctgcagtgcctgtccttcagcggagtgaaggagcgggagtggcagatggagtctctcattcgttacatcaaggtgatcggtggccctcctggaagagaaggcctcttagtggggctgaagaatggacagatcctgaagatcttcgtggacaatctctttgctatcgtcctgctgaagcaggccacagctgtgcgctgcttggacatgagtgcctcccgtaagaagctggccgtggtagatgaaaatgacacttgcctggtgtatgacatcgacaccaaggagctgctttttcaggaaccaaacgccaacagtgtagcttggaacacccagtgtgaggacatgctctgcttctcgggaggaggctacctcaacatcaaagccagcaccttccctgtgcaccggcagaagctgcagggctttgtggtcggctacaatggctccaagatcttctgcctccatgtcttctccatttctgccgtggaggtgccgcagtccgctcccatgtaccagtacctggataggaaactgttcaaggaagcctaccagattgcttgcttgggtgtcacagacactgattggcgtgaactggccatggaagcgctagaaggtttagattttgaaacagcaaagaaggagaggaagaagcggggagagaccaacaatgacctgtttctggcagatgtgttttcctaccaggggaagttccatgaggccgccaaactgtacaagaggagtgggcacgagaacctcgcgcttgaaatgtacaccgacctctgcatgtttgagtatgccaaggatttccttggatctggagaccccaaagaaacaaagatgctaatcaccaaacaggctgactgggccagaaatatcaaggagcccaaagccgccgtggagatgtacatctcagcaggagagcacgtcaaggccatcgagatctgtggtgaccatggctgggttgacatgttgatcgacatcgcccgcaaactggacaaggctgagcgcgagcccctgctgctgtgcgctacctacctcaagaagctggacagccctggctatgctgctgagacctacctgaagatgggtgacctcaagtccctggtgcagctgcacgtggagacccagcgctgggatgaggcctttgctttgggtgagaagcatcctgagtttaaggatgacatctacatgccgtatgctcagtggctagcagagaacgatcgctttgaggaagcccagaaagcgttccacaaggctgggcgacagagagaagcggtccaggtgctggagcagctcacaaacaatgccgtggcggagagcaggtttaatgatgctgcctattattactggatgctgtccatgcagtgcctcgatatagctcaagatcctgcccagaaggacac

SEQ ID NO: 2709 - DNA, 1176 bp, Homo sapiens
cctcctccttccccacctgtatgcggacggtctttcactctaataccagtgtgagctcgctgctgcacaggcctggccatgtcactcctcagctgacaatccatggagggtggagacaccaccgtgaccacacagccattgacgagtgggacttcaaccccagtaagtttctcatctacacctgcctgctgctcttctcggtgctgctgcccctccgcctggacggcatcatccaatggagctactgggccgtctttgcccccatatggctgtggaagcttctagtcgtcgcaggcgcctccgtgggcgcgggcgtttgggcccgcaaccctcgctaccgcaccgagggagaggcctgtgtggagttcaaagccatgctgatcgctgtgggcatccacctgctgctgctcatgttcgaagtcctggtctgcgacagggtggagaggggcacccacttctggctgctggtcttcatgcctctcttcttcgtgtcccccgtgtccgtggctgcctgcgtctggggctttcgacacgataggtcgctggagctggagatcctgtgctcggtcaacatcctgcagttcatcttcatcgccctaaagctggacaggattattcactggccgtggctggtggtgtttgtgcccctgtggatcctcatgtcgttcctttgcctggtcgtcctctattacatcgtctggtccctcctgttcctgcggtccctggatgtggttgccgagcagcggagaacacacgtgaccatggctatcagttggataacgattgtcgtgcctctgctcacttttgaggtcctgctggttcacagattggatggccacaatacattctcctacgtctccatatttgtccccctttggctttccttactaactttaatggccacaacatttaggcgaaaggggggcaatcattggtggtttgccattcgcagagacttcttcaggatcaactaccccagcccacgggaaaacccccacctccccctttgacagaccatcatggggaaaaggcgttgccactgcaaaacaaggacagaggctcatggccagcttccaggggatcccccaggctcctctgagcacgtccatgtctcgtgctgagattagatggaagatgccaacaggaccagcaaagggttcaggcccccgaatgaag

SEQ ID NO: 2710 - DNA, 791 bp, Homo sapiens
  misc_feature (1)...(791): n = a,t,c or g
ctcatacgccagcttgaacgaggcctcgtgccacctcgtgccacaggccttcatagactgaagatgccaatgttgtgtatgctgaaggctgctggctgacttctggacacataatgaccagatctgagttttgcttcacacacttcacagtgcagaagcattgctggtctttacacccttgctgatataggcagccatggaaattagagcctgcagtggatttcccaggctctctgttgacttccagaatgatgtgtactttttctgcacctaaatttctcttttggtaatagctatagatctacctcatatccatggtgtgagcatcgataacacaagtcagtacaacgtccttgaggacgtttgggacaaagctgccccagtgctcagctgtgaagctgcaacacagactgaaaggagactggatctggctgcagtgactctgaggagaggcttgagatctagagcttcgcgatgcaggaccgcggtctttgatagattacaaatcctacatggacaccaagctgctggtggcgaggttcctggagcagtcctcttgtaccatgaccccagacatccatgaacttgtagaaaacattaaatctgttttgaaatctgatgaggagcacatggaggaagccatcacaagtgccagttttctagaacagataatggcccattcagnccagcacatcagggcccacaagcttccttgngagacagctggcctcttnacctcagagcttcgggnccttacaccttacaccagcnggaagccnagccagagaggc

SEQ ID NO: 2711 - DNA, 791 bp, Homo sapiens; identical to SEQ ID NO: 2710
  misc_feature (1)...(791): n = a,t,c or g

SEQ ID NO: 2712 - DNA, 733 bp, Homo sapiens
tttttttttcagttggtgcttttattctaaagccagcaggttggtgtgtagttgcctccctggtctgaatcagtgcccctttcagcccctgccctgctccctgtcccttgctcccaccccaatctggacagaggactgccctcctcaaagtcaccaacctgctctcagggctgatccttggaaaggagttgtttaaggaaacaccctaattgccttctaatatgtcaatatcagattagattgaaccaccaccatttgcattttaatggaaaagcctgtgggaattgggggcttcagtggttaactggtaaagtgtggtaagagggggcctcagaggcatgacaattctggcagaaggtcacaggtcacaggccacaagccacaggctgactgggaccagagtcttcagggggctgattggcctccctgggctccctacacctgccttggggtgactgtctgctgccctctgggaagagccaatcttgagtctgtggtctgaaactaaggagttaaccaatcgagggaagatgaactacccacaaattggtcctcacagacctcacgtgaagggcctgagggtcaggccaggacctgggactctgagcaatgcacccaagagcctgtgcccaggaatgtctaattcagaccgagggatacatgtggggagaggggcagggcccaggaaagagagcaggtcacctggggaggggagggggaatgtcctttctgc

SEQ ID NO: 2713 - DNA, 1873 bp, Homo sapiens
tgttttaaactccggacgggcttttttctcctcctcttgggggggacccagagggagcggcgccccctcccccctccggcgcggaccccgcgtgcgccttgctcgcccgcagccccgagaccgcaggcgtcacaatgtagcagggaccccaggcgtcgtgctcagaaaatggaaaaagagccagggccggaaggagggtgcagaagcgagtccgcgtgcggagccaggaggcagcgtcgcgtgggagtgctggcctgaagcctccatgccccggcagagggacggacacgcggacgtctagcggagaagccaaagatgttgaccaggaagatcaagctgtgggacatcaacgcccacatcacctgccgcctgtgcagcgggtacctcatcgacgccaccacggtgaccgagtgtctgcacacctgtacgtgccctgcccgcgccacccagggagggcgcgcccttcccagctctgtgctcttcagaaccttggcttttgtgttaccacacgcttttagctcaagcccgacaaaagcaggaaccaggaccaggggcagagacgatcttgaagataagtcagaaaagtcatttcacgctaaaggtcctgtgggtggtgtcagagcagatgaggcctcgcttaggagagcgaaacacaggagagaccccacattcctcccacggagcagcaaggccagtagccgctgtgacagtgctcactgctggcagtttccaaatctccagaggagttccttagatccttcaaaggggaaccttccagtgtgttcttcacacctgatgtgcgtcctcacacctgatgagtctgtgctttggtgttagaggactcacacctggggctggacctgagtgtttttctaagtgtggctaccgctgacgggcaggtgccatccatcaggctgaggctcggctcttatgctaacctgaggccccatggctggcggccctgctggtgtggacgaccgctgtgtgcgtctcttgatggctggggagcattttgtttaaacaggatctttaaaatgaagtgtacgcttataatacaagtgatgcttgtgtatttctcactttaggaaataaaatatttgccaatttgatagaattttgactttaacgttaatcgtatttttagatattggttagcatattttatgttaggttattttcatttgattttatctagttgtacgtagaagatactgtcatcttttaggacaaagtattgtaaaattatctgttttagcccatgttctgatgacccacagctctgtcacctttgagcatcatctccccattctaagtttttttcccacttaattcctaaccctgcctctttgaggaagcccattgacggggcaattaaaaccttctcattgctcctgagaccagaacggcaagatgtttcctttcagaagctgagagccacaaggaggacagcagtgagcatctgcacagaaacgagctcagagacgcccgtgttcagtggagcacgccgatggggtgggcgccctggctctagacgctctcctaacacacctgtgctttgatgacagtctgcaggagctgcctggtgaagtacctggaggagaacaacacctgccccacctgcaggattgtgatccaccagagccaccccctgcagtacatcggtcatgacagaaccatgcaagatattgtttacaaattggtaccaggcctccaagaagcggaaatgagaaagcagagggagttctatcacaaattgggcatggaggtgccgggagacatcaagggggagacctgctctgcaaaacagcacttagattcccatcggaatggtgaaaccaaagcagacgacagttcaaacaaagaggccgcggag

SEQ ID NO: 2714 - DNA, 740 bp, Homo sapiens
  misc_feature (1)...(740): n = a,t,c or g
aagcagtgcggtattccgcacgaggtggtacgcgatgagaacagcagcgtctacgccgaggtctcccggctgctcctcgccaccggccactggaagaggctgcggcgagacaaccccagattcaacctgatgctgggagagaggaatcggctgcccttcgggagactgggtcacgagcccgggctggtacagttggtgaattactacaggggtgctgacaaactgtgtcgcaaagcttctttagtgaagctaatcaagacaagccctgaactggctgagtcctgcacatggttccctgaatcttatgtgatttatccaaccaatctcaagactccagttgctccagcacagaatggaattcagccaccaatcagtaactcaaggacagatgaaagagaattctttctcgcctcttataacagaaagaaagaggatggagagggcaacgtttggattgcaaagtcatcagccggtgccaaagtgtgggtccaatggtaaatgacggatttggaagaggaaatagacatcccttctcctgtgggtttgggattggagtcagaatggccactgtgaggacacctggggatacctggaccctcactaggacacgactcagagggacacccagcagcacggggaagtcaagagagaataaaatgctaaagactttttgctttacaaaaaagatnnnnnnnnnnggggggcccgttttggaggacccattttaacttccccgtcct

SEQ ID NO: 2715 - DNA, 2432 bp, Homo sapiens
taaaaaatgaaaaaaatcaaatggttgatatcataaaaacaactggtctctaaatttaagattgagacaagaatagaaatcaggagaaatgaggaatctttaatttcaactgactgaatgctcacaggactcaaaccagttggtgcattcaactgagaaaaagaacaaatgagaacatgcagaaaacactggaaataaattatctaaaattatgtctaaaaattgaagcataattaggaattccagaatgatttaagatctctacaactcctctctacttttttagtccattatcttttacagaaccaatgttcaaatacatttttaggaatgtatttagtaggatataagaggacttcttgtgctgaaaatgaagaaaaaaattgacccaacattagttttttaatcgcatctactgaatgattccctaagattagaaaaaattgccttagcaatcaacaaatgcaagccaagaaattaagcactaatctacagtaaaaggtgctacacaagagatatttattaatgttctgttgtatttacagttttaacatagcaaaccaagatgaattaccacttgggcagaaagcacatcattctacattataacccactggtttctgctaacacattgtaaaagcaagtagtacagtatgttagggatcatctcaaaagttccaagctacttctttctttgctcctaagtacctaatcctctccttactcccagactttggcctaatcaccaggagacaaaaggaaaataaggggggtgggggtgggggtgggggtgaagaacgctaattatagaaagagtgtcaagaattacattttagtaattaagcttcatttgtatcctagtgctttctgttttatacagtgacaacacctttagaatcccttaggtacaataaggtaccgcagaattgtgaatacaggctataaaaaattaatgcttattatttaccaattaaagacttatttttgaccacaccttaaatgtatttttgcactatgattttgcttccaggtgttcatacagaattgaataaatttctagattaacttgaacagcaaatatggattatgtgcaaaaacacagtcataacaaaagtttaacttttgagaaaacccctttaaaatggccagcattatacatatcttacaatatttaattccaagttcattttgagatggaggatgaataaagcaagactgccccctaccgactacagggacatggctcatgctacttaaaatgactacaaacaatatataaggcattattaatacatcacagacttgattgcaagagctttttcaaacattaaccactaatgattcaatgattacagaattctgcattaactattaaaattttacacctaggaacaaatagagagaaatgatcttttcaacagtactttatttttttaaagcaggtgattattcctctgtgttctgcatcttgattcacttcctgcaggtgttctcttgcttcttgagagagaattcataaatgcaggaaggcctttgccagaaaacatctttaataaataaagagaactctggtcctggggagatttgagaaagtttctggcatcttccgaacttttgcataattgataaatcctctgagaaacaggagaaagcctaaaacaaggaacacccaccagagccagtactgaccatcaaaatatccagggaaataggtggaaaacctgacaatcaggatccatttaattagagagagaccaaatcctgaaatggccccataccttcctgcagctgaagtggtcaggcaaaaagacaggaaaaacccaatccagttaaagaggaatgccatgaaaaaagttaacatgaaaatcccatcatttcctatcctcagctggtcagcatcatcaaaatcatcccgacccacaaaatcctcatctctcccaggaaccaaagggatagtagcttcagccttggtcctctccgcttcatcataactgggcagtgttgtagctacattgtaagatgggggctttggaaacccagactcatccttgtagtcaaaatatgctgcgctctctgcagaaatgctgctgtaaggtggaggagcatcacctgcagcctgttcaggttctccagactcttcttcattctgcaactgctggtaccggctgccgcaggccggctcgaccgccgccagcgccgccaacgccaacgccatggcgcagccggcagtcagggaagcagagcgagcgagcgagctagctgaaggggcgcggccgctacggcttgggagcgctgggaggccgagggggacgcgccttgggtgggtctcgatggccgccgccgctcccgggcgagacgctcttctcaggctgtaagcaccgccgccgccgccgaggctccgacgcggcccctggggaagaggcggggactac

SEQ ID NO: 2716 - DNA, 1457 bp, Homo sapiens
ggcacgaggcggggtccaggtggaggtcttgaggctatcagatcggtatggcattggcgtccgggcccgcaaggcgggcgctagctggctccgggcagctcggccttgggggcttcggggccccgagacgcggggcgtatgagtggggcgtgcgctccacgcggaagtcggagcctcctcccctggatagggtgtacgagatccctggactggagcccatcacctttgcggggaagatgcacttcgtgccctggctggcgcggccgatctttccgccctgggaccgcggctacaaggacccaaggttctaccgctcgccccctcttcacgagcatccgctgtacaaagaccaggcctgctatatctttcaccaccgttgccgccttctcgagggtgtaaagcaggccctctggctcaccaagaccaagttaatagaaggccttcccgagaaagtgcttagccttgttgatgatccaaggaaccacatagagaaccaagacgagtgcgttctgaatgtgatctctcacgcccgtctctggcagaccactgaggaaatccccaagagagagacctactgcccggtcatcgtggacaacctaatacagctgtgtaaatctcagattctcaagcatccttctctggccaggaggatctgtgtccaaaactccacgttttctgctacctggaaccgagagtctcttctccttcaagtccgtggttctggtggagcccgactgagcactaaggatcctctgcccaccatcgcctccagagaggagattgaagctactaagaatcatgttctagagaccttctaccccatatcacccatcatcgatcttcatgaatgcaatatttatgatgtgaaaaatgacacaggattccaggaaggctatccttacccctatccccataccctgtacttactggacaaagccaatttacgaccacaccgccttcaaccagatcagctgcgggccaagatgatcctgtttgcttttggcagtgccctggctcaggcccggctcctctatgggaatgatgccaaggtcttggagcagcccgtggtggtgcagagcgtgggcacggatggacgtgtcttccatttcctagtgtttcaactgaataccacagacctggactctaacgagggtgtcaagaatttggcctgggtggactcagaccagctcctctatcagcatttttggtgtctcccagtgatcaaaaagagagtggttgtggaacctgttggcccagttggtttcaagccagagacattcagaaagtttttagctctatatttgcatggtgctgcgtgagcggaggacccctctgaatcctgaaacccctcttgcctctcttccacggaagagggcctgggccccgtggagcctcagtgcccgtttggcctgctgctctcgctgacaataaagagcccttgcgttgcaaaaaaaaaa

SEQ ID NO: 2717 - DNA, 465 bp, Homo sapiens
cagttaccaactacctgttgatgtgtgtggttacagacttctttctatgctttgtacaactctacagaccgtatcttgatactgatggacattgtgtgggccagaggcagggatggttggctatgaccccaaaccagatggcaggaataacaccaagttccaggtggcagtggctgggtctgtgtctggacttgttactcgggcgctgatcagtcccttcgacgtcatcaagatccgtttccagcttcagcatgagcgcctgtctcgcagtgaccccagcgcaaagtaccatggcatcctccaggcctctaggcagattctgcaggaggagggtccgacagctttctggaaaggacacgtcccagctcagattctctccataggctatggagctgtccaattcttgtcatttgaaatgctgacggagctggtccacagaggcagcgtgtacgacgcccgggaatt

SEQ ID NO: 2718 - DNA, 814 bp, Homo sapiens
atagtagactttagtcagtgcggaggaattctcggcgcgctcctgctgagggtcgccggagatgtcgctcggccgccttctaccaggagcctgatccgtgccgcccgccgcccggatgggaccaccagagtgctctaaagtctccagtgaatattgaattgctgaggattttgggaaaagacaaatcaaagttcccattccatggatcccttaggtgcaccttcccagtttgtggatgtggatacactaccaagctggggtgactcatgccaagatgaattaaattcctctgatactacagctgaaatatttcaggaagacactgttcgatcaccttttctttataataaggacgtcaatggaaaagtggttctttggaaaggagatgtggcattactgaactgtacagccattgtgaataccagcaatgaaagtctcacagataagaatcctgtgtcagaaagtatcttcatgcttgcagggcctgatttgaaggaagatctccagaaacttaaagggtgccgaacaggtgaagcacaattgacaaaaggattcaatctagctgcccggttcatcattcacacagtgggacctaaatataaaagccgctatcgcacagcagctgagagttccctttatagctgctacagaaacgtacttcaactagcaaaagagcagtcaatgtcttctgttggcttctgcgtcatcaattctgcaaaacgtggttatcctttaaaggatgcaacacacatagcacttcgcactgtaagaagattcctagagattcatggggaaaccattgaaaaagtagtat

SEQ ID NO: 2719 - DNA, 1255 bp, Homo sapiens
tagattggcacgagggcggcaggactcgggccggagcgtggccggacccccttccttcgaggggcccagggaggacgcgagtcacggtggcagcattgagagttggacacccgggtccttgaagtgatctctaggccccagccccaaatccgccaccattccgtgctgcggggacaccatggctccagaagaggacgctggaggggaggccttagggggcagtttctgggaggctggcaactacaggcgcacggtacagcgggtggaggacgggcaccggctgtgcggggacctggtcagctgcttccaggagcgcgcccgcatcgagaaggcttatgcccagcagttggctgactgggcccgaaagtggagggggaccgtggagaagggcccccagtatggcacactggagaaggcctggcatgcctttttcacggcggctgagcggctgagcgcgctgcacctggaggtgcgggagaagctgcaagggcaggacagtgagcgggtgcgcgcctggcagcggggggctttccaccggcctgtgctgggcggcttccgcgagagccgggcggccgaggacggcttccgcaaggcccagaagccctggctgaagaggctgaaggaggttgaggcttccaagaaaagctaccacgcagcccggaaggatgagaagaccgcccagacgagggagagccacgcaaaggcagacagcgccgtctcccaggagcagctgcgcaaactgcaggaacgggtggaacgctgtgccaaggaggccgagaagacaaaagctcagtatgagcagacgctggcagagctgcatcgctacactccacgctacatggaggacatggaacaggcctttgagacctgccaggccgccgagcgccagcggcttcttttcttcaaggatatgctgctcaccttacaccagcacctggacctttccagcagtgagaagttccatgaactccaccgtgacttgcaccagggcattgaggcagccagtgacgaagaggatctgcgctggtggcgcagcacccacgggccaggcatggccatgaactggccacagttcgaggagtggtccttggacacacagaggacaatcagccggaaagagaagggtggccggagccctgatgaggttaccctgaccagcattgtgcctacaagagatggcaccgcacccccaccccagtccccggggtccccaggcacggggcaggatgaggagtggtcagatgaagagagtccc

SEQ ID NO: 2720 - DNA, 271 bp, Homo sapiens
gcacgaggagaagacctggctctggccacgggtgggggcccggacacagtgactcattctaacatgccctgccctaacagcttggtttatgattgctggctgaacatcaaagaatgttctgtgggtgaacatacctttgaggacttaggactttgccccggccgaaaccaacgagagaaaaaacgttcttacaaagattttttaagggaagaggaaaaaattgctgctcaggtcaggaattcttccaagaagaagttgaaggatagtgaac

SEQ ID NO: 2721 - DNA, 1428 bp, Homo sapiens
attcggggagagggagtgagtcccaggaaaccggtgggggcccacaggaatgaatgggccgggtccccctttctaaaaggtgtcggttccgcgggaaattttgttgaaggagctttttccaaagaccaagaatgacgactgacttttggctcggttgcacgtggtataacttaattgggccaacttagttattatgtggccgagggaggaagaaaaagagaaagttcaggactattccctaggaggcttgagccctgacctgagaattgatgtctcccgaaaaaaaaaaatcctgaaagcttacgatgaggacgaagatgaagacctgtatcctgacatccacccgcctccttccttgccccttccagggcagttcacctgcccccagtgccgaaagagctttacacgtcgcagctttcgtcccaacttgcagctagccaacatggtccagataattcgccagatgtgccccactccttatcggggaaaccggagtaatgatcagggcatgtgctttaaacaccaggaagccctgaaactcttctgtgaggtggacaaagaggccatctgtgtggtgtgccgagaatccaggagccacaaacagcacagcgtgctgcctttggaggaggtggtgcaggagtacaaggccaaactgcaggggcacgtggaaccactgaggaagcacctggaggcagtgcagaagatgaaagccaaggaggagaggcgagtgacagaactgaagagccagatgaagtcagagctggcagcggtggcctcggagtttgggcgactgacacggtttctggctgaagagcaggcagggctggaacggcgtctcagagagatgcatgaagcccagctggggcgtgcgggagccgcggctagtcgccttgcagaacaggccgcccagctcagccgcctgctggcagaggcccaggagcggagccagcaggggggtctccggctgctccaggacatcaaggagactttcaataggtgtgaagaggtacagctgcagcccccagaggtctggtcccctgacccgtgccaaccccatagccatgacttcctgacagatgccatcgtgaggaaaatgagccggatgttctgtcaggctgcgagagtggacctgacgctggaccctgacacggctcacccggccctgatgctgtcccctgaccgccggggggtccgcctggcagagcggcggcaggaggttgctgaccatcccaagcgcttctcggccgactgctgcgtactgggggcccagggcttccgctccggccggcactactgggaggtctgcatgggtccctgataatgagaacagctgcctggtcttctctcccagtctgcctagcccagccctgggactggaatttgaaccggccagaatttagcttcacttgagagagatctggaatggtc

SEQ ID NO: 2722 - DNA, 1996 bp, Homo sapiens
tttcgtgctggtgggacagtgagcagagggctgggccctgtgcctggggactgtggcctggaggctgagcaggagctgaggaggggaccagagggacaaggcccctaagctggccaccatggccagactctgagtgcaggggaggtgaggggcctgcgtgtgccttatcttcccagacacactggatccttcttgtcctctgatcaagggaaagacaaacgacctggatggaccacaactttgctcctgctcctccagagatgcagtcgcatggagctccaggcccgggaacctccttctcccatagccatgtgctggggcgccctatccgcccctcgagactccctggaggagggtcccccctcacccccgtcctcaggaagaccatccatctggataccttcccccaaagccatatcccacagacctccagccggctgggccttggagccaggacccggagtgtgcccccacaggagacgggcatcgctctgggggcttccttgagccccctgcccaccagcagccttgtacccaggaagctcagctccatctccttgactctccatcagaacagccaggcacggtccctggatcgcccactttctcactgggaagagttgcctaccccaggaaagaaggctgctccccatgaaggagggagggtgtcctcgccaggctcgccacctgtgaccctagtgccagggggcagggtccactctgagggcccagggaacccaggtctgaccaaatccaacaggatgcttgccacggagaagcccctggtgagttcctacctagccttacctttccaatcccggttagcccagagtgcaccagtccttgcagagccaggctcgttgggccaggggcaccttgtctcagtgactgaccacatgcctaccagagcttctccaggaaaaggcaagccccgggccagggggatccccagaccccgggggcgtctccaaagggccaacacgactgtgaatttgactgctatggacacaaggacagacgcagccagacatttagccacaatggccaccaacagacctagcttggctatcaatttagccacaccaaacacatcccaactggacacaggcacagagttccctgccctggatatcaagctgggcacagccagagacttgtcttcggtagggacagtcaagtcaggcaaaaccgtgaacttggctacagcaggcacaatcaagccgggcacagccatgaatctgactacagttgggacaaccaagccagggatggtcatggatttgatagcctcagaaccagacaagctgggcaaagccatggctacaagaagcacagccaaaccagatatgaccacagagggtatagccatggattcagcaacatcagacccagtcaagccggacacaatcacagctacagtgggcaccagtaggttggaaacagccatggctttggccagagtgaacagagccaagctgggcacggctaagaattctcttgctttggacacaagcaggatgggcacagctgtgggttcagttgtgccagtaaccccagacccagccactgggaagaccacactgggcagtgttaataacctaaccatatcagacgttgctacatgcctgctaatgccaagcagatccacagacctagccctggacaacactaatgctgccatggacagagccacagagcctgcctcactggacctggccacagaatacaaaggtaaatgcagaaacttggttggggatggactaggctgccgggagggggaggtgtgtgagcttggagatggatccatgaagcccatgagcatcaactccaacctgctgggctacatcggcatcgacaccatcatcgagcagatgcgcaagaagaccatgaagaccggtttcgacttcaacatcatggtcgttggtacggaaggctgtggggctgctgcaggcctggtggcgggcagcaccaaggatcccatttctttcccccaaat

SEQ ID NO: 2723 - DNA, 549 bp, Homo sapiens
tttcgtcctcgatctcccgtgacttcctcggccaggccgcctgcgcctctgggaccatgttgcgctggctgcgggacttcgtgctgcccaccgcggcctgccaggacgcggagcagccgatgcgctacgagaccctcttccaggcactggaccgcaatggggacggagtggtggacatcggcgagctgcaggaggggctcaggaacctgggcatccctctgggccaggacgccgaggagaaaatttttactactggagatgtcaacaaagatgggaagctggattttgaagaatttatgaagtaccttaaagaccatgagaagaaaatgaaattggcatttaagagtttagacaaaaataatgatggaaaaattgaggcttcagaaattgtccagtctctccagacactgggtctgactatttctgaacaacaagcagagttgattcttcaaagcattgatgttgatgggacaatgacagtggactggaatgaatggagagactacttcttatttaatcctgttacagacattgaggaaattatccgtt

SEQ ID NO: 2724 - DNA, 1866 bp, Homo sapiens
gaattccggggagcaggaagagccaacatgctggccccgcgcggagccgccgtcctcctgctgcacctggtcctgcagcggtggctagcggcaggcgcccaggccaccccccaggtctttgaccttctcccatcttccagtcagaggctaaacccaggcgctctgctgccagtcctgacagaccccgccctgaatgatctctatgtgatttccaccttcaagctgcagactaaaagttcagccaccatcttcggtctttactcttcaactgacaacagtaaatattttgaatttactgtgatgggacgcttaagcaaagccatcctccgttacctgaagaacgatgggaaggtgcatttggtggttttcaacaacctgcagctggcagacggaaggcggcacaggatcctcctgaggctgagcaatttgcagcgaggggccggctccctagagctctacctggactgcatccaggtggattccgttcacaatctccccagggcctttgctggcccctcccagaaacctgagaccattgaattgaggactttccagaggaagccacaggacttcttggaagagctgaagctggtggtgagaggctcactgttccaggtggccagcctgcaagactgcttcctgcagcagagtgagccactggctgccacaggcacaggggactttaaccggcagttcttgggtcaaatgacacaattaaaccaactcctgggagaggtgaaggaccttctgagacaggaggtgaatgaaacatcatttttgcgaaacaccataactgaatgccaggcttgcggtcctctcaagtttcagtctccgaccccaagcacggtggtgcccccggcttcccctgcaccgccaacacgcccacctcgtcggtgtgactccaacccatgtttccgaggtgtccaatgtaccgacagtagagatggcttccagtgtgggccctgtcccgagggctacacaggaaacgggatcacctgtattgatgttgatgagtgcaaataccatccctgctacccgggcgagcactgcataaatttgtctcctggcttcagatgtgacgcctgcccagtgggcttcacagggcccatggtgcagggtgttgggatcagttttgccaagtcaaacaagcaggtctgcactgacattgatgagtgtcgaaatggagcgtgcgttcccaactcgatctgcgttaatactttgggatcttaccgctgtgggccttgtaagccggggtatactggtgatcagataaggggatgcaaagcggaaagaaactgcagaaacccagagctgaacccttgcagtgtgaatgcccagtgcattgaagagaggcagggggatgtgacatgtgtgtgtggagtcggttgggctggagatggctatatctgtggaaaggatgtggacatcgacagttaccccgacgaagaactgccatgctctgccaggaactgtaaaaaggacaactgcaaatatgtgccaaattctggccaagaagatgcagacagagatggcattggcgacgcttgtgacgaggatgctgacggagatgggatcctgaatgagcaggataactgtgtcctgattcataatgtggaccaaaggaacagcgataaagatatctttggggatgcctgtgataactgcctgagtgtcttaaataacgaccagaaagacaccgatggggatggaagaggagatgcctgtgatgatgacatggatggagatggaataaaaaacattctggacaactgcccaaaatttcccaatcgtgaccaacgggacaaggatggtgatggtgtgggggatgcctgtgacagttgtcctgatgtcagcaaccctaaccag

SEQ ID NO: 2725 - DNA, 417 bp, Homo sapiens
  misc_feature (1)...(417): n = a,t,c or g
ccctgtccggaatccccgggtcgacgatttcgtgtcaaattcaagatggatggaatcacagcggctgcggcggctgcggcgcgcgcgagccgagtgtgagcggaaaggggcccggcgtctgcctcgagactgaagaccgataaactcaagccatggagggattactgcattacatcaaccctgcacacgccatttctctcctaagtgccctgaatgaggagcgtctcaaaggacagctgtgtgatgtgctgctgattgttggagaccaaaagttccgagctcataaaaacgtcttggctgccagcagcgaatactttcagagtttattcacaaataaggaaaatgagtcacaaactgtatttcagcttgacttctgtgagccagatgcttttgataatgttttaaactacatttatn

SEQ ID NO: 2726 - DNA, 1107 bp, Homo sapiens
tttcgtccggtgttcgcggaggagtcgaggcacggagaggcttcgggggagggacggaaagaagggtggcccgccaggcgggcggggtccatggattcggggtgagggccgtccgcggcctcgctttcgcctcctccgagccgggccggcgatggccgcagctgtgaggcgagcagaagaatagaaggaaggtgataggatgtgatgatagaatttgtgatagccaagcaacaacttttcctaattcggcatgttaaaaaataagggtcactcatctaagaaagataacttggcagtcaatgcagttgctttacaagatcacattttacatgatcttcaacttcgaaatctttcagttgcagatcattctaagacacaagtacaaaagaaagagaacaaatctctaaaaagagatacaaaggcaataatagatactggacttaaaaaaactacacagtgccccaaactagaagactcagaaaaagaatatgttcttgatcccaaaccgccgccgttgactttggcacagaagttgggcctcattgggcctccaccacctccactgtcatcagatgaatgggagaaggtgaaacagcgctctctcctgcaaggggactccgtgcaaccatgccccatctgtaaagaagaattcgagcttcgtcctcaggtgtttagcatacgagggtgagctagagagctcctgggctgtttcctagggacgaggcccagagctggagcctaagattccaagcttcctttttccagtttcatcctcctgtgtgagcctcacacacttccattttgttttccattaattaaagtgtgtgaagagctaaacaccctcattaaatagttttgtttgtttactaactggtattctcaagtactaaagtttgtacaaaaggaatgtttctgttcaacaggccccatgcggctgtgcagacaactggggggcttcccaggagcagctgtgtcccagcgcgggaaggatgaaagcagagggactcttaagtggttttgtgatttgagtcagaaacgaaaaaaaaacctgtgcttgaatgtctccaaagaatttgtgagagaatctttaagaaaagtaaaatcttt

SEQ ID NO: 2727 - DNA, 918 bp, Homo sapiens
gcagcttggagatgtcgtcggatggggaacccctgagccgcatggactcggaggacagcataagcagtactataatggatgtagacagcacaatttccagtgggcgttcaactccagcaatgatgaatggacaaggaagcactacttcttcaagcaaaaatattgcctataattgttgttgggaccagtgccaggcttgcttcaactctagcccagatctggcagatcacatccgttccatacatgtagatggtcagcgaggaggggtatttgtttgcttatggaaaggttgtaaagtatataacactccatctaccagtcaaagttggttacaaaggcatatgctgacacacagtggagacaaacctttcaagtgtgttgttggtggctgcaatgccagctttgcttctcagggagggctagctcgtcatgtacccacacacttcagtcagcagaactcctcaaaagtttctagccagccaaaggccaaagaagaatctccttctaaagctggaatgaacaaaaggaggaaattaaagaacaaaagacgacgctcattagcacggccacatgatttcttcgatgcacaaacactggatgcgataagacatcgagccatatgctttaacctctcagctcatatagaaagtttagggaagggacacagtgttgtttttcatagtactgtaagtattcttttattttttcaaattaaatataaaactttgcaaaaaaatatttccacaatcatttctaaatctctcaaaatctaagaaagtacaatttaacagaaatcacaaaaccttttgttttatcagtatttaaaacattgtattattggttataaagcacacatttcttataattttacatgtttgtgattaaactgaatatgttagcctttagtttgagttactt

SEQ ID NO: 2728 - DNA, 517 bp, Homo sapiens
gcgggcgacatggcacaacgcggggaaggagcgtgaggcagtacagctgatggcgggggccgagaagcgagtcaaggcctcccactccttcctccgagggctgtttggaggaaacacaagaatagaagaggcttgtgaaatgtataccagagctgcaaatatgttcaagatggctaaaaattggagtgctgcaggaaacgcattttgtcaggcagccaagctccacatgcagcttcagagcaaacatgactctgctaccagctttgtggatgctggaaatgcttacaaaaaggcagatccccaaggtaagacagccaggcatgtagcatgctatctctgtgtgtaactaaccagtcagtacttccctcaacgttaaggtcagtgttggtgtgctttcaagtcctggtaaaaaggaatttttgtattttggaataatagagaattttgataaccttagggatttttcttttttaatcatttggggggctttatgaggagaaattatgttaaatttata

SEQ ID NO: 2729 - DNA, 1174 bp, Homo sapiens
agtggccgtgtgagcgtgaggagctgccgccaccgcctgctcctcgtcgtcctcgtcctccggggccccggcgacgtgggccgcgcacggccctggaaaagacgtcgcctccccttcatccgtctctctctcaccgcgccgctcccgcctcctcgtcctgcgctgcgggctcaggcggaacccggaacggccgtcctcttcccccgccctccgccgcctcctccttctcctcctcctcctcctcctcctccttctcggcttcctcctcagccccgggccggagcggggtgtcggcggcggccggttcgggcggcgactcgcgcttctttgggcggcggcgcttggccatgtcgtgtcggggaaggtaatgagccgcagagccccggggtctcggctgagcagcggcggcggcggcggcggcaccaactattcgcggagctggaatgactggcaacccagaactgatagtgcatcagctgacccaggtaatttaaaatattcttcatccagagatagaggtggttcttcctcttacggactgcaaccttcaaattcagctgtggtgtctcggcaaaggcacgatgataccagagtccacgctgacatacagaatgacgaaaagggtggctacagtgtcaacggaggatctggggaaaatacttatggtcggaagtcgttggggcaagagctgagggttaacaatgtgaccagccctgagttcaccagtgttcagcatggcagtcgtgctttagccaccaaagacatgaggaaatcacaggagagatcgatgtcttattgtgatgagtctcgactgtcatatcttcttcggaggatcacccgggaaaacgaccgagaccgaagattggctactgtaaagcagttgaaagaatttattcagcaaccagaaaataagctggtactagttaaacaattggatatcttggctgctgtacatgatgtgcttaatgaaaggtaagtaactaataatggttcggtttaaatgactttaaaatatatttttagaaattacttaacaatacacaagaagacaaacccactggctttgtttatgaacatttattgacatttcagtgggtcttgtcatttttatctgcattaattatgtgttaattacggttgaatacaaatggaatccacttgaaaagaatattta

SEQ ID NO: 2730 - DNA, 458 bp, Homo sapiens
tccggaactcccgggtcgacgatttcgtgtgctctggaaccctgtggcttctttgagttcatctcctgctggttaccaccttactcatttctctccaacgatactggccttcttgttattccttgaacataccaagtatattctcttgcctcagggactttgcttctgcccttctccattcttgggatactcttctcccagttattctgcatgcctttctcccacacctcttttaaatatttgctttgaagtcaccttcttatcttttgccttgttgcactcctgaaggcaaaatggatcacaagcagctctgctggagccacccacaaaaatctggccagagttctcgctcttgttgcatctgctcaaaccagcatggtctgatctggaaatatagcctcaatatgtgcctccagtgttgccatcagtacgtgaaggatataggtttcattaaattg

SEQ ID NO: 2731 - DNA, 1557 bp, Homo sapiens
cccgggtcgagccacgcgtccgcggacgcgtgggggcgccgattccaaagactgtggggcggatcaagctagactgctctctacggcccagctgcccactggaggtcgctgctgcacccaaactttgcaaggaattcggtccagaggattacggcgaagaggacatagtggattttcttcgacggcttgtggagagtgatccccagggcctgcaccggatccatgtggatgggagcagcgggcggctgcagctgtggcaccatgattacctcctgggccacttggatgatgaagggaaatcaactggacagagtgacaggggcaagggggctgagggactgggcacctactgtggtctccgcaagtccttcctgtatcctccccaagagtctgagccctgccctcaaagcccctctgcctctgccaccttccccagtgtctcagacagcctgcttcaggtggccatgccccagaagctcctggtgacagaagaggaagccaatcgcctggctgaggagctggtggctgaggaggagcgcatgaaacagaaagcagagaaaaagcgactcaagaagaagcgtcaaaaggaacggaagcgacaggagcgtttggagcagtactgtggggagcccaaggccagcactacctcagatggagatgagagccccccatccagccctggaaacccagttcagggacagtgtggtgaagaagaggactcactggatctatctagcacttttgtgtctctggctttgcgcaaggttggggattggcccctcagtgcccgcagagagaagggactgaaccaggagccccaaggcaggggtctggccctccagaagatgggtcaagaggaagagagccctccaagagaggagaggccccagcagagtccaaaggtacagtgttacctgtttaaacaaaggagaaggatttggggaggctgagacctcaagacctgcttgactttgcaccctatccccaggcatctccgggactgctggcagctgccttacaacagagccaggaactgagttgggtaccagctttgctcaaaatggtttctaccatgaggccgtggtcctcttcacccaggccttgaagctcaacccccaggaccaccggttatttggaaatcgttccttctgccatgagcggttgggtcagccagcgtgggccctggctgatgcccaggtggcccttaccctacggcctggctggccccggggcctcttccgcctgggcaaggccttgatgggactacagcgcttcagagaggcagctgctgtgtttcaggaaactctgagaggtgggtcccagcctgacgcagcccgagagctccgctcttgccttctccacctcacactgcagggtcagcgaggaggaatctgtgcaccacctctgtcacctggggccctccagccacttccccatgctgagctggcaccctcaggcctaccttccctcaggtgccctcgaagcactgctttgaggtcccctggcctgtctccactcttgcattaaccataatgtcaccgaagccacccctgtatt

SEQ ID NO: 2732 - DNA, 455 bp, Homo sapiens
tttcgtccgcatcctccgcatccacatccgcatcgtcgtcctccccgaccgcgtcctgcagcagctgccagtggagccgcctgacaaggactgccatccaccatggtgaagctgggctgcagcttctctgggaagccaggtaaagaccctggggaccaggatggggctgccatggacagtgtgcctctgatcagccccttggacatcagccagctccagccgccactccctgaccaggtggtcatcaagacacagacagaataccagctgtcctccccagaccagcagaactatacaaagagtaggtaagcgtaggtggagtggcatggacaggtaaaatgaggaaagtgtttcccagaatgggaaatcttgtaaacccttaaaaaatgtgggtttattcagtcaaatgttggctcttaattgcagactttgaaaagcagtagatacaatggaag

SEQ ID NO: 2733 - DNA, 618 bp, Homo sapiens
accggaagcggctccgaggaaggcctgtgggagtctcggagacgtgtctgtctgtgaggcgctgggtgcacgtccccagggctctgggctaggaaggcagcggcgaggtgcctccccacgtacccctcgcgggcccagccgagcaacgtggggcgaaggcggcggcgaaggcccgggctgggagcgttggcggccggagtcccagccatggcggagtctgtggagcgcctgcagcagcgggtccaggagctggagcgggaacttgcccaggagaggagtctgcaggtcccgaggagcggcgacggagggggcggccgggtccgcatcgagaagatgagctcagaggtggtggattcgaatccctacagccgcttgatggcattgaaacgaatgggaattgtaagcgactatgagaaaatccgtacctttgccgtagcaatagtaggtgttggtggagtaggtagtgtgactgctgaaatgctgacaagatgtggcattggtaagttgctactctttgattatgacaaggtggaactagccaatatgaatagacttttcttccaacctcatcaagcaggattaagtaaagttcaagcagcaggacatactcctgaggaa

SEQ ID NO: 2734 - DNA, 593 bp, Homo sapiens
gccgcggagccggcgggagggcgggcgggcgggcggacgggcagcctaacatggcagaccagagacagcgctcactgtctacctctggggagtcattgtaccacgtccttgggttggacaagaacgcaacctcagatgacattaaaaagtcctatcggaagcttgccttgaaatatcaccccgacaagaaccccgacaacccggaggccgcggacaagtttaaggagatcaacaacgcgcacgccatcctcacggacgccacaaaaaggaacatctacgacaagtacggctcgctgggtctctacgtggccgagcagtttggggaagagaacgtgaacacctacttcgtgctgtccagctggtgggccaaggccctgtttgtcttctgcggcctcctcacgtgctgctactgctgctgctgtctgtgctgctgcttcaactgctgctgcgggaagtgtaagcccaaggcgcctgaaggcgaggagacggagttctacgtgtcccccgaggatctggaggcacagctgcagtctgacgagagggaggccacagacacgccgatcgtcatacagccggcatccgccaccgagccc

SEQ ID NO: 2735 - DNA, 2173 bp, Homo sapiens
gagtggcggggtaaggatgggaagccgagcagacggccccagaacaagcggtcatgtgactgggaagatggccgtctttccttggcactccaggaataggaactacaaagctgaatttgcatcatgccgactggaggctgtaccattggagtttggggactatcaccctctgaaacccataactgtcacagagtcaaagacaaagaaagtgaaccggaaaggaagcacttcttccacgtcctcctcctcctccagctccgtggtggacccgctgagcagcgtcctcgatgggactgaccccctctccatgtttgcagccactgctgaccccgcagccttggcagctgccatggacagctccagaaggaaacgtgatagagatgataactccgttgtaggatcggattttgagccttggaccaacaaacggggagaaatccttgcccggtacaccactaccgaaaagctgtctattaatctgtttatgggatctgaaaaaggcaaagctgggactgccacattggcaatgtcagagaaggtgcggacccggctggaggagctggatgactttgaggagggttcccaaaaggagctgttgaacttgactcagcaggattacgtgaaccgcatagaggagctcaaccaatcgctgaaggatgcctgggcctcagaccagaaagtgaaggctcctaaaaatgttcatccaggaaagctcgtgtacgagcgcatcttttccatgtgtgtggatagccgcagcgtcttaccagatcacttttctccagagaatgcaaatgacacggccaaggaaacatgcctaaattggtttttcaagattgcctccatcagggaactcattccaagattttacgtggaggcatccatcctgaaatgtaacaaattcctctccaaaacgggaatttcagagtgcctgccccggttgacatgcatgatcagagggatcggagacccactagtgttcggtgtatgcccgtgcctacctgtgcccgggtgggaatggaagtggccccacatctcaaagaaaccctaaataagaacttttttgacttcctccttacgttcaaacagattcatggggatacggtccagaaccagctggtggtccaaggagtggagctcccatcttacctccccttgtacccgcctgccatggactggatcttccagtgcatctcctaccatgcccccgaggctctgctgaccgagatgatggaaaggtgtaagaaactaggaaacaatgccttgctgttgaattctgtgatgtctgccttccgggctgagttcatcgccacaaggtctatggatttcattggcatgattaaagagtgtgatgaatctggtttccccaagcatcttctttttcgatcactgggattaaacttggccttggctgatcctcctgagagtgaccgacttcagattctcaacgaagcttggaaagtcatcactaagctgaagaacccacaggactacattaattgtgccgaagtgtgggtggaatacacctgcaagcatttcacgaaacgagaggtgaataccgttttggcagatgtcatcaagcacatgactccagatcgtgcatttgaagattcctacccccagcttcagttaataattaagaaagttattgcccacttccatgacttctcagttcttttctcagtggaaaaatttctgccgtttctggacatgttccaaaaagagagtgtgcgggtggaggtttgcaaatgcatcatggacgcctttatcaagcatcaacaagagcccaccaaggacccggtcatcttgaatgcccttttgcatgtttgcaagaccatgcatgactctgtgaatgcactcactcttgaggatgagaaaagaatgctgtcatatttgattaatggatttataaaaatggtttcctttggccgtgattttgaacaacagctgagtttttatgttgagtccaggtcgatgttttgcaatctggagcctgttcttgtgcagttgattcatagtgtgaaccggttggcaatggagacaagaaaagtaatgaaaggaaatcattccagaaagacagctgcatttgtccggtcctggggtgcctactggttcatcaccatcccctccctggcgggcatcttcacacgtctcaatctctacctgcattctggtc

SEQ ID NO: 2736 - DNA, 349 bp, Homo sapiens
ggcacgagctcagtggcctgtaggaaaatctgtttagagcaggatttgctttttcattattgaggtcatccttttatatttccaaaacatattgttcttggttttcaaacctcatttctggttctctggctgatttcaactccaagggcacaagagactatagtccccggcagatggcagttcgcgagaggtgtttgacgtaatcatccgttgcttcaagcgccacggtgcagaagtcattgatacacctgtatttgaactaaaggtgaggaatgggcaagaagaaactacatggtagatgagtgggcatttgaataacaaagaagatgacaacaagagagtgagggtc

SEQ ID NO: 2737 - DNA, 310 bp, Homo sapiens
ccccagctgtctgacctgcgttggccactgcagcattggcggatcctgtaccatgatcggcataatgatgcctgagtgccactgctcactccacatgacagggccccggtgcgaggagcacgtcttcatcctacagcagccaggacatatagcctccatcctaatccctctgctggtgctgctgctgctggctctggtggccggagtggtattctggcataagcggcgagtccaaggggctaagggcttccagcaccaacggatgaccaacggggccatgaacgtggagattggaaaccccacctacaag

SEQ ID NO: 2738 - DNA, 722 bp, Homo sapiens
tttttttttttggtttccggtactgtcacctccaggctgagccgggctggcggaagaggcacgtgcgctgctgaatggagctggtcgctggttgctacgagcaggtcctctttgggttcgctgtacacccggagcccgaggcttgcggcgaccacgagcaatggactcttgtggctgacttcactcaccatgctcacactgcctccttgtcagcagtagctgtaaatagtcgttttgtggtcactgggagcaaagatgaaacaattcacatttatgacatgaaaaagaagattgagcatggggctctagtgcatcacagtggtacaataacttgcctgaaattctatggcaacaggcatttaatcagtggagcggaagatggactcatctgtatctgggatgcaaagaaatgggaatgcctgaagtcaattaaagctcacaaaggacaggtgaccttcctttctattcacccatctggcaagttggccctgtcggttggtacagataaaactttaagaacgtggaatcttgtagaaggaagatcagcattcataaaaaatataaaacaaaatgctcacatagtagaatggtccccaagaggagagcagtatgtagttatcatacagaataaaatagacatctatcagcttgacactgcatccattagtggcaccatcacaaatgaaaagagaatttcctctgttaaatttctttcagagtct

SEQ ID NO: 2739 - DNA, 462 bp, Homo sapiens
  misc_feature (1)...(462): n = a,t,c or g
atggccnnnnnaatgaaatcaatcttgcagcacccgccggaatcccgggccgagccagcgaccggatacctttaccattctttgattttttcctttgttgaatgtatagatggagcttagtgataatagaaggtctggaggcttggaagggctggcagaaaaatgtccaaatcttacctacctcaatctgagtggaaacaaaataaaagatctcagtacagtagaagctctggtaagtggaacagttttgtctctggacttgctttttttggttaaattttctgagatttgtttgtgtctattaatttctatttaactcttaaaacttaagaattttttgtatgttgtgatctaggcagctactgcttttgtttcttttagactaaaatattcagatgaatttttaaatcaatgagaaatttattttatcatcaacttcaggagttgactatcttggtttan

SEQ ID NO: 2740 - DNA, 406 bp, Homo sapiens
ctgtagaccggggcaccgaggcgtggcagcgagaccccgccttctcgggtctgcagagggtcgggggcgttgacgtgtccttcgtgaaaggggacagtgtccgcgcttgtgcttccctgggggtgctcagcttccctgagctcgaggtggtgtatgaggagagccgcatggtcagcctcacagccccctacgtgtcgggcttcctggccttccgagaggtgcccttcttgctggagctggtgcagcagctgcgggagaaggagccgggcctcatgccccaggtccttcttgtggatggaaacggggtactccaccaccgaggctttggggtggcctgccaccttggcgtccttacagacctgccgtgtgttggggtggccaagaaacttctgcaggtggatgggct

SEQ ID NO: 2741 - DNA, 406 bp, Homo sapiens; identical to SEQ ID NO: 2740

SEQ ID NO: 2742 - DNA, 433 bp, Homo sapiens
agttctgatgatcgtagtctgtttcgacggctgaaacttaattacgcaatttttgatgagggccatatgctgaagaatatgggctccattcgctaccagcaccttatgacaattaatgcaaataaccgtttgctgctcacaggcacacctgtacagaacaatctgttagaactcatgtcgctgttgaattttgttatgccacacatgtttagtagtagcaccagtgaaatacgaagaatgttttcctctaagacaaaatcagcagatgagcaaagcatatatgaaaaggagagaatagcacatgcaaaacaaattataaagccatttattctcagaagagtaaaagaagaggttctcaagcagttaccccccaagaaagatcgaattgagttgtgtgcaatgtcggagaagcaggagcaactctatttgggtc

SEQ ID NO: 2743 - DNA, 383 bp, Homo sapiens
  misc_feature (1)...(383): n = a,t,c or g
gcgcgcggatcccgagagggaaagcctgtancaccgttttagggagatcgactggcgaactggaaggtttcgcctcctcccgcctgccccctcagccctgtggctgggggcagagctcagatttattatctaggatagatttggatgaactaatgaaaaaagatgaaccgcctcttgattttcctgataccctggaaggatttgaatatgcttttaatgaaaagggacagctaagacacataaaaactggggaaccatttgtttttaactaccgcgaacatttacacagatggaaccagaaaagatacgaggctctaggagagatcatcacgaaatatgtatatgagctcctggaaaaggattgtaattcgaaaaaagtatct

SEQ ID NO: 2744 - DNA, 3585 bp, Homo sapiens
aagaaattgcaggtgctgcagcagagaacatgttaggcagtttgctgtgcctcccaggttcagggtcagtgcttcttgacccctgcactggttctaccatatcagagacaacaagtgaagcttggagtgtagaggtattgccaagtgactcagaggccccagacctaaagcaggaggagcgtctgcaagaactggagagctgttctggactgggtagcacatctgatgatacggatgtcagggaggtcagttcccgccccagcacaccaggcctcagtgttgtgtccggcataagtgcaacctctgaggatattcccaataagattgaagacctgagatctgagtgcagctctgattttgggggtaaagattctgtcactagtccagacatggatgaaataactcacgattttctttatatacttcagccaaaacaacattttcaacacattgaagcagaagcagacatgagaatccagctgtcttctagtgcccaccagctgacctctcctccttctcagtcagagtctctgctggccatgtttgatccactgtcttcacatgaaggggcttctgctgtggtaaggccaaaggttcactatgctaggccatcgcatccaccaccagatcccccaatcctggaaggagctgtgggaggaaatgaggccaggttgccaaactttggttcccccatgttttaactcccagctgaaatggaggcattcaagcaaaggcattccttacccctgagagactagttcgaagcaggagctctgaatatagtatcttctgtccggagacccatgagtgaccccagctggaaccggcgtcccaggaaatgaagagcgagaactccctccagctgcagccattggtgctacttctttggtggctgcacctcattcatcatcttcatccccgagtaaggactcctcaagaggagagactgaagaacgcaaagatagcgatgatgagaaatcagacaggaacagaccttggtggagaaaacgttttgtttcagccatgcctaaagctcctataccatttagaaagaaagaaaaacaagaaaaagacaaagatgatctggggcctgacagattctcaacactcacagatgatcccagccctagactcagtgcacaagctcaggtggctgaggatattctggacaaatacaggaatgccattaaacggaccagccccagtgatggagcaatggcaaactatgaaagtacagaggttatgggtgatggtgaaagtgcacatgattctccccgtgacgaagcactgcagaacatctcggctgatgatctcccagactctgcaagccaagcagcccacccgcaggattcagctttctcttacagagatgcaaaaaagaaactgaggcttgctctttgctctgcggactctgttgccttcccagtgctgaccccattcaacaaggaatggtttaccagaccacacagacccagaagacaatgaaattgtatgcttcttaaaagttcaaatagctgaagcaattaatttacaagataagaatctaatggctcaacttcaagaaacaatgcgctgtgtgtgccgttttgataataggacttgtaggaaactgctggcttcgattgctgaggactacagaaaaagagccccatatattgcttatctcactcgttgtcgacaaggactacagaccacacaggctcacctggaaaggctattgcaaagagttttgcgggacaaagaagtggccaatcgatactttaccactgtctgtgtgagattactgcttgagagcaaagaaaagaagatcagggaattcattcaagactttcagaaactcaccgcagctgacgataaaactgctcaggtagaagattttctgcagtttctttatggtgcaatggcccaggatgtcatatggcaaaacgcgagtgaagaacagcttcaagatgcacagctggccattgagcgaagcgtgatgaaccggattttcaagctcgccttctaccctaatcaagatggggacatacttcgcgaccaggttcttcatgaacatatccagagattgtctaaagtagtgactgcaaatcacagagctcttcagataccagaggtttatcttcgagaagcaccatggccatctgcacaatcagaaatcaggacaataagtgcttataaaaccccccgggacaaagtgcagtgcatcctgagaatgtgctctacgattatgaacctcctgagcctggccaatgaggactctgtccctggagcggatgactttgttcctgtgttggtgtttgtgttgataaaggcaaatccaccctgtttgctgtctactgtgcagtatatcagtagcttttatgctagctgtctgtctggagaggagtcctattggtggatgcagttcacagcagcagtagaattcattaaaaccatcgatgaccgaaagtgaccaagaccaaggcccaccaaggcagcagactgttaatcagacaaacagatctctgagaaggtgcatcagctgctttgaaggctgaagattgttttgtatgatactgcacagcatcaggcattttaaagcagatctttactaaacaggttaatgagctaacaagcaggttctctcgtctttgggctctttcctttctgagttgcatattctattttcttgtccccaagtagagactagtactacaaaaagggaccacatttttcaagtatttctaagtataaaaaacaaaacaaaaatctcttaggaaatgtctagacctccattcttggattccctttctttccttttattttaaaaaagaacagtacccctcttttaagatgctgtcttacattaatgagcatctaatggaaagaaggtatgagttgcactgaggattagaatagtggtgcgttagtggcattatctataaatacactcacctaaattgaaagctaagaaggaaatgtaaatataatatatatttatatttgatgtaatatggacatctgcagattctaataaacaaggactattgctgatagtaggctgtgacatactgtcttgtgaaatggtttccttgacaaaatttaagctgagcttaaaagcaaaaaaacaaaaagtacacagaaatatttattaaaatgtaatacagtttattgaactttctaggtatggagtttgatggacagggctgcctttaatgagtgtgaaggtcactaagtcacttagacatctcaccgtggaagtttgtgagcctgcattaggagatagactgattaccatacatgacataaaaaggaacagtggatagctcatactttatggtggttcttctcctccgaaataatatactgcagaaatcccagacagagctccttacaaacctttaattgtaatatatttttgatgattattcacattgaatgcacagaccaagaattcagtgaatgtcattttttaaaaaactaatttgtattgtctgctctagtgatacaagttttactagtgataaactattttaatcaaccatactattcttatggaaaataatatctattttggcaggtttctgtgcctttatttccctcttg

SEQ ID NO: 2745 - DNA, 3585 bp, Homo sapiens; identical to SEQ ID NO: 2744

SEQ ID NO: 2746 - DNA, 3585 bp, Homo sapiens; identical to SEQ ID NO: 2744

SEQ ID NO: 2747 - DNA, 5891 bp, Homo sapiens
  misc_feature (1)...(5891): n = a,t,c or g
gtgaatactgctatgcatgaggcaaaacttatggaagaatgtgacgagttggtagagatcatccagcagaggaagcaaatgatcgctgtcaaaatcaaagagacaaaggttatgaaactgagaaagttggcacagcaggttgctaattgccgccagtgtcttgaacggtcaacagtcctcatcaaccaagctgagcatatcctgaaagaaaatgaccaggcacggtttctacagtctgcaaaaaatattgctgagagggtcgctatggcaactgcatcttctcaagttctgattccagacatcaattttaatgatgcctttgaaaactttgctttagatttttccagagaaaagaaactgctagaggggttagattatttaacagccccaaacccaccatctatccgagaagaactctgtactgcctcccatgacaccattacagtccactggatctcggatgatgagttcagcatcagctcctatgagcttcagtacaccatattcactggccaggctaacttcatcagcctgtataattcagtagacagctggatgattgttcccaacattaaacagaaccattacacagtgcatggactccagagcgggactcgctacatcttcatcgttaaagccataaaccaagccggcagccggaacagtgaacctacccgactaaaaacaaacagccaaccctttaaattggatcccaaaatgactcacaagaagttgaagatctccaatgatggattgcagatggagaaggatgaaagctctctaaagaagagccacaccccagagaggtttagtggcacagggtgctatgtatatggtgtcttacacaactcagataattcataaatgtttatttctctctcctttccactgtctcacaggtatgcaattggcattgcctacaaatcagctccaaagaatgaatggattggcaagaatgcctcctcatgggtcttctctcgctgcaatagtaacttcgtggtgagacacaacaacaaggaaatgctggtggatgtgcccccacacctgaagcgtctgggtgtcctcctggattatgacaaccanatatgctgtctttctatgacccagctaactctctccaatcttcatacttttgatgtgaccttcaattcttccagtttgtccaacatttacaatctggaacaaatccctaatgatcctgtctggcttgcctgccccagattttattgattaccctgagcggcaggaatgcaactgcaggcctcaagaatccccttatgtttctgggatgaaaacctgtcattaagtttcaggagagtatataattcactggctctctagttcagcagttcttcccctcctacacctaagttagcgttcaatatacgagacacaaaataaagtttgtttgaagcatccaaaataactagatattgcagatttaatttttgtgcattaaagcttgtatttgaattaatttattgagtttttcagaacaaattatctgagtagtctgcgttcaagccattggagaaaaatttagaaaatgcctctgttgtcattggagaattaaaaattcccaatgatttaagaatataaattatattggaagcaattagggtaattctagttaaataatgtggaaaggtgccctgaataaggagctagcaagccagagcggggggtggtcagcctttctagtactggccagtttggccatgtagaattttgaacagtgtcaaattatcacatattatattttacttttgatgaaaacctatcatcaagggtttgttaggaaaccatgaatgtgtatatgtaatatataaagtgaacatatatgtactttatatatattcacttgtgtatgtatgtttatgcatattcactttatatattacatatacacaaaaaacttttttttccaaacaccacctcgaactagaacaaaaaactttttaatttgctaatttgagtgagaaatatactggaagggaaaataagttacaccatccatttttgtcccctaaaggaaacatcaaaatcaatcaacatttatttcctccctctatccatcattgccttcctccctcctgtcacgcacacatacacatgcaaccatgacacagataatgggaagagctttattggattagcagagatttacagacaagattgcacaagagatgctgttgctggatagaaaattgatcaggtagaagtgatgctacctacttgaggatggccatctgaattgttaaaaattctgtcatagactattaaaaaaaaagttttactactcccaagtacacacagttatgagaattaggcttttaaaaagttgcacagtgaaggctctttaggaacctactttacttaatcagtaaaaattgagtattattgatgcaccaactattcccatataaatgtacttgctttttcagataaaacacttctgaagtgctcaagaatgtctgaaaacagtttgttttcttaaataggataaataatcattccttttgcaatcttgtttacagtattcattctcttagccaatccctccacgcaaatggagacaaacttcatcccagtcctaaccagtatagttgaagggaatggagccttgtagtctatgatttttttttttaaatttccatcgaagggattggggatgtcagagagccagagctttcccctttccaggagctaagttggcttcggaagtcttctgggatttgtgaaaatattactgttgtaaaattacaaagtggtagccataacaactccctcagattggagacttgaaatgtcaaaactcccctcttcctttcccctagtttggtggatgctcatttattaattcattcaataaactattagatgccaggtaccaaactactgccatgggagtgcacatattaacaaaatgctctacctgctgccaaatggcttactattctgtggaagaaacaaagtatataatcctccccaataacagttatgtattgtttgttcacttaatgtggaaggcaagactgatgcagacacacaaggaaggctcaaaaatataaatctagcagcaatgtcatcttttttgattttaaataccatatgtgcttactgctaatcaggaaatgaacaacctcagtaaaattcatcagtgctggtaaatagtttgctgtagtggaaagctcataacctttggattcaaatgatcctagtttctgtaccatttattagcgttgtgacctaggacaagtacctcacttctctgagcctgtttcctcctctgtaaaataatgtctacttcacaaggctgtttcaaaggttaaaaaagatagcatatgtaaactgtcttagctcagcgcttgacatttcctaagtgtgccataaatattaatctctttccttactcccagctccaatacagcgtaacagtgctttaaaatgtatgtccttcatttctccttcatttctcagtcacctttgtctcttccctagggcatatccccaaattcttaaacaaaaaaaaatgatttttttccccttcatcaaacttttcactggctcccttagcacccagtagaaggtcccaactccttacagagtctgggttttcatgtccctgtttgcttacacagcttaatcttttgccactttccccctcacattgattaaggtagccaagtttaactatttacacaactattcacacaagttattctctgggcctgcagcagaaacatgattaacaattttaatgcccagagtaaacaacagaaatttttcttaaattaaaggaatagtgtgaaaatgctgtaagtacagaaaatgcaacctccattccagtagaacaatttcctttgccttgtccttggctctccaaaactgttcatttattgtggtgtcttttagattttagtgccctgggacaaagatctaatttccccaccctacttttgactctatcctggactacctttcctcacctctatctctctcaaccagactaactctttattccttagacttgatgatgcatccctctttagagatccaaagacaccccaagcatccccctctctcagcaataatcacattgtatagcagtgtttttcaaagtgtggtcctcacaccgcctgtgttagaatcacctttagtgtttgttaaaagaattgattttgggttcccactcctgacctaaccagaatatctgagaacataggcaggaatttacatttttgacaagctcctcatgattctgatgcaccaaaaattttaatgaataatcatcttcccctactagactgaacaccttgagaggaaggactgtgtcttttattgttgttatattgttaatacctggcacagtgcttggaacattagcttggctaatgtttattgaatgaatgtatgaatgaaaaaatgcattatgaaagtttcctcttgtactctcatgttcgtagtgatgtttgttacttcctgggcagaaaagcttggttactactccatttgagctgtattaattctattttgcagagatatcaaggctcctacataataaatgatcattgtcctcctcaaaaactctttggcagttatcttggggaaatgtctttgggagcatatgggcaccattgttttcagtaacatttcagtcttgtcaaactttgttgtttgaaggtgggattacatttcggttataggccaaaaatcactcaaaggctaaggcctacttaaaaaagtggggaattaaactgggtttggattaagcaatgaagtttgactctgaagtcccaaattctgagtcaaacagtgaaaaatgacttctaagatacaacatggtgacaaagtacttagtgggggtgcgatgggccccagatatttacttcagttaacttggcttttatagaatcctggcaatgccatggaccttaagagaagtaattggctacctctagctaaacccagctggacaaagagaataggacttgtatttaacattttcaaagaaggtgactgcataagcttttgttgttgttgctctactcaacctgttctccacaactgtttctaccagaagattattttatgtctgcaatttatgcttgtttccactttttatattgtcttattgaagaaagcacaaaaataatcaaaaataaagtaaaacctgttttgagagtatgaaagaaattttaatgccacattgaggttctggctacttgtaagtaagagtaactgcatctggatgtgtttttattatacaattctatgtgtatctttagatgcagtgaaattcagattgcagcaaaatcacttatctgttcttttcggctaaaacactctaggtgaattttctaaacttccatggtttacatatttatatatgactaccaagatggagcaatccacggatggacttttgaataaactcaaatatttgatactgctttcctccaaggaatgggagagtgtcaggccaggtaggtaaagaaaccactccctaaacttaattcctagctccctgaagccaactgccagccttggagccaaatggtcgtatttggctgtgtgttacaggttggccaaacgtgattgcccatcaggtcagacaaaagctgccttttatgggtgtagtctgccagcttcagacatatgctgtattgttgttattggctagactatttattagactattgttggactattttttatcaaatgctttaccccacgcctgtttgtattgggagctctggacccaatagtgtctctcctagtgacagaaatatgagcatctgtggattacacagcctcatccctctctacaatattccagcccatccaaaatgctatattatgaattaaataaatatatatgtattcatgaa

SEQ ID NO: 2748 - DNA, 3374 bp, Homo sapiens
caagcttatatccttaatcacctaaagatcagagtgtgaagaaacaaacctgtgacagatctgtggttgaggtttagactacgggaggagtatattacctgactttctttgtaacttgtaccatgactggggcagagattgagcctagtgcccaggccaagcctgaaaagaaggctggggaagaggttatcgctgggcctgagagagagaatgatgtccctctggtggtcagacccaaggttaggacccaggcaactactggggcaaggcccaaaactgagaccaagtctgtgcctgcggcaaggcccaaaactgaggcccaagcaatgtctggggcaaggcccaaaactgaggtccaagtaatgggtggtgcaagacccaaaacggaggctcaaggaatcacaggggccaggcccaaaaccgatgccagggcagtaggtggcgctcgttctaaaactgatgccaaggcaatccctggagcaaggcccaaggatgaggcccaggcatgggcccagagtgaatttgggactgaagcagtgtcacaggcagaaggagtgtcccagactaatgccgttgcttggccactggccactgctgagtctggatcagttactaaatctaagggcctgtctatggatagagaactagtcaatgtggatgctgaaacctttcctggcacccagggtcagaaaggaatccagccctggtttggaccaggggaggagactaatatggggtcttggtgctattccaggcccagggccagagaggaggcctctaatgagtctgggttctggtcagcagatgagacctctacagcgtcttctttctggactggagaagagacaagtgtcagatcatggcccagggaagagtccaataccaggtccaggcacagggctaaacatcagactaatcccaggtccaggcccagatccaagcaagaagcctatgttgattcctggtctggatctgaggatgaggccagcaacccattctccttctgggttggagaaaataccaataacttgttcaggcccagagtcagggaggaggcaaatatcaggtccaagctcaggacaaatagagaagattgttttgaatctgagtctgaagatgagttctataagcagtcctgggttttgcctggagaagaggccaatagtagattcaggcacagagacaaagaagatcctaatactgccttggaaactcagggcccagaaagatgttgacagtgatagggtcaaacaagaacccaggtttgaggaggaagtcattattgggtcctggttctgggcagaaaaagaggccagtttggagggtggagcttcagcaatctgtgaatctgagccaggaactgaggagggggccattggcggatccgcgtactgggctgaggaaaagtccagtttgggggctgtggccagagaagaggccaagccggagtctgaagaagaggccatatttgggtcctggttctgggacagagatgaggcctgctttgacctaaatccctgtcctgtgtacaaggtcagtgataggttcagagatgcagctgaggagcttaatgcatcctccaggccccaaacctgggacgaggtcactgttgaattcaaacctggtctttttcatggggttggcttccgatccacaagcccctttggaattcccgaagaggcttctgaaatgcttgaggcaaagcccaagaacctggaacttagcccagaaggagaagagcaggaatctttgcttcagcctgatcagcctagtcctgagttcacatttcagtatgatccttcctaccggtcagtccgggaaattcgagagcatcttagggccagggagagtgcagagtctgagagttggtcctgcagctgcatacaatgtgagctgaaaattggttctgaagagtttgaagaattccttttattaatggacaaaattcgggatccttttattcatgaaatatctaaaattgcaatgggtatgagaagtgcttctcaatttacccgagatttcattcgagattcaggtgttgtctcacttattgaaaccttgcttaattatccatcctctagagttaggacaagttttttggaaaatatgattcacatggctccaccttatccaaatctaaacatgattgagacattcatatgtcaagtgtgtgaggaaacccttgcacatagtgtggattcccttgagcagctgactgggaataagggatgctttagacacctcactatgactattgactatcacacaactgattgccaactaatatggtccggggtttcctctccttttttaaccacaagcccaatgcggagaaacgaagtttcacgttctgaaaatgctattgaatttgtctgaaaatcctgctgtggcaaaaaaactattcagtgccaaagctctttcaatatttgtgggtctctttaacatagaagagacaaatgataatattcaaattgttattaaaatgtttcagaatatcagtaacattataaaaagtggaaagatgtccttaattgatgatgatttcagtcttgagccgcttatttctgcatttcgtgaatttgaggagttagctaagcaactacaagcccaaatagacaaccaaaatgatcctgaggcgactggaactacagcatttgttggtaaaggaaacaatccgtcagccaaccgggagcgtcttagcccgtctgtcttttgtccaggagctcaagaagcagagagtctacctgcccgacgcgttcgtggagaggagcagcggttgctgttggaggaggtgggtgcaaggacggcagatggcatccctgaggggtggtgactgagactagatgcgggtgcaggttcctgtaaagatctgtatgtagctgttcacttggaagttaattaagaaagaacaaaaactattcatttggattcaaggtccatctccactggtggctgtggtggctttggattgttggaagaccatcaccttcagcaggtctgcacttgggaacaatcattctcccccagcccgagcgtgcctctgccctctgtatcattgacagaggctgtatgtttggaaagagaactttgtgactgcagaactgacagttgactctaattcttgctaccaagtttttccccgacccagtgaaagagtgttaagacttcgacctaggacacattgagaaccaaggccaagactggacagggccatataactgggcttcaaccatggctgggactaagaataagacaagagcccaggccaaaactgaaaaaaaggctgctatacaagctaaagctggagcagagagggaggctactggtgttgttaggcctgtagccaagaccagggccaaagcaaaagccaagac

SEQ ID NO: 2749 - DNA, 3275 bp, Homo sapiens
agatgtgccactgattcgaattgaagaggatactggtgagatcttcactactggcgctcgcattgatcgtgagaaattatgtgctggtatcccaagggatgagcattgcttttatgaagtggaggttgccattttgccggatgaaatatttagactggttaagatacgttttctgatagaagatataaatgataatgcaccattgttcccagcaacagttatcaacatatcaattccagagaactcggctataaactctaaatatactctcccagcggctgttgatcctgacgtaggaataaacggagttcaaaactacgaactaattaagagtcaaaacatttttggcctcgatgtcattgaaacaccaggaggagacaagatgccacaactgattgttcaaaaggagttagatagggaagagaaggatacctacgtgatgaaagtaaaggttgaagatggtggctttcctcaaagatccagtactgctattttgcaagtgagtgttactgatacaaatgacaaccacccagtctttaaggagacagagattgaagtcagtataccagaaaatgctcctgtaggcacttcagtgacacagctccatgccacagatgctgacataggtgaaaatgccaagatccacttctctttcagcaatctagtctccaacattgccaggagattatttcacctcaatgccaccactggacttatcacaatcaaagaaccactggatagggaagaaacaccaaaccacaagttactggttttggcaagtgatggtggattgatgccagcaagagcaatggtgctggtaaatgttacagatgtcaatgataatgtcccatccattgacataagatacatcgtcaatcctgtcaatgacacagttgttctttcagaaaatattccactcaacaccaaaattgctctcataactgtgacggataaggatgcggaccataatggcagggtgacatgcttcacagatcatgaaatccctttcagattaaggccagtattcagtaatcagttcctcctggagactgcagcatatcttgactatgagtccacaaaagaatatgccattaaattactggctggcagatgctggcaaacctcctttgaatcagtcagcaatgctcttcatcaaagtgaaagatgaaaatgacaatgctccagttttcacccagtctttcgtaactgtttctattcctgagaataactctcctggcatccagttgacgaaagtaagtgcaatggatgcagacagtgggcctaatgctaagatcaattacctgctaggccctgatgctccacctgaattcagcctggattgtcgtacaggcatgctgactgtagtgaagaaactagatagagaaaaagaggataaatatttattcacaattctggcaaaagataacggggtaccacccttaaccagcaatgtcacagtctttgtaagcattattgatcagaatgacaatagcccagttttcactcacaatgaatacaacttctatgtcccagaaaaccttccaaggcatggtacagtaggactaatcactgtaactgatcctgattatggagacaattctgcagttacgctctccattttagatgagaatgatgacttcaccattgattcacaaactggtgtcatccgaccaaatatttcatttgatagagaaaaacaagaatcttacactttctatgtaaaggctgaggatggtggtagagtatcacgttcttcaagtgccaaagtaaccataaatgtggttgatgtcaatgacaacaaaccagttttcattgtccctccttccaactgttcttatgaattggttctaccgtccactaatccaggcacagtggtctttcaggtaattgctgttgacaatgacactggcatgaatgcagaggttcgttacagcattgtaggaggaaacacaagagatctgtttgcaatcgaccaagaaacaggcaacataacattgatggagaaatgtgatgttacagaccttggtttacacagagtgttggtcaaagctaatgacttaggacagcctgattctctcttcagtgttgtaattgtcaatctgttcgtgaatgagtcggtgaccaatgctacactgattaatgaactggtgccgcaaaagcatttgaagcaccagtgaccccaaatacttgagatagctgatgtatcctcaccaactagtgactatgtcaagatcctggttgcagctgttgctggcaccataactgtcgttgtagttattttcatcactgctgtagtaagatgtcgccaggcaccacaccttaaggctgctcagaaaaacatgcagaattctgaatgggctaccccaaacccagaaaacaggcagatgataatgatgaagaaaaagaaaaagaagaagaagcattcccctaagaacctgctgcttaatgttgtcactattgaagaaactaaggcagatgatgttgacagtgatggaaacagagtcacactagaccttcctattgatctagaagagcaaacaatgggaaagtacaattgggtaactacacctactactttcaagcctgacagccctgatttggcccgacactacaaatctgcctctccacagcctgccttccaaattcagcctgaaactcccctgaatttgaagcaccacatcatccaagaactgcctctcgataacacctttgtggcctgtgactctatctccaattgttcctcaagcagttcagatccctacagcgtttctgactgtggctatccagtgacaaccttcgaggtacctgtgtccgtacacaccagaccgcctgttgacttagaggtaggaggagcccagagtggccaggtagcaatcttaacttccagtttaatggaattgttgttgtgtctcatggtggcagcattcctccctctggagttaagacctctaggccagcagaacgtaatgtcatgggaacaggaagcaaaaattcttctagtaggttactggggtgatggtgagtggtgccacttccacttccaccacttgattcctggacctgtgaatcctggctatgagaggaagcagtaccatatattggacagtgattcagaggatacacagccttctggagaactttgccccatccctgtaaggccattcacaattctatcaatccagctgcttcaggatgatggggaacactgtggaactaaacaaggctttcaacctgctgtacaattaggtttgctccctcataaaacactgaaatga

SEQ ID NO: 2750 - DNA, 1097 bp, Homo sapiens
ggcacgaggccaggacatctaccggctccttctgatggattttgtgttctctttagtcaattccttcctgggggagtttctgaggagaatcattgggatgcaactgatcacaagtcttggccttcaggagtttgacattgccaggaacgttctagaactgatctatgcacaaactctggtgtggattggcatcttcttctgccccctgctgccctttatccaaatgattatgcttttcatcatgttctactccaaaaatatcagcctgatgatgaatttccagcctccgagcaaagcctggcgggcctcacagatgatgactttcttcatcttcttgctctttttcccatccttcaccggggtcttgtgcaccctggccatcaccatctggagattgaagccttcagctgactgtggcccttttcgaggtctgcctctcttcattcactccatctacagctggatcgacaccctaagtacacggcctggctacctgtgggttgtttggatctatcggaacctcattggaagtgtgcacttctttttcatcctcaccctcattgtgctaatcatcacctatctttactggcagatcacagagggaaggaagattatgataaggctgctccatgagcagatcattaatgagggcaaagataaaatgttcctgatagaaaaattgatcaagctgcaggatatggagaagaaagcaaaccccagctcacttgttctggaaaggagagaggtggagcaacaaggctttttgcatttgggggaacatgatggcagtcttgacttgcgatctagaagatcagttcaagaaggtaatccaagggcctgatgactcttttggtaaccagacaccaatcaaataaggggaggagatgaaaatggaatgatttcttccatgccacctgtgcctttaggaactgcccagaagaaaatccaaggctttagccaggagcggaaactgactaccatgtaattatcaaagtaaaattgggcattccatgctatttttaatacctggattgctgatttttcaagacaaaatacttggggttttccaataaagattgttgtaatattgaaatgag

SEQ ID NO: 2751 - DNA, 432 bp, Homo sapiens
tgtagaagtatgcagaaggtacttgtggaaaatgactgtggacgcttcacaaaatgtacaatgctgcgtcatattcagtcactttccatttatctttaataatctgtcgaaaattaaactactacatacagacacacttttaaaaatagagagtaaaaaacataaagcttatcttaggtcggcagcaattgaggaagaaagagagtctgaattcgctttgaggcccacgtttgatctaacagtcagaaggaatcacttgattgaggatgttttgaatcagctaagtcaatttgagaatgaagacctgaggaaagagttatgggtttcatttagtggagaaattgggtatgacctcggagggagttcaagaaagagatcttctactgtctgtttgcagagatgatccagccggaatatgggatgttcatgtat

SEQ ID NO: 2752 - DNA, 1541 bp, Homo sapiens
ttttttttttttaaatttaaaatgtctttattcatttacatggtatatatcaccctctacaaaaaaaaatgacacttgtctttcaatctgtcaagcttagctaaaaaattcacgtatctcttttctatatcacatattgacatgatataggatgcaagatataaatatcaatttaatagacattattaaataattttacacttagtagaatcttggataaatggttaaaattatagattgacattaagtgtgggcacaggaatattctgtgtataccaatgggtttaacagaagatgtgtttgcactgatttctggtcatcaacttgctttccgtgaatctttaaatacccaattccaaatcttccagctcctggagaagggctgtttctttctgaattttctccaactgatttttttctagctgttttccagttgctgcttgttctttcagttgttcgattgctttcagtttcttctttaggttcttgatttttttgtctatctcagggtccccagaaattgactgagagacagtgtttcgtggtgtgctctgtggggcaggagtaggtgccaaatctggactcttgtcacttcttgcttcctgctttgcagctttcttagcttcatgcttcctttgatttttaagagctgtttttgataatggcttatcgtttcctgattgtggtttcatattctgaggtggttcctcttcatgcaatttggaattggtgattggtttatttcttaaagctgggggtctataagctgttgcaactttaggttcctcattgggtacttcacttggaactgcttggtaagttattgtttttgctggaaatattccatccaaaaatggctgccaagaaacctgccataattctgcatttgatggcacatcatacttgtgcaagatagagccagtataatgccaaattttgtatccattattaacccgtaacctgggagcacatgtagctgttaaaatatgctcaccatccgggcaccaagcaaaatatgtagaatcagaagccaccggtttagaaataagtttgtagtttttcacattccacactttcatttgtccgctcagatttgtaaaatcagatttccaaatccagctaatactaatatatgtccatgagggctatagtaggctgcattacgaggaccagttccaaagtcaaatacaggatcacatttcaagttgaaaattgtcgctttggcaggcataaaaccatatacagcacaaaactcagtagaactagaattccaaactacatcataaatggggccattttttggtaattgcactacagcactttctccatttgttgcaatgtagtgtagagtttgttctccatagtaggaagctcctgtcttgtcaacatctgtgctagctattaccaacacagcagtagcttttttattccacagcattgtaactttatctgccttaaagaaacttttattagctaaagctgcatgaggtccagcaaagttggggtactgatataatctaacaaatgaaggtgcaccttta

SEQ ID NO: 2753 - DNA, 3268 bp, Homo sapiens
  misc_feature (1)...(3268): n = a,t,c or g
gtgttaaaacccgggcccgggaatttatttttggggccccataaaaaaaatttttccttgccagcccgggggagttaaaattggttcctttaaaagggcccccccnnnnnnnnnnnnncaagtggtgattttctgtttattgctcaaaaacaagaattcagaagcaaaggtggagagactgtgggttggggagatggcaggaagggggcaaggccttgtcccagctctcccctttgtccttcttctgaccctcctggccggagtcaggcctagggccagggcatctgggaggctgttcccttcgtggccaagggaacagtagagctatcgggggcagtccttgaggggtgccctgggcagggaggggctgcaagatttgcagggtaggtcagagttcccctcccagaattccaaaagccggtagggcggggggcaggcccctcgtttgggcaactgagaagaggcggctttggggcggcaggatgctggtttatttactgtaggatctccagggccatcaaagccccctcgtgggatagggagactatttacacagccagggaggagggcagccaggaggcagagaccgggtcccgtatttccctctgcccgaatgaggaggggaggggcgtcctgggtcctgcagctgtagtcttggggttcagatggaaacttcatactcccgcgtatccccagcttcatacagcgggttgctgaagtccgactccacggtgatggggctgtaggagtgggagcccgagaagccgaaaagggactttccctgaagcttggtgtagtagatgtaaacgccactgccgaggacaatgaccaagcctagaggcagcaggatggccagggccaggttccccccttccagctgccgtgatggatctgtggtctgggtcactttgcagagtgggggctggctggtccactgggaggggtggccgggcacacaggtgatggtgacctcgccgataagctcaaagccctcatagcagaagaagcgcagagactcgcccgcctggtagtggtgcttgtacagcgtctggtagccattctcgggaacccccgggttcaggcacggctcgtacttcaaggcgcatttggggaccctatcgctccacttgggtgtgcctgtgtcccggctgtagcaggtgagcatggctgccccctcgaggctgtaccctggcaggcagcggtactggacgtgggagccaacggggaagccggcgtccgaggcggtgcggtgcccgttggcaatctcgccagggtcagcacaagtcatgatcttttggcaggcgggcggcgcggcgctccaagacaggtcccactggcaagtgagaatgtcggagcctagcagctcgtagccaggctcgcactggtaggtgagcaccgtgccccggatcaggtccccgtgggatgccgttctccagccccactccggaggtggcagctcggggcacgtgtcgttcctcgggacctctttgaagtgcaatacgaagccctggcccaggcctggatttgggggcccgggcggtgcctgaaactgcagtgtgaggtcgggcccagaggagagaaggcggcggcgcggctgaggtccccgcagctgggccaagactcgggcgctgggaccgtccccgtcgaacagcgtcagcatgtccccttcccgcacattcaatatctcaacttggagcaagatgcgcttctcttcctggacgtgcacgccccacacgcagtcttggcccgggctatagctctggggccagtcgggagagaggaccacgccagctggttccgacagctcccctccacacatggctttgcaggccggctctgtgtcgttccagtggggttctgtgggatccacacattcgatggcattggggggcccagggggctccagggcatatcctgggaggcacgagaaggttgccagtgcccctgggcgatactcagggtccgtggtagtgacatttccatgtgccaggaagggggcgaagcagcgatcctcctcaaaggcttcaaatcgaaggcttaacagcaggggattggcaggtgtctctgacagcagctccacgtagagggactgggcgtcactgatgagaccccgctcgggracatcgtccatgtccgaatcatagatcacgggggatagggggctgccccctgagcgcaccatcagccggtcattgtcctcatccagcgagaccctttcaaagtgcaggtgcagccggcgcccctcagctgcttcaatgacccaacggcaggtgaggttgggccctacggctcccccaggctctggggacacgatgcggcccagggtggcattgtggatggtgccaccacaggatgccatgcagctgggggtttcaccgttccaggatggccgggtgccattgaggcagatgagggtctcctctccctgcagctggtagcccgaatcacagtgaaaggtggcagtgcccccagggtgcaggtccgtcacactcacgtccccatgggccggccggggagggaagccacagctcaggaggtaggcctgatagtggatcctgaagccaccgccccttgggacccgtgggctctggaagtgcagaagcagccggttggttgggctccgaaggacttgtccttctccaagcatggatgagttggccaggagtcggggggccaggcctggggatcccccaccagccagcaccaggagctcctcttcctgtgacaggttcagcgtctgcacctggatctcaatgccgtagccagggtagacatggatgctgtaagtgcagtccaggagccccagggtgcggctgacggggctccccagatctggagactccacatacccttcgccctcggagatgttgttattacacagaactgggctggtcaccgtagtggtaacagttgtcgtggtgatgatggtggtcgtcgtctcctcctctcctccctcaggcccaaggggaggccctggcaggtagcccatctctgggcccctcctcagcagggccccatgaagcagttcagccagggcctcagaggccaccgtgggggtctcacttccaggctctggcaatatctcctcctccttcaggggcagaccctggatccagggacagctcagcagaattaggaacagcagctggggaggcggcgggtgctgggccctgggagtccccatggcgactcaccccgatctctctcctctgtgcctctctaagtaatctggctgccacctttcctccgtctccgacctgcccgggcg

SEQ ID NO: 2754 - DNA, 3268 bp, Homo sapiens; identical to SEQ ID NO: 2753
  misc_feature (1)...(3268): n = a,t,c or g

SEQ ID NO: 2755 - DNA, 733 bp, Homo sapiens
gacaatggtgtttggtctggaggcagacataggggagtaggatgaagagagtcactgaactagacatgaggacccgaaaaaaatcatcattatcagatgagagacagcattataaaacgctagaggaagtctacagcctggtgaccaaacagcattagggtaaaggaggagtgcaagatgataccccaaaacacagctatcagtgtgggagcccagatttttacagagcaacctaatttcagtaagagacaaatcatggtaacagattaatccacagataactttgtataaaataatttttttacattggttcagcaaagcagggatcctattaaacatccacagggataaacattcattttttggaagtaacagtctggtgtaatgagtctgttattataataaatgtactaataatgcaaaaaacaatcttaatttgttctcagtagagataaaaattactaactgaagacaaagacaacaactttgcaatacagagaactcttacctcaaccgtttcaactgtccactcatctacctgctccttttcaccactggtgaactgtgtttctgccatgaactgtctatttacatactgcaaagcaaagtaaatgtttgagacatttgtttgaaaggcagcaaagtaaaggcagcattaaattaaaatcatacctctgttgattcaacttcactttgctcagtgtactcttctgctggctcaggttctaagagg

SEQ ID NO: 2756 - DNA, 1578 bp, Homo sapiens
gatggctcactatattacatttctctgcatggttttggtgctgcttcttcagaattctgtgttagctgaagatggggaagtaagatcaagttgtcgtactgctccgacagatttagttttcatcttagatggctcttatagtgttggcccagaaaactttgaaatagtgaaaaagtggcttgtcaatatcacaaaaaactttgacatagggccgaagtttattcaagttggagtggttcaatatagtgactaccctgtgctggagattcctctcggaagctatgattcaggagaacatttgacggcagcagtggaatccatactctacttaggaggaaacacaaagacagggaaggccatccagtttgcgctcgattacctttttgccaagtcctcacgatttctgactaagatagcagtggtacttacggatggcaaatcccaagatgacgtcaaggatgcagctcaagcagcaagagatagtaagataacattatttgctattggtgttggttcagaaacagaagatgccgaacttagagctattgccaacaagccttcgtctacttatgtgttttatgtggaagactatattgcaatatccaaaataagggaagtgatgaagcagaaactttgtgaagaatctgtctgtccaacacgaattccagtggcagctcgtgatgaaaggggatttgatattcttttaggtttagatgtaaataaaaaggttaagaaaagaatacagctttcaccaaaaaagataaaaggatatgaagtaacatcaaaagttgatttatcagaactcacaagcaatgttttcccagaaggtcttcctccatcatatgtatttgtgtctactcaaagatttaaagtcaagaaaatttgggatttatggagaatattaactattgatggatgccacaaatagcagttaccttaaatggtgtggacaaaatcttattatttacaacaaccagcgtaattaatggctcacaagtggttacctttgctaaccctcaagttaagacgttgtttgatgaaggctggcaccaaattcgtctcttagtaacagaacaagatgtgactttgtatattgatgaccaacaaattgaaaacaagcccttacatccagttttagggatcttgatcaatgggcaaacccaaattggaaaatattctggaaaagaagaaactgttcagtttgatgtccaaaagttgcgaatctactgtgacccagaacagaacaaccgggagacagcatgtgagattcctggattttgccttaatggtcccagtgatgtaggttcaactccagctccctgtatttgtcctccgggaaaaccaggacttcaaggccccaaaggtgaccctggactgcctgggaaccctggctaccctggacaacctggtcaagatggtaagcctgtgagtactgaaagcttagtcatctccggtatatctgggattacaggatatcagggaattgcagggacaccaggtgttccaggatctccaggaatacaaggagctcgaggactaccaggttacaaaggagaaccagggcgagatggtgacaag

SEQ ID NO: 2757 - DNA, 5048 bp, Homo sapiens
ttttttttttttaagatggagtctcactctgttgcccaggctggagtggagtgattggagtgatgcggtctcggctcactgcaacgtccgcctctcaggttcaagcaattctcctgtctcagtctcctgagaagctgcgattacaggcgcctgccaccacgctcggctattttttcgtatttttagtagagatggggtttcaccatgttggccagcctggtctcaaactcctgacctcaagtcatctgcccaccttggcctccccaagcgctgggattacaggcgtgagccaccgcgcctggcctgattcatatatattactaactgaaatgcagtatcactgcacttccccaattagtaaattcaatacatcctgtatgtaaaaaaacccaccaatccccacaaaaaaccaatcaaacaaaaaccccaaaaaaatcaccaaaccatactgtcaagcgaaatagttttaattagtaggctgatcataaataaatctacataaaagatttaacagaattacaaagagttttgtgttcctttgtggactcaattcataatatgcattagtcaacctcattctctaactgtgacaaaaagagttgtcatccaacaatgcagcacagtttaagcaattcatatgctatagttacatttttacattttctttacaaatgtaacatttatgtacattatatatagatttttttctatagttcatgtactgaaactctattgtttttacagagaaaatgttgaattcatttaatgaataagaaacattccttgttaaaaagtaattcatataaacaaataacacggtaccaatgccttttggcatctcttgccagagttcaagtccagaaatgttatattaattataagaaaaaagaatttatctaattttacattatgacatatcattccacatagctacataaatttgccagcttgcaatgaacagagcactgtactgccatactactggaaatgtgtagaaaccaattcaaaatatacttggtgaaacagcatcatcgttaccattaatttgagttgaaaaagatctgtcaagttctttcttcccctttactttttaccaaagcctcagacagagtgctgtgcgttgcatcttgtattaacaaatgccttcatttcaaatttctcacgcgcttctctgacagattatgctttacctaggttatagatctttttcttattcaattttattctacttcacttacaaatctgctgctgaacatgaagcaaaaattcatagtaagaaaatgcagcctctgtccggtcttcaatcaaatgctgaaaaaattctgctttggcaggactctcatcttttactatgtgaaggattggacttaatggtctgctgtctctaagccaagttatgaaggatctggctctttctgatgaaagtgtatctagctctggaagatgtgtcattttctgtggtattgatgcaaaattagtatatccaagcacatcctctatgaagttattgtcacagcctttcccaacccaaatgtaaaaaacagagccacagtccataaggaaagcaccttctcttgtcagcttctctgcagacaatttttgaagaggtggctgtggtacaatcctgtcattaacatgtactgcaccctcatctgtcaatctgtctatcctgtataagttgggatgaatcattttcattagatgaacaagtggctgagactttatctgacacatggcatatacacgatcatccagccgtgtgcttgtacccgttctaaatgctttctgtttgagaagggccaaaacatagagaggaaacaacttgagggagctgggcgccatcaatgcagagtgctgtaaatttgagacagttgagccatatgcagacaatgagtccactacagcattcactaaggcatctcttgcatctgacagacttgatgaaacggaccgatccacagccatgtttgccagaaggcagatggcagcttgtacatccactcccgcatatacatctgatagtgaacttaccactggcaaacaaagtgtatgtactctaattctccgctcacctttgcttgatgtatataatagggctgtttgaaaacatactaaggaagtatctgttaaactttcttcaattgacaactgcaccgcaaatccagcatcaggattgatgttggcaagggataacaaatcagtagaacggacaaagaagttaccgtgaaaagtgtgcattgaaagacctttagtacaccttattctcataacagcttcaaacccaatttttcttgtgagataccgttttaggtctttttgtaacttttctgcttgtgaaggattgtgagtatagtggaatgatggataataatagatgcaccctgcagaatacttggacatgcaagctagagaagcaagatcagaatactgtgaacttaaaaggaacaaatccactgcagtttgctgtcccgagcaatctaatgcaagtttcttataaaaatcagttgcagggccaagatgttgtaccacctttgtacttgatctctgattaggatcttctctggattgcagaagtcctgcacccaaggaaggtaactgtgtctgaaatacagacacacggccacctgttggagacattaatttaaaggcagcctgaagtgcaggaccaagggcactgtgtgtttctcttgtattggtgaacatgtttggtaatgcattcagtaagtcttttataagctctttactttcatatagattcacaagtaaactatccggtgtaggtagaaaaacatcatctatatcagacacaatcaacatttgaggctgtgataatccttcctgggtaaattgtagaaatgaataggtgcttatcaaaggtcatgaatcctattcttggttcgtgaattctccaggaagcttgtctagatttttctaggagtgactggcaccaaaaattgtcaaatatccagcttccactgcattatgagacacatctaaaacaaacaagtaaactgcaggttgaggaggacgcagcatgtaatctgaagaagcaatgaactccacagttggaattctgaacttctggtcgtttatgaggctctccataagatcgggtaagggggttatacataaattcttcaggaacatcgtttactctatagcacaaattgcattttcatctacgttgatcaatgaaggatacaaacggggttaatatacgttcgacaggatcggcacctcacaatggtatttgatgttatcactggtaattgcgttaggtctctgaagggatgtaacaacaatcctaaaggaagcttagctttattcagtaaagcctgtgtctgtggaatatttgtcaaagtacaccgaaatgaatctgggctacagtttaattttttgaggtctgcattcaagttaggtacaggagcccaaacaggagtcataggtaaaatattcctctcctgagtaaggtttacaggtctcaggctttctggttgtggagaactctgaagactcaatcctcctatactggaggatagctggttcacaccaggatactgttgaggatactgctggaatccagaatataccgggttactggggctgtactccagaaataagtggtgctgtagcattctgataaccaggctgaagtgttggatagccatagccaaaggcttagccatttttgaaggctgagggacgacaggagctggagctgaagctggagctggagcagaagcaggatcaggttcaggggcgggatcaggagcaggactgcttgctgatgaagaaagcatatctgggtaactgcctccttccagggcatcataactgttgggcattggagaagcactgcttgtggtagaagagctgtcaacacctgcttcctcatcctcctcctcctcttcctcatcatcggaagttgatgacaagggagttggtgcggagctagcttggttattaacatattcaccatactgcacgcctttttgttgtaatagctctgatggctgtgtaactgaggtcacaggctcaactgggtgatttgcagtgggaggtgttcttgttgatgaggatcctgaggatcctgataaaacagtggataccactgggctggacttgggaggctgaacattttgcataacaggacaggataaagaatctgcaacagtaatggttgggttgttgttcgctacagccagggatcctgtgtggtttcggatgagattgtcttgagtcgatggaaggcctggagatgaccacgttagagtactgtatcctgaaagactttgctgctggtggtgctgttgtgatggtagaggtggaagtggcgatggatggctgatagctgtattttgaccagagaatgaattatctttaactggcctaacagtcggagcattctgtgaggtaaacatttgcccatatgtatcaccagcaggcagagagggatatgaaacactaggatacgcggcattagaaacagttgacatagcataatgaccacaagtagagggaaatccctgagacgcaacagaagagctggcagagtacatggctggactattgtagtgattcacaaaagaggagtatggttgggaggcactcgtatgcaaatgggatgctgacgatgcagcaccttggaaagatcctagagtggatcccacaatatgaggggcaggaggacccctgctgtacaactgctgtgctcctggttgctggttcactgtgttaggagtcacattttgtgttggtactgtatagagagcagagtagtaatcaccacactgggtatccaatggcaatgaggtcattttcccaggtccttgagagtaatgtcctgagggagcaatatagttttgatgatgcaatccatatccagatggaacctgcatttgattctgggctggaccgttctgctggtgcggcgccgggcccgcacccgggcccgcgggcgctgcggctcctgagacggccgatccgccgaacttgggcgggatccgggcgctggcggccgggtgagaggacccggcgggggccgacat

SEQ ID NO: 2758 - DNA, 1164 bp, Homo sapiens
aatacacctgggcgactatgactttaaacatgaattgtaataggggaggagaggcagtcagattctcagctgcctgacagcagaggcctggaagtgtgcagcttagctcctctgaagtctgtgctgggggcactgtacatggaagatccctcctggttggcctggcacaacaggaccgtgcctgcatagaattcgggactgtagactgcacccacaactggattcaatttccagccatttgtataagggttgacggtctttttatttgtcattacacgtgctgtggcattaatttacctccaattttacggccctctaaccacggtgccgtgtaaatttctccctcgccctgtccgcatcggcactattttcgaaagttacgaaaccaaatccctttgagcctcgctcattaaaaataatttcaacatctaagattttaccaaattgaccaaaacatttgtctgaggtccggatcccggaaccctgaaggggatattggagacatgcagcccgcttgggctggagacttgttttccgtgttttcaagaagtttgtgtcttggggcttggccatccgtcggtgctgcgtcaatcttgtttgttgcgggtgccagagacggtctgagcgctcgtgtccgccgggctctgctcggagtgcgtctgggcgggagggtacaggtttaatgtgtgctcgggaaccgtggtctggcctgtgtactctggcgcggggtggggatgaggggccgtgtattccgcggggataccgttctgcgggggagcaaactgggccgaagcgtaaggctgagccattgtgtcaggggcagcggctgcttcctgattaccctgaatcagtccaggaaggtaaggagctgccggtacaatcataggcacgccataaggatgcaggagaactccttgagacgccagcatgctttacgtagagttattattccctctgaagctcaacacatcaatggagagttagggggaaatctatagacccaacttcttccgaactacaaagctgggagccaaatcccttctgtcaggagccaagcactcatcaacgccgggagaggaaagaaagaaaatccgcatcagcaactcttaatgtgaaagttttcttcccagacgacgaagagacacagcagctcggacgcgtggg

SEQ ID NO: 2759 - DNA, 1473 bp, Homo sapiens
  misc_feature (1)...(1473): n = a,t,c or g
ctcagttccagcaggcttggatgcaaaataaagttccaattcctgctccaaatgaggtgctgaatgacagaaaagaagacattaaattggaagagaagaaaaaaacacaagcagaaattgagcaagaaatggctacattacaatatactaacccacaacttctggagcaacttaaaattgaaagacttgcacagaaacaagttgagcaaattcagcctcctccctcatctggcacccctctcctcggaccccagccttttccaggacaaggtccaatgtctcagattcctcaaggttttcaacagccccatccatctcagcagatgccaatgaacatggctcaaatggggcctccaggtccacagggacagtttaggcctcctggaccccagggacaaatgggaccacaaggtcctccactgcatcagggaggtggggggccacaaggattcatgggaccacaggggccccagggcccgccccaggggttgccacggcctcaggacatgcatgggccccaaggaatgcagaggcatcctggacctcatggccctttgggacctcaagggccacctggaccacaaggtagttctggtcctcaaggtcatatgggtcctcagggtccacctggcccacagggtcacataggcccccaaggcccgcctggccctcagggtcacttgggcccacaggggcctccgggtactcaaggtatgcagggaccacctggtcccagaggaatgcaagggcctcctcatcctcatgggatccaaggcggaccagggtctcaagggatccaaggtcctgtgtctcagggacctctgatgggattgaatccaaaaggaatgcaggggcctccaggcccccgggagaaccagggtcctgctccccaagggatgattatgggccacccgcctcaagagatgagaggacctcaccctccaggtggactactgggacacggccctcaggaaatgagaggtcctcaggagatccgaggcatgcaggggcctccaccccaaggatcaatgctgggacctccccaggaattgcgagggcctccaggctcacaaagtcagcaggggccgccccagggctctttaggacctccaccccagggtggcatgcaaggaccccccggacctcagggacagcagaacccagcaagagggccacatccatctcaagggccaataccattccagcaacagaaaacgcctttgctaggtgatgggccccgggcccccttcaaccaggaaggacagagcacaggccccccacccctgataccaggcctagggcagcagggagcacaaggtcgcattccccctctgaaccccggacaaggacctggccccaacaaagtttcagaagaggagccccgccgaggcatgagggccgtgctccccccagaggaagggatggttttcctggtcctatgaagactttagtccnagaggagaatttttgatg

SEQ ID NO: 2760 - DNA, 1629 bp, Homo sapiens
gatttcagttgcctgaaagctgtaagtctgcttttttaaaagagaaattggagttaagcagacttttcattttttgatcatgaccctggaaagagaaatatatttgacatcaaaactcagcacatatccttggtctatatatacacatgaaagtttcataaaacaatacactgatattttccatgctgtattctatttcattttttaaaatgctggttgtatcccattaaactggtttcaaaataaatataacatgtacacaacaacaacaaaaaaaaacactgggttagagggccagtaagctcagcgagtatcagcaactgagacttcatccttgtctcacaaggactaaaaagagaataatgttctcattatgtggttcaatgccacacccatgtatctgagatatacatgtcacaatctgggagaagcctgtcctcaatttactttaaatacccaattctgcctagaacatgaattagacacatagtaagctcttgagtgaagtgcagatgataatgacacgatcacataccacttaaaaatatcttaacacctttacttagatctcatctcatacttgtagcatttcttcaaatttactttgaaaaaagagcttcactgtgtgtggttgtcatacacattcttctacccaaccatggacctcttttttcctctcaggcgcacttcatctaatttttttagcactggcctggcctttttggaggaggtggagtagctcttcagaaaggcttcaaacacagtttcagtgttgggatgggtactgaggaaggccttctccaggacatagaggtctactcccttatcctctggaagtgctgaaatgaaactcagcccaaagtctatgagcacaatgttcagctgttccagggggggtttcaggagcatgttggaggtggtgagatcaccatgaatgaggtcttcatcgtgcattcgagccaaaacctgcccaattgtcttggctaagttggagagaccctggggagtttttttcagtctccatagtggactgaatataatctcgaacagtcactgagccttcaatttcttccatatataagcagttggaagcatagtccacaaaaaagacaactggggcagatattccagcgcggcgacagcggaggagcgcccgggcctcctgcaccgtccgccgtctgccaagccgcgcctccagcgccgggtgccggtagcccttggggaagcggtgcttgatcaccgccgcgcggccctggaagcggccacggaacacgcgcgcctcggcaccctgcttcaccagctccaggccgctcaagaagcggctgctccgctcccgggctgcggccagagcctcagcctccggggcgggctcctcgccatcggccggcgtagtagctctggccgccgccatgactgctcggcgcaacagctccaaccgatcagctgtctctgaaaactgtcgcgatgcttcggctcgcttcggaaatcctgggacttcttcggcaatcctgggacttcttcggctacccgaatgcgtccaccccggacacttccggcctgtaagtggttacgcctcccaacttttcggctctctgaagcctgaggttccctgcaggaagggctcttgtg

SEQ ID NO: 2761 - DNA, 1475 bp, Homo sapiens
attcccgggtcgacgatttcgtggccgtccggcctccctgacatgcagatttccacccagaagacagagaaggagccagtggtcatggaatgggctggggtcaaagactgggtgcctgggagctgaggcagccaccgtttcagcctggccagccctctggaccccgaggttggaccctactgtgacacacctaccatgcggacactcttcaacctcctctggcttgccctggcctgcagccctgttcacactaccctgtcaaagtcagatgccaaaaaagccgcctcaaagacgctgctggagaagagtcagttttcagataagccggtgcaagaccggggtttggtggtgacggacctcaaagctgagagtgtggttcttgagcatcgcagctactgctcggcaaaggcccgggacagacactttgctggggatgtactgggctatgtcactccatggaacagccatggctacgatgtcaccaaggtctttgggagcaagttcacacagatctcacccgtctggctgcagctgaagagacgtggccgtgagatgtttgaggtcacgggcctccacgacgtggaccaagggtggatgcgagctgtcaggaagcatgccaagggcctgcacatagtgcctcggctcctgtttgaggactggacttacgatgatttccggaacgtcttagacagtgaggatgagatagaggagctgagcaagaccgtggtccaggtggcaaagaaccagcatttcgatggcttcgtggtggaggtctggaaccagctgctaagccagaagcgcgtgggcctcatccacatgctcacccacttggccgaggctctgcaccaggcccggctgctggccctcctggtcatcccgcctgccatcacccccgggaccgaccagctgggcatgttcacgcacaaggagtttgagcagctggcccccgtgctggatggtttcagcctcatgacctacgactactctacagcgcatcagcctggccctaatgcacccctgtcctgggttcgagcctgcgtccaggtcctggacccgaagtccaagtggcgaagcaaaatcctcctggggctcaacttctatggtatggactacgcgacctccaaggatgcccgtgagcctgttgtcggggccaggtacatccagacactgaaggaccacaggccccggatggtgtgggacagccaggtctcagagcacttcttcgagtacaagaagagccgcagtgggaggcacgtcgtcttctacccaaccctgaagtccctgcaggtgcggctggagctggcccgggagctgggcgttggggtctctatctgggagctgggccagggcctggactacttctacgacctgctctaggtgggcattgcggcctccgcggtggacgtgttcttttctaagccatggagtgagtgagcaggtgtgaaatacaggcctccactccgtttgctgtgaaa

SEQ ID NO: 2762 - DNA, 1468 bp, Homo sapiens
atcgaccgcgctgccgaatgtcgtactaagcccctgcctatggcagtatccatccgcgggaatgcggactctattgtcgcctgcctggtcctgatggtcctctacttgataaagaaaagactcgtcgcgtgtgcagctgtattctatggtttcgcggtgcatatgaagatatatccagagacttacatccttcccataaccctccacctgcttccagatcgcgacaatgacaaaagcctccgtcaattccggtacactttccaggcttgtttgtaagagctcctgaaaaggctgtgtaatcggactgcgctgatgtttgtagcagttgctggactcacgttttttgccctgagctttggtttttactatgagtacggctgggaatttttggaacacacctacttttatcacctgactaggcgggatatccgtcacaacttttctccgtacttctacatgctgtatttgactgcagagagcaagtggagtttttccctgggaattgctgcattcctgccacagctcatcttgctttcagctgtgtctttcgcctattacagagacctcgttttttgttgttttcttcatacgtccatttttgtgacttttaacaaagtctgcacctcccagtactttctttggtacctctgcttactgcctcttgtgatgccactagtcagaatgccttggaaaagagctgtagttctcctaatgttatggtttatagggcaggccatgtggctggctcctgcctatgttctagagtttcaaggaaagaacacctttctgtttatttggttagctggtttgttctttcttcttatcaattgttccatcctgattcaaattatttcccattacaaagaagaacccctgacagagagaatcaaatatgactagtgtatgttccacaccctctgctactgtgttacattctgattgtcttgtatggaccagaagagagctttgggacattttttctgaacattctaagcattctagtgaaagttcccatgttccaacagaacttaaaagcaatgtttgccttatatataaaagggacacaataattgaggtccaccttctaggaaatcctaggactcgtttatttgggacatggtgggaataaaggtcacatattggaaaatggaaaggctgatgaaactatcagatactaaaacattcttaaaatagaggaatatagttagagacatcaggtttaagccagtatttgttcctgttttacaatgcttctgtcttaagctgtgtcttaacttttaacacccatcttttctttctaaagctttcctgacagctgtgaaaatccaaaaaatattcttaaactgtgtatggtggcccttgcctgtagtctcagcactttgggaggctgaggtgggagggtcgcttgagttcaggagttctagacccacctggggcaagatggtgagacctagtctcaaaaaaaaaa

SEQ ID NO: 2763 - DNA, 2328 bp, Homo sapiens
atggttatatcatttcagggcttggtgacatttggggatgtggctgtagatttctcccaagaggagtgggagtggctgaaccccattcagaggaacttgtacaggaaggtgatgttggagaactacaggaacctggcatcgctgggactttgtgtttctaagcccgatgtgatctcctcgttggaacaaggaaaagagccttggacagtgaagcgaaagatgacaagagcctggtgcccagacttgaaggctgtgtggaagatcaaggagttacctctcaagaaggacttctgcgaaggaaagctatcccaggcagtgataacagagagactcacaagctataatctggagtactctctgttaggggaacactgggattatgatgctctgtttgagacacagccgggcttggtgactatcaaaaacctggctgttgacttccgccagcagctacacccagctcagaagaatttctgtaagaatgggatatgggagaacaacagtgacctgggatcagcaggacattgtgtggctaagccagatttagtctctttactagagcaagagaaggagccctggatggtgaagcgagagctgacaggaagcctgttctcaggccagcgatctgtacatgagacccaggaattatttccaaagcaagattcatatgctgaaggggtaacagacagaacctcaaacactaaacttgattgttccagtttcagagaaaattgggattctgactatgtgtttggaaggaagcttgcagtaggtcaagagacacaattcaggcaagagccaattactcataacaaaaccctctctaaggaaagagaacgtacatataacaaatctggaagatggttctatttggacgattcagaagagaaagttcataatcgtgattcaattaaaaattttcaaaaaagttcagtggtaataaaacaaacaggcatctatgcaggaaaaaagcttttcaagtgtaatgaatgtaagaaaacttttacccagagctcatctcttactgttcatcagagaattcacactggagagaaaccttataaatgtaatgaatgtgggaaggcctttagtgacggctcatcctttgcccgacaccagagatgtcacactggcaagaagccctatgagtgcattgagtgtgggaaagctttcatacagaacacatcccttatccgtcactggagatactatcatactggggagaaaccctttgattgcatcgattgtgggaaagccttcagtgaccacatagggcttaatcaacacaggagaattcatactggagagaaaccttacaaatgtgatgtatgtcacaaatcctttcaggtatggttcctcccttactgtacatcaaaggattcataccggagaaaaaccatatgaatgtgatgtttgcagaaaagccttcagccatcatgcatcactcacttcaaccatcaaagagtacattctggagaaaagccttttaagtgtaaagagtgcggaaaagcttttaggcagaatatacaccttgccagtcatttaaggattcatactggggagaagccttttgaatgtgcggagtgtggaaaatccttcagcatcagttctcagcttgccactcatcagagaatccatactggagagaagccctatgaatgtaaggtttgtagtaaagcgttcacccagaaggctcaccttgcacagcatcagaaaacccatacaggagagaaaccatatgagtgcaaggaatgcggtaaagccttcagccagaccacacacctcattcaacatcagagagttcacactggtgagaaaccctataaatgtatggaatgtgggaaggcctttggtgataactcatcctgtactcaacatcaaagactgcacactggccaaagaccttatgaatgtattgagtgtggaaaggcattcaagacaaaatcctcccttatttgtcatcgcagaagtcatactggagaaaaaccttatgaatgcagtgtgtgtggcaaagcctttagtcatcgtcaatcccttagtgtacatcagagaatccattctggaaagaaaccatatgaatgtaaggaatgtaggaaaaccttcatccaaattggacaccttaatcaacataagagagttcatactggagagagatcttataactataagaaaagcagaaaagtcttcaggcaaactgctcacttagctcatcatcagcgaattcatactggagagtcgtcaacatgcccctctttaccttccacgtcaaatcctgtggatctgtttcccaaatttctctggaatccatcctccctcccatcaccatag

SEQ ID NO: 2764 - DNA, 823 bp, Homo sapiens
gcggccgctgggctgtgcggctgcgtgctgaggagagggccagccacagcatggtgtccgcgccctgggcctcggagcgcaggcgataccccgaagcctggacgtggaaccccggcatcgcctgcctcacacctggggtgtcaggcccagccaggatgcatggaagaaaaatggatggccgggtgcccttgggccccaccgctcccgtcagaaccacttgctgcctctcactgaccttgttttgtgcatagaccatagttcccatccaaatggtgttctttcggactggagatcattggttgttcagtttctgaaccaacattcctcctgaggagacgggttatcactcgggggtccgtgttctttctccagcacaggggatcaggccgggtcgtgagaaatgtacacaccccagagtattggcaaccaaagtttttttcaaagtccatcttcttgtgagcttctcttttattgaccatgcaacctgcattattgatcaagaacatggagtttatgttcctgcttgaaattttcaacaaatttccagattttcttgggatcagacaagtccacaatgtgcagaaaaatgttctggttaccgcatctcccggatgatctcacccctggcatcttctgctggggcttgatctcgacaaaccaggtgaactgtgccacctcgcttggcgatttcaagggcagttgctttgccaatgccgctgtttcctccagtgaccaaaaagactcttccaggaatctggacctccaagtcatgagggacaaagtctttacatgcagagtcatagccactcttggtgtagccccc

SEQ ID NO: 2765 - DNA, 1938 bp, Homo sapiens
ttttttttttttgccgctgtcaacagacagtttattctatatacaaacacaattttgtacactgcaattaaatagaatggaatgagcgctcctccgcattcctccccgagtgactggtttggccgccggcccactccatccccgagtgggactggaccacggccctggctgctgccactgatgttggcgcctgcaccccacgtccctatgcccgaggcgcaagctctgctctcccggggaccccaggcctggcgcacacgcggggagggcggggccatggagaaggcactgcagggagcaccaggcagagccgggctgaggccggccggcactagggcgcgaggccccaccccaagccggcctctcctccacacctccgccttgctcagagacctgcaccatgggaccccactccatcctcaggacggttcactgcagacctaccaagacccctccagaaccttccgcggaaccccaccccctctccttgctgaccagctcaaacacctcactagcgggtacaagcctcgggcgcgacctcacaccagggggaggaaagccgccttccgggcaaaccccacgaaaccctgaaagcccccgacacaggctgggcagtcccagaggaaggaggtggctggcctcccccacccccacgggctcgggaaggtcaggcccagccagcaggggtcagaggcggctcagctgtgcggctcaggaccccacctccgagggcgcctccgttggggccatggaggccgggctaggcccgcctaccgcagcccccaggggagttgtgtcagaagctgcggagtcactcggggggacactgtcctggggggcgtgggggaggcccccagcagggcccagcgggctggctggacgccgctccaggagggaggcgctcaggccggacaggaaggaggcgtctgtgatgatggcagcggtctctgccatccaacccaggtcaccaccggcagctgctgccactgaggctgccgcggccaccagggagctgggcgccgctgccacaggcccgggactcccgctggccccaggcgagacggggcccagggcggggggctggccggcagagtccaggggctgtagccggggcgcccgagttgttgttcatgtcatcgggcagctgccgtgggggtcccggggcccagtgtcggcgcctgaagcagcatctccctggatgcggacatgctgcaggatggcaggcagctcgtagtggtggaagaagtagatcatggaatgctggatgaagagccaggaggtgaccagggccaggctgctatactgcccattgaagcggtagtgataggcatagaaggcgaagtggtagagatagaagaaccgcagccaatgccgcttgctggtgctggtgtggcagcagatggcgtcatactggtccgcgagccacacgatgaggatgatgtagaaggcggtggtggtgtcgttgaagaactccgacatgatggcctccatcccgacgagggccaggatgacggtcagcaggggcgctgcggggaaggcgatggccatgttcatctccagcatctgcagcaggtccacgatgaagacgaagatctggtggtgtgagtacccgcagcaagcatgggacacgctcagcgtaaaagattgaccatgattggcgaaggcggccaggtaggacggtccgcgccatccacatgctgcacaaagcggtagtgctcgcccgacaccacattccgcaggaagcccttgttctcctcgttctcggccaggcccttcacgctggacattaaggatgtcatcatagcccaggaactcatccagcagcaggcggctgaagcggtccccgaagcactgggtcccgcgtggggtccagggtgagcaccatgacggggatgctcaggcgctggcggggtggcctgcgacaggcgaaggaagcca

SEQ ID NO: 2766 - DNA, 1165 bp, Homo sapiens
gggtttgttggaaccattttcaaaactgctcagctttgtaattcagaatgccgtcttcactctggcctacctggtggagctgtgtggcttatgttaccgagctttcactaaggaacgagataaattctacttgtctcgtagtgttgttctagaacttctgcaggccctaaagctcaaatctcctttaccagatacaaaccttcttctgcttgttcagtttatttgtgcagatgctggaaccaaactagctgagtcaacaatcctgagcaagcagatgatagcctctgtacctggatgtgggactgcagcgatggagtgtgtgaggcagtacatcaacgaagtgctggatttcatgggcagacatgcacacgctgaccaaactgaagagccacatgaagacatgttcccagcctctgcatgaagatacctttgggggacatctcaaagtggggctggcccagattgcagccatggacatctcacggggcaaccacagagataacaaagctgtgatccgctatctgccttggctttatcatcccccctctgcaatgcagcaaggacctaaagaattcattgagtgtgtctcccatatccgactgttgtcctggctgctgctgggttccctcactcacaatgcagtgtgcccaaatggcctcctctccctggcctgcccattcctctggatgcaggctcccacgttgcagaccatcttattgttatcctgattggatttccagagcaatcaaagacctccgtgctggcacatgtgctccctcttccacgcgttcatctttggctcagctgtgggacagtttattggcgaggcaaagtggccgttggtaacaaatctccaaaatcaggaatgaattcagcttcacgggcgatactgacaggcactaggaattttgggagtaggggtcgacatccaggcattccttcagtttaatgggcccattaacaaagtggtgagttcacagacgagtttcccttctgagatggaatctcaaagtgtccacaccactcctaatcctcacactccctgttttcacagatctcagttgtaaggttatataaatggatcggggatatgttaccttataagctggatgttctgcttgcataagcattttgattaaaaataagcattttgattaaaaacaaa

SEQ ID NO: 2767 - DNA, 429 bp, Homo sapiens
cccgatggtgagtgtctctaggagtcattatcaataacatcagtgagaatttctttgctggtcacatgaacaccaaattcaatcttcatatcaaccggtgtacagttctgggagcaaccgggatttctccgggatttcaaaaacagcctatgtggcatgactcatgatatccacttcagttttataccaagtgcagcaaagccaaattttgctgcaattagctgttgcctagaccactgtgggtcatgattggcatcatccttgaaaaacatctccactttaggtgggcaaaactcacatccttccttgacaccaggatttctttcgagtgaagaaccagttggtattcttctgcaaaccattcagttggaattatttcacactggggcacaatgaaagctgtctcctcacattttctggtgaaagcag

SEQ ID NO: 2768 - DNA, 1646 bp, Homo sapiens
gccctggtgttcccacctcctcagagccatgaggaggaatgttctccttatgtgactaggcacaggttccaaatggggaggggactggctcagcatccggagccaaaacaggaatagaactgggagctgagcctggagcggttctgggcttttggttctctgcatcaacacagccagcatgcctatgatttctgtgctgggcaaaatgtttctgtggcagcgtgaagggcctggaggacgatggacttgtcagacaagtcgcagagtgtcctcggaccccgcttgggctgtggagtggatcgaacttcctcggggtctctctctatcctctttgggatctgctcgaaccctccgaggctggagcaggtcctcccgcccttcctcggtggacagtcaggacttgccagaggtgaatgttggagacacagtcgcgatgctgcccaagtcccggcgagccctaactatccaggagatcgctgcgctggccaggtcctccctgcatggtatttcccaggtggtgaaggaccacgtgaccaagcctaccgccatggcccagggccgagtggctcacctcattgagtggaagggctggagcaagccgagtgactcacctgctgccctggaatcagccttttcctcctattcagacctcagcgagggcgaacaagaggctcgctttgcagcaggagtggctgagcagtttgccatcgcggaagccaagctccgagcatggtcttcggtggatggcgaggactccactgatgactcctatgatgaggactttgctgggggaatggacacagacatggctgggcagctgcccctggggccgcacctccaggacctgttcaccggccaccggttctcccggcctgtgcgccagggctccgtggagcctgagagcgactgctcacagaccgtgtccccagacaccctgtgctctagtctgtgcagcctggaggatgggttgttgggctccccggcccggctggcctcccagctgctgggcgatgagctgcttctcgccaaactgccccccagccgggaaagtgccttccgcagcctgggcccactggaggcccaggactcactctacaactcgcccctcacagagtcctgcctttcccccgcggaggaggagccagccccctgcaaggactgccagccactctgcccaccactaacgggcagctgggaacggcagcggcaagcctctgacctggcctcttctggggtggtgtccttagatgaggatgaggcagagccagaggaacagtgacccacatcatgcctggcagtggcatgcatcccccggctgctgccaggggcagagcctctgtgcccaagtgtgggctcaaggctcccagcagagctccacagcctagagggctcctgggagcgctcgcttctccgttgtgtgttttgcatgaaagtgtttggagaggaggcaggggctgggctgggggcgcatgtcctgcccccactcccggggcttgccggggggtttgcccgggggcctctggggcatggctacaagcttgtggcagacaagtgaatgttcatgttcttaaaaattgccacacacacattttcctcctccggataaatggtgaaccactaaagggggttgtgactgggctgtgtga

SEQ ID NO: 2769 - DNA, 2168 bp, Homo sapiens
attattacagctctgtgaggcagagggttacctgtgaagaacctagattccgggaatgcgccgcagccctcatcgagggctcggccacagaggtgtacgcgggcgagtggcgcgcagatcggcgcagcggcttcggcgtcagccagcgctccaacgggctgcgctacgagggcgagtggctgggcaaccggcggcacggctacgggcgcaccacccgccccgacggctcccgcgaggagggcaagtacaagcgcaaccggctggtgcacggcgggcgcgtccgcagtctcctgcctctggcccttcggcggggcaaggttaaggagaaggtggacagggctgtcgagggcgcccgtcgagccgtgagtgctgcccgtcagcgccaggagatcgccgctgccagggcagcagacgccctcctaaaggcagtggcagccagcagtgtcgctgagaaggccgtggaggcagctcgaatggccaaactgatagcccaggacctgcagcccatgctagaggccccaggccgcagacccaggcaggactcagaaggttccgacacggagcccctggatgaggacagccctggggtatatgagaacggactgaccccctcagagggatcccctgaactgcccagcagtcctgcctcctcccgccaaccctggcgaccccctgcctgccggagcccactgcctcctggaggggaccagggtcccttctccagccccaaagcttggcctgaggagtgggggggggcaggcgcacaggcagaggaactagctggctatgaggctgaggatgaggctgggatgcaagggccagggcccagagacggttccccactcctcggaggctgcagcgacagttcaggaagtcttcgagaggaggagggggaggatgaagagcccctgcccccgctgagggccccagcaggcacggagcctgagcccatcgccatgctggtcctgaggggctcgtcctcgaggggtcctgatgctgggtgcctgacagaagagctcggggagcccgctgcaaccgagaggcctgcccagccgggagctgccaaccccctggtggtgggagccgtggccctcctggacctcagcctggcattcctgttctcccagctcctcacctgaggctacttcctggcctggttctggctttggttgcgtgcctcttcacccctttgacctgccttttttctcttctcctcttcctggctgtgttttctcctatctttctttctcttcttcctttcttttctgtgctcctttgtttttttctctcgctttttctttccctgtcttctttcagattatctcatttcttctggatctgtctctgtattcctcactcccttccccatcccaaccccttctttctctagattgtttacatatgaagggcttttctctctcagagttgctgtcttctctgagacacacaaatctaagtcagaccattgctccacgccctcccaccttttctttagacctcaacttcgctgcgggtgggggtttggtgtcctaaggagactcctggaagctgaatggagaggaggaagaaaatgaagaaggagtgattgaatgtcgggcaaggcactggctgagctgctgtggctccctagcctaaggggcctgctgtccctctgaggcctagtgaaaaagctgcaggaggtgcatcctccacctctaatcttggaggctattatcttacctccaagcactgagctgggttactgcccaattccatccttccctgaaggagagaagggaagtgaaaagtagagtaactccccagcatttccctctttttctcctcatcggccagcccctcctccagccccctctggtgggcatgccatgccaagagcaacgtgtaaaggaacagagaatatccaatgcagtcaagttccaccctgcccagactttgccactgacttctcccacccttctgtctcccccataatagtttatttggttggtctggactcacttgtggcctttgattaaattcctaaggggcctgaagaagacatttctactgcagagggttagaggcacttgagcaaggcccccacatcccaactctgggagttgtggtgggaggaggcacttctgggggataggaccagacaagataacaggagctcacatggaagcaga

SEQ ID NO: 2770 - DNA, 5364 bp, Homo sapiens
  misc_feature (1)...(5364): n = a,t,c or g
ctccagcctcctggagaagatgacgtccagcgacaaggacttcaggttcatggccaccagcgacctgatgtcggagttgcagaaggactccatccagctggacgaggacagcgagcgcaaggtggtgaagatgctgctccggctcctggaggacaagaacggtgaggtgcagaacctggctgtcaagtggctgggtgtcccgctgggcgccttccacgccagcctcctgcactgtctgctgccacagctgagcagcccgcgcctggcggtgcgcaagcgggcggtcggagcgcttggccacctggcgaccgcctgcagcaccgacctcttcgtcgagctcgctgaccacctactggaccggctgcccggcccgcgggtgcccaccagcccgactgccatccgcaccctgatccaatgtttgggcagcgtcggccgccaggccggccaccgcctcggggctcacctggaccgcctggtgcccctggtggaggatttctgcaacctggatgatgatgagctccgggagtcctgcctccaggcttttgaggccttcttgaggaagtgccccaaggaaatgggtcctcacgtgcccaacgtgaccagcctctgcctccaatacataaaacacgaccccaactacaactacgacagtgatgaggatgaggagcagatggagacagaggatagtgaattcagtgagcaagagagtgaagacgagtacagcgatgacgatgacatgagctggaaggtgcgccgggcagctgccaagtgcatcgcagccttgatcagctcgcggcctgacctgctgcccgatttccactgcaccctggcacctgtgctcatccgccgcttcaaagaacgcgaggagaacgtcaaggctgacgtcttcactgcttacatcgtgctgctgcggcaaacacggcccccgaagggatggctggaggccatggaggaacccacccagaccggcagcaacctccatatgctacgtggacaggtgccccttgtggtcaaggccctgcagcggcagcttaaagatcggagcgtcagagcccgccagggatgcttcagcctcctcaccgagctggcgggtgtcctcccaggcagcctggccgagcatatgcctgtgctggtatcaggcatcatcttctcgctggccgaccgctccagctcctccaccatccggatggatgccctggccttcttgcaggggctgctgggcaccgaaccagctgaggccttccacccacacttgcctatcctcctgccacctgtgatggcctgtgtggctgactctttctacaagattgcagccgaggccctggtggtgctgcaggagctggtgcgggccctgtggccgctgcacaggcctcggatgctggatcctgagccatatgttggagagatgtctgctgtcaccctggcgcgacttcgtgccactgacctggaccaggaggtgaaggagcgggccatttcctgcatgggccaccttgtaggccacctgggtgaccggcttggggatgacctggagcccacgttactgctcctcctggaccgcctgcggaatgagatcacccggctgcccgccatcaaggcgcttacgctggtggccgtatccccactacagcttgacctacagcccatcctggccgaggcactgcacattctggcctcattcctgcggaagaaccagcgggctttgcgactggccacactggcagccctggacgccctggcccagagccagggcctcagcctcccaccgtctgccgtgcaggccgtgctggctgagctgcctgccctggtcaacgagagcgacatgcatgtggcccagctggctgtggacttccttgccacagtgacccaggcccagccagcctctttggtggaggtcagtggccctgtgctctcagagctgctgcggctgctgcgttcgcccctgttgccagccggagttctggcagctgctgaaggcttcctgcaggccctggtagggacccgtcccccgtgtgtggactatgccaaactcatcagcctgctcactgcgcctgtttatgagcaggctgtggatggtgggcctggcctgcacaagcaggtgttccactcattggcccggtgtgtggcagccctctcagctgcctgtccccaaagaggcggaaagcacagccagtcgcctggtctgcgatgccaggtcgccccactccagcacgggggtcaaggtcctggcattcttgtcgctggctgaggtgggtcaggtggctgggccaggccacgagcgggagctgaaggcggtgctcctggaagctttggggtcacccagtgaggatgtgagggctgcagcctcgtatgcactgggccgtgtgggtgctggcagcctgcccgacttcctgcccttcctgctggagcaaatcgaggctgaaccccgacgacagtacctgctgctgcactcactcaaggaggccctgggggccgcccagcctgacagcctgaagccctacgccgaggacatctgggccttgctgttccagcgctgcgagggagctgaggagggcacccggggggtggtggccgagtgcattgggaagctggtccttgtgaacccttcgttccttctgccccgcttgcggaagcagcttgctgcaggtcggccacacacccggagcaccgtcatcacagcggtcaagttccttatctcggaccagccccatcccattgaccccctcctgaagagcttcatcgctgtgcacaacaagccctcgctagtccgggacctgctggatgacatcctgcccctcctctaccaggagacaaagatccggcgggacctcatccgagaggtggagatggggccctttaaacatacagtggacgatgggctggacgtgcggaaggcggcctttgaatgcatgtattcactgcttgagagctgcctgggccagctggatatctgtgagttcctgaaccatgtggaggacgggctgaaggaccactacgacatccggatgctgaccttcatcatggttgcccggctggccaccctgtgtcctgcacctgtcctgcagagggtggaccgactcattgagccactaagggccacctgcactgccaaggtcaaagctggttctgtgaagcaggagtttgaaaagcaagatgaactgaagcgctctgcaatgagggcagtggctgccctgctgaccatccccgaggtggggaaaagccccatcatggccgacttctcttcccaaatcagatccaaccctgaacttgctgccctctttgaaagcatccagaaggattccacttcagcccccagcacagactcaatggagctcagctagtcccctcagcaccaaggtgggccctcgcttaagagaaaggagcccacccaagtccgaggcctccccatcccaccatcgcaggactctacttttgcccttccaccatctcactgggggccctgtcgctcctggtcagggcttacagtgccttctccagggacccaactcaaaggcccccagcccaagctgtgaggctgccaacagttgggccccttccttaactcaggacagtcatccaaagaaatagggtgaggaagttttccagtgacttcacactgtacccctccatagtctgtctggttccttcagagggtgtctctgcctcacaaactagtagtatttagaaataggctgtgctgtcagctgtaaaagatcaggaggcagcagacaccactctggtttcttcactgcattcagcaatgcctgaagttagtgctcaggccgggcatctcaaaagaaaagatacttgagttattcacattttaaaattcaaaacggttcatttttaagtggcagtgatgaatcagaaatttggaagatgatacgggtttcttttttccagggaggaggaatgggttgggtagggaactggacaggcttggacctcatgtttcatttctaatttcaaaatacttattagcaaattgggcaacaatgggcatcttccatgccaccacccaggcataaccagttggtttgtttccttctgaggaaggtttcaaatgtgtctagtgttcagtattgaggacaaagaaatacaagtggcaggcccaagtattttctgtgatatcccaggttaataaagattagattctaagttacttctttcctctgcacgactcgtctccaattgttaatcgaatcgcctgaacccaggaggcagaagttgcagggagccaagatcaagccnctgcactccagccggggtgacagaatgagtctcaaaaacaaaatcccaaaaatgaccagtttgcattataaatatttatgactaggttttgaacaggagacaatctgtaagcttcctgtctagactagaagtagaaaagctttattatacccagcgcagcatttctgctaagttgaccaggatggttacagaaaaacatcctgtaagcatttctgtctcataagtaccacatcccatatccctcatgacctatatactacagaagatgcctgtaatcccagtactttggggagggctgaagcaggattgcttgagctcagggagttccgggagccctagggcaacatgggctaggaccacctctacaaaaaaacttcaaaaactacccaggtttggaggtgtgcatctgtagtcccagctacttggaaggctgaggtgggaagatcacctgagcctggggaggtcaaggctgtagtcagtgtgccactgcactcccagcctgggtgagagcaagaccccgtctccaaaaaaaatcaggaccacgtgtcactaaattctgagtaccagtcaagaggctcaattgtcaccagttaggtccccgccttggcaaactgctgtaacattatacctgaagcagcagctggtgggagggttataggagactgaaagtgcttttccagttaaccgtggtggattacctggaagagcaatttgtacatcatcctgttctttttggacagaagttacaggatgcaatttaggcatcccgtaagaatctgtgtaagaaattcatctggatatttccatgcatattttctcaattctcacaagcatcacatggaataacttgtcacctaactttacaaaagcaaggctaagaatgactacttgtggcttgggagccacaagcttcttcaagtgtctcagaacctacctggtgtgagggccaagtctgtacccctcatacccagcctcaactggagatgactaaggctagtctgtgcacttgaggccacattcccctgttcaaggactgagtgtcctttacaaatcccctccaaatgggagattccaaaggggcttaagcaaaagaacaatctctgtggcaaactaagt

SEQ ID NO: 2771 - DNA, 5364 bp, Homo sapiens; identical to SEQ ID NO: 2770
  misc_feature (1)...(5364): n = a,t,c or g

SEQ ID NO: 2772 - DNA, 1982 bp, Homo sapiens
atcgatagcgtgtaggaccggcccggaattcccggttccacgggaggcaggaggggaagtcccaacggtgctagaatggtgctgcagtggcagaagacggctcacaagtgaagtctggaagaacaacagggaagacatccatcatttgctccaaagtgtgcaagtcaaatcctggggagaatcatgataaccctgatcactgagcagctacagaagcagactctggatgagctgaaatgcacacgcttcagcatcagtctgcctttgcctgatcatgcagacatctccaactgtgggaactctttccagcttgtgtctgaaggtgcttcctggaggggcctgccccactgttcctgtgctgagttccaggacagcctcaacttcagctaccatccctcaggcctgagcctgcacctcagaccacccagtcggggaaactcccccaaggagcagcccttctcccaagtcctaagacctgagcccccagatccagagaagcttcctgtgccccctgcccctccatccaagaggcactgccgctcactctcagtgcccgtggacctgtctcgctggcagccggtgtggcggcccgccccctccaagctgtggactcccataaagcaccggggcagtggtggagggggtgggccgcaggtgcctcaccagagccccccaaagcgggtctccagcctcaggttcctccaagctcccagtgcctcttctcaatgtgccccagctcacacaccctacagccctcctttcttcagcctggccctggcccaggattcctctcgaccctgcgccgcctcccctcaaagtggctcctgggagagtgatgctgagtccttgtcaccttgcccacctcagcgccgcttctccctgtcacccagtctgggcccgcaggcaagccgcttcttgccctctgcccggagctctcccgcatcctccccagagctgccctggcgacctcgaggtctccgcaaccttccccgaagccgctcacagccttgtgatctggatgcccgcaaaactggggtcaagcggcgccacgaggaagacccccggcgtctgcggccttcgttggactttgacaagatgaatcagaaaccatactcaggaggtctttgtctccaagaaacagcccgggaaggcagcagcatctctccaccatggttcatggcctgtagccccccacccctctctgcttcctgcagccccactgggggttcctcccaggtgctgagtgaaagcgaagaggaggaggagggggctgtgcggtggggtcggcaggcgctgagcaagcggacactgtgccagcgggactttggggacctggacttgaatttgattgaggaaaactaaaactgagaggctacttcctggggccacacagactgactctctcatggctactaacaagtgttcgagttccccaaggctgggggccgagcctgggaatgggggtgagtggagggctccgactcagggcagctggaaatcttctcgctccagcaagctcgaccatgccaagagactggccgggacaagataaacggagctggtggcgggagggacagccccagagcagacccttcctatggcggccctgagtgtgagtatccctgccaccaagagagcaatgggcagggaaggaaggggtctgccgaccccagctcggggaatttcactagcccctttgcttcaaagggcacttgtgtcttagaatttggccagggtggggggttgagtcagcctcctcagagaaactgcgtgagagtgtgtgcgtgcatgggagtgtacttgtggaaaggtgtgtttgcgtagccttagggaaggaaggcaattgctccttaacagcagagtatcatgatacccccaggatcttgagttttttacaggatgttgggtttgctcaaggagtcaagaggagggcaccaagttttccttttttctaaatagctctggaaccaggcttgtgtatt

SEQ ID NO: 2773 - DNA, 413 bp, Homo sapiens
aatttttcatcatcatactgtaaacaatagacacctttactcttttcagagtggcactgaatcctttgtaaggtgtgtcatccacactgccagttagattctatagtctctataacctggataatctttgggtataatgacctatgaaatgaattgggagggccatctgtgggtctgtttttaaacaggtgctgtcccacactttttctgaaagtcccttccatagaggataagcgtgtaccattcgttcaatcagcttcttccaaagcattcattctgaggtcacttgctgccattctttacataccagctctgctgcacacagagacctggcatcgaaataactttttctgctatgtgatctaagccttgatctggtaagtggtaaagtcctgctgcaacatgggctttgg

SEQ ID NO: 2774 - DNA, 613 bp, Homo sapiens
tttcgtatctggcagcccatggaggatggatgggagcacggagaggctggaggcaaggagaccagccgggaggctgccgtggtcatccaggcaagaaatgacgaggcgtccctccctgatggcgggcagacagcacggatggagcgcccagcagagtgccaccgtggccaacccagtgcctggtgccaacccggacctgcttccccacttcctgggggagcccgaggatgtgtacatcgtcaagaacaagccagtgctgcttgtgtgcaaggccgtgcccgccacgcagatcttcttcaagtgcaacggggagtgggtgcgccaggtggaccacgtgatcgagcgcagcacagacgggagcagtgggctgcccaccatggaggtccgcattaatgtctcaaggcagcaggtcgagaaggtgttcgggctggaggaatactggtgccagtgcgtggcatggagctcctcgggcaccaccaagagtcagaaggcctacatccgcatagcctatttgcgcaagaacttcgagcaggagccgctggccaaggaggtgtccctggagcagggcatcgtgctgccctgccgtccaccggagggcatccctccagccgag

SEQ ID NO: 2775 - DNA, 563 bp, Homo sapiens
  misc_feature (1)...(563): n = a,t,c or g
gctgatgacaccttacacttatggaatttacgtcagaagaggcctgccatactacattcgcttaaattttgcagagaaagggttacattttgccatctgcctttccagagtaagtggctctatgtgggcactgaacgaggtaatatacatattgtcaatgtggagtccttcacactctcaggctacgtcattatgtggaataaagccattgaactgtcatctaaatctcacccaggacctgtggtccatataagtgataatccaatggacgagggaaagcttttgattggctttgaatctggaacagtagttttatgggacctcaaatcaaagaaagccgactacagatacacatatgatgaggctatccactctgttgcttggcatcatgaaggaaaacaatttatttgcagtcattcagatggcaccttgactatatggaatgtaaggtcccctgctaaaccagtacagacaatcactccacatggaaaacagttaaaggatgggaagaagccagaaccatgcaaacctatcctcaaggtggaattcanaacgactagatc

SEQ ID NO: 2776 - DNA, 826 bp, Homo sapiens
ttaccagcctgtcgctgcggctgcgtggcgggttgtccaagtaaccacggtatttgtcgctgtctaagagcatctgaaagacaggtgtgcgtcatgcacttgaagcacctgaggaccctgctgagccctcaggatggagctgcaaaggtgacctgcatggcttggtcccagaacaatgccaaatttgctgtctgcacagtggaccgagtggtcttgctgtatgatgaacatggagaacggagagataaattctccaccaaaccagctgacatgaagtatggcaggaagagctatatggtgaagggcatggctttttctcctgattccactaaaattgccataggacagactgacaacatcatctatgtctacaagattggagaagattggggtgacaagaaagtcatctgcaacaagttcatccagacggtaaagttcagaccagtccctggaaccttaggatgaacaaacatatatcagtatatctacttataaatacagccaggagttgcatttctaacatctgaatgtgacttttcctactgcaaggatggtgcttcatggctgttcatggtcatctgctgtcttccttagagccctgctgtgtccttccctataggagattgagagtgctgtcacttgtctgcaatggccggcagaatacatcattgtctttggactggctgaagggaaggttcgtttatcaaacaccaaaactaataaatcatctaccatctatgggacagagtcttacgtggtgtccctgacaacaaattgctctgggaaaggaattctctctggtcatgcagatgggtaccaacgttag

SEQ ID NO: 2777 - DNA, 2251 bp, Homo sapiens
ttttttttttgcatctgcacagactgtttttattattacctattgtaaaacatcaggttcactcaggagaaatatacgtgtaaacatttgctgtctgtcatgacaggtttggttgttggtggtgtcattttaagaaatagcaggtgcagctccatctcccgagtggggtttatggccaacagtctgaatctaggacgtgtgctcctggtttgcagcgctgggcaggcagtgtttttttgtcgtggtggttgttgggatgtttcagaaacacattttaaaaagaaagagatcagcagcgaaaaaccatatggctggctacatctttggattactggactccaggacgcccaagccaaacctttcaaaccggggtacaactttgctgctgttaatgtcagctgactttcagaagtgtccagggtgggagagccgccggttcagcttgggaagtttctccagcatgtccatcagcaggctgaagactgggtctctcctgcaggtcgaaagcccagcaggccgacagattctcactgacttccttccccaagctgacagaagtcaggacacgcttcattccttccccgcttccaatctgccagatggatgcctctgcagcctggttcttcaagggccagtctcttgcttgcagctcataccaaacagtcccaaatgcatagacatcagcagctttggagaatggcagctgatcctcgtccttcccgggggtcatctcgcgtacaatctcaggggccagatagcacagccagtcgtgggacagctttagctggttctcacgccgtccctctggggaccacgcctgagatcccaaaacagcccgaagtctgtgatgaccaccttgcccgttgtcatagaagacgtttctagatttgagatctttgtgtacgatgcccttggcatgaagatatcccatgcccttgatgatctcctgagcgatttgcctcgtcttgttgatgtccagagacgtcttggggtccctcacaaacgagtgcaacgtccgccccttgcagaagctggtgataatggccaggtggggcgggttcatgcaggcccccatgaagagcaccacgttctcatgccgcgtctgccggtagttcatcacctctttcttgaagagcttcaggtggtcctggttgtggccgtccatctccagcaggcgaatggccacctcgccatgccagcggccgcggtgcacccggccccagcggccctgcccgatgggctcgcccagctctacctgctcgaaggggatgtcccactcctgcaggtacacgctggtctggctggccttgcgagagatggggccccgccagggccggcgagagctcggcaagtcgtccacctcgtcctcatcgtcttctgcctctgacttgccagcctctggctcctcagcctccgcttcgtgagcttccaacacatctgctttcggctggtcatcgagccgggtaccgtcggcagcttcagggagcggggctgcgtgtgcaaaggctgaaatgtctggaaagataaactgcctgtcctatgatgaatgaagtagggcagctggggaagttgaacctgctgttcccgctggccagggtgaggggttgggggggcgtggtggcgctggatgggttggatgatgtcgggaagggcgccggtgaggagggtgtggagaaggtggtggaggaagggttgctgctggagtccaggtgattcatggccggagggtgctccttctttgtcagtgctttggggagggttccaaaatggggttcggctgctctgtccaccgggttgttgatgtccgaggggacagattctgtcctccgaagccgagttagtggcaggaaggatattctacaggcaggggcttctttggtacatttgttgtgacacttcaacctgcaatgcttgcacttcactccaaatatcatgctcttctggcacacgtggcagacctgcgacagccaggacttggtggagaacctgtgcgtcaccgacagcccgatatccctccgtaccatctgtggggatccatgcgagagatcaaacctcatcgaggagacgtcatcaatgcggttccccagctgagactcatgggacttgctccgggtgagtgtggggaagctgggcagcagctggaagaccttgcggctgggtggttgttgggatgtttcagaaacacattttaaaaagaaagagatcagcagcgaaaaaccatatggctggctacatctttggattactggac

SEQ ID NO: 2778 - DNA, 1578 bp, Homo sapiens; identical to SEQ ID NO: 2756

SEQ ID NO: 2779 - DNA, 1377 bp, Homo sapiens
aatgcaaagtatggcgaaatccactaaatttatttaggggtgctgaatacaatcggtatacttgggtgacaggacgagagcctcttacttactatgacatgaatctctctgcccaagaccaccagacattctttacttgtgactcggaccatctgcgtcccgcagatgcaataatgcagaaagcctggagagagagaaacccccaagctaggatttctgcagctcatgaagccttggagataaatgagtgtgcaactgcttatattctcttggctgaagaggaagcaacaaccattgctgaagcagaaaaattatttaagcaggccctgaaggctggagatggctgttaccgacgctctcagcagctacaacatcatggatcccagtatgaagcccaacatagtgttttatatctccctcttcaggacgagacaccaatgtcttggtgtacatcaaaagaaggctagcaatgtgtgccagaagactcgggaggaccagggaagcagtgaaaatgatgagagatttaatgaaggagttcccccttctgagtatgttcaatatccatgaaaaccttttagaagcccttctggaactacaagcatatgctgatgttcaggcagtcttagcaaagtatgatgatataagcttaccaaagtcagcaacaatatgctacacagctgctttgctcaaagcaagagctgtctctgacaaattctctcctgaggctgcatctcggcgggggctgagcacagcagagatgaatgcagtagaggccattcatagagctgtggaattcaatcctcatgtgccaaaatacctactagaaatgaaaagcttaatcctacccccagaacatatcctgaagagaggagacagtgaagcaatagcatatgcattctttcatcttgcacactggaagagagtggaaggggctttgaatcttttgcattgtacgtgggaaggcacttttcggatgatcccttatcccttggaaaaggggcacctattttatccttacccaatctgtacagaaacagcagaccgagagctgcttccatctttccatgaagtctcagtttacccaaagaaggagcttcccttctttattctctttactgctggattatgttccttcacagccatgctggccctcctgacacatcagttcccggaacttatgggggtcttcgcaaaagctgtgagtgtttgcctagagggaggccttggggaatggatggggaaagccaagggcataaaagcagcgtgagagaaatggggttgccttacagaaatgggtacgagcctgcaaagatcattgctcaccatttaattttcatgatcatcaatggaatcaaagcattaagggtcacatgagaa

SEQ ID NO: 2780 - DNA, 2039 bp, Homo sapiens
cccagacagaagagaccacggtaaagatcagctgacggcctctgtgggaacaaagacagggaaaggggaaatgagttcaccagaaaccaacaggcagcacaggaggtggtaaacccgaaaaagaaaatgaagaaaaagaaatacgtgaattctggcacagtcaccctgctttcctttgctgtggagtcagagtgcaccttccttgactacatcaaaggagggacccagatcaacttcactgtggccattgatttcactgcctccaatgggaacccctcacagtccacatccctgcactacatgagcccctaccagctgaacgcctacgcgctggcgctgactgccgtcggagagatcatccagcactacgacagtgacaagatgttccctgccctgggcttcggggccaagctgcccccggatggcagagtgtcccacgagttcccactgaatggcaaccaggagaacccctcatgctgcggcatcgacggcatcctggaggcctaccaccgcagcctgcgcactgtgcagctgtacggccccaccaactttgcccccgtggtcacccacgtggccaggaatgcagcggccgtgcaggatggctcccagtactcggtgctgctcatcattactgatggggtcatctcggacatggcgcagaccaaggaggccattgtcaacggttgccaagctccccatgtccatcattatcgtcggcgtgggccaggcagagttcaacgccatggtggagctggatggcgacgacgtgcggatctcctcccgggggaagctggctgaacgcgacatcgtccagtttgtacccttccgggactatgtggaccgcacaggcaaccacgtgctgagcatggcccgcctggcccgagacgtgctggcagagatccctgaccaactggtgtcctacatgaaggcacagggcattcgcccgcgttccccacccgcagcaccaacccactcgccctcgcagtccccagcccgcacgccccctgcgtgccccctgcacacgcacatctgaacctggtctcagcaggcaggtggctggggcctgggagaggccaggtgaatgggaggccagggccccagactccccgaagttggcctgcccggcctttgggacatctgtgtgcctgggaggctgccagggggtggggcttctgaagacccctcctcaatttcttggcctcacttattgcccaaacccagggagttaggggggtacgggtgaaagaggggtacacagggacccagcccttctcttcttccccaatacctggctctaacccagccaggaaggtgtaaacaataagggtgattggggtccctgtcgcccacccccggcaatcctatttgcttacctgtcaccctgaagcctgggcttggcctcctccagccccccatctccgtcccatcctcccatggtgtctactcctgtccctgagccccgccctgtggtctatcctgtgcccgatttccagtgaaccccatgaagctgatgggtttgcaggaaggcctgaacatgtgcaccctcccagggacactggatgcgctgggagccccggggaccccatggggtgctgtaatcatggaccgtaggccatgtgatgggcctgaagtggaggctgctcagcacagagccctttctggtgcctctcgaactcagtacgatgcaagttctagacacacagatggcctgtggaggcctctccctggtgtgggcccacaggtacttccatggttgactcctggcttcaggaatcccttcctccctccagaggcttcccagggccctcggtgcccacgcctctgcccatctggaggcctgagtaaggagtggctcaaccccacgttcccacactgctcctgctctttgccctgtatcccatgaggctaggagacaggagtcctgggtttgagccctgcctccccccactgcctaatgtgggaacccaagcaaggcccttctaccttttgggcctcagtttccatgtctgtacgacaagagggttggaccaagatggccc

SEQ ID NO: 2781 - DNA, 3959 bp, Homo sapiens
aggagcagtccgaggggaacgtgggttgaacgttgcaactagggtggagatcaagctggaacaggagttccgatcgacccggtaccaagaaggggagtgcccgcggcagggttcattgaaaaaatccttagtgatattgacatgtctcaagtgacataaattagccaatgactcggaatgatggattctccgaagattggaaatggtttgccagtgattggaccagggactgatatagggatatcttcactccacatggtggggtatttgggaaaaaattttgattcagctaaagttccatcagatgagtattgccctgcttgtaaagagaagggaaagttaaaagccttaaagacttaccgaattagttttcaagaatctatctttttgtgtgaggatctgcagtgcatctatcctttgggctctaaatcacttaataacctaatttctcctgatttggaagaatgtcacactccacataagcctcagaaaaggaagagcttagaaagcagctataaggattcacttcttttagcaaattccaaaaagactagaaattatattgctattgacggtggaaaagttttgaacagcaaacataatggagaagtatatgacgaaacctcgtcaaacttacctgatagtagtggtcaacagaatccaattaggacagctgattccttggagcggaatgagattttggaagctgatactgttgacatggctactacaaaagatcctgctacagttgatgtctctggaactggcagaccttcccctcaaaatgaaggatgtacatctaaactggaaatgccactggagagcaaatgtacatcatttccccaggctttatgtgtccagtggaaaaatgcttatgctctctgttggttagactgtatcctgtcagctttggtgcactcggaagagttaaagaacaccgtgactggactgtgctcgaaggaggaatctatattctggcggttgcttacaaaatataatcaagcaaatacacttctatataccagtcaattgagtggtgttaaagatggagattgtaaaaaacttacctcagaaatatttgcagagatagagacctgtctgaatgaagttagagatgaaatttttattagccttcagccccagcttagatgcacattaggtgatatggaaagccctgtgtttgcatttcccctgctcttaaaactagaaacccacattgaaaagctcttcctatattctttttcttgggactttgaatgttcgcagtgtggacaccaatatcaaaacaggcatatgaagagtctggtcacctttacaaatgtcatccctgagtggcacccacttaatgctgcccattttggcccatgtaacaattgcaacagtaaatcacaaataagaaaaatggtattagaaaaagtatctcccatattcatgttgcactttgtagaaggcttaccacagaatgacttgcagcactatgcatttcattttgaaggctgtctttatcagataacttctgtaattcagtatcgagcaaataatcattttataacatggattttagatgctgatggaagttggctggaatgtgatgacttaaaaggcccatgttctgaaaggcacaagaaatttgaagttcctgcttcagagatacatattgttatttgggaaagaaaaatatcccaagtgacagataaagaagctgcctgccttccacttaaaaagactaatgaccaacacgctctcagtaatgagaaaccagtatctttaacatcgtgttctgtgggtgatgctgcctcagctgaaacagcctcagtaactcaccctaaagatatatcagttgcccctcgtactctttcacaggacacagctgtaactcatggagatcatttactttcaggtccaaaaggtttggttgacaatattttacctctgacacttgaagaaactatccagaaaacagcctcagtttcacagttaaattctgaagctttcctgtttagaaaataaacctgtagcagaaaatacaggaattctcaaaaccaatactttgctatcacaagaatcactaatggcttcttcagtatcagctccatgtaatgaaaagcttattcaagaccaatttgtggacataagttttccatcccaagttgtaaatacaaacatgcagtcagtacagctgaatacagaagatactgtaaatactaaatctgtgaataatactgatgctactggtcttatacagggagtgaagtcagtagaaattgagaaggacgctcagttaaaacaattccttacaccaaaaactgaacaattaaaaccagaacgtgtcacatctcaggtatctaatttgaagaaaaaagaaactacagcagattctcaaaccacaacatctaagtcattacagaatcagtctctgaaagaaaatcagaagaagccatttgtgggaagttgggttaaaggcttaataagcaggggtgcttcttttatgccactctgtgtttcagctcataatagaaacactataactgatttacaaccttcagttaaaggggtaaataattttggtggctttaaaactaaaggtataaaccagaaggccagccacgtatccaagaaagctcgtaagagtgcaagtaagcctcctcccatcagtaagccaccagcaggccctccatcgtctaatggcacagctgcccacccacatgctcatgctgcttcagaagttttggaaaagtctggaagcacctcatgtggagctcaactcaaccacagttcttatgggaatggtatttcttcagcaaaccatgaagacttggtggaaggtcagattcataaacttcgtctaaaacttcgtaaaaagctaaaggcagaaaagaagaaattagctgctcttatgtcttccccgcaaagcagaacagttcgaagtgaaaatctagaacaggtgccccaggatgggtctccaaatgattgtgaatcaatagaggacttgttaaatgagctaccatatccaattgatattgccaatgagtctgcatgcaccactgttcctggtgtttccctgtacagtagtcaaactcatgaagaaattttagcggaattattgtctcctacacctgtttcaacagagctgtcagaaaatggggaaggtgactttaggtatttgggaatgggagatagtcatatcccaccaccagtaccaagtgaattcaatgatgtttcccagaacacacatctgagacaggaccataattattgtagccccaccaagaaaaatccatgtgaagttcagccagactctctgacaaataatgcctgcgttagaacattaaacttggagagtccgatgaagactgatattttcgatgagtttttttcctcctcagcattaaatgctttagcaaatgacacattagacctacctcatttcgatgaatatctgtttgagaattattgaattaatgcttgttaacttttttcatataatatttattattattagaagaacttacaatgtgttcaggtagtgtttatacactggacttgtgtaattacttgtgtaataaccatgaacaaaatgcaaggtttaacctttggttctgcccatgaagcatgtaatctttcttacacattaaaatcactgaatgtgttctcctttttggtttcattttgttcttgtgagagtatgaggatttcaaaatgttaaagatgaaaagtggcgtctagtttctgacagtttgtacagttggatgcattacatttttagatttgaagttttggttatgttagtgttatgagtgatctttgtggggttttcttcccctggaaacctgttgctcgtggcgctttgcccacggtgcccgagttcttgtcctgtgtccagatatgcagacaaatgaagggtgaagaagaagaagaggagctttatttagtgttagaacagctcagaaggagacccc

SEQ ID NO: 2782 - DNA, 1705 bp, Homo sapiens
ctgctcagcagatcgtgtacagaaatgtgatgctggagaactataagaacctggtttccttgggttatcagcttactaagccagatgtgatcctccggttggagaagggagaagagccctggctggtggagagagaaattcaccaagagacccatcctgattcagagactgcatttgaaatcaaatcatcagtttccagcaggagcatttttaaagataagcaatcctgtgacattaaaatggaaggaatggcaaggaatgatctctggtatttgtcattagaagaagtctggaaatgtagagaccagttagacaagtatcaggaaaacccagagagacatttgaggcaagtggcattcacccaaaagaaagtacttactcaggagagagtctctgaaagtggtaaatatgggggaaactgtcttcttcctgctcagctagtactgagagagtatttccataaacgtgactcacatactaaaagtttaaaacatgatttagttcttaatggtcatcaggacagttgtgcaagtaacagtaatgaatgtggtcaaactttctgtcaaaacattcaccttattcagtttgcaagaactcacacaggtgataaatcctacaaatgccctgataatgacaactctcttactcatggttcatctcttggtatatcaaagggcatacatagagagaaaccctatgaatgtaaggaatgtggaaaattcttcagctggcgctctaatcttactaggcatcagcttattcatactggagaaaaaccctatgagtgtaaagaatgtggaaagtctttcagccggagttctcacctcattggacatcaaaagacccatactggtgaggaaccctatgaatgtaaagaatgtggaaaatccttcagctggttctctcaccttgttactcatcagagaactcatacaggagacaaactgtacacatgtaatcagtgtgggaaatcttttgtcatagctctaggcttattagacaccagaggacacatactggagagaaaccctatgaatgtcctgaatgtgggaaatctttcagacagagcacacatctcattctgcatcagagaacccatgtgagagtgaggccctatgaatgcaatgaatgtggaaagtcttacagccagagatctcaccttgttgtgcatcatagaattcacactggactaaaaccttttgagtgtaaggattgtggaaaatgttttagtcgaagctctcacctttattcacatcaaagaacccacactggagagaaaccatatgagtgtcatgattgtggaaaatctttcagccagagttctgcccttattgtgcatcagaggatacacactggagagaaaccatatgaatgctgtcagtgtgggaaagccttcatccggaagaatgacctcattaagcaccagagaattcatgttggagaagagacctataaatgtaatcaatgtggcattatcttcagccagaactctccatttatagttcatcaaatagctcacactggagagcagttcttaacatgcaatcaatgtgggacagcgcttgttaatacctctaaccttattggataccagacaaatcatattagagaaaatgcttactaataaatatgggaatttttcacaaagagcaatgactttattttgcattggagaactcctggagataagctgtacaaattgaat

SEQ ID NO: 2783 - DNA, 1705 bp, Homo sapiens; identical to SEQ ID NO: 2782

SEQ ID NO: 2784 - DNA, 2309 bp, Homo sapiens
  misc_feature (1)...(2309): n = a,t,c or g
gaattggttacgggtcctaacggtcccctgccttgaaatcccttgttgagggcctgcaaccttgtgcttccgactggagacgcctttggtccctcggtgtctgcactggctgctggtcaaggcttcagtgtggagtaattgacactttcgagaatattaaaatcaaattagagaagaaaactgatccataataataaaaatgtctcgaaaaatttcaaaggagtcaaaaaaagtgaacatctctagttctctggaatctgaagatattagtttagaaacaacagttcctacggatgatatttcctcatcagaagagcgagagggcaaagtcagaatcaccaggcagctaattgaacgaaaagaactacttcataatattcagttactaaaaattgagctatcccagaaaactatgatgatcgacaatttgaaagtggattatcttacaaagattgaagaattggaggagaaacttaatgatgcacttcaccagaagcagctactaacattgagattagacaaccaattggcttttcaacagaaagatgccagcaaatatcaagaattaatgaaacaagaaatggaaaccattttgttgagacagaaacaactagaagagacaaatcttcagctaagagaaaaagctggagatgttcgtcgaagcctgcgtgactttgagttgacagaagagcaatatattaaattaaaagcttttcctgaagatcagctttctattcctgaatatgtatctgttcgcttctatgagctagtgaatccattaagaaaggaaatctgtgaactacaagtgaaaaagaatatcctagcagaagaattaagtacaaacaaaaaccaactgaagcagctgacagagacatatgaggaagatcgaaaaaactactctgaagttcaaattagatgtcaacgtttggccttagaattagcagacacaaaacagttaattcagcaaggtgactaccgtcaagagaactatgataaagtcaagagtgaacgtgatgcacttgaacaggaagtaattgagcttaggagaaaacatgaaatacttgaagcctctcacatgattcaaacaaaagaacgaagtgaattatcaaaagaggtagtcaccttagagcaaactgttactttactgcaaaaggataaagaatatcttaatcgccaaaacatggagcttagtgttcgctgtgctcatgaagaggatcgccttgaaagacttcaagctcaactggaagaaagcaaaaaggctagagaagagatgtatgaaaaatatgtagcatccagagaccattataaaacagaatatgaaaataaactacatgatgaactagaacaaatcagattgaaaaccaaccaagaaattgatcaacttcgaaatgcctctagggaaatgtatgaacgagaaaacagaaatctccgagaagcaagggataatgctgtggctgaaaaggaacgagcagtgatggctgaaaaggatgctttagaaaaacacgatcagctcttagacaggtacagagaacctacaaccttagtacagaaagcaaagtaacagaatttctccatcaaagtaaattaaaatcttttgaaagtgagcgtgttcaacttctgcaagaggaaacagcaagaaatctcacacagtgtcaattggaatgtgaaaaatatcagaaaaaattggaggttttaaccaaagaattttatagtctccaagcctcttctgaaaaacgcattactgaacttcaagcacagaactcagagcatcaagcaaggctagacatttatgagaaactggaaaaagagcttgatgaaataataatgcaaactgcagaaattgaaaatgaagatgaggctgaaagggttcttttttcctacggctatggtgctaatgttcccacaacagccaaaagacgactaaagcaaagtgttcacttggcaagaagagtgcttcaattagaaaaacaaaactcgctgattttaaaagatctggaacatcgaaaggaccaagtaacacagctttcaccaggagcttgacagaggccaattcgctattaaaccagactcaacagccttacaggtatctcattgaatcagtgcgtcagagagattctaagattgattcactgacggaatctattgcacaacttggagaaaggatgtcagcaacttaaataaagaaaagtcagctttactacagacgganggaatcaaaatggcattaggatttaggaccaacttctaaatcatccgtgaaggaaatttggcaagcaaatgaaaaccagattcctcggttaagatgcatt

SEQ ID NO: 2785 - DNA, 4459 bp, Homo sapiens
atgatgctgccgaattcagagttgttgctgatgccatgaaagtcattggcttcaaacctgaggagatccaaacagtgtataagattttggctgctattctgcacttgggaaatttaaaatttgtagtagatggtgacacgcctcttattgagaatggcaaagtagtatctatcatagcagaattgctctctactaagacagatatggttgagaaagcccttctttaccggactgtggccacaggccgtgacatcattgacaagcagcacacagaacaagaggccagctacggcagagacgcctttgccaaggcaatatatgagcgccttttttgttggatcgttactcgcatcaatgatattattgaggtcaagaactatgacaccacaatccatgggaaaaacactgttattggtgtcttggatatctatggctttgaaatctttgacaacaacagttttgaacaattctgtatcaattactgcaatgagaaactgcagcagctatttattcagctggttctgaagcaagaacaagaggaataccagcgggaagggatcccctggaaacatattgactacttcaacaatcagatcattgttgacctcgtggagcaacagcacaaagggatcattgcaatccttgatgatgcttgcatgaatgtcggcaaagtcaccgatgaaatgtttcttgaagcacttaacagtaaattgggcaaacacgcccatttttccagccgaaagctctgtgcctcagacaaaattctggagtttgatcgagattttcgaattcgacattatgcaggcgatgtagtctattctgtcattggttttattgacaaaaataaagatactttatttcaagatttcaagcgccttatgtataacagttcaaatcctgtgctcaagaatatgtggcctgaaggcaaactgagcattacagaggtgaccaagcgacctctgactgctgctaccttgtttaagaattctatgattgctctagtagacaaccttgcatcaaaggaaccatattacgttcgttgcatcaaacccaatgacaagaaatctccacagatatttgatgatgaacgctgccggcaccaagtagaatatcttggactactggaaaatgtgagagtgcgtcgggcaggatttgccttccgccagacatacgagaagtttcttcacaggtataagatgatctctgaattcacctggcccaaccatgaccttccttcagacaaagaggctgtcaagaaactaattgaacggtgtggttttcaggatgatgtagcttatgggaagaccaaaattttcattcgaacaccccgaacattgtttaccttggaagaactccgtgcccagatgctcataaggattgtcctctttctacaaaaggtgtggcggggcaccctggcccgcatgcggtacaaaagaaccaaggcagctctgacaataatcaggtactaccggcgctacaaagtgaagtcgtacatccacgaggtggccagacgcttccatggcgtcaagaccatgcgagactacgggaagcacgtgaagtggccaagccctcctaaagttcttcgccgttttgaggaggccctgcagacgattttcaatagatggagagcatcccagctcatcaagagcattccggcctcagacctgccccaggtcagggcaaaggttgcagccgtggaaatgttgaagggtcaaagggctgacctcgggctccagagggcctgggagggcaactatcttgcttcaaagccagatacacctcagacctcaggcacttttgtccctgttgctaatgaattgaaacggaaggacaaatacatgaatgtcctcttttcctgtcacgtccgtaaggtaaatcgatttagtaaggtggaagacagagcaatttttgtcactgaccgtcacctgtataaaatggatcccactaaacagtacaaggtgatgaagactatccctctatacaatttgactggtctgagtgtctccaatggaaaggaccaacttgtagtgttccatacgaaagacaacaaagacctcattgtctgcctcttcagcaaacagccaacccatgagagtcgaattggagaactctgttggagtgctggtgaatcatttcaagagtgagaagcgccaccttcaagtggaacgtcaccaacccagtacagtgcagcctgcacgggaagaagtgcaccgtctccgtggagacgcggctcaaccagccccagcccgacttcaccaagaatcgctcgggcttcatcctcagcgtgcccgggaactgacgccccgcggaggcctggcccggagcccggccacactccgagtcctgggtcccagtccagctgctgcctcccaacccatgcccgctagaaacctgctgcgagggcccctcccagaggagccccgcccctgtaagatttccttcctggttttctgcctttggtatcatcttcctctgtccttactgtccacggtccctgttcaataagccaaagaccctggtgccccgcccagacccctgggctgacgtccagaccaatctcaccccagaggcaactggatggtgcctttagttggtgcggatgccccgtggccaggtcaagtcagagcacctggacaggtgtcctccctgctgctgaccctgcagagggaaggggtggggatgcaggaccccactctgcgggagccccatagccacctctcttgcccaaggtgagccagccctggggacccagctcagggaggctctgctcagagttcggcggacccaccccaacccaactcccagccgccagccaaagccactgggtgagcagagtcacccacagggccagcccctcagccaggagccagtggcaggaggcggaacagcccatccagcagagtgagtccatccttcccaggttctcccctgggagactccctttgccaccaaggcccccaccagggcctctgaccaccgctctggagaggacagtgtggcatgctccaaggatcatcttacttaactcgcagcctgtggctgtggtcctcttatagatactttcaccgtttgcagggttgctaatcagatacctgctgtcaccacacttgggtcaggaaccctaatgagaacggggagctgccagggtgagggcagccctcagggtcggccgctttccctctggaccacctcccgctgcgtttcctactcagagaaacagcaagggcggggtcaagacacgggatgacgggaagcaggaagcggggcagcagcacagcgtggggtcctggcactgcaggccaggccaggatgcccaccccgccctctacacggccccttggggcctgcgcccgtgaaactggtgccagggagcactgccagcttgccagtttctgcccagcaaaagcacgtatgcttcaggggccttctgagaccaccttccccactgagccccagctgctgagaaggccttgagggaagtagaggctgggagcaaatgccccatgcggtgagaggatgaggggagcctacgcctcaggcatgtggtgagaggatgagggggagggagcccacgcctcaggtggagtgggcagaggtgcaagagagggatgtactgaagcttcttcccgtcctgccacagacacttctcctgccttcccaccctgacccggcagaacccaccaagtgcctgtgtgcagcctcctgtgcctcacccagggcctgaccccagagtggtcccaacaacccggtctcatgcccactccccatccctgcttcccaaaaattgcactgtgtgcagtttgcaacaaagaatcccgctggcatcctgtccttgggaaccctttctcattctccaagcctggtcagctgcctgcacaggcagaggtgccctcagcccaggttagcaacactcatagttttgccaattaccagtagacactagtggaaccatctaactggaacttcctctctccttccacttatttcctcaaacttgttgctttacactagacacatgcaaatgtatgttttaaacacaccaaaacagatcatgccaaatgagttgcctgtcaaaggctggagggcaggaggagggcctgggtttgggttctttcctcccagcctttggatggtgccttgggccccttagccccagcgccagggcctcccagctgaggccacaggacaagcacttttttatgatgtactaaaagccacagtatgtggcaactgcaaaaggatcaggaatttagggtatgatctcggtcacgtgtcccgggcgctgaggggaaaggaagcgggcatgattgtagacaatgagggggttctcttgatgtaatgaaatgcaattttatggtttggtgcaaaaactcctattttccagtaaattaactttatttctaaagcatattttgatttgccatcaagagcaataaagcattaaatcttaaaaaaaaaa

SEQ ID NO: 2786 - DNA, 6507 bp, Homo sapiens
cgcacaaggtggcagcccctgatgtcgtcgtgccaacgctggacacagtccgccacgaagccctcttgtacacttggctggccgaacacaagcccctggtcttgtgtggccctcctgggtctggcaagaccatgacactcttcagcgccctccgggccttgcctgacatggaggtggtgggtctcaacttctccagtgctactactccagagctgcttctgaagacttttgatcactactgcgagtacaggcgcacacctaatggggtggttttggctcctgttcaacttggaaagtggctggtgttgttctgtgatgaaatcaacttgccagatatggataaatatgggacccagagggtcatatccttcatcagacagatggtggagcacggaggcttttaccgtacctcagatcaaacatgggtgaagctggagagaatccagtttgttggggcttgtaatccccccacagaccctggaagaaagcccctctcacacaggttcctgcgccacgtgcctgtcgtgtatgtggattacccgggccccgcctccctcacacagatctacggcaccttcaaccgcgccatgctgaggctcattccatccctgcggacgtatgcagagccgctcactgctgccatggtggagttctacaccatgtctcaggagagattcacccaggatacacaacctcactatatctattcaccccgtgaaatgactaggtgggtgagaggcatctttgaagcgctgagacctctggagaccctgcctgttgaaggcctcattcggatttgggcacatgaagctctgcgtctcttccaagatagactcgtagaggatgaggagaggcgttggactgatgagaacatcgacacggttgctctgaagcacttccctaacatcgacagagagaaggcaatgagccgacccatcttgtacagcaactggctgtcaaaggattacatcccagtagaccaagaagagttaagagattatgtcaaagctaggctgaaggtcttttatgaagaagaacttgatgttccgctggtgctgtttaatgaagtcctagaccacgtgctgaggattgacagaatattccgtcaacctcaaggccacttgcttctgattggtgttagtggagcaggaaaaactaccctgtctcgtttcgtcgcctggatgaacggtttgagtgtgtaccagattaaggtccataggaagtacacaggggaagactttgatgaagatctacggacagtgttgagacgttctggctgtaaaaatgaaaagatagcatttataatggatgaatctaatgtgttagattctggattcctggagcgaatgaatacccttctggccaatggagaggtgcctggtctctttgaaggagacgagtatgccaccttgatgacgcagtgcaaagagggggcacagaaggaaggcctgatgctggactcgcacgaggagctctacaagtggttcactagccaggttatccgcaacctccacgtcgtgttcaccatgaacccgtcctcggagggactcaaggaccgggcagctacatcaccagcacttttcaacaggtgtgtgttgaattggtttggagactggtccaccgaagcactgtatcaggttggcaaagaattcacaagtaagatggatctggagaagccaaattacatcgtgcctgattacatgccagttgtgtatgataagctgccgcagccaccatcccatcgggaagccattgtgaacagctgtgtgtttgttcatcagactcttcaccaggcgaatgctcggctagcaaagcgaggcggcagaacgatggccatcacccctcgccactacctggacttcatcaatcactatgccaacctgttccacgagaagcggagcgagctggaggagcagcagatgcacttgaacgtggggctcaggaagatcaaagagacagtcgaccaggtagaagaactgcgtcgtgacttgaggataaagagccaagagctggaggtgaagaatgcagcagccaatgacaagctgaaaaagatggtgaaagaccagcaggaggctgaaaagaagaaggttatgagccaagaaatccaggaacagctgcataagcagcaggaggtaattgcagacaaacagatgagtgtcaaagaagatcttgataaggtggaacctgccgtcattgaggcccagaatgctgtgaagtcgatcaagaagcagcacctggtggaggtgaggtccatggccaaccctcctgctgctgtgaagctggcgctggagtccatctgcctgctgctgggggaaagcaccacagactggaagcagatccgctccatcatcatgcgggagaacttcatccccaccatcgtcaacttctctgcagaggagatcagtgacgccataagggagaagatgaagaaaaattacatgtccaatccaagttacaattatgaaattgtgaatcgggcttccctggcttgcggccctatggtgaaatgggcaattgcacagcttaactatgcagacatgttaaagagagtggagcccctacgcaatgagctgcagaagctggaagatgacgccaaggacaaccagcagaaggccaacgaggtggagcagatgatccgagacctggaagccagcatcgcccgctacaaggaggaatacgccgtcctgatctcagaggcccaggccatcaaggcagacctggcagctgtcgaggcaaaagtaaaccggagcactgctcttctgaagagcttgtctgctgaacgtgaacgatgggaaaaaacaagtgaaactttcaaaaaccagatgtccaccattgctggggactgtctcttgtcagctgcgttcattgcctacgcgggttactttgaccagcagatgcgtcagaacttgttcactacctggtcccatcacctacagcaagccaacatccagttccgtacagatattgccaggacggaatacctttccaatgctgatgagcgtcttcgctggcaggccagctccttgcctgctgatgacctttgcacagaaaatgccatcatgctgaaacgattcaataggtatccgctgatcattgacccctctggacaggccacagaattcattatgaatgaatataaggatcgtaagatcacacggaccagcttcctggatgacgccttcagaaagaacttagagagtgcactgagattcggtaacccccttctggtccaggatgtggaaagctacgatccagttttgaacccggtgctgaaccgtgaagtgcggcgaacaggggggagagtgctgatcactctcggggaccaggacatagacctgtcgccatcgtttgtcatcttcctgtccacccgggatccaactgtcgagttcccaccagatctctgttcccgggttacttttgtaaacttcacagttacccgtagcagtttacaaagccagtgtctaaatgaagtacttaaagcagaaagacctgatgtggacgagaaacgatctgatcttcttaaacttcaaggggaatttcagctccgtttgcgtcagctggaaaaatctctactacaagctctgaacgaggtgaaagggcgcattttggatgacgacacgatcataaccactctggagaacctgaagagagaggctgcagaggtcaccaggaaagttgaggagacggacattgtcatgcaggaggtggagaccgtgtcccagcagtacctcccgctctccaccgcctgcagcagcatctacttcaccatggagtccctcaagcagatacacttcttgtaccagtactccctccagtttttcctggacatttatcacaacgtcctatacgagaacccgaacctgaagggtgtcaccgaccacacacagcgcctgtccattataacaaaggacctcttccaggtggcgtttaaccgagtggctcgaggcatgctgcatcaggaccacattacctttgccatgctgctggcaagaatcaaactgaagggcaccgtgggggagcccacctacgatgcagaattccagcacttcttgagaggaaatgagattgtcctgagtgctggctccacccccaggatccagggcctgactgtggagcaggcggaggcggtggtgaggctgagctgccttcccgcgtttaaggacttgattgcaaaggttcaggcagacgagcaatttggcatctggctggacagcagctccccggagcagactgtgccctacctctggagtgaagaaacacctgcaacacccattggccaggccatccaccgcctgctcctgatccaggctttccggcccgatcgcctgttggccatggcccacatgtttgtttcaacaaaccttggggagtctttcatgtccatcatggagcagccgctcgacctgacccaaattgtgggcacagaggtgaagcccaacactcctgtcttaatgtgctctgtgcctggttatgatgccagtggacatgtcgaggaccttgcagccgagcagaacacgcagatcacttcaattgcaatcggctctgcagaaggctttaaccaagcagataaggcaataaacaccgctgtaaagtcgggcaggtgggtgatgctgaagaatgtgcatctggccccagggtggctgatgcagctggagaagaagttgcattccctgcagccgcatgcctgcttccgactcttcctcaccatggagatcaaccccaaggtgcctgtgaatctgctccgtgcgggccgcatctttgtgttcgagccaccgccaggggtgaaggccaacatgctgaggacgttcagcagcattcccgtctcacggatatgcaagtctcccaacgagcgtgcccgcttgtacttcctgctggcctggtttcatgcgatcatccaagaacgcttacgatacgcaccactggggtggtcaaagaagtatgaatttggagagtctgacctgcggtcagcttgcgatacggtggacacgtggctggatgacacggccaagggcaggcagaacatctcaccggataagatcccgtggtctgcactaaagaccttaatggcccagtccatttatggcgggcgcgtggacaacgagtttgaccagcgtctgctcaacaccttcctggagcgcctgttcacaaccaggagtttcgacagtgagtttaagctggcatgcaaggtcgacggacataaagacattcaaatgccagatggcatcaggcgagaggagtttgtgcagtgggtggagttgctccccgacacccagacgccctcctggctgggcctgcccaacaacgccgagagagtcctccttaccacacagggtgtggacatgatcagtaaaatgctgaagatgcagatgttggaggatgaggacgacctggcctacgcagagaccgagaagaagacgaggacagactccacgtccgacgggcgcccgtgcctggatgcggacactgcacaccaccgcgtccaactggctgcacctcatcccccagacgctgagccacctcaagcgcaccgtggagaatatcaaggatcctttgttcaggttctttgagaagagaagtgaagatgggcgcaaagctgcttcagggacgttcgccaggaccttgcagatgttcgtccaggtgtgcgaaggaaagaagaagcagaccaactacttgcgcacgttgattcaacgagctagttgaaagggatcttgccttcggagctggtcccactacacggtgcctgccggcattgaccgtcatccagtggggtgttccgatttcagcgaggaggattcaaacagctgcagaacatctcactgggcagctgcatctggtggcgccaaggagctaaagaacatccacgtgtgcctgggtggcctgttcgtgcctgaggcgtacatcactgccaccaggcagtatgtggcccaggccaacagctggtccctggaggagctctgcctggaagtcaacgtcaccacctcacagggcgccacccttgacgcttgcagcttcggagtcacgggtttgaaacttcaaggggccacgtgcaacaacaacaagctgtcactgtccaatgccatctcaaccgcccttcccctgacgcagctgcgctgggtcaagcagacaaacaccgagaagaaggccagtgtggtaaccttacctgtctacctgaacttcacccgtgcagacctcatcttcaccgtggacttcgaaattgctacaaaggaggatcctcgcagcttctacgagcggggtgtcgcagtcttgtgcacagagtaaacttttctagctgcccctttctgtaatagtgaaagttggtatttaacatttattcatttttaaaatatttggaaggtctgagcttgtgaaaagaaagtggttggtctgaggttggaggaagctgaatggaatctgacggttgggagtggtggaaattggaaggataccaggaggtatttgggaaggccagtggcgtggctcctttgaggaaataaaacactaagcatg

SEQ ID NO: 2787 - DNA, 2867 bp, Homo sapiens
cttcctcttctccacgcaggcttcaacaggagatttatggagaatagcagcataattgcttgctataatgaactgattcaaatagaacatggggaagttcgctcccagttcaaattacgggcctgtaattcagtgtttacagcattagatcactgtcatgaagccatagaaataacaagcgatgaccacgtgattcagtatgtcaacccagccttcgaaaggatgatgggctaccacaaaggtgagctcctgggaaaagaactcgctgatctgcccaaaagcgataagaaccgggcagaccttctcgacaccatcaatacatgcatcaagaagggaaaggagtggcagggggtttactatgccagacggaaatccggggacagcatccaacagcacgtgaagatcaccccagtgattggccaaggagggaaaattaggcattttgtctcgctcaagaaactgtgttgtaccactgacaataataagcagattcacaagattcatcgtgattcaggagataattctcagacagagcctcattcattcagatataagaacaggaggaaagagtccattgacgtgaaatcgatatcatctcgaggcagtgatgcaccaagcctgcagaatcgtcgctatccgtccatggcgaggatccactccatgaccatcgaggctcccatcacaaaggttataaatataatcaatgcagcccaagaaaacagcccagtcacagtagcggaagccttggacagagttctagagattttacggaccacagaactgtactcccctcagctgggtaccaaagatgaagatccccacaccagtgatcttgttggaggcctgatgactgacggcttgagaagactgtcaggaaacgagtatgtgtttactaagaatgtgcaccagagtcacagtcaccttgcaatgccaataaccatcaatgatgttcccccttgtatctctcaattacttgataatgaggagagttgggacttcaacatctttgaattggaagccattacgcataaaaggccattggtttatctgggcttaaaggtcttctctcggtttggagtatgtgagtttttaaactgttctgaaaccactcttcgggcctggttccaagtgatcgaagccaactaccactcttccaatgcctaccacaactccacccatgctgccgacgtcctgcacgccaccgctttctttcttggaaaggaaagagtaaagggaagcctcgatcagttggatgaggtggcagccctcattgctgccacagtccatgacgtggatcacccgggaaggaccaactctttcctcctgcaatgcaggcagtgagcttgctgtgctctacaatgacacctgctgttcctggagagtcaccacaccgccctggccttccagcctcacggtcaaggacaccaaaatgcaacattttcaagaatattgacaagggaaccattatcgaacgctgcgccaggctattattgacatggttttggcaacagagatgacaaaacactttgaacatgtgaataagtttgtgaacagcatcaacaagccaatggcagctgagattgaaggcagcgactgtgaatgcaaccctgctgggaagaacttccctgaaaaccaaatcctgatcaaacgcatgatgattaagtgtgctgacgtggccaacccatgccgccccttggacctgtgcattgaatgggctgggaggatctctgaggagtattttgcacagactgatgaagagaagagacagggactacctgtggtgatgccagtgtttgaccggaatacctgtagcatccccaagtctcagatctctttcattgactacttcataacagacatgtttgatgcttgggatgcctttgcacatctaccagccctgatgcaacatttggctgacaactacaaacactggaagacactagatgacctaaagtgcaaaagtttgaggcttccatctgacaggctaaagccaagccacagagggggcctcttgaccgacaaaggacactgtgaatcacagtagcgtaaacaagaggccttcctttctaatgacaatgacaggtattggtgaaggagctaatgtttaatatttgaccttgaatccattccaagtcccccaaatttccattccttagaaagttatgttcccatgaagaaaaatatatgttccttttgaatacttaaatgacagaacaaatacttgggcaaactccctttgctctgcctgtcatccctgtgtacccttgtcaatcccatgggggctggttcactgtaactagcaggccacagggaaggcaaagccttgggtgcctgtgagctcatctcccgggatgggtgactaagtaggcttaggctaggtgatcagctcatcctttaccataaaagtcatcattgctgtttagcttgactgttttcctcaagaacatcgatctgaaggattcataaggagcttatctgaacagatttatctaagaaaaaaaaaaaaccgacttaaaataggggaagcaactaggaccaaattacagataaactagttagcttcacagcctctatggctacatggttcttctggccgatggtatgacacctaagttagaacacagccttggctggggggtgccctctctagactggtatcagcagcctgtgtaacccctttcctgtaaaaggggttcatcttaacaaagtcatccatgatgagggaaaaagtggcatttcatttttggggaatccatgagcttcctttatttctggctcacagaggcagccacgaggcactacaccaagtattatataaaagccattaaatttgaatgcccttggacaagcttttcttaaaaaaaaaa

SEQ ID NO: 2788 - DNA, 1021 bp, Homo sapiens
actgtttacaatgtggtttaatgagaattggaactagccctactattagcagacagcatcagggcggaggcccccagcccagaccccatggtcttccccatcccgaagtgggatggatttcctcatctgcatacacagcacttcgtcgatataaatggtgttctctttgacctggatctcctcctgcagggcaagctgtctgcgatgcagccctttcagctctgcctgagcttggggctaaagtttccttcaatcttgcgacattgtgggtgatctcttgaacctccttcattagcctatattgtgcgacatcacgacacagctccacgttcggccggtgtgtcctggtctccaagcgcgtatgagccaccttggctggcccttcttggtcaaggatggccttttcaagagctgtaatatttttctcctgggaagcaatctcttccatgacctttggccagatgatcagccagctggtccctggcatcctttgtatccttcagcccattcttgaatgccgtgtgcaccacatcacactgcttgcgcagataattggctgtctgggacaggattcgaatccaccagggctttcagcatcagggagttgttccgctgcttgtcagccttctccacattggtgctggagaagtccaaccagtcttccagactcacggagtttggctcaatcctcacggcgttctcagaatatctgatgtttggtgagttgttgttgagcgagaagcagatatcatctatggtcagggccacaaacttgtccttcaaatccttctcaagattgtacttggcagagcggttcatccgaatctgctcggaagcctcctccaaggtacgggtcagcagagccataatgccctggatgatctcagcctcctttatcagctcatgctccactgtgtcgtgcaccaggtcaatgccaatgcgcttctccctgtatgccaggcatgtctcagtgatgtgcaaggacgggaatccatccgcatggactagggtctacaattcc

SEQ ID NO: 2789 - DNA, 1287 bp, Homo sapiens
gcggccgcccgggagtccgagcgccagctgcgcctccgcctctgcgtcctcaacgagatcttgggcaccgagagggactacgtgggcaccttgcgcttcttgcagtcggcattcctgcatcgcatccggcagaacgtggccgactcagtggagaagggcctcacggaggagaatgtcaaggtcctgttctcgaacatcgaagacatcctggaagttcataaggatttcttggccgccttggagtattgtttacacccggagccgcagtctcagcatgaacttgggaatgttttcttaaaattcaaggacaagttctgcgtgtacgaggagtattgcagcaaccatgagaaagccctgaggctgctggtggagctgaacaagatccctaccgtgcgcgccttccttttgagctgcatgcttctgggaggccggaagaccacggacatccctttggaaggctacctggttgtctccgatccagaggatctgcaagtacccgctcctccttaaggagctggccaagaggactcccggcaagcacccagaccaccccgcggtccagacgtgccctgcaggccatgaagaccgtttgctccaacatcaatgagaccaagcggcagatggagaagctggaagccctggaagcagctgcaagtcccacatcgaaggctgggagggttccaacctcacagacatctgcactcagctcctcctgcaagggactttgttaaagatctctgcgggcaacatccaggaaagggccttcttcctcttcgacaaccttctcgtctactgcaagcggaaatccagggtcaccgggagcaagaagtccaccaagaggaccaaatccatcaacggctccctctacatcttcaggggtcgaatcaacactgaagtcatggaggtggagaatgtggaagatgggacaggtagcccctcccccagccttgcctgagccctgcctgagccctgcctgctccctggcactctctctgtttcatttaaatatatttttttcttttatcatgagatgtaatctacctacagaaaagtgcccagagcatagatgcatgaagcgaacatctgggtggttagcattcaagttaagaaataaaacactgcaccccaaatccttcctccttgcaatgccttcttccccctagaagtaaccactgtctgaattttgtgatgatcattttcttgctttttaaagacatttttacctcctaagcatttatgactaaacattttaattaaaatttctatttttgagccttaaaaaaaaaa

SEQ ID NO: 2790 - DNA, 4254 bp, Homo sapiens
ttttttttttttcttgctttattaggtttattataaggagcagtgatgagatctttatcagtcctcactacaaagctttcatctccagccttctccatagctctgtggagggcagagagttgagggaaggaagaatggagcttgggagcatgggatcatgtatgtataccaggaaagaaaacacacattctttattctattgcttcaaagacagtttgtgagaatggaagataacaagcacagctggccaggaaggcagggcacacatggcaggtcaagttcctgctatccagggaggtggcccagagcttccctgctgctcctggaggaagcagagtccaagctggcccagatgaggccccgggcagcactgcttctgtgtgggtatggccagtcgggacgtggcgccacacactgctcctccgaactctggtgaagggctgcccagcctcacaggcctgagcagagtctcccacatctgcgaatggggccaatggcactcactgtctcttcaggcccccacggacggcatgcctggggaagcctagtctacttaccatcagcacgttgatctgtcacacagcatggagccatagtttacaaaggaccacggcaggtcaaggacaggccactaaaactgttggtgctgggcaccatcacccaccctcaccaccatcaaagacactggtgcagtgagacttcgagtctgcaaaaaccccggggaggacaggaggcagggccactctccctgtgtgtcatcagcctgcagtgcctgaaactccagcctgtgcacctctggcaggatgccccacactgctccacaggtttggcggtgagttatttttaaaccagcgtcctgctgttcttgccccccgcgtcccctctgctgtgcctaaacacctctcaggaacacttggcagcacgccattgtcagttccaggtccactcatcccctgcgtgttgccgggacccaccttcctgcgctatcccagcacaactctccaaccacaccattgctgaacaaagctggggagtgacggccagggcaggctgtaaggcaagtgaatggaaactggctggaaaaagagaaagggcccagagcacaaaatcgccacgcacaaagactaagccagcctgcctgagtgtctggtgagcgaagacggagcaggcacctctgtgggaacatgtatctagggatcacgcataccccagacagggcaggcccatcctcaggagctgcagtcacactcagcccggcctgaggcaagggatgcagggccttgcctaggcagagaatgatgctctccgaggcatctaggcatggagtgtatggccaaagagggtctatttacaacatacctgacaatcaactagcactgtattcctagaactgagaccccttgcttctcatcttaccttgcttaaatattagttattcccagagtcagggaagtgggagagaaagcctgggtagggcagtgagggaagtgataaatggtgagaaagaaaaggagactgaaaactaacagggcggctaccgaggggtgcagggcacagttaccatggagacgtaaaacactacacagaatgcgagccatcgggtccatgcggccagaagcttgagtgctgttctctcatggaactctccagtgagccatgctgagcggtccttgtgaagtcatgtacttaatagaaaagcccttgatgaacaaccccatggttacaaacacttgtgacaagtttccttgttcaggtgactggtgtgcaaaggcaagatggtgcacatcctcctgaccaagcaggtactgaattctctggaattgcccacaacataatggtataaggtataactaatctcttttcccattaaaaagctggcaatgccagaccatgagtctaattaattcagagttgttccagggcacaagatagccaagtaatgtccaaatggggagccttgtggttggtggcagccaggattcctaaggccaaggtgctccttcacctctctgggagagccaagctgtccatccgctggatccccaggatgctgggctcaagtgtcagctgggtttacctctttgggaacagaagtaatggacgaccactccattggggtatcttgcaaatgcactgttcccaatcttcttcttacacaccatgcacaccttctcctctgtgatgatgcacttcacctgctggtgtaaaatccgctcttcctggaaccctcaggaattctgcatggagaaggttcttgagcacttgattgaaccgtttcttttgtgcattttcttccaagaccttttccaggaagatgcgtatgtcattgatctgagtgtttgctggcagaaggttgagggccttggtggtgtccagtttgctgtggtgtagctcgaggacctgcagagcggcctggaggttggcttttggctccagtagttccagcttgattggccccaggcagtgaatgctggggggcgacaggtacatccgaagcagggacagatacacatctttgttgccatctttgtttcggtcatagtgtttgtggcagtactcctcagccatccttgtatccttcaagatgtggacataaatgaaaagagcttgttcatgtttccccatgcgccccaacaggagagctcgttcttctaagaggccatcaaagggaaaatcacagatgagccggcctggatcatagtagctggaaatctccaagaacatgaggagcttttgccggtattctcccagctcaccctcttcctctccagctgggactggggttttgcctgcagggaaggacaggagatactccttcatcagaccttgcaccttctcacagtatagctggatcaggcagttgtggaaccgagagcctgtctcctcccaaacatggatgatgtgttccagataaggaatagccagacccttaaaattctctattaagaagccgaggactcgatcacgtggcagagactccacttccgggagatcttcagtaaatatcttcaggccatcttctgggaagtctctcagcacccacactgagtaggagaaaatcaaatgcaggttttctgtgcccagatgctgcagatactgcactgtcctctcgtggcctttcagaggggagttggctttcttggactggtccacgagcacctgcagagctttctcgtggagccccttcttctcatacaggatgataagctcactgtacttgtgagccttcttcagcacgtgctcgctctcctcgatgtggcagtgattgttctccaggcgtagcaagggggccaccagggccacatttgtatggagatagcacttgagcagggtggtgtcgatgatttgtagcagcttcttcttggatttgatggtgggagtgccttccatgagcggtgaggtgcttgactggtgatcagagtcattcagcttctttaccaattgacttcgtttctgtgtcaggtagtcaatcagagctaagtgagccttctccaattcagccccggagagcacaggcaatgggttgggatactgcaactgctttctgtagtctgtgggcagcaggtcagggtacaggcccatcacatgggtgggatctgtgccaagtttagcaaagacctgcatggactcatcaaaacgcttctggcagaagaggttgaaggcatacaagttcttgatgtgatgaatttgttgctgcttttcactgtcagaatcatctttcatttctgcgagctgcagagccaattcaaactgcttgtcctggagaagttgttggatttgggttgccatggggacagggatgagtctccaaacaaaatgattgctggccacatagataatgtttgatcctcctgaggtaatgaaacggggcctttgcaattcaatgctttggaccagaagcctcggttcaaatgttcggatctcaacatatcgaggcaacactgcaatgatgtagggaggctggtgctccatggccactggtatgtccgtccagttcagggcacatttctgtgtgcagatcccttcctcattgagtaccacggtgagatcatcctggcccacagccacttttccatctgccagaggtgcaactaagggctccagctgttttcctgttggaaagagctctttgatggacccctttccatccacccttattaggtagtagtctctcttgaaacccacacagatagaattttcacaccacgccatggacttgggcacatctggcacactaaagtccccctgcaattc

SEQ ID NO: 2791 - DNA, 1832 bp, Homo sapiens
ttttttttttttaagtaagaacaaaagctttactcgtgctcggcaacagcaaagcaggaggcagaggggagatgacggcccctgtcccatttccctccatggaaggcaccaggcggggaggtgggtctgctgggatgggcaggtcagcggaacaaaaggctcctgttgtttatgggcccaggcacagtggggcaggagcacgacccagaaagtagtcctgagccacaagtcagagcggagaaaacatctctgtggtcccagtcaagaggcctccgaatgaggcgcctggactgggagcaaagctctggtcgagaacatgaccttcccgggcctgagtcccactgtggtgcccgggccgtgcacccagcctgcggcagagagggcggcgtcccccacaaagcctgccaggctgagcccttgcaatggccgtggctgggccaggaccttggcctggagcctgctccttgacacccagccagcctagcacccgccttcagcaacaggtaatggagcccggatggcagctccctcccaggtgcgcaagtgctggggtggaagcctgttcccgtgggatcaaccttggggctgggtcggggggaggggcactgcggccctggccatcagcctggctgtcttcgttctcccaaaacacccatcaccgcagcccaccaggggctgggagagggggggctgcaggctagccagagggtctgccaggtgcctgcatctcactggtgtggccgtggcacctgagggagcccactgagcccatagggggctctggttccccgcgcctgggacagagccaggcagccctgggtcggggtggttggtgtcaccgagaggtcggggcgccctgtttctgcctgggacaccagtccgtgtctgggtacagaagacaatggatagacttaaaccgtgtggggtcttgatgcaggctgaagcctccagccacgttcaccacgttctgtgggttctcaggacccccatggctcaaggtaacctgctggagcagggtgtcgggcggcagcctctgcaggttctccaggtgagagtggaagagggggctgtgcagcaggcgggcgcccaggagcccctccacgatgtagccaactgtgcagtcatccggcagccgcacctgctcagctgtgctcatgaagctgcccaggctggcccatgggctcatcttgagggcaaggcctctgctgaggcagaacccggccccaccagtagcaaaccagaacttgaccgtggtcacagttctgccaccctggaccctctcggtggcctcaatggggtggtccaggctgggccgccccaggtagacgtcctggctgggtgagaagctggagagcaggtgcaggaggctccttgcgttcacataattgtcatcatccacgtggcaaaaccacttgcgcccggactcaatgaacttgtcatactccacggacatcttgcagcagagggcctgacgagtgcgcaccgccgagcagttggtgttgatgacacggtcgccgccctggagctcgagctcagggtcgtccccgtcggtgaagataaacgtctgctggcgggcccgggagatcccaggtgcgcagcagcagccgcaggcgcggcccgtggttcttccgggtggtcttgacggcgatgaagacgtcgtcaggccgcaggctgggggcagcgggccgggacgggggcgcgcgcggggccggggcgggggtccgggccggggcgggcgcgcggggcagcggcagcggcagtaacagcagcgcggccagggccgcggccagcgcgaggcaggcccggcacagcgccccacgcgcgcggctcat

SEQ ID NO: 2792 - DNA, 1330 bp, Homo sapiens
ggcctcgtgccaagcttggcacgagggcgcgaaacatggcggggcaggacgctggctgcggccgtggcggcgacgactactcagaggacgaaggcgacagcagcgtgtccagggcggctgtggaggtgttcgggaagctgaaggacctaaactgccccttcctcgagggtctgtatatcacagagccaaagacaattcaggaactgctgtgcagcccctcagagtaccgcttggagatcctagagtggatgtgtacccgggtctggccctcactgcaggacaggttcagctcactgaaaggggtcccaacagaggtgaagatccaagaaatgacgaagctgggccacgagctgatgctgtgtgcgccagatgaccaggagctcctcaagggctgtgcctgcgcccagaagcagctacacttcatggaccagttgctcgataccatccggagcctgaccattgggtgctccagttgctcgagcctgatggagcacttcgaggacaccagggagaagaacgaggccttgctgggggagctcttctctagcccccacctgcagatgctcctgaatccagagtgcgacccgtggcccctggacatgcagcccctcctcaacaagcagagtgatgactggcagtgggccagtgcctctgccaagtccgaggaggaggagaagctggcggagcttgccaggcagctgcaggagagtgctgccaagttgcacgcgcttagaacggagtactttgcacagcatgagcaaggggctgctgcgggcgcagccgacatcagcaccctagaccagaagctgcgtctggtcacttccgacttccaccagctaatcttggcttttctccaagtctacgacgacgagctgggcgagtgctgccagcgcccaggccctgacctccacccgtgcggccccatcatccaggccacgcaccagaatctgacttcctacagccaactgctgcaagtggtcatggcagttgctgacacctctgcgaaggccgtggagaccgtgaagaagcagcaaggcgagcagatctgctggggtggcagcagctccgtcatgagtctagctaccaagatgaatgaactaatggagaaatagaaagtcttcagtgatggcctacgccaaagcacaggatggggcgggcaggaagccctctcccaagatcgagttggccgaggatggatgattgtggcagcagaagccgttgcagccccacgttgtgctctaggcagggacctttggcccctttggggagggagagacagacgggcggtttgacttggacacaaaaaaagccttggtttctaaaaaaaaaa

SEQ ID NO: 2793 - DNA, 673 bp, Homo sapiens
gatcagaggaagatgttattgaagggaagactgcagtcattgagaaacgtaggaagaaaaggtcttctgcaggagtggttgaagatatgggggtgaagtgcagaatatgctggaaggagttggagttgacattaacaaggctcttcttgccaagagaaagagactagaaatgtataccaaggcttctctcagaactagtaaccagaaaattgaacatgtttggaaaacacaacaagatcaaaggcagaagcttaaccaagaatattctcagcagtttctgactttgtttcagcagtgggatttagatatgcagaaagctgaggaacaagaagaaaaaatacttgttggtatcatgattaggtttataatcaaccaagtctcaagtaggaatggacaacctagccttttattgtgaccagtggaactgagccaggtttcattaaccattgctggccatgtgttttaaacctactgaactgtaaaccacagacgtataggcacataccatactcataaaaggcatttatattgtttggggttcctgcatttccaagtgacagaaatttgtcaaagtacaaaagaaggatcattggtttatgtaaaagaagtcggggcagtttagcttcaggcatagccagatgggaacagggagggggttgctcatgtagtgtca

SEQ ID NO: 2794 - DNA, 788 bp, Homo sapiens
gcggccgcgggctctcgcggggcggcgacgccgcggggaggatgctgcttgccgcgcccgcgtcctcaccgtcctcccgggccgcctgctggggctttgttgtggcccggacgccgcgggccaccccctgaagtcgcctgccgccgccgccgccgcacctagcggacgggcgggcgggcgcgcgtgtgcccaggagtgcgcgcctgtcgcggtggtgggtgcaggactggacccacgggcccattgtgcgcccgcccgcggcagccaggaccatgtgggtgaacccggaggaggtgttgctggccaacgcgctgtggatcaccgagagggccaacccatacttcatcctgcagcggaggaagggccacgccggcgatggaggcggcggcggcggactggcgggcctgctggtgggtacccttgatgttgtgttggactccagcgcccgggtcgctccttaccgaatcttgtaccagactccagactccctggtctactggaccatcgcctgtgggtggttccaggaaagaaatcactgaacactgggaatggcttgagcaaaatctcttgcagacactttccatctttgaaaatgagaatgatatcaccacatttgtgagaggaaaaatacagggcatcattgcagaatacaacaaaatcaatgatgtaaaggaagatgatgacacggagaagtttaaagaagccattgtgaaatttcataggctgtttgggatgccagaggaagagaaactcgtcaactattactcttgcagctattggaaggggag

SEQ ID NO: 2795 - DNA, 1092 bp, Homo sapiens
  misc_feature (1)...(1092): n = a,t,c or g
ctgcaaaagctgtactctttttcctcaaaatccaaatcttccacctccttccacaagagaacgacctcctgggtgtaagaccgtgtttgtcggaggattaccagaaaatgctactgaggaaattattcaagaagtctttgaacagtgcggtgatattacagcaattcggaaaagcaagaagaatttttgtcacattcgctttgcagaggaattcatggttgataaagccatttacctttctggttataggatgcgattagggtctagcaccgacaaaaaggattcaggccgccttcatgtggactttgcccaggccagggatgacttctatgagtgggaatgcaagcagaggatgcgtgcccgggaggagcggcaccggcgcaagctggaggaggaccggctcaggcccccatccccgcctgccataatgcactactcggagcacgaagccgctctgctggctgaaaagctgaaagatgatagcaagttttcagaggctatgcacagtgctgctttcctggattgaacgaggggaagtgaatcggcgctgctgcaaaccagttctattccatggtgcagtcggccaacagccacgtccgccggctaatgaatgaaaaagccacccatgagcaagagatggaggaagccaaggagaattttaaaaatgccttaactgggattctcactcaatttgagcagattgtggccgttttcaacgcttctaccagacaaaaagcttgggaccatttctcgaaagcccagcgcaagaacatagacatttgggcgaaagcattctgaggagctccggaatgctcaaagtgagcagctcatgggcatccgccgcgaagaagaaatggaaatgtctgatgatgagaactgtgacagccctacaaagaaaatgagagtcgatgaatcagccctgggtgccccaggnctacgctctgaaagaggagaatgacagtctncgcttgcagcttgatnctacaggaatnaggttgagcttctgaaacaaggaaaaggacagcttttccgncagaagaaaccttaccaagggccagcacttcagtttttcagcaaccattcaagnattca

SEQ ID NO: 2796 - DNA, 2535 bp, Homo sapiens
gcagcccaggcggagcgggaggagctggcagcggggcgcatgccaggcgggggtcctcagggcgccccagccgccgccggcggcggcggcgtgagccaccgcgcaggcagccgggattgcttaccacctgcagcgtgctttcggaggcggcggctggcacggaggccgggctacatgagaagctcgacagggcctgggatcgggttcctttccccagcagtgggcacactgttccggttcccaggaggggtgtctggcgaggagtcccaccactcggagtccagggccagacagtgtggccttgactcgagaggcctcttggtccggagccctgtttccaagagtgcagcagcccctactgtgacctctgtgagaggaacctcggcgcactttgggattcagctcagaggtggcaccagattgcctgacaggcttagctggccgtgtggccctgggagtgctgggtggcagcaagagtttgcagccatggatagttctgagaccctggacgccagctgggaggcagcctgcagcgatggagcaaggcgtgtccgggcagcaggctctctgccatcagcagagttgagtagcaacagctgcagccctggctgtggccctgaggtccccccaacccctcctggctctcacagtgcctttacctcaagctttagctttattcggctctcgcttggctctgccggggaacgtggagaagcagaaggctgcccaccatccagagaggctgagtcccattgccagagcccccaggagatgggagccaaagctgccagcttggacgggcctcacgaggacccgcgatgtctctctcagcccttcagtctcttggctacacgggtctctgcagacttggcccaggccgcaaggaacagctccaggccagagcgtgacatgcattctttaccagacatggaccctggctcctccagttctctggatccctcactggctggctgtggtggtgatgggagcagcggctcaggggatgcccactcttgggacaccctgctcaggaaatgggagccagtgctgcgggactgcctgctgagaaaccggaggcagatggaggtaatatccttaagattaaaacttcagaaacttcaggaagatgcagttgagaatgatgattatgataaagctgagacgttacaacaaagattagaagacctggaacaagagaaaatcagcctgcactttcaacttccttcaaggcagccagctcttagcagtttcctgggtcacctggcagcacaagtccaggctgccttgcgccgtggggccactcagcaggccagcggagatgacacccacaccccactgagaatggagccgaggctgttggaacccactgctcaggacagcttgcacgtgtccatcacgagacgagactggcttcttcaggaaaagcagcagctacagaaagaaatcgaagctctccaagcaaggatgtttgtgctggaagccaaagatcaacagctgagaagggaaatagaggagcaagagcagcaactccagtggcagggctgcgacctgaccccactggtgggccagctgtccctgggtcagctgcaggaggtcagcaaggccttgcaggacaccctggcctcagccggtcagattcccttccatgcagagccaccggaaaccataaggagcctccaggaaagaataaaatccctcaacttgtcacttaaagaaatcactactaaggtgtgtatgagtgagaaattctgcagcaccctgaggaagaaagttaacgatattgaaacccaactaccagccttgcttgaagccaaaatgcatgccatatcaggaaaccatttctggacggctaaagacctcaccgaggagattagatcattaacatcagacagagaagggctggagggactcctcagcaagctgttggtgttgagttccaggaatgtcaaaaagctgggaagtgttaaagaagattacaacagactgagaagagaagtggagcaccaggagactgcctatgaaacaagtgtgaaggaaaatactatgaagtacatggaaacacttaagaataaactgtgcagctgcaagtgtccactgcttgggaaagtgtgggaagctgacttggaagcttgtcgattgcttatccagtgcctacagctccaggaagccaggggaagcctgtctgtagaagatgagaggcagatggatgacttagagggagctgctcctcctattccccccaggctccactccgaggataaaaggaagacccctttgaaggaatcttacatcctttctgcagaacttggagaaaagtgtgaagacataggcaagaagctattgtacttggaagatcaacttcacacagcaatccacagtcatgatgaagatctcattcagtctctcaggagggagctccagatggtgaaggaaactctgcaggccatgatcctgcagctccagccagcaaaggaggcgggagaaagagaagctgcagcttcctgcatgacagctggtgtccacgaagcacaagcc

SEQ ID NO: 2797 - DNA, 1116 bp, Homo sapiens
gcggccgccggcgggccgggcccgcgcacagcgcccgcatgtacaacatgatggagacggagctgaagccgccgggcccgcagcaaacttcggggggcggcggcggcaactccaccgcggcggcggccggcggcaaccagaaaaacagcccggaccgcgtcaagcggcccatgaatgccttcatggtgtggtcccgcgggcagcggcgcaagatggcccaggagaaccccaagatgcacaactcggagatcagcaagcgcctgggcgccgagtggaaacttttgtcggagacggagaagcggccgttcatcgacgaggctaagcggctgcgagcgctgcacatgaaggagcacccggattataaataccggccccggcggaaaaccaagacgctcatgaagaaggataagtacacgctgcccggcgggctgctggcccccggcggcaatagcatggcgagcggggtcggggtgggcgccggcctgggcgcgggcgtgaaccagcgcatggacagttacgcgcacatgaacggctggagcaacggcagctacagcatgatgcaggaccagctgggctacccgcagcacccgggcctcaatgcgcacggcgcagcgcagatgcagcccatgcaccgctacgacgtgagcgccctgcagtacaactccatgaccagctcgcagacctacatgaacggcttcgccccacctacagcatgtcctactcgcagcagggcacccctggcatggctcctggctccaatgggttcggtggtcaagtccgaggccagctccagcccccctgtggttacctcttcctcccactccagggcgccctgccaggccggggacctccgggacatgatcagcatgtatctccccggcgccgaggtgccggaacccgccgcccccagcagacttcacatgtcccagcactaccagagcggcccggtgcccggcacggccattaacggcacactgcccctctcacacatgtgagggccggacagcgaactggaggggggagaaattttcaaagaaaaacgagggaaatgggaggggtgcaaaagaggagagtaagaaacagcatggagaaaacccggtacgctcaaaaaaaaaa

SEQ ID NO: 2798 - DNA, 2976 bp, Homo sapiens
tttcgtgtccccgacagctgcccggtggtgctgcacagcttcacgcagctagaccccgacctgccgcgcccggagagctccacgcaggagatcggtgaggagctgatcaacggagtcatctactccatctccctgcgcaaggtgcagctgcaccacggaggcaacaaggggcagcgctggctcgggtatgagaatgagtcggccctgaacctttatgagacttgcaaggtgcggaccgtgaaggctggcacgctggagaagctggtggagcacctggtgccagccttccagggcagcgacctctcctacgtcaccatcttcctgtgtacctatagagccttcaccaccacccaacaggtcctggacctgctgttcaaaaggtacggtagatgtgacgccctcacggcctcctctagatacggctgcatcctcccctattccgacgaggatggtggaccccaggaccaacttaaaaatgccatctcctccatcctgggcacctggctggaccagtactcggaggatttctgtcaacctccggactttccctgcctcaagcagctggtggcctacgtgcagctcaacatgccaggctcagacctggagcgccgtgcccaccttctcctggcccagctggagcactcggaacccattgaggcagagcctgagggtgaggaggactgggctctgtcaccagtgccagctctaaaaccaactccagagctcgagctagctctaacaccagctcgagcacccagcccagtgccggctccagccccggagccagagccagctccaacaccagctccaggttcagagctagaagtagctccagcaccagctccggagctccagcaggctccagagccagctgtgggactagaatcggctccagcgccagctctggaactagagccagctccagaacaggatccagctccctcacaaactctagagctggagccagctccagcaccagttccatcattacagccttcctggccttcacctgtggttgcagagaacgggctgagtgaggagaagcctcacctcttggtgttccctccagatctggtggcagagcagtttacactgatggatgcggaactgttcaagaaggtggtgccctaccactgcctgggctccatctggtcccagcgggacaagaagggcaaggagcacctggcgcccaccatccgcgccactgtcacccagttcaacagtgtggccaactgtgtcatcaccacctgcctcgggaaccgaagcacgaaagccccagacagggccagggtggtggagcactggatcgaggtggccagggagtgccggatcctcaagaacttctcgtcactgtatgccatcctctctgccctgcagagcaactccatccaccgtctgaagaagacgtgggaagacgtttccagggacagtttccggatctttcagaagctgtcagagatcttctcagatgagaacaactactcattgagccgggagctgctcatcaaggagggcacctccaagtttgccaccctggagatgaaccccaagagagcccagaaacggccgaaggagacgggcatcatccagggcaccgttccctacctgggcacgttcctcaccgacctggtgatgctggacactgccatgaaggactatctgtatggcagactcatcaactttgagaagaggaggaaggagttcgaggtgatcgcccagatcaagctgctgcagtcggcctgcaacaactacagcatcgcgccagatgagcaatttggggcctggttccgggccgtggagcggctcagcgagactgagagctacaacctgtcgtgcgagctggagcccccatccgagtcagccagcaacaccctcaggaccaagaagaacacagccattgtcaagcgctggagcgaccgccaggcccccagcactgagctcagtaccagtggcagctcccactccaagtcctgtgaccagctcaggtgtggcccctacctcagcagcggggacatcgctgacgcgctcagcgtgcactcggccggctcctctagctccgacgtggaggagatcaacatcagcttcgtcccggagtctcctgatggccaggaaaagaagttctgggaatcagcctcacagtcatccccggagacctccggcatcagctcagcctccagcagcacctcgtcctcctcagcctccaccacgcccgtggctgccacacgcacccacaagcgctctgtctcagggctctgcaactccagctccgcgctgccgctctacaaccagcaggtgggcgactgctgtatcatccgcgtcagcctggacgtggacaatggcaacatgtacaagagcatcctggtgaccagccaagataaggctccggctgtaatccgcaaggccatggacaaacacaacctggaggaggaggagccggaggactatgagctgctgcagattctctcagatgaccggaagctgaagatccctgaaaacgccaacgtcttctatgccatgaactctaccgccaactatgactttgtcctcaagaagcggaccttcaccaagggagtgaaggtcaagcacggagccagctccaccctccctcgcatgaagcagaaaggactcaagattgccaagggcatcttctgagggcatcctcccagggtctggctggctggtagccaagcacttatggaccagagtggcccaggccagctgggcgccttcctcccacctgccagcccagggtaccccagactccagtttcatcctgaacctctcccgctgcttgggatttgacgcctgccatttggtcaggctgaacttgggcctcccgtggaaccaactcgcttgccttaaggtggccttctggctctctggaaccagaggactagctgactttttggcaaaggaagcagtgccaacgggaatggcatgggtgccctgcctgcccccgggcgccaactctgtaca

SEQ ID NO: 2799 - DNA, 1131 bp, Homo sapiens
accgaagtgggcagggcaaggtgtatggactcattgggcggcgacgcttccagcagatggatgtgctggaggggctcaacctgctcatcaccatctcagggaaaaggaacaaactgcgggtgtattacctgtcctggctccggaacaagattctgcacaatgacccagaagtggagaagaagcagggctggaccaccgtgggggacatggagggctgcgggcactaccgtgttgtgaaatacgagcggattaagttcctggtcatcgccctcaagagctccgtggaggtgtatgcctgggcccccaaaccctaccacaaattcatggccttcaagtcctttgccgacctcccccaccgccctctgctggtcgacctgacagtagaggaggggcagcggctcaaggtcatctatggctccagtgctggcttccatgctgtggatgtcgactcggggaacagctatgacatctacatccctgtgcacatccagagccagatcacgccccatgccatcatcttcctccccaacaccgacggcatggagatgctgctgtgctacgaggacgagggtgtctacgtcaacacgtacgggcgcatcattaaggatgtggtgctgcagtggggggagatgcctacttctgtggcctacatctgctccaaccagataatgggctggggtgagaaagccattgagatccgctctgtggagacgggccacctcgacggggtcttcatgcacaaacgagctcagaggctcaagttcctgtgtgagcggaatgacaaggtgttttttgcctcagtccgctctgggggcagcagccaagtttacttcatgactctgaaccgtaactgcatcatgaactggtgacggggccctgggctggggctgtcccacactggacccagctctccccctgcagccaggcttcccgggccgcccctctttcccctccctgggcttttgcttttactggtttgatttcactggagcctgctgggaacgtgacctctgacccctgatgctttcgtgatcacgtgaccatcctcttccccaacatgtcctcttcccaaaactgtgcctgtccccagcttctggggagggacacagcttcccttcccaggaattgagt

SEQ ID NO: 2800 - DNA, 1226 bp, Homo sapiens
tttttttttttcagaataaacttgctttataatcaatataatctctgggcctttgaatctaacaggacacctgggtcccagacgcctgggaattgggtctctcaattccctttggttttggagggaggagtttaaaactgtgcatgggaccaggagggactcaagggtggcagtggtgagtgggagggaaatacacttttgggatgacttcgtcacccctgagagaggggtgtgagttacccagggaatgggtagggaaggtttaaagcaacacccaaggaaagaagggaaactcatctcttgtagtgattcaaccctgagaacagatggggagtggggttggctgtcccccatggatggatgaaaggtcacctaatcagtagtcaccaggacatagtggtggaggcacaagtggccaaggagtgctcatttggtggagactgggaaagcggctgttatttagtgtctgtgtagtagagggagcgcagctggtcccagaagaagagggagaggatggtgtgggggccgaggcggaagtaggaggcacctatacccttgtacatgccaaaaatgccctcggtccgagctgtctgcagcagagcgtccagtatcccccggtacatgaggcccttgccctgtgcatctgtgcggctggttgtagagccttgtgcaggccacatcaaagggtgccatggccaagacaactgctatgccactcatcatggcagccaccagcgccaacttccagctctggggaggaaagatctcccactggctcaggaggtccttggtggatgagaaggtgcacagctgggtggaggaaccgacgataactcggggcaggccgcccagagccccacgccataaccccaccagaccatgtttctggccaatctcggttagcgcctgaaacatgccctgatgcttatactggtgccctacagcaatttctgaggctgcctgtgcctgcaggtgtgtcttcaccatgtagatggggctccccaagtaggctcccatgaccccagccatggccccagctgctgcgctgcgggcaggactgtgggtgccttcggctgtgtgcaggtagcccccagcctcagccagcccataggtgcccagtcggatgccattcatcaggaactggtacaagagggaaagggacaggcctttctgcaggccagcaaggccatccacctgccgaggtgataatcaaccgctttgcgatc

SEQ ID NO: 2801 - DNA, 816 bp, Homo sapiens
ggcaggccggcggggagccccccggggcgcacggagcccgcgcgccctccgggaccctcccccgtccctgggccggacctgtgggcgccgggagtccgggcagcgttcggcgcgccgggccggggtggcgggcggccccgggacccgggcagctggagaaggagccggagcccggccaggatgagaaggtgacgccgccgggggcgccactcgctttgtggggggaagatgctcgcctactgcgtgcaggatgccaccgtggtggacgtggagaagcggaggaacccctccaagcactacgtatacataatcaatgtgacctggtctgactccacctcccagactatctaccggaggtaccagcaagttctttgacctgcagatgcagcttttggattaagtttcccatttgaaagtggccagaaggaccccaagcaaaggatcatccccttcctcccaggcaagatcctcttccgcagaagccacatccgggacgtagctgtgaagagactgaagcccatcgatgaatactgccgggcacttgtccggctgcccccccacatctcacagtgtgacgaagtcttccggttcttcgaggctcgacccgaggatgtcaaccctccaaaagagcaaggcccctcacccccagatgcagtcctcccatatggtgtcaacaagggcaaacaggagctaaaggcaggcccaaactggcccggcaggactcaccacgtggtcaactgcgtgacccagaaatgcctctttgtgttccattttaaattctcatccagtggaaataaggaatctaaaagtctttga

SEQ ID NO: 2802 - DNA, 3785 bp, Homo sapiens
ttttttttttttcttcccacctctataaacccgcccagtttcatactttggagcgaaagatttcgaaactttttcccatgcagccggaaataactggggtcagcatgaaacagtacattttcttcctagaggcagttacatggaaaaccaggttattatcaggttatttagcaagtatggaatccaaacaagaggagactaatcttaagacctataactcgtccatgaaggcttggggcacacttttctaccaccagaatgccttagcttccagaaagctgtggactcttccctctccgtcttggtctggctgagtaccgctactgctcagtcacttcctgcagccataccgtcaggccagcttggcctaaaagctgttatctctggtcactggtttgtgttgttacagccactgctactaacagttaaggttctgaagggggcatgtcaattgctcccaggtaccaactaggagacacaataatcctattagtttgttctcccaaacccactccagtttatcaggtaatatgctctgtaaggttctttccaaccccattagcacatacatagattacctataatttcacctaatgtaatctaccttcctactgaggattgaggttttaacgtttgttttttttccccccactttcttgatcagtgattctcaaccatgtaggaattaatgaaaccaattctgtatcaccactgcaaccaagacagcaataccaagtgatatgtatttttcaaactaatgtcattttgttctctatactgtaaaaaacgagaagatgcagtcctcaacttagaactcaatactaggaagggtcaagttgtcaaaaaatgtctttcaacagtagaaaagtttgctttcaaattaaaaaacaaagcacgtattgcaaacatcgtgtaatgataaaattacagaaaaaaatatattcagaatgacccatggcattcacgccataccagaattttgcctgtaacaaaacagagaattttatcccaaaaagtaggttaggtccatgctggctaaaaacttcagtcccagacccaataaatgaggatgaaatacatagtgcatgcttaacagacattgcatatacatcaacaattctttaatgcccctctctagggttttgagggaaggagggatgaaatgtggacatgtgcactcacaaaggcagaattttcttcctattataaaaagtcacacgtgaccctttactatgttttgggcaatagccaagattttatctgtgggaatccacctttgaaaatcacaacaaaaatcaatagtaagtgatttaatataaaatatacaaatttctcagtatgaggactttcacagaaaaggaaggagacaacaatgaaaatgaattttcttaaaaaataacattcccttattttgtccctgctactcaacactcaaaaacaagtctgtacaaaactaggaacacagaaaaggaccagagaggatgttacactgtaaagtcttaggacctactctaaacttctgtcctcatcaagaccctcacctagagacctgagggttcccaggtccactggagaaagtaagtagtctccgatcatcacccttgcttcaccgaagatggcctcaggtcactcgctgtcaaacttaatagaattgacctggacagagattgagcctccccggtagctgccccgcttcttcttggttttctcatgccgaaaggacttgcctttggtgaacttcaaaacctgattggctcgctctccccagtctccggctgcacctcgcttggcatcaaaggagttgtccgcaactcgtgaatccacctcaatttcctcctccctgacccttcggaatggggatgatgcccttttttctcctttcttcctttttggaaatgtgttaggggtctgaagctttatcttcttggcctgaggagtctctgcctccttggcagcctcattctgcttccgcttctttaatgaacctgatttggaaactaccactgccgcctttttcttttcttcttcctcctcctcactgttcttagctgcttttccattctgggcagtcagtgcagaggtgccattggccttgggggcttgtggtcttggagagcccttgcccttgagcttctcttcctcttcctcactggagtcatcagaagaagaactgttgctgctctcagcctttcctttctttgcagaggctggcttggaaggggctgcacctcctgctaccttctgtggcttcttcttaactgcagacttagatgtcttctcttcctcctcctcactgctggagctgtctgaatcagagctgctgtccctactaccctgaggagcctgcttggcaggcagagatagagctgctttggcagtcgccttgggcttagtggtggccaccatcttctttgtcttctcctcctcactggagctgctctcttcctcactggagctgctgtcagcctttctcgtcagaagcttctggccaccgcccacaggttgcttgggggctgcagctggcttcactgcaggtgacttggtggtgacagctggcttatttgaagaattcttggtggtaccagctggcttagaaggagcttcatcatcctcagagctgtcagagtctgagctgtctgaagagctctctgctgctttctttgctggaggtggtttagtggttgctttagagactactgccttagttgggggtttcttctcttcttcagaacttgaatcagactcatcactgctgtcttcactgctttccacaggctgctgcttctccacagccttcttgggaggctgggttcccagagacttctttggtgggggagcagaaggcggggggactgaactgtagggacctggtttatttttcatgggttttttttgctcctcttcctcgtcactggaggaatcctcactgctagaactcttccgggtaggggtggtagctgctttcactggggccttggccacaacttgctttttaggtacagtcttcttgggggtggctgctgccttctcctcctctgagtcatcactgctactgctgctgctgctgctactgctgctactggctgctttaccattggctattttaggtgctggctcgagctggtttgggaggggctttagtctgagctttaactgtcacagggtgttatctttggcttctggttctttggtggctcatcctcggagcttgagtcagaatcagaatcagagctcttggccttcttaggaggagcttggcctgccttggcttggggcttaactcccttctggacaggctgtttcttttggtcctcctcatcatcatcatcactggactcttcactgctgctactctctgatgctttggctgcagccttcccaggaggcagaccgactcgcttggcaggtacagcagccttctttgctggaggcccttgaacttcctcctcctcctcgctgctgtcctcactgtcactggatgaggccttcttcttagctttcttagccactggtccatttgcctgtaactttcgctctgggaccttggcagacctgttgagccagaagctatagatgtctaagagggaagaggcattggcatcctgctgtgtagctcctgtcgctttggcgaacttattggccacctctgagagttggttatcgcgcaggaagccgagcacgaggggatacaggtcgctgggaaccacgcggcgaatgccggcgtccgccatcctccaggcaatacgcgtcactaccgttgtcgacgcagcacgacccacgaattc

SEQ ID NO: 2803 - DNA, 7150 bp, Homo sapiens
  misc_feature (1)...(7150): n = a,t,c or g
gaattccagagggcccgccctttcggcagaacacacctcttctttggtgccttctctgcatatcaccacactgggtcaagagcaagccatcctttctggggcggttcccgcatcaccatcaactgggacagccgactttccctccatacttactttcctccagcccacagagaatcatgcctccccatctcctgtgccagaaatgcccactcttccagcagagggcagtgatgggtcccctcctgcaactagagacttgctcctctcaagcaaagttcctaatcttctttccacatcttggacatttccccggtggaaaaaggacagtgtgacagccattttagggaagaatgaagaggcaaatgtgacgattcctctccaggcctttccaaggaaagaggttttgagtcttcacactgtaaatggatttgtctctgatttcagcaccggtagtgtctcatctcccatcattacagcaccaaggacgaatccccttccttcaggaccacctctaccttccatactctccatacaagccacccagactgttttcccatctctcttggctttttccagcaccaagccagaggtttatgcagctgctgtggaccattctgggttgccagcttcagctcccaaacaggtgagagcatcgccctcctccatggatgtatatgattccttaacaataggagacatgaaaaagccagcaaccacagatgttttctggagttctctttcagcagaaactggatctctttccacagaatcaataatatctggcttgcagcagcaaacaaattatgatttaaatggacacacaattagcaccacaagttgggaaactcatttagctccaacagctcctcccaatggtttaacttcagctgccgatgccataaaatctcaggatttcaaagatactgctgggcattcagtgactgcagaagggtttagtattcaggatctagtcctcggtacaagcattgagcagcctgtgcaacagtcagacatgaccatggttggaagccatatagacctctggcccacaagcaataacaaccattccagagacttccaaacagctgaagttgcatattactcacccacaactcgacattccgtgtctcatcctcagctacagttgcccaaccagccagcacatcctcttttgctaacctcaccaggaccaacttctacaggtagcttgcaggaaatgctttcagatggaacagatacaggttctgaaatttccagtgacatcaattcatcacctgagagaaatgcttccacaccattccagaacatcttgggatatcactctgctgctgaatcttctatatcgaccagtgtctttcccaggacctcctccagagtgctgcgggcttctcagcaccccaagaaatggacagcggacacagtatcatctaaggtacagccaacagcagcagctgccgtcacattgtttctgaggaaatcaagtccacctgcactgtctgcagccctggttgctaagggcaccagcagcagccctttggccgtggcctcaggaccagctaagagcagttcgatgactactcttgctaaaaatgtcacaaacaaggccgcatctggcccaaagaggacaccaggggcagtccatacagccttcccattcacaccaacctacatgtatgcaagaacaggacataccacgagcacacatacagccatgcaaggaaacatggacactgcctctggcctgttgtctacaacttacctccccaggaaaccacaagccatgcacaccggcctcccaaaccccaccaacctggagatgcccagagcatccacgccacgcccactgacagtcacggccgcgctgacatccattacagcctcagtgaaggccacccggttgccaccattgcgagcagaaaacacagatgctgtccttcctgctgcatcggctgcagtggtcacgactggcaaaatggcatccaacctggagtgtcagatgtccagtaagctcctggtgaagacagttctctttctcacccaaaggagagtgcagatcagtgaatccttgaagttcagtatcgccaaagggctcacacaggcattgcggaaggctttccaccagaacgatgtctcagctcacgtggacattctggaatattctcataatgtcacagttggttattatgctaccaaagggaagttggtgtatttgcctgctgtggtgatcgaaatgctgggtgtgtatggagtcagcaacgtcactgcagacctgaagcaacacaccccacacttacagtctgtggcagtacttgcctccccatggaatccccagcctgcaggctacttccagctaaaaacagtgctgcagtttgtgagccaagcggacaacatacagtcctgcaagtttgctcagacaatggaacagaggctgcagaaggcattccaggatgccgagaggaaagtcctgaataccaaaagcaacttgacaattcagattgtgagcacgtccaatgcctcccaggcagtcaccttggtgtacgtcgtgggcaatcagagcacattcctcaacggcaccgtcgccagcagcctcctcagccagctctcggctgagctggtgggattctacctcacctatccgccgctaaccattgctgaaccactggaatatcccaaccttgacatatcagaaacaaccagagactattgggtaattacagtgctgcagggtgtggacaattcgctggtgggcctgcacaaccagagctttgcccgggtcatggagcagcgcctggcccagctattcatgatgtcccagcaacaaggccggcggtttaaacgggccaccaccctgggaagctacactgtgcagatggtgaagatgcagcgtgtcccaggcccgaaggacccagcggagctgacttactataccctgtacaacgggaagcctttgttggggaccgcagctgccaagatcctgagcaccattgattcccaaaggatggccttgacccttcatcacgttgtccttctgcaagctgaccccgtggtgaagaacccgcccaataacctgtggatcatcgctgcagtgctggcgcccattgccgtggtcacggtcatcatcatcatcatcactgccgtgctctgcaggaagaacaagaacgacttcaagcctgacaccatgataaacctgccgcagagagcaaagcctgtgcaaggctttgattatgccaagcaacacctgggccagcaaggggcagatgaggaggtcatccctgtgactcaggagacagtggttctcccactgcccattagagatgctcctcaggaaagagacgtcgctcaggatggaagcaccatcaagaccgccaaatccactgaaaccaggaagagcaggtcgcccagtgagaatggctctgtcatcagcaacgaatcagggaagcccagctcagggagacgctcaccccagaatgtaatggcacagcagaaagtgacaaaggaggaggcaaggaagagaaatgtgccagcgagtgacgaagaggagggagcggttctatttgacaactccagcaaggtggccgctgaaccctttgacacatcttctgggtctgtgcagctcattgccataaaacccacagccctccccatggtgccccccacctcggacaggagccaggagtcatcggcagtcctcaacggcgaggtgaacaaagccctgaagcagaagtcagacatcgagcactatcggaacaagctgcgcctcaaagccaagaggaagggatattacgacttccctgcagtggagacgagcaagggtctgaccgaaagaaagaagatgtatgaaaaagccccgaaggaaatggagcatgttttggatccagattcagaactctgtgctccattcaccgagtctaaaaacaggcaacagatgaagaactctgtctacagaagccggcagtctctgaacagcccgagtccaggggaaaccgagatggaccttctggtgactcgggagcgaccccggcgtggaatccgcaacagcggatacgatactgagcctgaaatcatagaggaaaccaacattgacagagttcctgagccccggggctattccaggtctcgacaggtgaaaggccactcggagacctccacactgagctcccagccatccatcgacgaggtcaggcagcagatgcacatgctgctggaggaggccttcagcctggcatccgcgggccacgcaggccagagccggcaccaagaggcctacggctcagcccagcacctgccctattcggaggtggtgaccagcgctccggggaccatgacgcggcccagggccggggtgcagtgggtgccgacctaccgcccagaaatgtatcagtacagtctgccccggccggcttacaggttttcccagcttcctgagatggtcatgggctcaccgcctccacccgtacctccccggactggtcctgtggctgtcgcttctctcaggcgatccacctcagacatcggcagcaagaccagaatggccgagtctacagggcccgagccggcccagctgcacgacagcgcctccttcacgcagatgtccagaggccctgtgtccgtgacgcagttggatcagtcggctttaaattactcaggtaatacggtgccagcagtgttcgccatcccagctgccaacagacctggcttcaccggctacttcatcccaacgcctccctcatcctataggaaccaggcctggatgtcctatgcaggagagaatgagctcccgagccagtgggcagattcggtgcccctcccagggtacatcgaggcctacccccgatcacggtacccccagagctctccctccaggcttcctcgtcagtacagccagccagccaacctgcaccccagcctggagcaggccccggcgccctccacagcggcctcgcagcagagcctggcagaaaacgacccgtctgacgctcccctgaccaacatctccactgcggcccttgtgaaggccatccgggaggaggtggccaagctggccaaaaaacagacagacatgtttgagttccaggtctaacgccttagccctgtgggactctggacttccaaactctgaggactcagcctttgggtttcccatgcctacgtgttaggacttgagacatagcaatgggtgagtctttctcaccctccatttctgaaaaggtgaactatggggcttctgggaacaggaaactcttgaacgactagattcttggctcatccaactgattgtgggtcaagtccctggcttggggccttatgtttgatactctctcatgtcaaatgtttgaactttgggcatgtgccctatggaagcttagtcacaagaggcactagctaatctacagattcctatccaatgccacattttaataaatcaccggaagcgggagaatgtagctcttatcttcggtgacctctgcatgttaactctgtttctgtgttaaaggcaatgcaggagtgtggattaagcaccagactgtattctcattcaaccatgaccgtgcgcattaaaatcagtttgtaagggagacactgactccagccaagaaacctgagccccttttttttaggttcatattcaaagtcaaatgaactggatgaaagtcagtaccaatggctgtgcctataaatagacctgattctttgtttccctcgtcaattaaacaaaggccaagaaagagagaagatgagagggaatggtggatttgcgttgacagattttttaaaaggtgtttgccattttgggaattaaagtcccctacaagttaggatctaactgaaagagaatcggtgctaagagcttttaggatcctacaaaagaaacacagttatttgtgaaggtttttctttgccttgttttgaaggtggcctgagaatggagcttctctttttcttgggataatagatacatcaacttttacaagaaaatctctgtctcttcaacaatgatgtccagtgtgtgctgctgagtggtacaaaaggaaatagtacttgattcctgttagaaacaggagtggtagaaccacagtcttcccaggccgcagcctctgtttatagaagcttctgaatgtagaaaagctgttgaatttcatttaaatgtaaataaccttttaaaaagcgtatggagttagccagttccccctagttaatggacataggaagacatttgctgaaatggtagggtggccactttgtgaccatgatgttgcaagttgccctccctggcatggtgagttggcttccagagctgtgggtagaggacatcgcctcacggcactgaggcaccagccgctgcctacccatcaatgcaagcaaaacagctactgactttgtgtagcagggagattggggactctggttccctcgccaagtgtggcaagcctggtgcaagtgttggggggcttacttgggtatctgttgggagaattgaggtcctgtcctgcttttcacccccatgacccatctagccttcagcctgtatcccattttccttcctgaagcccccatccttcccattgtccctcaacgagtttcctttggcctttacctgaaagaagatagtagaaatttaaaagttgagagaagactagaaatggaactgattagaaggggaggttcaaactgtcaatgcacagacttttcaaagaagttgtttatattttcccaatggcaaactgccctttctggaatgttcagagatgatgtgtcatggaaccttcaaacaagtctcttgttcggatgataataggtagtgtccttttagtatgctggttgatctttcatagtgttagtgttttgttacttaaaaaggaaatcagcttataaataaaatgtatttttgtaattcccgtgtgtatatatggtatatttctatcaatggccagttgttgtagtccaaaacctaaatcagtttgcaaaacactgtggacagtgcgagattttattgacaggttaacacaatgcctacgtctatccacatagggcattcaatgcacttgaatgaaccaaaggagccaaagaaactcagcctgttcatgcaaatgggtatgagtctggataaaatcagctacattgtccnggctttatccantaattaatattt

SEQ ID NO: 2804 - DNA, 1977 bp, Homo sapiens
catgaagggcctctacacagacgccgagatgaagtctgataatgtgaaggataaagatgcaaaaattagcttcctacaaaaggccatagacgtggttgtaatggtgtcgggagagccactgttggccaaaccagcccgaatcgtggcggggcatgagcctgaaagaacaaacgagctgctccagataattggaaaatgctgtctcaacaagctctctagtgacgatgcggtgcggagggttttagctggagagaagggagaagtgaaaggccgggcctcactgacctcaagatctcaggaattggataataagaatgtgcgagaagaagagtccagagttcacaaaaatacagaggatagaggagacgctgaaataaaagagagaagtacaagcagagatcgaaaacagaaggaagaattgaaagaagaccgcatgccaagagaaaaggacaaggacaaggagaaggccaaggagaatggcggaaacagacacagagaaggggagagagagagagccaaagcccgggccaggccagacaacgagcgacagaaagacagaggcaacagggagcgggacagagactccgagcgcaagaaggagacagagagaaagagtgagggggggaaagagaaggagagactgagagacagggaccgagagcgcgaccgggacaaagggaaggacagggacagacggagagtgaaaaacggggagcactcctgggacctggacagggagaataacagagagcatgacaaacctgagaaaaagtcagcaagctcaggggagatgtctaaaaagttatcagatggaacttttaaagactccaaggctgaaacagagactgagatttccactagagcttccaagtcattgacaacaaaaacatcaaaacggcgatccaaaaattcagtggaaggtgactccaccagtgatgcagaaggagatgctggacctgctggccaagataagtctgaggtgccagagactccagaaattcctaatgagctttcatccaacatcagaagaattcctcggcctgggagtgcaagaccagcccctccccgggtcaaacggcaagacagcatggaggcgctacaaatggataggtcagggagtggtaaaaccgtttcaaatgtgattacagagtcacacaattctgacaatgaagaggatgatcaatttgtggtggaagctgcccctcagctctctgaaatgtcagaaattgaaatggtaacagcagtggaactagaagaagaggagaagcatggtggacttgtgaaaaaaattttggagacgaagaaagattatgagaaattgcagcagtcacccaaacctggggagaaggagcgatctctctttgagtcggcatggaagaaggagaaggacatcgtttccaaggagatagagaagctccgcacgtccatccagaccctgtgcaagagcgcacttcccctggggaagatcatggactacatccaggaagacgtggatgccatgcagaatgagctgcagatgatatcacagcgagaacaggcagcacgccgaggccctgcagcaggagcagaggatcacagactgtgccgtggagccctttaaaggctgagctcgcgtgagctggagcagctgatcaaagacccagccaagacaagatctgtgctgtgaaggccaacatcctcaagaatgaagaaaaaatccagaaaatggtatatagtatcaatttgacttcgagaaggtgaacactcaaaagtttcagagatgaaaagtcacctcagtttaaaagcaaaaaggaagatagaaaatcattactcttttaagttccagtttgctaagaaaatgaacagtttacaatgttattatccagctaattttcagagctttaaaactgtaagcatgttaagtgtattaaaaaaaccatgttttcttacctccttccagatggaatactggctagttataaatagcgcttccaaaca

SEQ ID NO: 2805 - DNA, 5164 bp, Homo sapiens
atgaggacacttgggacttgcctggcgactttggccggacttttgctaactgcggcgggcgagacgttctcaggtggctgcctctttgatgagccgtatagcacatgtggatatagtcaatctgaaggtgatgacttcaattgggagcaagtgaacaccttgactaaaccgacttctgatccatggatgccatcaggttctttcatgctggtgaatgcctctgggagacctgaggggcagagagcccacctgctcttaccccaacttaaagaaaatgacacccactgcatcgattttcactattttgtgtccagcaagagtaattctcctccggggttactcaatgtctacgtgaaggtcaataacgggccactggggaatcctatctggaatatatctggagacccaacacgtacatggaacagggcagaactggccattagtactttctggcctaacttttatcaggtgatttttgaagtgataacttctggacatcaaggctatctcgctatcgatgaggtgaaggtgttaggacatccatgtaccaggactcctcacttcctgcggattcagaatgtggaagttaatgctggccagtttgctaccttccagtgcagtgccatcggcaggaccgtggcaggagacaggctctggttacagggcattgatgtgcgagatgctcctctgaaggaaatcaaggtgaccagctcccgacgcttcattgcttcatttaatgttgtgaataccaccaaacgagatgctggaaagtaccgctgcatgattccgcactgaaggaggtgttggaatatcaaactatgcagagttgggtagttaaagaaccacccgttcctattgccccacctcagctcgcctctgtaggagccacctacctgtggatacagctcaacgccaactccatcaatggggatgggcccattgtggcccgagaggtggagtactgcacggccagtgggagctggaatgaccggcagccagtcgattccacgagctataaaattggacaccttgacccagatacagaatatgagattagtgtgctcctgaccaggccaggggagggtggcactggctctcctggtccagctctcaggacaagaacaaagtgtgctgatcccatgcgaggcccaagaaaactagaagtagtggaggtcaaatctcggcaaatcactatccgctgggagccatttggatataatgtaactcgttgccacagttataatctcactgtccactactgttaccaagttggaggacaagaacaagtgcgagaagaagtaagctgggatacagaaaattcacaccctcaacacacgatcactaacctgtcaccatacaccaatgtcagtgtgaaactgatcctcatgaacccagagggccggaaggaaagccaagaactcatagtgcagacagatgaagacctcccaggtgctgttcccactgaatccatacaaggaagtacctttgaagagaagatatttcttcagtggagagaaccaactcaaacatatggtgtaatcactttatatgagatcacctacaaagcagtcagttcctttgacccagaaatagatttatccaatcagagtggaagagtttcaaagctgggaaatgaaacccattttctgttttttggactgtatccggggaccacatactcctttaccatccgagctagcacagctaagggttttgggcctccagcaacaaaccagttcaccaccaaaatatcagcaccctctatgccagcttatgaacttgagacacctttgaatcaaactgacaataccgtgacagtcatgctgaaacctgcccacagcagaggagcacctgtcagtgtctatcaaatagttgttgaggaagaacgtcctcgaagaactaaaaagacgacagaaatcttaaagtgctacccagtgccaattcacttccagaatgcttctctgctgaactcacagtactactttgctgcagaatttcctgcagacagcctccaagctgcgcagccttttacaattggtgataataagacatataatggatactggaacactccccttctcccctataaaagctacagaatttatttccaagctgctagtagagccaatggggaaaccaaaatagactgtgtccaagtggccacaaaaggagctgccactccgaaaccagtcccagaacccgagaaacagacagaccatacagttaaaattgctggagtcatcgcgggcatcttgctgttcgtgattatatttcttggagttgtgttggtaatgaagaaaaggaaacttggccaagaagcggaaagagaccatgagcagcacccgacaggagattgacttgtggattggtgaactcaatggaccaagaagctatgctgagcagggcacaaaacttgcgacgagggctttctcattcatggacacgcacaatctgaatgggagatctgtgtcttcaccatcgtccttcacaatgaaaacaaatacactgagcacatcggtgcctaattcctattacccagatgaaacccacacaatggccagcgataccagcagcctggtgcagtcccatacttacaagaagcgagagccggccgacgtgccctatcagactgggcagctccaccccgccatccgggtggcagacctccttcagcacatcacacagatgaagtgtgcggagggctacggcttcaaggaggaatacgagagcttctttgaagggcagtctgcaccatgggactcggctaagaaagatgagaacagaatgaagaacagatacgggaatatcattgcatacgatcattcccgagtgaggctgcagacaatagaaggagacacaaactcagactatatcaatggcaattatatcgatggttatcatcgacccaatcattacattgctacccaagggccaatgcaggaaaccatctatgacttctggaggatggtgtggcacgaaaacactgcaagtatcatcatggtgaccaatcttgtggaagtgggaagggtcaaatgctgcaaatactggccagatgacacagagatatataaagacattaaagttaccctaatagaaacagaactactggcagaatatgtgataagaacatttgctgttgaaaagagaggtgtgcatgaaatccgagagatcagacagtttcacttcactggctggccggatcatggggtcccctaccatgccaccggcctgctgggattcgtgcggcaagtcaagtccaagagcccgcccagtgcaggcccactggtggtgcactgcagtgctggtgcagggaggactggctgtttcatcgtcattgatatcatgttggacatggccgaaagggaaggggtcgtagacatctacaactgcgtcagggagctgcggtcacggagggtgaacatggtgcaaacagaggagcagtatgtgtttatccacgatgcgatcctggaagcctgtctttgtggggacacctctgtgcctgcttcccaagttaggtctctgtattatgacatgaacaaactggatccacagacaaactcaagccagattaaagaggaattccggacgctaaacatggtgacaccaacgctgcgagtagaggactgcagcatcgcactgttgccccggaaccatgagaaaaaccggtgcatggacatcctgcccccagaccgctgcctgcccttcctcatcaccatcgatggggagagcagcaactacatcaatgctgccctcatggacagctataaacagccttcagcttttatagtcacccagcatcctttgccaaacacagtgaaagacttttggagactggtcctggattatcactgcacatccgtagttatgctaaatgatgtggatcctgcccagttgtgtccacagtactggccagaaaacggagtacacagacacggccccatccaggtggaatttgtctctgctgacctggaagaggacatcatcagcaggatattccgcatttacaatgccgccagaccccaagatggatatcggatggtgcagcaattccagttcctgggctggccgatgtacagggacacaccagtgtctaagcgctccttcttgaagctcattcgccaggtggacaagtggcaagaggaatacaatggcggggaaggccgcaccgttgtgcactgcttgaacgggggaggccgcagtgggacgttctgcgccatcagcatcgtatgtgagatgctccggcaccagagaaccgtggatgtctttcacgctgtgaagacactgaggaacaacaagcccaacatggtcgacctcctggatcagtacaagttctgctacgaggtggccctggaatacttgaattctggctgatggtgtaaacagctctgcaaacaatccctttcataccacaaagccaagacgttccatggtatttgtgcaaaagagatgaagacttctcaatatgcttattttgctttgcataattggctctttttaagagcccaagaaagtgtttctaaaattgcttgcactgcccaatcccagtaatgctgctgcctgacagaaacacacacacagccacagttgccaaatcccgtactccttgccaccggcttcctagagcagcgtagacagctggtaaactgaagagcacaactatattcttatgaaggaatttgtacctttggggtattattttgtggcccgtgaccctcgttattgttacagctgagtgtatgtttttgttctgtggagaatgctatctggcattatggtaatatattattttaggtaatatttgtactttaacatgttgcataatatatgcttatgtagctttccaggactaacagataaatgtgtaatgaacaaagatatgttgtatgagtcgtcgtttctgtcagatttgtattgtttccaagggaaaagcttgggggaggactcagttcacaaaatgcaaaactcaacgatcagattcacggacccagagcttttccatgtgtttatattgtaaatatttttgatttcatcgaaattatttattcattaaaagaaatttttgtgaagcacagtgagtgacaatcatttttcttaaggcctggaaacgattttctgtatgatgttactttatgtgaattctcatctcaataaatgatgacccgtg

SEQ ID NO: 2806 - DNA, 1555 bp, Homo sapiens
  misc_feature (1)...(1555): n = a,t,c or g
tcgtcattacgcctagcttgtcacgagggatcaagttcatggaagtatatgctttttaaaaatcaaagggagactttgtgaccaacagggtcactgctgtagcaaaatataaaatatgccatggttaaagcagtaatgattttcttttgggtggggttcctagagattccaagaagacatcatgaaatatgtgagtgaaacatatcaccagtgaagttctgtctgcccggcactaactttttacttggcttgagttgtaggaggaacagacacctttacatattgcctcccgcctgggtaagacagaaattgtccagctgcttctacaacatatggctcatccagatgcggccactacaaatgggtacacaccactgcacatctctgcccgggagggccaggtgggatgtgggcatcagtcctattgggaaggcagggagcagcccactcctttaggcttaccaaggtaaggagaatgacatcatgagaacatggaccaagaggattcctaagtcatggcctttctgctctaccacatacagaatcaagagggtagatctcctcaggccttgacttacttccttctctacatatttaagactcattgtctaaatgatttaatagaattgtgagattccgtatatcttcaataaagagtgctgaatttcattctaattaatgccaatgtttctaggacaggtatctagtactctaagatgattttcactttttcttctcttttattataaaatccataatatattcttaagaaaaagataaatgaaatccctaaatatattgaactggtaatactaatgaggaagagggtactgcattagattggcagtactatatttgctgtgagttatagtaccagatcgaagctcaatttacttgtacattttcgcaaccctactattagccaccacttatttgacattctcattcccatattagtttccaactttaccaactacacttttgcctgggtatttacagtgtttaaagagagctgaagctggaaaatcacacttctttagttgttattgacatcgagcaaagaattttacttatgttccaagtttcatgacagggcagagtaatttttcccatgctttatacatgctgtttgacattccataattttggnagatgaccttagaataaaaccatgaatatacctcagcctaattagagcaaaattaattggagcccagtgcaagtgaatttgtcatggggcaaaataattcccccacaaatgtaacagtgattcagattaatgaaaggacaatttcaattctctcataatcagtaggtataagtacttcatccagggagagggaaagttgcaaatttaaactgagatagtgatgtggcatctgtccactttgtaagtaggagcagcccacttagctgttatggcttatctggttgcctgttatgacttacctggttgcctatggctgtaaaaggtattttgatataagaaattgacaattattgaagttcttgaactctgaaaagttggaaggattttaaaagttcttaaaaaaaa

SEQ ID NO: 2807 - DNA, 6390 bp, Homo sapiens
cttccccctgttaccatgtcagggaaatatataatggaagaacatgatagttattcggatcaggtgtggagtatagatgaactgccttctaaacaaggttactatttacagggaaattatctgcgttgtgtggcagaagttggttcctttgaacataatcttacaactgatcttctaaaccacttggtatttgtacagaaagtgttcatgaaggaagttaatgaagtaatacaaaaagtttctggtggggagcagcctattcctctctggaacgaacatgatggaacagcagatggagataaacctaaaattctcctctattccctaaacttgcagttcaagggtattcaagtaacggccactactccatcaatgagagctgtaagatttgaaactggattgattgaactggaactttctaaccgacttcaaaccaaagcttcaccaggaagtagcagctatctgaaactgtttggcaaatgccaggtggatttaaatctggcattaggacaaattgtcaaacatcaggtttatgaggaagctggttctgattttcatcaagttgcctattttaaaaccagaattggattaagaaatgccctccgagaagaaatcagtggttcttcagatagggaagctgtgcttattactttgaatagaccaattgtttatgcacagcctgtggcctttgatagagctgtgctgttttggctgaattataagggccgcctatgacaactggaatgaacaacgaatggctttacataaggatattcatatggctacaaaggaagtagtagatatgctacctggtatccagcaaacatcagcccaggcctttgggactccttttctccagctcactgtcaatgatctgggaatttgcctacctatcacaaatactgcacagtctaatcatactggagaccttgacactggttctgctttggtattaaccattgaaagtactctcatcactgcatgctcttcagagtctctggttagcaaagggcatttcaaaaacttttgtatccgttttgctgatggatttgagacatcatgggatgactggaaaccagaaattcatggggatttagtgatgaatgcctgtgtagttccagatggcacctatgaagtatgttcaagaactacaggacaagcagcagctgaaagcagtagtgctggaacctggacactcaacgtattgtggaaaatgtgtgggattgatgttcacatggatcctaacattggcaaaaggcttaatgctctgggcaatactcttacaacactgacaggagaggaagacatagatgacattgctgacttaaattcagtgaacatagctgacctgtcagatgaggatgaagttgatactatgtctcccactatccatactgaagccacagattatcgaagacaggcagcatctgctagccagccgggagaacttagaggaagaaaaattatgaagcgtatagtggatatcagagaactgaatgaacaggccaaagtaatagatgatctgaaaaaattaggtgcaagtgaaggaaccataaaccaggaaattcaacgttaccaacagttagaatctgtggctgtgaatgacattagaagagatgttcgtaaaaaattacggaggtccagtatgcgggctgcttccctaaaggataagtggggtttgagttacaaaccaagttacagccgatcaaaaagcatttctgcttctggaagaccacctcttaagcgaatggaaagggcaagttctcgagtaggagaaactgaagagctcccagaaatccgtgtggatgcagcatctcctggacctagagtaacttttaatatccaggatacatttccagaggagacagaactggaccttttgtcagtaaccattgaaggtccatcccattattcatcaaatagtgaaggatcatgttctgtgttcagttctcccaaaactccaggaggcttttcaccaggcattcctttccaaactgaagagggccgacgggatgacagtttgtcttctaccagtgaagattccgagaaggatgaaaaagatgaagaccatgagagggaaaggttttatatttacaggaaaccctcacatacgtctcgtaaaaaagcaacaggctttgctgctgttcatcagctatttacagaacgctggccaacaacaccagtcaatagaagtcttagtggcacagctacagagagaaatattgactttgaacttgatatacgggttgaaattgatagtggaaaatgtgtactccacccaaccacccttctacaagaacatgatgatataagtttgagaaggagttatgatcgaagttccaggagcttagatcaagattcaccttcaaaaaagaagaagtttcaaactaattatgcttctaccacccatttaatgaccggcaagaaagtgccatcatctctacagacaaagcctagtgacttagaaacaacagtattttacattcccggagttgatgtaaagttgcattacaattccaagacgctaaagactgaatcacctaatgcctccaggggatcttccttgccaagaacactgtccaaagagtccaagctgtatggtatgaaagatagtgcaacatctcctccttctcctcctttaccttccactgtccagagcaagactaacaccttacttcctccccagcccccacctattcctgcagccaaaggaaaaggaagtggaggagtaaaaacagccaagttatatgcctgggtagcacttcagtcattgccagaagaaatggttattagtccctgcctattagactttctggaaaaagctctggaaactatcccaattacaccagttgaaaggaattatacagctgtcagctcacaagatgaagatatgggacattttgaaataccagatcctatggaagaatccaacaacatcactagtgtccgtcttcaacatctgcttactcttccttccctgtagatgttgtggtttatgtacgagttcagccctcacagatcaaatttagctgtttaccagtatcaagagtagaatgcatgttaaagctgccatccctggatttggtgttttcttcaaaccgaggagaactggagactttagggactacatatcctgcagagactttatcccctggaggtaatgctactcagagtggaacaaagacttctgctagcaaaactggaataccaggttcatcgggattaggcagccctcttggccgaagtcgacatagtagtagtcagtcagacctgaccagttccagcagtagttcatctggcttgagcttcactgcatgcatgtctgacttttccctttatgtatttcatccatatggagcagggaaacaaataactgctgtttctggcctcacacctggatcaggaggattagggaatgtggatgaggagcccacttcagtcactggtcgaaaagattcactcagtataaaccttgagtttgtaaaagtgagtttgtcacggatcaggcgttcaggaggtgcctcattttttgaaagtcagtctgtaagcaagtctgcaagcaaaatggatactacgttaataaatatatctgctgtttgtgatatagggtctgcctcctttaaatatgatatgcgccgactcagtgaaattctggcatttccaagagcatggtatagaagaagtattgcaagacgtctattccttggagaccaaactataaatttgccaacatctggcccagggacacctgattccattgaaggggtaagccaacacctttcccctgaatcatcaagaaaagcttactgcaagacctgggagcagccaagtcagtcagcctccttcacccacatgcctcagtcacctaatgtgttcaatgagcatatgacaaacagcaccatgtcaccagggacagtaggacagagcctaaaatccccagcttccataagatcaaggagtgtatctgattcttcagttcctcgaagagattcactttcaaaaacatcaactccttttaacaaatcaaacaaagcagcaagccaacaagggaccccatgggaaacacttgtcgtgtttgctatcaacttgaagcaattaaacgttcaaatgaatatgagtaatgtaatgggaaatacaacttggacaactagtggtttgaagagccagggccgtctgtcagtaggaagtaatcgtgatcgagagatcagcatgtctgttggtctgggaagatcacaattagattctaaaggaggagtagttggagggaccatagatgtcaatgctttggagatggttgctcatatttctgaacatccaaatcagcaacccagtcacaaaattcagattactatgggttctactgaagctcgtgttgattacatgggctcaagtatcctcatgggcatcttcagtaatgctgatcttaagcttcaggatgaatggaaagtaaacttgtataatacattggattcaagcataactgataaaagtgagattttcgtccatggagatttgaagtgggatattttccaagtaatgatatcaaggtcaaccacaccagatctgataaaaataggaatgaagctccaggaatttttcacacaacaatttgataccagcaaacgagctctgtctacctggggaccagttccttaccttccgccaaagacaatgactagcaacctagaaaaaagttcacaagaacaattacttgatgcagcacatcatcgacactggcctggagtattgaaggtggtatcaggatgccacatatccttatttcagattccattaccagaagatggaatgcaatttggaggatcaatgagcttacatggaaatcatatgacactggcatgttttcatggtccaaattttcgttcaaaatcttgggccctttttcatttagaagaaccaaatattgctttttggactgaagctcagaaaatctgggaagatggctccagtgatcattctacatatattgtacaaacactagattttcacctgggtcataatactatggttaccaaaccatgtggtgctttggaaagtcctatggcaacaataaccaagataacaaggcgtcgccatgaaaatccaccccatggagtagcaagtgtgaaagaatggttcaattatgttacagctacaaggaatgaagagctaaatctgcttcgtaatgttgatgctaacaacactgagaatagcactactgtgaagaattctagtttgttgagtggattcagaggaggttctagctacaaccatgaaacagagactatctttgcattaccaaggatgcagcttgactttaaatccattcatgttcaagaaccacaggagccttcattacaggatgccagcctgaagccaaaagtagaatgtagtgtggtgacagagttcactgaccacatttgtgtgactatggatgctgagctcatcatgtttcttcatgatttagtatcagcttatcttaaagaaaaagaaaaagccatctttccacctcggattttatctactcgaccaggacaaaaaagtccaattattatacatgacgacaattcctctgataaagatagagaagatagcatcacttatactactgtggactggagagattttatgtgcaatacatggcatctagaacctactcttagattaatttcttggactggaagaaagattgatccagtaggtgttgattatattcttcaaaaattgggctttcatcatgctaggactactattcctaaatggcttcaaagaggagtcatggatccactggacaaggttctgtcagttcttatcaaaaagctcggtactgcactacaggatgaaaaggaaaagaaaggcaaagacaaagaagaacactaaaaaagtaatttgatctgtgaacaaattatgattgtgtctgttttattacactggagtgtttttttagtataataatttgaaatataactttaaaataattctaaatttgtggctataattaaaagtttgtaagttaacctgttctagttccatcattctgtgtacagtgaagtattgcatgataatgtaaattttgtgaaaaactagattaaaatatataactgcttgttatggtttataattatataatgtgcaatacaattcctgcatctttaaaatgtctgcagaataactgtgaatttttttgttattggattggccgtaacttttagaaaaaaatcttgttgatgataatgtgattttggggaggtcattaattgctttttcttttttaaatgtagacttatataaatacctgtttgtatatagcttgagtaattgtgatatgattgtataccactaaaatattgttaactattataataaagtcacagtaatggtttaaaaaaaaaa

SEQ ID NO: 2808 - DNA, 836 bp, Homo sapiens
  misc_feature (1)...(836): n = a,t,c or g
caaaatggctctactcccctacatcatgcagcttccaaaaacaggcatgagattgctctcatgttactagaaggtggggctaatccagatggtaaggatcattatgaggctacagcaaagcaccaggccacagccaagggtaacttcaagatgattcatatccttctgtactacaaagcatccacaatcatccaagacactgagggtaacactcctccacacttagtctgtgataagagtggaagaagcaaaactgctggtgtcccaaggagcaatatttacatagagaataaagaagaaaagaanccccacaagtggccaaaggtgccctgggtttagtactcaagagaatggtagaaggttaaacagcttggatttcttcttactttctatgttgtgatgctgtccccagtgtcctggaaactaacatacttgggcacaggacatcatctacaaatgttttctcaccttcaaagtcttataaacatgttgactattgttcctgctgaggttcttattctaaacttacggcttgctttctgggcactgagtaactgctgactgttctactgttgtcacatattcttgtatactgaatttcggctaattctgagtaagtgattccgtggctgttgttaatcttcagcaacctccgagcatgcaccttgtatcagtctctgaaatagaatagctccaatagcaacaggctagtcgttctgctagatggttctaggtggactccgtgatgttcctccatacagttaaacatcctaacttgtttctcaagctcactcaggcctatgccagacagttgtttttttccccaaccatgagat

SEQ ID NO: 2809 - DNA, 582 bp, Homo sapiens
  misc_feature (1)...(582): n = a,t,c or g
ggatatagtccctaatccaaagatggcccctctgggggatgaggcccccactctagaaaaggtcttgaccccagagctttctgaagaagaggtgtccaccagagatgacattcaattccatcacttctcttcggaggaagccctgcagaaggtcaagtactttgtagccaaagaggatccatcatcccaggaggaggcccacacgccagaggcacccccaccccagcctccttcctcagagaggtgcctgggagagatgaaatgtaccctagttagaggggacagctccccacgccaggctgagttgaagtctgggccagcatccaggcctgccctttgagaagccccacccccacgaagaggcttacaacccttcccagaagganggcacctttccaattggacgaagaggaccccttgaaagaggagggcgccccccaacgaggcagagggcctcttgagagaggaggtgctccccaaagagggagtgggctttccaaaagaggaggtgaccttgaaangaggaattggccccttaaagagggaagttgggttccaaaagaggaggtgccccccatagaa

SEQ ID NO: 2810 - DNA, 420 bp, Homo sapiens
  misc_feature (1)...(420): n = a,t,c or g
ncattctatgtgtcatttactggggacacatagtgtacaagacttttgtggcctctggtcccttgaaggagaataaaaatattaaaatagcttatttatttatttttttgactgccctaaattatgagggatgaattttacaaactttacttatattagtggtaacaggggaactggagagttttgcgccttctctaagctgcccggcaagaaccaccaatagcatgggggaacatacggtccttttcaagcccatggctctttcggcctgtagatgtcagcccacacatctccctgtgcttatagactgctttggagatccattgggtgtcaggatttcttctgatagctttatggaatggatcaatgaggataacctcaaaaaatttgtatgtgtaatcttcaccaacccaataagaa

SEQ ID NO: 2811 - DNA, 592 bp, Homo sapiens
ggctctggcagcagcttcactaaggtgggatggatagcagggtctcaggcacaaccagtaatggagagacaaaaccagtgtatccagtcatggaaaagaaggaggaagatggcaccctggagcgggggcactggaacaacaagatggagtttgtgctgtcagtggctggggagatcattggcttaggcaacgtctggaggtttccctatctctgctacaaaaatgggggaggtgccttcttcatcccctacctcgtcttcctctttacctgtggcattcctgtcttccttctggagacagcactaggccagtacactagccagggaggcgtcacagcctggaggaagatctgccccatctttgagggcattggctatgcctcccagatgatcgtcatcctcctcaacgtctactacatcattgtgttggcctgggccctgttctacctcttcagcagcttcaccatcgacctgccctggggcggctgctaccatgagtggaacacagaacactgtatggagttccagaagaccaacggctccctgaatggtacctctgagaatgccacctctcctgtcatcgagttctggga

SEQ ID NO: 2812 - DNA, 935 bp, Homo sapiens
gaaagcctgccagcacctattccacctcccagcccagcatggcacccctgctgcccatccggaccttgcccttgatcctgattctgctggctctgctgtccccaggggctgcagacttcaacatctcaagcctctctggtctgctgtccccggcgctaacggagagcctgctggttgccttgcccccctgtcacctcacaggaggcaatgccacactgatggtccggagagccaatgacagcaaagtggtgacgtccagctttgtggtgcctccgtgccgtgggcgcagggaactggtgagtgtggtggacagtggtgctggcttcacagtcactcggctcagtgcataccaggtgacaaacctcgtgccaggaaccaaattctacatttcctacctagtgaagaaggggacagccactgagtccagcagagagatcccaatgttcacactccctcgaaggaacatggaatccattgggctgggtatggcccgcacagggggcatggtggtcatcacggtgctgctctctgtcgccatgttcctgctggtgctgggcttcatcattgccctggcactgggctcccgcaagtaaggaggtctgcccggagcagcagcttctccaggaagcccagggcaccatccagctccccagcccacctgctcccaggccccaggcctgtggctcccttggtgccctcgcctcctcctcctgccctcctctcccctagagccctctcctccctctgtccctctccttgttccccagtgcctcaccttccaacactccattattcctctcaccccactcctgtcagagttgactttcctcccattttaccactttaaacacccccataacaattcccccatccttcagtgaactaagtccctataataaaagctgaagctgttctgcctaaaaaaaaattcaaaa

SEQ ID NO: 2813 - DNA, 2063 bp, Homo sapiens
gcgacgcggttgctgcggggctcgggttcttggggctgttcgcggctgaggtttggacctcctgcgtatagacggtttagtagtggtggtgcctatcccaacatccccctctcttctcccttacctggagtacccaagcctgtttttgctacagttgatggacaggaaaagtttgaaaccaaagtaaccacattggataatgggcttcgcgtggcatctcagaataagtttggacagttttgtacagtaggaattcttatcaattcaggatcgagatatgaagcgaaataccttagtggaattgctcactttttggaaaaattggcattttcgtctactgctcgatttgacagcaaagatgaaattctgcttacgttggaaaagcatgggggtatctgtgactgccagacatcaagagacaccaccatgtatgctgtgtctgctgatagcaaaggcttggacacggtggttgccttactggctgatgtggttctgcagccccggctaacagatgaagaagtcgagatgacgcggatggcggtccagtttgagctggaggacctgaacctgcggcctgacccagagccacttctcaccgagatgattcatgaagcggcttacagggagaacacagttggcctccaccgtttctgccccacagaaaacgtagcaaagatcaatcgagaggtgctgcattcctacctgaggaactactacactcccgaccgcatggtgctggccggcgtgggcgtggagcacgagcatctggtggactgtgcccggaagtacctcctgggggtccagccggcctgggggagcgcagaggccgtggatattgacagatctgtggcccagtacactggggggattgccaagctagaaagagacatgtccaatgtcagcctgggcccgacccccatccccgagctcacgcacatcatggttggactggagagctgctccttcctggaggaggacttcatcccctttgcagtgttgaacatgatgatgggcggaggtggctccttctcggctggtgggcccggcaagggcatgttctccaggctctacctcaacgtgctcaacaggcaccactggatgtataacgcgacctcctaccaccacagctacgaggacactggcctcctttgcatccatgccagcgccgacccaagacaggttcgagaaatggtagaaatcatcacaaaggagtttattttaatgggcggaaccgtggacacggtggagctggaacgagccaagacgcagctgacatcaatgctcatgatgaacctggaatccaggcctgtgatcttcgaggatgtggggaggcaggtgctggccactcgctccagaaagctgccgcacgagctgtgcacgctcatccgcaacgtgaagccggaagatgtgaagagagtcgcttctaagatgctccgagggaagccggcagtggccgccctgggtgacctgactgacctgcccacgtatgagcacatccagaccgccctgtcgagtaaggacgggcgcctgcccaggacgtaccggctcttccggtagaaccgctccccggcctgacagacccagggagctgcagctggagcccgttcccgtgcgtgttagtttggacacgaatttagtctaaaaagctgtctggttgtataaacggtgcaaacaatgtcgccacagcacccacgcggtttgcattcttttggaactcaatgtgccgatcagtggagtcagtatcgagcctgaccaccgcaagccaggaagcaggtgaagtgcccagcgctggagtgcagcgtgccacgaggagggcggtcggtgcttccctcctcgggctgtgggcacatggggccccgcaggttccttggaggagccctgagctgggaggcagcaaaggctgacctatcaaagcctcccggaggccaccgtgctgggtaccaggactcacctctgacaagcaggagaaggtaagggcccggtcagctccaaggagcgcgctccacgcgcgtgcacacagcttccctggtaataaagagctggcatctttcttaaaaaaaaaa

SEQ ID NO: 2814 - DNA, 759 bp, Homo sapiens
ctgtaggtgcccacagtttctatagtcaagaggagaacttctcccacaaatgacaaatgcaaatccccctagaagcgactggttgaggctggagtgcccaggacctttgatgggattgttggggaaggaggggcacaaagcaggagctgctggccctggggtgtcactgcccagacccctgctttctctgcagactctctgaactgcctaaagaactgcatgagcatcacgatgggctctgtgaggccctcggtggagcagttccataagtatcttccctggttcctgaacgaccggcccaacatcaaatgtcccaaaggcggcctggcagcatacagcacctctgtgaacttgacttcagatggccaggttttagcctccaggttcatggcctatcacaagcccctgaaaaactcacaggattacacagaagctctgcgggcagctcgagagctggcagccaacatcactgctgacctgcggaaagtgcctggaacagacccggcttttgaggtcttcccctacacgatcaccaatgtgttttatgagcagtacctgaccatcctccctgaggggctcttcatgctcagcctctgccttgtgcccaccttcgctgtctcctgcctcctgctgggcctggacctgcgctccggcctcctcaacctgctctccattgtcatgatcctcgtggacactgtcggcttcatggccctgtggggcatcagttacaatgctgtgtccctcatcaacctggtctcg

SEQ ID NO: 2815 - DNA, 759 bp, Homo sapiens; identical to SEQ ID NO: 2814

SEQ ID NO: 2816 - DNA, 1089 bp, Homo sapiens
gcgtcttcggtcatctccggcgcttctagggctggttcccgtcatcttcgggagccgtggaggtacgaacttaagacatgcctattttattaatttacttccaaacgcaacgaaaggtccatggacaatttgtgggccatttaattcagggcccccaattcgtacgtggagaagtgggaatgcaaaagtactttgacctttaaccttcggtccggcgcggtggagggaaacgcctccgtctctatataaggaattttccggtctcttcgggtcctttttcctctcttcagcgtggggcgcccacaatttgcgcgctctctttctgctgctccccagctctcggatacagccgacaccatgggtttcggagacctgaaaagccctgccggcctccaggtgctcaacgattacctggcggacaagagctacatcgaggggtatgtgccatcacaagcagatgtggcagtatttgaagccgtgtccagcccaccgcctgccgacttgtgtcatgccctacgttggtataatcacatcaagtcttacgaaaaggaaaaggccagcctgccaggagtgaagaaagctttgggcaaatatggtcctgccgatgtggaagacactacaggaagtggagctacagatagtaaagatgatgatgacattgacctctttggatctgatgatgaggaggaaagtgaagaagcaaagaggctaagggaagaacgtcttgcacaatatgaatcaaagaaagccaaaaaacctgcacttgttgccaagtcttccatcttactagatgtgaaaccttgggatgatgagacagatatggcgaaattagaggagtgcgtcagaagcattcaagcagacggcttagtctggggctcatctaaactagttccagtgggatacggaattaagaaacttcaaatacagtgtgtagttgaagatgataaagttggaacagatatgctggaggagcagatcactgcttttgaggactatgtgcagtccatggatgtggctgctttcaacaagatctaaaatccatcctggatcatggcatttaaataaaagattgaaagattaaaaaaaaaa

SEQ ID NO: 2817 - DNA, 656 bp, Homo sapiens
ggcgtaattcctgcgagggcttggtttagggcttcagctctctgcgttctcggctccgggaggcctcggtgattcagccacagcctctgcctcccgttgctctgtgacctgagggtattggacaatttgtagctaagactcccggataccctgaagtcgggaaatggaactcgtaacattcagggatgtggccatagaattctcccctgaagagtggaaatgtctggaccctgcccagcagaatttgtatagagatgtgatgttggagaactacaggaacctggtctccctgggttttgtgatctctaacccagacctggtcacctgtctggagcaaataaaagagccctgcaatttgaagatacatgagacagcagccaaacccccagctatatgttctcctttcagccaagacctttcaccagtgcaggggatagaagattcattccacaaacttatactgaaaagatacgagaaatgtggacatgagaatttacaattaagaaaaggctgtaaacgtgtgaatgagtgtaaggtgcagaaaggagttaataatggagtttaccagtgcttgtcaactacccagagcaaaatatttcaatgtaatacatgtgttagagtttttagtacatcctcacattctaacaaacataaat

SEQ ID NO: 2818 - DNA, 1431 bp, Homo sapiens; identical to SEQ ID NO: 850

SEQ ID NO: 2819 - DNA, 872 bp, Homo sapiens
ggaactctctgttcttgctttttgttctgtttgattgatttattgggcttctctttttatatccagtaggggaatcagattgtggccaaaggtagtggattaactctagaaaaggagattatatctacagttcctcaaacaattttagatttttcttttcaaggacagctagagaagataatgacataataactatttccttttttaggatctgaatctaaaaatggtgaagcagacagttcagataaagaaatgaaacatgggcaaaaatctcccactggaaaacaaacaagtcagcacttaaaacgattaaaaaagtctggtttagggcacttgaaatggaccaaagctgaggacattgacatagaaaccccaggatctattcttgtcaacactaacttgagggcattaataaataaacatacgtttgcttccttacctcagcattttcaacaatacctcctgcttttgctcccagaagtggataggcagatgggaagtgatggaattttacgcctcagtacttcagctctaaataatgaattctttgcatatgcagcacaagggtggaaacagcgactggcagaaggtaaatttgtattttctattattatgtgacatattggagtacacataccgtactgagcttgtacctttctctgatttttcagtcttttccccgacacagtacactttaatttagtaaaaactcatatccctttccaaatgagttcactgattcttttgttatacttgacattattgatgtcagatatttttgaagaaagcataattttatcttggacatcataaaatttttgatgcagcaacattttcttgcggatggtaattttaatgacattggttgatcc

SEQ ID NO: 2820 - DNA, 481 bp, Homo sapiens
  misc_feature (1)...(481): n = a,t,c or g
ggggtttgaaccatatccangttttggagtccctagtcagtgtggtggaattccatacactcgaagtccagtgtagaagagcactctggaaaaccctagacccatctgacgagagacccaatcactctgactttctttccagaaagtcctgagtacacctaggagcgatgagaggaggcccttcccctctttctaatcttcctctcgggcaagcccacccgagcacccttcctcacaagcacactgtgggccactggtactatcacatgcatgcccggaggttactaacaagtggtctacggggtcttcatcctctcccaattcctcttgggtgtcttcacctcttcagcccgagggtctcagcggctcctcccggatgaaaggtggaagtgccaccaagattctgctggaaaccctgttattagcagcccatatgactgcggaccagggcattgcatcatctcaaagatgcctcctggan

SEQ ID NO: 2821 - DNA, 385 bp, Homo sapiens
cagagcgcagacaccctcttccctggagacatcaacttcaacgtgtcaggcctcttctcagctgttaccctccaggacacagtcagtgacaggctggcctctgaggaacttccgtccactgccgtgcccaccccagccaccaccccggctccggctccggctccagctccagctacggccccagccttggtttcagcagctaccaaggaaaggacagagtctgaggtgcctcccagaccagcctcccccaaggtcaccaggagtcccccggagacagctgccccagtggaggacatggctcggaggagtgagttggctgtgggaggggaggaggggacagagggtgggcggggagaggggacaggcagtcccatgtcctcctatc

SEQ ID NO: 2822 - DNA, 1245 bp, Homo sapiens
tggaagaagggagtgagactgctcagagaggcaggattcctgctgactccagggggacacctggcacctcagcttcctttcccacttctccaggctgcatggaggggtgccgggcaggggcctcctggaagggaacctcctgcagcctcaagcaccaggtcatgacatgacatctatccctttcccaggtgaccgactcctgcaggtggatggagtgattctgtgcggcctcacccacaagcaggctgtgcagtgcctgaagggtcctgggcaggttgcaagactggtcttagagagaagagtccccaggagtacacagcagtgtccttctgctaatgacagcatgggagatgaacgcacggctgtttccttggtaacagccttgcctggcaggccttcgagctgtgtctcggtgacagatggtcctaagttttgaagttcaaactaaaaaagaattgccaatggtttgggattcagtttcgtgcagatggagaaagagagctgcagccatctcaaaagtgatcttgtgaggattaagaggctctttccggggcatccagctgaggagaatggggccattgcagctggtgacattatcctgggccgtgaatgggaaggtccacggaaagcctcatcttccaggtgccgggggtcatgggcaatgcagctctctgtgcaggctggccccagctttgcctcttactatcctgctgccgtggaggtgctgcatttactgagaggggccccacaggaagtcacgctcctcctttgccgaccccctccaggtgcgctgcctgagctggagcaggaatggcagacacctgaactctcagctgacaaagaattcaccagggcaacatgtactgactcatgtaccagccccatcctgggatcaagaggacagctgggagggacagtgcctccccagatgcaggggaaggcctggggtctcaggccagagtcttcccaaaaggccatcagagagggcacaatgggggccaaaacagagagagaccttgggccagttccttgacacattctcctgagtcccaccctcatttatgcaaacttcaccaagaaagggatgaatcaacattggcgacctctttggaaaaggatgtgaggcaaaactgctattcagtttgtgatatcatgagacttggaagatattccttctcatctcctctaaccagactttcgacagatattttctgagcaccttctctgcatgtctgcagtgctgtg

SEQ ID NO: 2823 - DNA, 1408 bp, Homo sapiens
aaaaatactatctatcctctcaccgttgatggcactgtcttccccaaaagccccaaggaactcctgaaggagaagcccttccactctgtgcccttcctcatgggtgtcaacaaccatgagttcagctggctcatccccaggggctggggtgctcctggatacaatggagcagatgagccgggaggacatgctggccatctcaacacccgtcttgaccagtctggatgtgccccctgagatgatgcccaccgtcatagatgaatacctaggaagcaactcggacgcacaagccaaatgccaggcgttccaggaattcatgggtgacgtattcatcaatgttcccaccgtcagtttttcaagataccttcgagattctggaagccctgtctttttctatgagttccagcatcgacccagttcttttgcgaagatcaaacctgcctgggtgaaggctgatcatggggccgagggtgctttttgttgtttcgggaggtcccttcctcatggacgaggagctcccgcctggcctttccagaggccacagaggaggagaagcagctaagcctcaccatgatggcccagtggacccactttgcccggacaggacctcccacactttggggcatcgttgccactggagcctctcttcgggtgacgttgcccctccctgctgcccccaagctggccccttcccactcttcagaccttgaccaggaccccaggaaacaaggcaatcgctggcggtgcgggcctctgggccgtcctctggggttccgagaggaccccaccttacagatgaggaaattagaatcagagaggggcagtaccgtgcctgaggccacacaggctgaggccccaggataagttccttgtgctggcctcagatggcctgtgggacatgctgagcaatgaggacgtggtaaggctggtggtggggcacctggctgaggcagattggcacaagacagacctggcccagagacccgccaacttggggctcatgcagagcctgctgctgcagaggaaagccagcgggctccacgaggctgaccaaaatgcagccacgcggctgatcagacatgccatcgggaacaatgagtatggggagatggaggcagagcggctggcggcgatgctgacattgccagaggacttggcgaggatgtacagggatgatatcactgtcactgtggtgtattttaactcagaatcaatcggtgcatattacaaggggggttaagaatctcccatcctattgtcaaggttaacataaatgctcttctaaaatgtttcacttactcctaaactagctatccaaacctatgatgtgagtgcccagacatctacatatcacctttccttttggtttttgctctgagctacctcaatcattctaaagctttaagtt

SEQ ID NO: 2824 - DNA, 2887 bp, Homo sapiens
gcgtcgacgatttcggggcagctagtcccagtactccgagtcggtcgcgggccgacaggcatcccctgagcgcctgctgggctcttatcacgcgatggcatccactgtggaaggaggcgacacagctctgctcccagaattccccagggggcccctcgatgcctaccgagcaagagcgtccttcagctggaaggagctggcgctgttcacggaaggggagggcatgctccgctttaagaaaaccatcttctcagctcttgagaatgaccctcttttcgctcgttcccctggagccgatctgtccttggagaagtatcgcgagctgaacttccttcgatgcaagcggatcttcgagtatgacttcctcagtgtcgaagacatgttcaagagccctctgaaggtccccgccttgattcagtgcctgggcatgtatgactcttctctggctgccaagtacctcctccatagcttggtttttggatcagcagtttacagttctggttctgaaagacatctcacatatattcaaaagatcttcaggatggagatttttggatgttttgctctgaccgaattaagccacggcagtaataccaaggccattcgcacaactgcccactacgatcctgccactgaggaattcatcatacattcccctgatttcgaagctgccaagttttgggttggcaacatgggcaagacagccactcacgcggtggtgtttgctaagctgtgtgtgccaggggaccagtgccatgggctgcatccctttatcgtgcagatccgggacccgaagacccttcttcccatgcctggagtgatggttggcgacataggaaaaaaactcgggcagaacggtctggataatggtttcgccatgttccacaaggtcagagttcctcgccagagccttctgaaccggatgggagacgtcacccccgagggcacctatgtcagcccctttaaggacgtcaggcagcgctttggagcgtccctggggagcctgtcctcgggccgggtctccatcgtgagcctggccatccttaacctaaagctggccgtggccatcgctcttcgcttctcagccactcggcgtcagtttggacccacagaggaggaggaaataccagtgcttgagtatccaatgcagcaatggcgcttgcttccatatctggcagctgtctacgccttagaccatttctccaagtcgctcttcctggacctggtggagctccagcgaggacttgcatcgggagaccgcagcgccagacaggcagagcttggacgtgagatccacgccctggcatcggccagcaagcccctggcctcgtggaccacccagcaaggaattcaggaatgccgggaggcgtgtggaggacacggctatctggccatgaaccggttgggtgtccttagagatgacaacgatcccaactgcacatacgaaggtgacaacaacatcctgctgcagcagacaagcaactatttgctgggtctcctggcacaccaggtccacgatggagcttgcttccgcagtccgctgaagtcagtggactttctggacgcctatcccggcatccttgaccagaagtttgaggtctccagtgttgccgactgcttggactctgcagtcgccctggcagcatacaagtggctggtttgctacctgctccgagagacttatcaaaaattaaaccaagagaaaagatcaggaagcagtgactttgaagcaaggaacaaatgccaggtgtcccacggccgtccgttggcgctggccttcgtggagctcacggtggtccagaggttccacgagcacgtgcaccagccttccgtgccgccctcgctgcgggccgtgctggggcggctcagtgctctgtacgccctgtggtccctgagccgccacgcggccctgctctaccgaggaggatacttctccggtgagcaggcgggagaagtgttggagagcgccgtcctggctttgtgttcccagctgaaagacgatgcagttgccctggtagacgtgatcgctcctcctgactttgttctggactcaccgattggcagagccgacggcgagctctacaaaaacctctggggcgctgtcctgcaggaaagcaaggtgttggagcgggcatcctggtggccagagttttctgtgaacaaacctgtcataggaagtctgaaatcgaagctctagtgggactggcacacattcagccaagtctaatgaaacgaagggaactaatcagacgtggacctcaacttctgattccagaacacaccggagattgctgctgctttctgagcccgcacctgtgcgcctaaactgctgattggcctcaactgcccaggcggacgggagggaggcacccggccggctggactaatctgggatcgcggtgatttgcagcgtggaaaagaaatgcagatgatcatgtctaccctgatgcgctgtgggttttttgataattagaatttcgcacattcagttttcagggttcagctcctttctctaaagtaaacagcccattgtcagggatcttctggtcagacaacctgtgattcatctagattttttaccgagctccacttcattgagaagtcaatgatgccagtctggttctttgtcaactctccctcgggtttgttcacataattgaattatgtcataaccttattaatttgcacatagatcatctgaatgtcggtggtttaagacttaaggaggaacatctgtttgattactttcttttgtggaactggaaatttccatcgaggaaatgtttttttaaaaagtctaatgatttgaatgggcaattcagtctccaaccgcccccctccccctgccgccagttatataaaaatcactttattggtaaaaaaaaaa

SEQ ID NO: 2825 - DNA, 1014 bp, Homo sapiens
gtggtaggctgcgaccccttcctcccacagccccttcccgcccctcgccgggcatccgccgacaggtacataccaagaaattgaattgctgagtcacaggagagatttacaaatagtgttttggcatcatggaacgtgtaggttgtactttaacgacaacttacgcccaccctagaccaacaccaaccaactttctaccagccatcagtaccatggcctcaagctacagggaccgctttccccactccaatttgacccatagcctgagccttccttggagacccagcacatactacaaagtcgcctccaattccccaagcgtggccccgtactgcaccagatcacagagggtgtccgagaataccatgcttccctttgtttccaacagaaccactttcttcacaagatacacaccggatgactggtacaggtccaatttaaccaactatcaagagtccaacacttcccgacataattcggagaaactaagagtggatacatctcgcctgattcaagacaaatatcaacaaacaagaaaaactcaggcagacacaacccaaaatctgggagaacgtgtcaatgacatagggttttggaaatctgaaatcattcatgagttggatgaaatgattggagagacaaatgcacttactgatgtgaagaaaagactggagcgggctttgatggagactgaagcccctcttcaggtagcccgagaatgtctatttcatcgagaaaagagaatgggaatcgacctagttcacgatgaagttgaagcacaactgctgacggtaaatgtgggggaaatgcatcagtcacaggcagcttagttgtaaatgtatgttgaatatgtagaagcaaaaaaggatgttacataaaatgacttataagtaaagcattatcgtatcagatgctgatagcatttagcaaagacatgtttttcttggttataacatatattcaatgagaatatgaaaatgcaaacgagtaaataaagatgaaaatcacttgaaa

SEQ ID NO: 2826 - DNA, 518 bp, Homo sapiens
gggtgatacaagagctggaaggcggctccggcgcagaccttggagagcacagctgccggcccgcgagccagcctcggttcccgcggcccgccgaggctcggagccatccagcgacccggcgaccggcctcaggccccgccatggggaagaccaacagcaagctggcccccgaggtgctggaggaccttgttcagaacactgagttcagcgagcaggagctgaagcagtggtacaagggcttcctgaaggactgccccagcggcatcctcaacctggaggagtttcagcagctctacatcaagttcttcccctacggcgacgcctccaagttcgcgcagcacgctttccgcaccttcgacaagaacggcgacggcaccatcgacttccgggagttcatctgcgccctgtcggtcacctcccgcggcagcttcgagcagaagctcaactgggcctttgagatgtacgacctggacggcgacgggcgcatcacgcgcctggagatgctggagatcatcgag

SEQ ID NO: 2827 - DNA, 1373 bp, Homo sapiens
aaaagcaagccaggaggtgcttgcggccgcttctagtagtttccaggcgctgccgggcggctggcactaagcggtcctgaggctgtggctacggctgctccggagctggtggcgccgcgataggagagccgatggccaagtggggtgagggagacccacgctggatcgtggaggagcgggcggacgccaccaacgtcaacaactggcactggacggagagagatgcttcaaattggtccacggataagctgaaaacactgttcttggcagtgcaggttcaaaatgaagaaggcaagtgtgaggtgacggaagtgagtaagcttgatggagaggcatccattaacaatcgcaaagggaaacttatcttcttttatgaatggagcgtcaaactaaactggacaggtacttctaagtcaggagtacagtacaaaggacatgtggagatccccaatttgtctgatgaaaacagcgtggatgaagtggagattagtgtgagccttgccaaagatgagcctgacacaaatctcgtggccttaatgaaggaagaaggggtgaaacttctaagagaagcaatgggaatttacatcagcaccctcaaaacagagttcacccagggcatgatcttacctacaatgaatggagagtcagtagacccagtggggcagccagcactgaaaactgaggagcgcaaggctaagcctgctccttcaaaaacccaggccagacctgttggagtcaaaatccccacttgtaagatcactcttaaggaaaccttcctgacgtcaccagaggagctctatagagtgtttaccacccaagagctggtgcaggcctttacccatgctcctgcaacattagaagcagacagaggtggaaagttccacatggtagatggcaacgtctctggggaatttactgatctggtccctgagaaacatattgtgatgaagtggaggtttaaatcttggccagagggacactttgccaccatcaccttgaccttcatcgacaagaacggagagactgagctgtgcatggaaggtcgaggcatccctgctcctgaggaagagcggacgcgacagggctggcagcggtactactttgagggcattaaacagacctttggctatggcgcacgcttattttagggccagcggcaggggactccagcctgctggacacttcagtccagctctctcctgactggggcttgcgactcacaggattgcatcgtcccagctgctaacttggggccggggcccctcccttccacatataccttgggtttgtgcatgttttctgctgggtgggttcagagggcaatttctcttttatgtgtacatatgctaaataaacataatttaaaaaaaaaa

SEQ ID NO: 2828 - DNA, 563 bp, Homo sapiens
aattgaacgccatagatagccgtgcggaactgccgcgtcgacccacgcgtacgatcgaagagctaagtgccgccaacaacagcaacaacagcagaatggaggtcaaaacaaagtgagacctgccaaaaagaagacatctccagctcgggaagtgagttcagagagtggaacaagtggccaattcactcccccctctagcacctcagtcccgaccattgccagcagcagtgctcctgtgtctatctggagcccagcttccatctccccactgtcagatcccttgtccacctcctcttcctgcatgcagaggtcctatcccatgacctatactcaggcttcaggttatagtcaaggatatgctggctcaacttcctactttgggggcatggactgtggatcatatttgacccctatgcatcaccagcttcccggaccaggggccacactcagtcccatgggtaccaatgcagtcaccagccatctcaatcagtccccagcttctctttccacccagggatatggagcttcaaagctttggggttttaacttcaaccactgattgg

SEQ ID NO: 2829 - DNA, 2318 bp, Homo sapiens
  misc_feature (1)...(2318): n = a,t,c or g
tgcacggaaccgccgcgacgatccacgcgtacgcctgctgcccttgccagcctgcgcccctacacagactatgtggttgtttcggaccagattctccaggagtccgaggacttctttacgctcatcgagtctcatgaggggaagcccttgaagctgatggtgtataactccaagtcagactcctgccgggaggtgactgtaactcccaacgcagcctggggtggagagggcagtctgggatgtggcattggctatgggtatctacaccggatcccaactcagccccccagctaccacaagaagccacctggcaccccaccaccttctgctctaccacttggtgccccaccacctgatgctctaccacctggacccacccccgaggactctccttccctggagacaggttccaggcagagtgactacatggaggccctgctgcaggcacctggctcctccatggaggatccccttcctgggcctgggagtcccagccacagtgctccagaccctgatggacttccccatttcatggagactcctcttcagcccccacctccagtgcagcgagttatggacccaggcttcctggacgtgtcgggaatttctctcttggacaacagcaatgccagtgtgtggcccagcctgccctcttccacagaactgaccaccacagctgtctcaacctcagggccagaggacatctgctccagcagcagttctcatgagcggggtggtgaggctacatggtctgggtcagagtttgaggtctccttcctggacagcccaggtgcccaagcccaggcggaccacctgcctcagctgactcttcctgacagtctcacctctgcagcctcaccagaagatgggctgtccgccgagctgcttgaagctcaggctgaggaggaaccagcaagcacagagggcctagatactgggacggaggctgaggggctggacagccaggcccagatctctaccacagaataacaccctgggctgtgacaaggcccatgatgacatttcatgaggcccagatgtgggcaggcagcccgggctgcactatgcggtcaggattccttgctgctttggtgggacatgaggcctcagtgggtggtgagagggggccatgggctttgtgggaggatatcttttggccgtgtaccctcaggtccagtgcttggtcctgctctggtcactggggcttcccaggaggcagcagggtctggtcataatccagtgtgaagatgaggtgaggaaggaaggggttgctgtccagtgttggcctggtcgctttgattcttcctgcacagctcagcccaccccatctgtactggaagggaccctggagccctgggaccaccccctttcaagtcccaaacactgagtcctctgtcatgtgtccttgtccctaggctacaatgctacacttggctcaggctgatcaccatgctagtcacaggagggagagagaggcagtgtacttgcccccatctcctggagggaggtgcgttggaaattctaggcccttcagcagagacccatttgtgcccagaccacaatatttcttcttcctcagggactacatgccacagacctgtatccccagtggcaactcctgttagctcccaaacttaaacagtgatctcttctaaatatacaaggcatctacccagccccaatagtgaataaaagtcacaaatttaagttcaacaccctaagcaatttctcaaagccagtctacctgactaggtctatccacggcacggttcccaaccccaagggggaattaggggattagattaagagtaggtaaagacccttttgttctttcctgttgtaggggaggaagctgttctccccaccccaggtgcctttggaggttaaggctaggttaggccctgcactccacctggggacggcccctcatcacctgaagtcctctgctgtgttgactggaccctcagttcccacactgctaattactatgaaagctgctctggcctcgtcttctagcttgtgcctagttgaaagtctcacctttacaggatcatttgtaatgctggtgtacatgcagggaactcacaagctgtgtcaggtatgcaggacaaggaatgtctgctctggggggcacaggccaactatatggagggagggtcccaaattagcaaacccttcatttaaagcaaacccttgtcaagcctaccagagcagctgatacgtgtgcataacagtgaggcattgtgtcctggaatcgtctgggagcccagtggtcaagtctgctgggaatgcaggaagtaggacagnacgccacagga

SEQ ID NO: 2830 - DNA, 1444 bp, Homo sapiens
agtgttctggcaggtaaggaacgccggctcttcgcctctcagcgcggcttgtcctttgttccggacgcccgctcctcagccctgcggctcctggggtcgctgctgcatcccgcacgcctccaccggctgcagacccatggccgagcgcggggaactcgacttgaccggcgccaaacagaacacaggagtgtggctagtcaaggttcctaaatatttgtcacagcaatgggctaaagcctctggaagaggtgaagttgggaaactgcggattgccaagactcaaggaaggactgaggtgtcatttactttgaatgaggatcttgcaaatattcatgatattggtggaaaaccagcttcagtcagtgctcctagagaacatccatttgtcttgcaaagtgttggaggacagacattaacagtatttactgagagctcatcagataagctgtcattggaaggaatagtggtacaaagagctgaatgccgaccagctgccagtgaaaactacatgcgattaaaaagattgcaaatagaagagtcttccaaaccagtgaggctatcacaacagctggacaaagttgtaacaaccaattacaaacctgttgctaatcatcaatacaatatcgaatatgaaaggaaaaagaaagaagacggaaagcgagctcgagctgataaacaacatgttttagacatgctattttcagcctttgagaaacatcaatactataatcttaaggacttggtggacatcacaaagcaacctgtggtgtacctgaaggaaatcttaaaagaaattggtgttcagaatgtaaaagggatccacaaaaacacatgggagctgaagccagagtacagacactatcaaggagaagaaaagagtgactaagaagactcctagccagcatgctagtgaaacgactagcagcgatgctatgcaaaaggcgctgatactggaaggcttgaacaccgtatgttaataggggttaagtgacagtactttgatttctctcggtaaattttttaaacctgtaattcttgtaaagtttcttaactgtttttttgaggagaaagaacagatttatttatagacttaacttgtattaaaccagattattcacagtaggaataggggttggaggattaagagggtttttcttaaatattagcttttaatgtgtacaattaggaaatttttttaagtgaggactctctacccttgccgtatctaaggagctgaggtaatacagatccaaggagaattgtatagcaagaaaaaaacacgtcaactacagaaactcttaaaaggaataaaaacccaaagttccttattttgaaattgtcaaagaacaaagcggtgtttttcctttaaaccagggtgatcacgtttcgtgttcatactcaacgttaataaaaggagagagtttgtagtgaaaaaaaaaaaaaa

SEQ ID NO: 2831 - DNA, 411 bp, Homo sapiens
cataaaaaatatataaaacataggagattgggaagacatagggaagtcccctgaaagaataattcaatactatgggccagctacctgggcacaagatgggtcacggggatactgcactcctatttacatgcttaaccacatcataaggttgcaggcagtacttgaaatcatcatgaatgaaagagcaaatgcattagatttactggcccagcaaaccacaaaaatgagaaatgctaactatcagaacagattagctttagattacctcctagcccacgaaggaggagtatgaggaaagttcagtctaactaattgttgcctggaaattgatgacaatggaaaagcaattatggaaataactgcaagaatgagaaaattagcccatattccagttcagacttgggaaagggg

SEQ ID NO: 2832 - DNA, 4287 bp, Homo sapiens
agtctcattggcagaggcgggaccgacggtgtgtgcggaacatggcggagcgcggcaggaagcggccgtgcggcccgggtgaacacggccaaaggattgagtggcgaaaatggaagcaacagaagaaagaggagaaaaaaaaatggaaggatctcaagctgatgaaaaaactggagcggcagcgggcacaggaggaacaggcaaagcgcctggaagaggaggaggcagcggcagagaaggaggaccgcgggcggccctacacactgagcgtagccctgccgggctccatcctggacaatgctcagtcgccggagcttcgcacctacttggccggtcagattgccagagcctgtgccatcttctgtgtggatgagatcgtggtgtttgatgaggagggccaggatgccaagactgtggagggggaattcacaggagttgggaagaaggggcaggcgtgcgtacagctggcccggatcctgcagtacctggagtgtccacagtacctgaggaaggcgttcttccccaagcaccaggatctacagtttgcagggctcctgaaccccctggacagcccccaccacatgcgtcaggatgaggaatccgagttccgagagggcgtcgtggtggatcggcccacccggccaggccacggctcctttgtcaactgtggcatgaaaaaggaggtgaagattgacaagaacctggagcccgggcttcgggtgactgtgcgactgaaccagcagcagcacccagactgcaagacctaccatggcaaagtggtatcatcgcaggaccctcgcaccaaagctggtctctactggggctacaccgtccgactggcttcctgcctcagtgctgtgtttgctgaggcccccttccaagatgggtatgacctgaccatcgggacgtcagagcgcggctcagatgtggcttctgcccagcttcccaacttcaggcatgctcttgtggtgttcgggggcctccagggtctggaagctggagcggatgctgaccccaacctggaggtggctgaacccagtgtcctctttgacctgtacgtcaatacctgtcctggccagggtagccgtaccatccgcacggaggaagccatcctcatctccctggccgccctgcagcctggcctcatccaggcgggtgcccggcacacctgaaagttctaaggggccgaggacatcagtgaagcagcagtgaaaccaggggctctgcaggtcacttgggacggacgccaccagacttgtctccaaaaatcaccacctttaatactccccggcctgcacacacccacagtctcactgggctccaccctcacttactgcccgccgtgatggccttgaggctgcctgcccgcgccaggatgtttggcacaaagagcagccccgaagcccgctcaatgctctcgatgggcaccaggaagcgctccagtgggatggcctcatccacaggtgccgttgggcatcacgtaggtgcggagctcaatttgcccacctgctgcctccaggatcagcaccttgaagaagtgtgtgggcactgccacgtggttcttgccgatgacctggtactttacgtaggatttcccatcagcctctgtcctgtgggcagacccaggcacacgtgggcagggggcctggatgaacccaaagccacctcttccaggcagccttccctgatctgtcctctaacttctgtcaacctgcaggaccacgccctcactgtgagacttctgtagcctgcctggctcctccttgaggctggaactctctccagggtggttaactctttccctctgttttccttatgcccaacactgggtcaggcagagtgggcgacaataaacgctgctaggagaatcgagccttctgaatattcacattcgtctgaggggagacttaacgactgtccatctctccccacagaggtgagcaacaagtgggcaaggaccatgacaggtgacatcccagcaccagcacaggtgccaggacaccggacgggggctccccctcagcagagtctcctcccttccaccaggccctaggaggcacctgctaatgaaatttgatcagtgccccaaccaccgccttggccagcctatgccgagcccttaccatggaccaggccctggggaagcatgtgacatcaaccaagaggtcacaggttttgcagagggggacacaggtcatttgcccacagcaccaaggaactaggtgatgaggcctggactccatcccgagcctgtggattccagagtgagctgctcagcctggacctgttgcctctcagccccagccctctgcaggccagaaaaaccacggagcacacccagaggtgctcagttgcttccacctgagaggcagggctgcacaggagcaagagtggaggccctgggtcaggcagatctagattcaaactcccgagaagggtggagggaagtgctccaagcagagcagagactgaaggcgggagagcctggtgcaccgcggacctgcagggggaaggcgtgagagctcggtgcactggggacctgcatggggaaggcgggagagctcggtgcactggggacctgcatggggaaggcgtgagagctcggtgcactggggacctgcatggggaaggcgggagagctcggtgcacctcggacctgcagagggaaggtgggagagcttggtgcaccgcagacctgcagggggaaggcgggagagcttggtgcactgcagacctgcggggggaaggtgggagagcttggtgcactgcagacctgcggggggttccatattggcagaacaagattgggtgggcatgccaagaggtgacagcagggagaagcgggggcagattcagggcctgctgctgcccatgggcagaggagagatggtcaggggtacccgacaggtctttggctgtggaggtggaatgaggggactcgaggcagggaagctgacaggcttgccaagaaaccagatgagtagggaactggtattgacccagagcctggggcaagcctggccctgtgagtggcagtaggggcctcgggtgagtgggaggttctgccgcccccctggtttccaccttacctgggcaggaagagtggccctgtgcagacatagacgttttggtagctgcgggtcaagctgcggctatatttctccaggttgttccaggcattctggttgaggtggggcacctggtaggagagatagggcttagcaggactgtggctgggacccttcctcctctatcagagggccgccccaggtcctgaggggatggacaggctcagagatatccagtgagacaagcggggggaaactgaggctcaaggaatgaaagtcactccctgaaacccagggctgatagagtgctagccaccaccctctgtccctcccacagcccaggtgtcaaagtcttttctcagctcccaagagtcgaatgaaggaagagcctgtctccacctttcagagaggactgaggcctgtccccagccccacccagggtctcctgggaagaccagcccttccaactaccaacccgttccttttcccagtctgagccacaggaagagcctagcggggaatgccatgaatcgacctccatcctgagctctccaggcctgggacaatggaaagtggatagggggctgtcttcccagaaggaagctgggtcagaggttggtgccccatgggctccacccagagccccatggcagtctccatccattggtgccaggacctgctgggaacaggctgagagggtggttggcccagtgcacagtgcctggcactaacaacctgatcgtgggccaggtgtctgcctcgaaactgcctgaaggcaggcagggtaggacaatgtctggaggctcacggttttatagactaggggtccccaacccctgggctacagaccggtaccagaaccgggccacacagcaggaggtgagcagcaggcgagcaagggaagcttcatctgtatttacagccacccccccattgatcccacagcagcctgagctccgcctcctgtcagatcagtggcggctggagattgtcataggagctggaaccctatggtgaactgcgcatgtgaggaggttgcgcgctccttttgaaaacctaatgcctgatctgtcgttgttgcccatcacctccagataggactgtctagttgcaggaaaacaagctcagggctcccacgggatcctacattactgtgagttgtatatttcactatatgttacaatgtaataataatagaaataaaatgtacataaatgta

SEQ ID NO: 2833 - DNA, 1795 bp, Homo sapiens
ccatgcacaggtgcagctaccatataacaatccacacagttcctgacacatcataggccttcaatacatactttccagttgaattggaaagaaatgtgttaagtctcagttatgtcgtgatgcaaatgctcacaaaatatctgtttagggccatcttttcatcaaaagaattgtatctccgaatacttaacatcagcaatctgagtaaataaacttgctcatcaaggacaacttctttcttataattcttgtctgcaggcatgtctaattttactcattatgcctatctgcttatgatagagtcactgatgttggggaaagttcccccgcatgtccccagtcatcatttcatatttcatgatgatgggagtgccagacagaagggagagagtgattacaaggtcatcatacagcagtggttctcaaagagtggtccctggaccaccagcagcaatgttacctggggcttgttagaactgcaacaaagcatttctgaatcagctgttttaaccattcctccaggagattctggtgcaggctcaaatttgataaccatgtttctacgtaacagaaaagaaacagatctgtgcagtgggagaagtaaagtgaacagaggatggaattctggcagatgcaaacaaaggggcaagactgagcagcctggagagcccttggaacatgtgtatgtgactataaaacatgctgtagccctggaatcccgacatcaaaagggagagcttcagtgcctgataaaaatgtgcattcctcttagcaaaccactccaaatgttcttttctccaccccactgggaagcttggctgcagagagtacagcaacttgcgaaaaacacaagatacttcagacaaagactgcaggaaatgggattcattatctatggcaatgagaatgcttctgttgttcctctgcttctttatatgcctggtaaagtagcggcttttgcaaggcatatgctagagaaaaaaattggagtggtggtcgtgggatttccagccactcccctcgcagaagctcgggctcggttttgtgtttcagcggcacatacccgggagatgttagacacggttttagaagctcttgatgaaatgggtgatctcttgcaactgaaatattcccggcacaagaagtcagcacgtcctgagctctatgatgagacgagctttgaactcgaagattaagtttcctggtcctgaatgacacataaagactttgcgagaaagacctccctccttgcctcacaaggaatataaatggatttctcccccttcctcaggacaattttggttcccagaccagcttgattgaactgagggagacgttgttgtttttaatgtctccagcttggactgcagagacaaaaacatgattccagatttaagtctctcttcttccaagtattctactagaaatacacaccccacatccacacccacatacaccacaaacacacatacacacccacacaacacactctcacacacacacacactctcatacacacacacatctgcatcttaatgtacaggcagtgctaaaatagacatcttaatatttgttccatgaatatttaccttgtagatatacagagtttccttaaaacagcaaaactgttcctgcttctgattcaccctgctgacaatgtgcatggttaagtgtaacagcgtttatagtgagggtgattaatggtagtcacagtgtaacagagcacagacagccaggttccagggttgggagggcaaggaagtcaacacagttttatatcatcctcctggctggg

SEQ ID NO: 2834 - DNA, 1070 bp, Homo sapiens
ggggctggctctcagttccctcctcgcggtgtgtgcctgccccgctgcgatgggtgtcctaagagcaagggggggaagaggggctggttccggtacattgcaaatgacctgctttttttctgatcccgagctgcgttcagacccctgtcggatagtaaatcccaagtaaggcacctgccgtcggcagatctgagctttcttcttggacacctaaaacccacagtcctccagcagtgaaggatccagtgagattttccaggttaacggtcataaccgcctactggtccaacgttcagaagtaacacaggcacctggacaatacacagtagatgtggaaggacacggttgtacatttatccaggccacccttaagtacaatgttctcctacctaagaaggcatctggattttctctttccttggaaatagtaaagaactactcttcgactgcttttgacctcacagtgaccctcaaatacactggaattcgcaataaatccagtatggtggttatagatgtaaaaatgctatcaggatttactccaaccatgtcatccattgaagagcttgaaaacaagggccaagtgatgaagactgaagtcaagaatgaccatgttcttttctacttggaaaatgtttttggtcgagcagacagtttcactttttctgttgagcagagcaaccttgtgttcaacattcagccagccccaggcatggtctacgattactacgaaaaagaagaatatgccctagctttttaccacatcaacagtagttcagtttccgagtgagacaaaagcaattactggaagaagtaaagaaattttattacgtcataaaccattgaaaacacatctagtaagaaaatgaaaacctgaataaggatagggacaatagttgaagaaaagaaaagtctctgatggagaagcatttcttttaacaaactgattcttctgtatcaaacctggaaaaaaatcatgaaccatctgacatcgtgaacagtctgcagtgggctatggtttcttgacaagtcttatttccttatcatcccattaaatgttgtcattttgc

SEQ ID NO: 2835 - DNA, 2356 bp, Homo sapiens
cggattccagactccatcatttctcgtggtgttcaggggctcccacgagacacagcctccctcagcactactccttcagaatcgcctcgtgctcaggctacatctcgcctctctacagcttcctgcccaacaccaaaagtccagtccaggtgcagcagcaaggagaacattctcagagccagtcacagtgctgtcgatatcaccaaggtggctagaagacatcgcatgtctccttttcctctgacatctatggacaaagcctttatcacagtcctggagatgactccggtgcttgggacagaaatcatcaattaccgagatggaatggggcgagtccttgctcaagatgtatatgcaaaagacaatttaccccccttcccagcatcagtaaaagatggctatgctgtccgagctgctgatggcccaggagatcgtttcatcattggggaatcccaagctggtgaacagccaactcagacagtaatgccaggacaagtcatgcgggttacaacaggtgctccaataccctgcggtgctgatgcagtagtacaagtggaagataccgaacttatcagggaatcagatgatggcactgaagaacttgaagtgcgaattctggtgcaagctcggccaggccaagatatcagacccatcggccatgacattaaaagaggggaatgtgttttggccaaaggaacccacatgggcccctcagagattggtcttctggcaactgtaggtgtcacagaggttgaagttaataagtttccagtggttgcagtcatgtcaacagggaatgagctgctaaatcctgaagatgacctcttaccagggaagattcgagacagcaatcgttcaactcttctagcaacaattcaggaacatggttaccccacgatcaacttgggtattgtaggagacaacccagatgacttactcaatgccttgaatgagggtatcagtcgtgctgatgtcatcatcacatcagggggtgtatccatgggggaaaaggactatctcaagcaggtgctggacattgatcttcatgctcagatccattttggcagggtttttatgaaaccaggcttgccaacaacatttgcaactttggatattgatggtgtaagaaaaataatctttgcactacctgggaatcctgtatcggctgtggtcacctgcaatctctttgttgtgcctgcactgaggaaaatgcagggcatcttggatcctcggccaaccatcatcaaagcaaggttatcatgtgatgtaaaacttgatcctcgtccagaataccatcggtgtatactaacttggcatcaccaagaaccactaccttgggcacagagtacaggtaatcaaatgagcagccgtctgatgagcatgcgcagtgccaatggattgttgatgctacctccaaagacagaacagtacgtggagctccacaaaggcgaggtggtggatgtcatggtcattggacggctatgatggtcaccagcaggagaaagctttgatgcatgtccacatatcattgactgtatcctgtaatatgcaacggcacagctagttttcccgatttggataaaagttgatctgtatagtcaacatcttgaactatatttcaaatgaatttaaatatcttttaaagaaaaaaacacctaaaaataaatcttaacagaaaattctgttctgattatatcaaggcaaatttttcctttcttgcaaattgctttgtgtgttcaatgctaggtctgatagcgatagcttttagtagacagcggtaggtgcctgcagaacttgtgtttttctcatctttaaaatacaactacttatgctcttaaatcaaggctgtctgcttatttatactagcgtaggcaacacttggatttcccttcttagtatgcttcataactgctttacagagagcttttgcttgttctttctcatgtatctcgtgtttatgtgcacagtgccaaaagaagactgactgggtggaggctctgccttgcctcaagaaccatcccctgcagagcatccagggaggtttctcgccccaatagcctcacggcacagtactcttgggcagtaactggacaccttttatttgaagaaacaaactgaagaaaaaatgcttccttaagtgctgacagcctttttaaccaatacatttaaaattgtacagaacaaaaaaataaaatcaaagactgatcttgtacagatattagtgttaccagcattcatgtggaaatcaagagcaaagacaaaataatgttaaacaattctgtaccataacattttctgtaatgatactgaaacttaatgaataaaaaaattccttgatcattatttaaaaaaaaaa

SEQ ID NO: 2836 - DNA, 2216 bp, Homo sapiens
tttttttttttggcgttttgctctgttactttataaccctttcatactagttgaacttttttttttataatgtacatgtactactttataattaaacaaaaaactttaaaatgattttttaaaaaagaaaagaattaatcacagtggaacatgaaatggaatgtcaactttggggacgggtcatccagaggagtccaagagccccaacatggtcgcgtgtctctggtcctcaggtcatcacccagcctcacccacagggcacccgccacggccgtggcccaccgtgcaagcttccacttggtgcctgcgtgggaacgcaccacctgccgtggaacttcctcctgcggggcagaggaggggtccagaagccacaggagtcaagtcagcaaaattaagttaatttacaaagttatagtaaaaaccacaatagtgacccagtccctcccacgcagtgtgagccctgtgaggtgccagcacgggccacctcacagggcaaaggtggtgaagaagatgtgcatcttggccaggaaggtggtgacggagccctgcctccagagcttcatctccacgtccagggcaaagtcccggggctccagcacggcccgctgcaggtagaccacacccgtgtaggcattgagcctgcgcgtgccaaagtagccctcctcattgcccttgatgatgttcagggcgatggtgtcccccgtgaaggctggcgcggggccaatgcggaagatatgcgcaggcaccaggaggcccgtctggaagttgagctggtagtgcgtgatgcgcgctggcgagttctggcactccaggaagtcatggcacgtggtgcgctcgcacttcgttttggagacttggacatagttgggaggacactcgaagcgcaggcagcggaagctaccctggatgttgtggcaggtctcagcctcggaacagttgtgggtacccagtgcacactcatccacgtccttgcaggacctcccgttggccgtcatggtgtagccctgctcagggcatgcacactggtagctccctggcacgttgagacagcggaaggtgcagaggatgccggcgccttgagcacactcgtcgatgtctgtgcaggtgtgcccatcctcagccagctggtagccctggcggcagtagcactggtaggagccatagatgttggcacactcctggctgcagcgctgggcctcacactcattcacgtcttcacagcgcttgccgtccgctgctagcaggaacccggaggcgcaggaacagcggtaggagccgagtgtgttctcacacgtgtgctggcacaggcggcctggcgaggcccagcactcattcacgtcgatgcagccccggccaaaggcatcccgctgaaagccggctttgcagtcacagcggtaggagccagggaggttgtggcacacttggccctcaccgcagcggtgcacacctgtctcacactcattcacgtccacacacttggtcccatcatcgctggcgtggtagccgcgcgcgcagatcagcgggttcctctggcatgtgtaggagcccaccgtgttgatgcagctgaagcctggccgacatggctcggacagtgacgtgcactcgttgatgtccacacagttgccttcaggatcctgcaggaagccatccatgcagcgctgcctggcctggcagtagaaggagcccttggtgttctggcacaagaagcccggctggcaggtgtgcgtgcccatcgcacactcatccacgtcttcgcactcgccatccttgagggcatagcctggctcacaggtgagtgccttgtagcagtggaaggagcccagtgtgttcacacagtgctcgccccggctgcacgtgtgcaggtccgtcacacactcgttgatgtccacgcacttcctgtgcgcattgaggatatagccatcggcacagagcactgtgtggttgacacagtagaaggatcccagggtgttcacacagaactgtcgccggctacaatcgtgagcacccatcaggcactcgtcttggtcttcacaggacacgccatccgccatgatggcatagccgggaaaacaggagcatatggctgagcccccaacagtgctgcacacctgcttgcagggtccattgtctttgcaggtattgggctgcggcagtggcagcgggatggtgttagaggccacctgggaaaattctgacttcagtgcaggctcctgtgg

SEQ ID NO: 2837 - DNA, 2216 bp, Homo sapiens; identical to SEQ ID NO: 2836

SEQ ID NO: 2838 - DNA, 2502 bp, Homo sapiens
gcagtgcgcaggaattcctttggtgatgcgaatcctctgggccacaggccagtgtgagattgggaagccccttttcccagagctgtccagggcaggtgcggcaggcctgatgggtgcttttggcacccccttcctagtcaggaccacaggcacctcagagactgagatgtcggctatctgccaggaatacaggagcacctcagccaccgccgtgacattctctgactcgtcactgttgaagacgcaatcctcggactctgggaacaacagggaggcactaagccatggtcccagaaaaatcaaggccacccagggccagaggcagagccttagcaagactgagcccacccagagccagaggcggaactccagcaagaccaaggccactatacacaagaggaactccagcaagaccaaggccacccaaagccagaggcggaactccagcaagaccagggccacccagggccaggggcagagctccagcaagactgaggccactcagggccagaggcagagctccagcgagattgaggccacccagggcccaaggcaggagcccagcaagaccaagaccacccggagcccaaggcagaggcccagaaaggtcaaggctgctcgtggccggagctggagacccagcaagggttgatgccacccagggccgaagcaggggactgctccgaagttccaccaagactgaggctttgtatgactcaaactggagcctcagcaagactgagtatgcccaaggccagggctagaggtccagcaaggctgagggtgcccaggccaagagccagggcatgagctcaacttccagcaaggccgagtccacctggggacccagcccaagtctcagcaaaactgaggttgatcaggacctcacctactatgaagctgtctgaagggaccatccagaccctcccttcttgctggggaggggatgagttctacccacctccccacactggcactcagccagctgcctccttccagagcaattaaaagtcttagcaacagtcctctggtcccacagctgagtttattatacttgttttcttttacaaaattaaaaacatctaaaaccaggcccaagtggcagcttgagtccctccatttctggaaactgagaaggctccacctggcttgatatggacacagggtgtggggtggaggggaggaggtatggtgcccgaccaaggaggcaaggggcaagggtggcagactgaggagggagcaccgccacgagccacagtccctgagttataattcacagtaagaaggctcaggctgcagggggaggtcaaggctcagtgaggttctggggtgaccaggggtttccctggggaaggtggccggggccaagatgctctcgagccagtttagaggccagggcccttcctggccatctgtcccgtggcctagccgacactccgttcatctcacttggtgctctgggttcctgtgacagaggcccctggcctttcctgcatggcctggccatcaggggggccgaggacaccactcagagagtcagaggaagaaggcgattcgggaggccacggtcttgcagccgttggaggagaagagctgctcgtcttcagggaagaaggtggtgctgtccagcacagcctggacaacctcatcccttggctccaggcccagctgggccagctcgttgagcacgcagtgccggacgtggtgccgctggagcgggaggaagggcaccactgcgtctaggaggcgctcttccatgatgcccgagtttgagaagccatggtgcgggttgtccagcaccgcgcgggagatgaccggctccagctcctgcaggaggatctcctcgcggtcccgccggctgcgccacgcctccaatgccacctggttgatctgctcgccacccgtgttgctgatgaagatgaagatggctttgcggtaattggtcccgtataccacccaggaggagcccaggaaaggccgcaggacttccatcaggcctgggggcatcttgtccatctcatcgaagaggaagagggagcggccacaggcagtgaggttcccttggacccagctcttcagatccttcttgtagcgctcgatgtggctggggtgggggaagtggaggacgggagaaaagtggtgcacgcgggggctgcggaggccgccctggaagaggtagtgcgccagcagggagctgacataggatttgccggtgccggtccagccgtgcagggagaggaccagcggcttggtgggggctgggtcccgcacaaaggccttcagcgccttcaccaccagcgccttggccagatgctggccggccaggtgctgagccaggtcacactccagacccggcaagtcgggccggaagtcgcattcgcaaaaggcgcccaaggtgcagcgcagggaagccaggtcccaggcggcggccgcggccgagaccagcccgagcagcccgaggagcgagccccagggccggcagccgcgcgtcgcagccgccat

SEQ ID NO: 2839 - DNA, 6252 bp, Homo sapiens
tacggctgcgagaagacgacagaagggcgtattcctctcaaaaacatatatcgcttgttttcagcagatcggaagcgagttgaaactgctttagaggcttgtagtcttccatcttcaaggaatgattcaatacctcaagaagatttcactccagaagtgtacagagttttcctcaacaacctttgccctcgacctgaaattgataacatcttttcagaatttggtgcaaaaagcaaaccatatcttaccgttgatcagatgatggattttatcaaccttaagcagcgagatcctcggcttaatgaaatactttatccacctctaaaacaagagcaagtccaagtattgattgagaagtatgaacccaacaacagcctcgccagaaaaggacaaatatcagtggatgggttcatgcgctatctgagtggagaagaaaacggagtcgtttcacctgagaaactggatttgaatgaagacatgtctcagcccctttctcactatttcattaattcctcgcacaacacctacctcacagctggccaactggctggaaactcctctgttgagatgtatcgccaagtgctcctgtctggttgtcgctgtgtggagctggactgctggaagggacggactgcagaagaggaacctgtcatcacccatggcttcaccatgacaactgaaatatctttcaaggaagtgatagaagcaattgcggagtgtgcatttaagacttcaccttttccaattctcctttcgtttgagaaccatgtggattccccaaagcagcaagccaagatggcggagtactgccgactgatctttggggatgcccttctcatggagcccctggaaaaatatccactggaatctggagttcctcttccaagccctatggatttaatgtataaaattttggtgaaaaataagaagaaatcacacaagtcatcagaaggaagcggcaaaaagaagctctcagaacaagcctccaacacctacagtgactcctccagcatgttcgagccctcatccccaggagccggagaagctgatacggaaagtgacgacgacgatgatgatgatgactgtaaaaaatcttcaatggatgaggggactgctggaagtgaggctatggccacagaagaaatgtctaatctggtgaactatattcagccagtcaagtttgagtcatttgaaatttcaaaaaaaagaaataaaagttttgaaatgtcttccttcgtggaaaccaaaggacttgaacaactcaccaagtctccagtggaatttgtagaatataacaaaatgcagcttagcaggatatatccaaaaggaacacgtgtggattcatccaactatatgcctcagctcttctggaatgcaggttgtcagatggtggcacttaatttccagacaatggacctggctatgcaaataaatatggggatgtatgaatacaacgggaagagtggctacagattgaagccagagttcatgaggaggcctgacaagcattttgatccatttactgaaggcatcgtagatgggatagtggcaaacactttgtctgttaagattatttcaggtcagtttctttctgataagaaagttgggacttacgtggaagtagatatgtttggtttgcctgtggatacaaggaggaaggcatttaagaccaaaacatcccaaggaaatgctgtgaatcctgtctgggaagaagaacctattgtgttcaaaaaggtggttcttcctactctggcctgtttgagaatagcagtttatgaagaaggaggtaaattcattggccaccgtatcttgccagtgcaagccattcggccaggctatcactatatctgtctaaggaatgaaaggaaccagcctctgacgctgcctgctgtctttgtctacatagaagtgaaagactatgtgccagacacatatgcagatgtcatcgaagctttatcaaacccaatccgatatgtgaacctgatggaacagagagctaagcaattggctgctttgacactggaagatgaagaagaagtaaagaaagaggctgatcctggagaaacaccatcagaggctccaagtgaagcgagaacgactccagcagaaaatggggtgaatcacactacaaccctgacacccaagccaccctcccaggctctccacagccagccagctccaggttctgtaaaggcacctgccaaaacagaagatcttattcagagtgtcttaacagaagtggaagcacagaccatcgaagaactaaagcaacagaaatcgtttgtgaaacttcaaaagaaacactacaaagaaatgaaagacctggttaagagacaccacaagaaaaccactgaccttatcaaagaacacactaccaagtataatgaaattcagaatgactacttgagaaggagagccgctttggaaaagtccgccaaaaaggacagtaagaaaaaatcggaacccagcagccctgatcatggttcatcaacgattgagcaagacctcgctgctctggatgctgaaatgacccaaaagttaatagacttgaaggacaaacaacagcagcagctgcttaatcttcggcaagaacagtattatagtgaaaaataccagaagcgagaacatattaaactgcttattcaaaagttgacggatgtcgcagaagagtgtcagaacaatcagttaaagaagctcaaagaaatctgtgagaaagaaaagaaagaattaaagaagaaaatggataaaaagaggcaggagaagataacagaagctaaatccaaagacaaaagtcagatggaagaggagaagacagagatgatccggtcatatatccaggaagtggtgcagtatatcaagaggctagaagaagcgcaaagtaaacggcaagaaaaactcgtagagaaacacaaggaaatacgtcagcagatcctggatgaaaagcccaagctgcaggtggagctggagcaagaataccaagacaaattcaaaagactgcccctcgagattttggaattcgtgcaggaagccatgaaaggaaagatcagtgaagacagcaatcacggttctgcccctctctccctgtcctcagaccctggaaaagtgaaccacaagactccctccagtgaggagctgggaggagacatcccaggaaaagaatttgatactcctctgtgaatgctcctgccaggccttcagaaattgcatggccactccagcgtcatcggactctctcttattacaaagatcactgcccaggaccatcttcccgagaagcatcccttagcctaaaatccacaccaaagggagagttccagaggaatccatgaagaattcccatgcccaggctccatgtgtcatgtggaaacctccacaggtctgctagtgaagaatgcatgtatgtgagatttttgttttctttccaatagcaaatttcaaaggcaagcaacttgcaggctccatgggaactttttaatgaaggacagtgtcttcttttgaaggaaaatcaagctcgtgtttttattcgaagctctggtgtaaaatatttcaaagtcatagaaatagtttgagaaatgcatagcattatttaacactattgaacagccgactttgagcattgtttcttctaactgcccctcaactaccattatcttcaagtcaacatgcatattacattttcatcctttgctttgcaagcactggtggcttgcagtttgctaatttatttatcatagagtcatcaatgtatttgttgctgacatggttttattagatactgtagtgattcaaataagttttctatttgaaaaaaaaaatcacttgattgtatccttgcccagtgaagccatcctaagacttagcaatatggattgtacatttggctgcatgagcaagtcggccgcacacttccagacagtgtgctgtttgaattgactatttgcactcaaagtctgggtattcattggttattggcctgaaatgatcaaataactacaaatgatctgttgaataaaaatagttgagctgatatatgttaagcagatattcaatcagaatgaacaggttccggtggttattttgccgtttgacattttttatggttcatttatttttaatatagagaggaagattgaatatttatctagagaatacaaagacccacatgtaaatgataggtattatctccatgtatatatgtacccacttagtcatgtaagtgcatatacacatacacacacatgagtgtagacatgtgtttattaattgacaatgacccaaatctcttccacaagacttaaaaccaaattcagggacaaatggatagagaagaaaagggtcaaacatcgagattacatggatgttaaattatatggagacgcctaagaaataattggatggagcccttgatgccaaacccgaagtagatttagaaccttatatgaatttgatttatattttgccaagatcaaaaattagatgttaagtatccagattttaagcttgttttaatggtcaaaaaattaggacagaaataatatggacatttattagtatcttccataatttttaagtctgacacatttctattttattctaacataaaaaaacttccattatatatttactaagtatatttaattcacttaactctgtctttataagttcctattttagatggaataagagaaacaaattatatcaaggtaaaactgatcaaaagacataattgaaagttctgaaaaaagaaaaataataatatgtagaaaaatgtaacttagagagtaacacatgaacattgaagttaaaacccagaagccagatgctcacagttttattttactttaaaataaacctgtctgactgtagctttgcgaaatatcttaaaacgcaaaaaccagttgtgtcctgaaaattgtttcaagaatttaatatttttatgaaaattattttatttaactttaagcaataactagagattacaattaaattttaatcaaaatgaaggcttagttcaaacataaggaaacagtgtttgattaaaaaaaacacatctagtaagacgtaaggggaaaatcacatcctctttggagatgattatattttgatctgaagggtttggggtgttcattagacacttaataaaacttaacttccaatgaaaaagaaatcttttgtaaatcattctacttttgcactttgaaagaaaggcgttaatcataaagaagcaagaatggtcaaaatcgaatgctgcatttttataaacaaaattacagactgtctgaaattgaagaagaatgaactaataatagcattcataaccaaacacaatgatgattattgcagaacattgtatcacattttagtccagagatagaataaagttgaataaccttgacttacacaaaactgttttggtagttggatttcattatcttagtgaatttagtcattttacaatatgtttgtatttggccatttactgtaatcacatttttatatctgtacaatgacactttttgcagttgtggggtagtgtgtaacactgtccatcttgcatcattgaaactactacaatgatactatcatttaataatattaatattacttgaaatagactaagataaagaaaaggggtctgtatgatgtgcagttttgtgcctttatgtatttgccttgttctttgtcgaatgtgtgaaattctgtactggggtttttcctataatagaaagtagagctgtgtattaaattagactgtgtctctctgatacctttacactactgagaatagcatggttttggccatgtaaaccaattttcaaagttctaatgacatagccatgtgtttttggttttttatatttcattttaaaatttgagtatcaccatacattaattaatactcctgtagtagataagctgtcattaagtaattcccaaaaaaagggccatttgcttgcattactttgaatttaatgttgcgcttgtgcactgtgttaatattgtttgtgatggattggacgttgtgactcttgccttttaagaagaaaaaaaagataggacaaagtatttgaagctcttaaaatgtacatattttggttcttctatctcaaattatttaaaatgcataattcacatttttgtaataattctatgcaattttgtggcatgatgtttcttccacttgtaattttatgtgctttcatcacaaatccaaaggaaagaataaaaatttcttaacacaacccagcggtt

SEQ ID NO: 2840 - DNA, 432 bp, Homo sapiens
attttacactggtttgttcacaggtggtcaggacgtaataaccgagagaagattggtgttcatgttggctttgaggaaatcttaaacatggagccctattgctgcagggagaccctgaaatccctcagaccagaatgctttatctatgacttgtccgcggtggtgatgcaccatgggaaaggatttggctcagggcactacactgcctactgctataattctgaaggagggttctgggtacactgcaatgattccaaactaagcatgtgcactatggatgaagtatgcaaggctcaagcttatatcttgttttatacccaacgagttactgagaatggacattctaaacttttgcctccagagctcctgttggggagccaacatcccaatgaagacgctgatacctcgtctaatgaaatccttagctgatcc

SEQ ID NO: 2841 - DNA, 374 bp, Homo sapiens
ctggaatccgggcaaagttccccaacaaaatcccggtggtagtggagcgctaccccagggagacgttcctgcccccgctggacaaaaccaagttcctggtcccgcaggagctgaccatgacccagttcctcagcatcatccggagccgcatggtcctgagagccacggaagccttttacttgctggtgaacaacaagagcctggtcagcatgagcgcaaccatggcagagatctacagagactacaaggatgaggatggcttcgtgtacatgacctacgcctcccaggagacatttggctgcctggagtcagcagcccccagggatgggagcagccttgaggacagacccttgcatcctctctagcccatgtcg

SEQ ID NO: 2842 - DNA, 2566 bp, Homo sapiens
ccggaaaagaagtttgaaagagaatgtagagaggcagaaaaggcacaacagagttatgaaagattggataatgatactaatgcaaccaaggcagatgttgaaaaggccaaacagcagttgaatctgcgtacgcatatggccgatgaaaataaaaatgaatatgctgcacaattacaaaactttaatggagaacaacataaacatttttatgtagtgattcctcagatttacaagcaactacaagaaatggacgaacgaaggactattaaactcagtgagtgttacagaggatttgctgactcagaacgcaaagttattcccatcatttcaaaatgtttggaaggaatgattcttgcagcaaaatcagttgatgaaagaagagactctcaaatggtggtagactccttcaaatctggttttgaacctccaggagactttccatttgaagattacagtcaacatatatatagaaccatttctgatgggactatcagtgcatccaaacaggagagtgggaagatggatgccaaaaccacagtaggaaaggccaagggcaaattgtggctctttggaaagaagccaaagggcccagcactagaagatttcagtcatctgccaccagaacagagacgtaaaaaactacagcagcgcattgatgaacttaacagagaactacagaaagaatcagaccaaaaagatgcactcaacaaaatgaaagatgtatatgagaagaatccacaaatgggggatccagggagtttgcagcctaaattagcagagaccatgaataacattgaccgcctacgaatggaaatccataagaatgaggcttggctctctgaagtcgaaggcaaaacaggtgggagaggagacagaagacatagcagtgacataaatcatcttgtaacacagggacgagaaagtcctgagggaagttacactgatgatgcaaaccaggaagtccgtgggccaccccagcagcatggtcaccacaatgagtttgatgatgaatttgaggatgatgatcccttgcctgctattggacactgcaaagctatctacccttttgatggacataatgaaggtactctagcaatgaaagaaggtgaagttctctacattatagaggaggacaaaggtgacggatggacaagagctcggagacagaacggtgaagaaggctacgttcccacgtcatacatagatgtaactctagagaaaaacagtaaaggttcctgaagagggtttctgaggaaatgggcaagatgttgaaggaggttacatgcagctgcttttgggggagggtattagagttgtcaggctcaaagagagtgagagaagcaagttgcatgagtgcatgcagacatgattttttttttactaacttcattagcatttccatacattgtttttaaaaatcataataccaacccttaagttcctagttcacagttattcccacaaaagaaaaagccaacaatagtgtaccatttttctatttattttattgctgtctaatcaataaagaatgcagagctgtcaaaaaatgtgtcttacattagctgtcccaacaggattgtcttccctcccagctctgttttaattggcttttagacccactatctgtcagatccttgccatctgtcagtgtctgcctgcgccacctccgtgcttgcttaacatcctgttgcatgtctagcgtgattgagctagatttttcaggcatgtctttagattcccttgttcttgtcaaagccttgttttgttttacatttgtagtgcaaatcactttgtcaaacatctccagcactaatgtttccatcttagtatttgtgcacactgctataacttccccactgcaaacattccagttttggcattacgaagaagtagctgtgaacctgaagtatttatgataagaaaaagaaaacatctctgctgtagcctacagcccagttgaaagaactctttgaaacgtgatacatcttcagcacctcagtctgggaagaatctagtcagcactgaaatcctggcataataaacacagaagatattcaccacctcaagacaaaggactattgtcaaaagtcagctgcttccattcaaatgctgccttaaacttgagtgcctaaatctgttgattgccaacactaccactacagtatcccacaaagggctttatgtgtcagctcagtgcgacctgctttaactctgcagcaccgctgcagctgccgatgtagcctcggtaggtggctattagagctctaccatatacaggggggcatcttcaaatttatgcatcaaactaaagacatgtccaagtccattttaatttcctcagtggttttatgagaagttttatgggcctcccccaattgtctttttattttgggttatgacgatcatgtttgataattacaatgatagtctctttccacgtgatgcttttgtttgaacctgataaaatttagtgaaactttgtaatgatctatgtgcacttttacttgtaaaatggaatttctgtatgtttatactagaaaatatgattgttgttagtgctcctgtt

SEQ ID NO: 2843 - DNA, 2564 bp, Homo sapiens
cataaatcccgtcagtagtgcggtaaatggagaagctcattcatctcatgagactagagggcagaacagtaatgcccttccttctgtacttctcgagcttctcagtcagtcctgcctcatcccagccatgtcatcttatctacgaaatgattcagttctggacatggcaagacatgtgccactctatcgggcactgctggaattgcttcgggccattgcttcttgtgctgccatggtgcccctattgttgcccctttctacagagaacggtgaagaggaagaagaacagtcagaatgtcaaacttctgttggtacattgttagccaaaatgaagacctgtgttgatacctataccaaccgtttaagatctaaaagggaaaatgttaaaacaggagtaaaaccagatgcgtctgatcaagaaccagaaggacttactcttttggtaccagacatccaaaagactgctgagatagtttatgcagccaccaccagtttgcggcaagcaaatcaggaaaaaaaactgggtgaatactccaagaaggcggctatgaaacccaaacctttgtcagtattaaagtcacttgaagaaaaatatgtggctgttatgaagaaattacagtttgatacgtttgaaatggtttctgaagatgaagatgggaaattgggatttaaagtaaattaccactacatgtctcaggtgaaaaatgctaatgatgcgaacagtgctgccagagctcgccgccttgcccaggaagctgtgacgctttcaacctcactgcctctgtcttcatcctctagtgtgtttgtacgctgtgatgaggagcgacttgatatcatgaaggttctaataactggtccagcggacaccccttatgcaaatggctgctttgagtttgatgtgtattttcctcaagattatcccagttcaccccctcttgtgaatctagagacaactggtggtcatagcgtgcgattcaatccaaacctttataatgatggcaaggtttgtttaagcatcttaaacacgtggcatggaagaccagaagagaagtggaatcctcagacctcaagctttttgcaagtgttggtgtctgtccagtcccttatattagtagctgagccttattttaatgaaccgggatatgaacggtctagaggcactcccagtggcacacagagttctcgagaatatgatggaaacattcgacaagcaacagttaagtgggcaatgctagaacaaatcagaaacccttcaccatgttttaaagaggtaatacacaaacatttttacttgaaaagagttgagataatggcccaatgtgaggagtggattgcggatatccagcagtacagcagtgataagcgggtaggcaggactatgtctcaccatgcagcagctctcaagcgtcacactgctcagctccgcgaagagttgctgaaacttccctgccctgaaggcttggatcctgacactgacgatgccccagaggtgtgcagagccacaacaggtgctgaggagactctaatgcatgatcaggttaaacccagcagcagcaaagaactccccagtgacttccagttatgagctgcattgatgtggacttcatagacacaaaggcttcgaagcacaagccaaatatgtcaatatttgtatgtaagaaactaattatgtaataggtaatgaaactgaaactatactatgcccttaaggagatccagtttaattcaaggtgatcttttatttacctgtacaggagtgtaaacttttttgtgcttttatttttcaattgtgagaaccactgattggtatgttcaacaaatttgtgtatacaaagaaatggataaatcactgctatataagggaaactaccttaggaaagaatgtttactgaatgtttattttattttattttttttttactatagagtgaggggttgttaacaaagaatatatattggtcattcttacaactactatttaaagtcagcaacttttcactgaatttgatagattttatgtttggccatatcttcatgctcacatttgatttctgaagacctcctacatacacttcaataaaagttaaatggacatactccctcttttttgatttactggtacatttttaaaataataaatctgccataaaatgcattatatctggagacttgcacttgtatggatgaatttattacattcaacatatttaattttatgccttctaattctaagatgcagaaaaaaataaatgaacatgattttattctatgccaacatttgggcctctgaatgtatctgttatttgaatttaagtatttgaaaaggaatggtcaatttgaaagtcattctaaactgattttttttttctaaagggctccttttttcctggactatgtggttttatgactaaagtcacatgtatgtattaaacattgaggctctgtagaggagagaggatgtacctctctggtgctgttacagtacattctgtacctgccatacaggctcattttcatgcaaattcttcctagagccaaataaataaagacttaggtgaattagt

SEQ ID NO: 2844 - DNA, 2206 bp, Homo sapiens
  misc_feature (1)...(2206): n = a,t,c or g
ggcacgagaagccttttaaatttaactgaaagaaagggtacccagtgtgttgaacaaattcaagagttggttctacgcttctgtgagaagaactgtgaaaagagcatggttgaacagctggacaagtttttaaatgacaccaccaagcctgtgggccttctcctaagtgaaagattcattaatgtccctccacagatcgctctgcccatgtaccagcagcttcagaaagaactggcgggggcacacagaaccaataagccatgtgggaagtgctacttttaccttctgattagtaagacatttgtggaagcaggaaaaaacaattccaaaaagaaacctagcaacaaaaagaaagctgcgttaatgtttgcaaatgcagaggaagaatttttctatgaggagcagggaaaacctgaggtgcttggaggtccagacacaagaagaggattggaaccagttccgatacagcacaatggttggtctgttcccccagtattagaataaattaaaacatacaagccaggatgaatgaagccaataggaaataaaaaacaggcacacaacattatttggggaaaaacacctctagtgacacattttcttcatctgcactgattatttcagcaaaagaaatctagtatgttttcatacatctgatgtataaatttgctgaactttgagttagttttcttaagataatttttcatattaagaaaattttccttttctaacctattaaaatacctcactatcatttcaaaaggttaaatgagttgatcactatctctgctctgtgctcctcaaaatataatttcaaatggatccgatctaaatctatacctagtgcagatttgcaaaaaaagaaaaggaatagtcattaaggatacctgttaccatggccgcgattgttagcacttcatctacacagtcaaattcacaggacgctaagatagacttcgagagttgtggatcaagaggaaactctgacatgatgattccaaattcagaaagatttccatcattatccagtgctgccagataatctaagtcttccaatgcctgcatcaaactttctggtgctaggaaaggaaaaaaataataatttaagagtctcatatggctaagatggagaaacaggtactggacttttccctcctgcatgaaacaagcaaacaatggacaaaatatgtgaaacaacggtttgcaagccaccaaataccagggagtgaaggatagtgattcttgagagggcaaactcaggaggggagccctgtgattgtccagctcatgctccgaggagggtcccagctgcagtgtgcatgcggggggaacccaggtggagcctgccagcctccctgcagtaggaaaacaatgccagggatccagggagactaaggtggccggaactcgcggtcacagtactggagagagacacacagatctaagtcgggggccagagggagctccctcaactaggcagcacagccctactgatcagcgcatgtgtgtaaggaaccacctcaggccagagaaagagccatgtgagaagattaggaagggaacaagtggtgcctgacacagggcccctagggtaggggccctgtcccccacccacccctagcctggaaaaccctcatgatttatggggcactggggtagaaaaccacaagtgagaaaccccctagatgggcacctgcccaccctgacacaggctatacagcaggaccctgaaaggatcacactgccatccctaggacaaagctcaaaagtacctctgggactacaaaaatattcagtgcccaagaaggtaaaatgtacaatgtctagcatccagtagagaggcatgaaaagcaggaaaatacattgcataatacagagaaaaattaatcacaactgacctggatctcagatgctagaaatagtagacaaagatgttatttcccagtgcaaataaagaaataaagatagcaagctgattctctccatctctttatttcttttaagtttatgtaacatcgataatgatgtggtattatatatgctcagtctttaccaaagtttttaaaaatccatttatttaaagaaatatattctctttgtggaataaggctatatatagattggtgcaaaagcgnacgcgtgggtcgtcccgagggtttcaagcggttcgcacgctgtcagtgttaactctccccggccactgaca

SEQ ID NO: 2845 - DNA, 1733 bp, Homo sapiens
ttaaaatcgagatccctagtctagagtggcggaattcgcttcccatcagcatctgcatatgttgctgtgcatcgtccgtgcgttcagtccttcccacatttgtcaattactttgtgccaggctctgtgctaggcttaactgagcctggactttggtatctgatgtttaaatgttgaccctgccatttagcagctctgagtggatcacactccagtcctttctaagcctcagtgtttctcatcagtaaaatggggagctacattatcagcccgctcccaaaagacttcaggcattgggcgcctgatggtgcatgtcattgaagctacagaattaaaagcctgcaaaccaaatggaaagagcaacccatactgtgaaatcagcatgggctcccagagctacaccaccaggaccatccaggacacactcaatcccaagtggaattttaactgccagttctttattaaggatctctaccaagacgtgctgtgtctcaccctgtttgacagagaccagttttcaccagatgatttcctgggtcgtactgaaattccagtggcaaaaattcgaacagaacaggaaagcaaaggccctatgacccgccgactgctgctgcatgaggtccccaccggggaggtctgggtccgttttgacctgcagctttttgagcaaaaaactctcctgtaggggttctaaaggacagcaccagcgggacagcccacaaggctggggctggagaatgagagactgcgctctcttggggctgagggagcaccatgcagcttcacccctcacaaagccatgcacgctgggggctctgttttcctgcacactaaatagctagcaatctatgcaaacacctttcccataaagaaaccaaaccccatagtacagtgccttgtcctagtgttcacatgttcagctctgtttgtttagatgccaaggtttccattttcagggctataaaaagtattacttggaaatgaggcatcagaccaccagatgttaccgctcggttgaatgtgtccaccgtggagtggtttggtgacgctgtaaccattccacgccagtgacctctgctgggtcacagccactcaggaggggaagggtcaggatgagaggctgcagcctcgacacttggcgcggcctgatactgaaatagcgtctactcgtgcactgaataaaaacagaaacttgatcattttattcctgattagattttatcactctctgctaagacaatatagtctggagtataagtgggaaagcttgatttaaatactgtgaactctaataatgtggaaaatatttttcaactttaattttctgaagtataaattatttatgtaaattcattgtttttgcatatttcttaggacatgcatctttaagctttatcattgcccatatgtacagaaagagaataaagacatatgtttatggatggaaaaaaaaaaaaaagggggggccgttttaaaggatccttgggggggcccaagtttacccgggcttgcaaggtaaaatttttttccttatagggggccgaattaaaacctacttgggaatttttggaaaggacccttatttttggggggggacatattgggccaacctccctccagaaatttaaggctttagggaaaaaaaaaaattttaaggggaaaaaggggtaaaacaacctccatatccttgctgttggaaagttttctttacggagtttgattaatgaaaatttt

SEQ ID NO: 2846 - DNA, 1800 bp, Homo sapiens
ttttttttttttgcttttataaacattcaaccaacatgttctttaataatctcttctttaaagaacaaaataatcaagcacatggcattaagttaaatgtctctgcacatgaatttccaccttataaatctggtatattaaattgggctgcaaatagatttgcatattttcttttttgagtactatgataggtgaaatggtatgactataaaaaggatttgtttctttttgtctcctggaatgacatgatgcctttctagagaaagaaaaattgcaggctacaggaaaatgataaaaactactggattcatttagactattcgatttaggaaggtacaaccacttctttaacatcaagctaaaagtgggggaaagtctcagtctcccaggtaggtctcctctcacactgtcctgggtggcaggcgctgtttatacatgcctgctatcgctctggctgcactgtagatcatctgccgacgggacatcccagtaaatgccatgtgccaatcagtccggctgacattcagtaaactcttttccaggacttcacccactgtcaccaaaaggcctgaccacctcagattatagtcctggggagttagactttgagcctgctgtacaaattccaaaggcactggtgtggcttgtgtaaatgtttctagatgaatgccatggacaggatcttcaaccaccaaacaaccaatgtcaaaccatttgtcaggcagcaattctgcaatgaagttttctactgacacagctgtctgtttttcatggatcaccccagttcgacgcaagctatctatccgttcctgagcaccttttaatccagctgcatagcccactggttgtggggcaatattggactgtccagcttcccctacaaccacagctaagccaaagacctcctggaaggcatctcggacagcagcaacttttacttctttatttgaggtcactacaatatccagttcacctccagatttgatatagggagccatgccagggtccagcgttgtaatcatgctttctactgaatgttttgtcttatcaagcacagacttcaccataggattcccagccacacccttaataaaaccccagattccaccagcagatgcttcatcctgacctctagtaattctagggtcttcttgctcctctgggaaagtaatggctgatgtggttccagttccctgtgccagagatgtcaaactggcttgctgagtaataggagttggcaaaagacctgttcctgaaggtgcagaaaatgatggcatcaggggtgtctggggagctctcccagcatgtccccttgtaatgtcataagttgaaccaacagaaaatcctgatataggaggacccgaagggggtgcaggtaaaagagtgtttggggcagaagttgaaggtgggaagtgagatacaggaggattaccgaaggcagcagcagttgatggagaaacaggaggtggcatagaagtaacaagtggtgggacagaaggaactgcaggaggaggcacaaaaggtaatggtgctgaaggcctcacaggaggaaggggcggctgaggagtagagtatgcgagtggtgggaaggactccatggaggatacatttggagaagaaaaagaactggttgccgctaatggaacaggggtagaagacatagcagtagcagccagccctgcaggatttggtggaggagtcccaggtggtgttgtctctattccactctcttccatcatttttcttcaattatggtatactggggaccgggaaagtgcctgcgtggtcgctgaagagtgt

SEQ ID NO: 2847 - DNA, 676 bp, Homo sapiens
ttgattttggacacgctcagcttggcacgagggcctgcagcagatgaaagccaatgatcctagcttgcaagaagtcaacctttacaacattaagaacattccaattccaaccctgagggaatttgcaaaggctctggagaccaacactcacgtgaagaagttcagcctggccgcaactcgcagcaatgaccctgtggccattgcttttgcagacatgctgaaagtaaacacgaccttgacaagtctaaacatagaatcccattttatcactggaactgggatcctggccctggtagaggcactgaaagaaaatgacaccttgacagaaatcaagattgacaaccagaggcagcagttgggaacagctgtagagatggaaattgcccagatgctggaggagaattcaaggatcctcaagtttggataccagtttaccaagcaagggccacgaacaagggtggcagctgccatcacaaagaataatgacctggcctggcaaaaggacacccaggagcagacatccatttggcaagtggtcagtcagtcaatagcaggcttcaatccccagtttgaggttcagggacagaatgccagatcttggatggaggaactgggcaaggcgttccaccagttcgtaagaagagagttgaagcagaccgaaggtaaacttccttga

SEQ ID NO: 2848 - DNA, 782 bp, Homo sapiens
tttcgtgcacaatggccggcccccgcgggtagtggagcccgtttgttccgcccgtgtcgagcctggagccagaacctgtgaagagcggaagggccaagggacgtcttctccacgccgctccgactccaggggagccgtggcctcctctccgccctagcgctgagaaccgtgggtaccgatggatgtggccgagagccctgaacgggatcctcactctccagaggatgaagagcagccacagggactctcggacgatgacattctgagggacagcgggtccgatcaggatttggacggggcgggggtgagggcttctgatctggaggatgaggaaagtgcagccagggggccgagccaggaggaggaagataatcactccgacgaggaggaccgggcaagtgagcctaaatcccaagaccaggactcagaggtgaatgagctgagccggggcccgaccagctccccctgcgaggaggagggggacgaaggggaggaagaccggacaagcgaccttagggatgaggcctcctcagtcaccagggagctggatgagcatgagctagactacgatgaggaggttcctgaggagccagctcccgccgtccaggaggacgaggctgagaaagcgggggctgaggatgatgaggagaagggcgaaggcactcccagggaggaggggaaggctggtgttcagagtgtgggagaaaaggaatccctggaggctgccaaggagaaaaagaaagaggacgatgatggagaaatcgatgatgaggaaatgtatt

SEQ ID NO: 2849 - DNA, 1849 bp, Homo sapiens
cgctgttgccatggcagtgtggtcctggctgccgcggaggcaggtgccggggtctcctttgcctcaatgtgaagagcttaaaaagaggaggagaggagaactcccccggccatctctgtgatcccagccgccgcattttacacagaaaatgaatgaaaataaagatactgattcaaagaaaagtgaagaatacgaagatgactttgaaaaggacctggagtggttaattaatgaaaatgaaaaaagtgatgccagcataatagagatggcttgtgagaaggaagagaatattaaccaagacttaaaagagaatgagacagtaatggagcacaccaaacggcattctgatcctgacaaatctttgcaggatgaggtctcaccaagaagaaatgacatcatttctgtaccaggtattcaacctttggatcccatatcagattcagatagtgaaaactctttccaggaatccaaactagaaagccagaaagacttggaggaggaagaggatgaggaagtaaggagatatattatggagaaaattgtacaagctaacaagcttctacagaatcaagaaccggtgaatgataaaagggagcgaaaacttaagttcaaggaccagttagttgatttggaagttcctccactagaagacactactacttctaaaaattattttgaaaacgaaaggaatatgtttgggaaactgtcacaattatgtatttccaatgattttggacaagaagatgtgctcctgtcacttactaatggaagctgtgaagaaaacaaggataggacaatactggtagagagagatggaaaatttgaacttctgaatttacaagacattgccagtcaggggtttttgcctcccattaataatgcaaatagtacagaaaatgaccctcagcagttgttacccagatcttccaactcctctgtcagtggcaccaagaaagaagattctacagcaaagattcatgctgtcactcactcatcaacaggagagccgctggcttatatcgctcagccaccactcaaccgcaagacttgtccaagctctgctgtcaactcagatcgaagtaaagggaatgggaaatctaatcacaggacacagtctgcacatatctcaccagtgacttcaacatactgtctttcccctcgacagaaagaactacaaaaacaactagaagaaaagagagaaaaactgaaaagagaggaagagcgacgaaaaatagaagaagagaaagaaaaaaagagagagaatgacatagtatttaaagcgtggttgcaaaagaaaagagagcaggtcttagaaatgaggagaattcagcgagcaaaggaaattgaagacatgaacagtagacaggaaaacagagatccacaacaagcttttcgattatggcttaaaaaaaagcacgaagagcagatgaaagaaagacagacagaagaactaagaaagcaagaggaatgtttattcttccttaaaggaacagaaggccgggaaagggcctttaaacaatggttaagaaggaaacggatggaaaaaatggcagagcaacaagctgtcagagagagaactagacagctccgactagaagctaagcgttctaaacagttacagcaccacctatatatgtcagaagccaaaccttttcgttttactgatcattataactgaaagtttctattaaatatttcagtgggcagctgctatcaaaattttggatatgatttcttagggtctgtgtactttggttgtattctaaattatggaaatggtatttatcttttattgacagtgaatttgtttttttaatactagaacaaaataaatttttttctcacagtg

SEQ ID NO: 2850 - DNA, 896 bp, Homo sapiens
atgctgctccatgaggtggggattttgtctgcttgttcactgctgtgtgcccagggcccacgacagtgcccgatacagcaggcgctcaataagtggcgaatgaaagacagggcaaggcggagagagaagaaacagaaagggaaagagaaagcccgggccgccagagcgcttaatcacacctggctcaggctccacactggtcctccagctcccttttctcagcgatggactcacagccccacccggagcgctggagcgcggacgcggtcactgcgcgtgcgcctcaccgcgctggcaccccggcctggcagcctttggggacctgaaccagctgcgcctgcgcaggtggaacgggtggaacgggtgggggagcggacagtcgaacggcctgagagggctcagctggtccggggctgcggcgcctttgtgagcgcggccgccggccaggatcgagccctggcccgggccctggcccagccccggcctccaaggaccgcgccgaaggaggtgcccactggagggaggaggcgctcgactttctcaggatactgtccctctcccacagaggagctgaaggagtaggacagaagaactgtcaaattctggaatccttaaagccatgtccaaggatttggtgacatttggggatgtggctgtaaatttctctcaagaggaatgggaatggctgaaccctgctcagaggaatttgtacaggaaagtgatgttggagaactacaggagcttggtatcattgggtaaggacatgtccccttaattcagaatctgtacatgggactgagctccaatgtaatatttgggaaacctctgacgtgcttcactaaatttccttttcttgtgcttcccaaaataggttgaatttgtagaattggcagctt

SEQ ID NO: 2851 - DNA, 402 bp, Homo sapiens
ggctagcgatttctacctgcgctactacgtagggcacaagggcaagtttgggcacgagtttctggagttcgaatttcggccggacggtgtttacgtgtaattgttcaccataggacgcatgaagagtaccaagcaagaggggagaggtaaagttccacaggagggagtcaggaagatcttcttagaggacggcactcttgagatgagtctcgaaatgagagacttggcctttgagagaaaaaaaacagacttccagagcagtatgagcagaggatgaggtgaaactgctacccaagtagtgtgcaacagtgtgttttctgacagcgctatccttagagaatgttacattgatcttgcctacctgcaacaagaaagttcatttggatatatattttttgggtt

SEQ ID NO: 2852 - DNA, 782 bp, Homo sapiens
cactgagtccatcgtgcgggcggaggaagacctccgcggacagacatgcgagacacccctgctcctcgttggcaagccgccccatgatgaaggcctacacctgggcacggagacttttggatgcagcctttaacgaaggacgcaggcatgagcctgtcctctgtgacgctggccagcgccctacaggtcaggggtgaagctctgtctgaggaggaaatctggtccctcctgttcctggccgctgagcagctcctggaagacctccgcaacgattcctcggactatgtggtttgcccctggtcagccctgctttctgcagctggaagcctttctttccaaggccgtgtttctcatatagaggctgctcctttcaaggcccctgaactgctacagggacagagtgaggatgagcagcctgatgcatctcagatgcatgtctattctttaggaatgaccctctactggtcagcagggtttcatgttccgccacatcagcccctgcagctctgcgagcccctgcactccatcctgctgaccatgtgtgaagaccagcctcacaggcggtgcacgttgcagtcggttctggaagcttgtcgggttcatgagaaagaagtgtctgtctacccagcccctgctggtctccacatcagaaggctggttggcttggttctgggtaccatttctgaggtcagtagagaaccgtgcttttcaagcagtagctgctggtcatgtgtggctattaaaatttgaattagttatattatcattaactaaaataaaat

SEQ ID NO: 2853 - DNA, 1950 bp, Homo sapiens
  misc_feature (1)...(1950): n = a,t,c or g
tttcgctcggctgcacgaattcggcacgaggaaaaggccaagatgatgaagtgagaacgttgatggcaaatggcgccccattcaccacagactggttttccaaattgagagtctcctgtggatatataggtgataattgtaagaatggtgcagatgtgaatgccaaggacatgctgaagatgacagctttgcattgggccacagagcgccaccatcgagatgtcgtagagttacttatcaaatatggagctgatgtccatgctttcagcaaatttgataaatcagcctttgacatagctctggagaaaaacaatgctgagattttggtcatcctccaggaagcaatgcagaatcaggtgaatgttaatccagagagagccaaccctgtgactgaccctgtgagtatggctgctccattcatcttcacgtcgggtgaggttgttaacctcgcaagccttatttcttcaaccaacaccaaaacaacctcaggtgacccccatgcctcaacagtacagttttcaaattctaccacctcagtgctggctacccttgcagctcttgctgaggcatcagtccccctctccaactcacacagagccacagccaatacagaggaaattatagaaggaaattccgttgactcatcaatccagcaagtaatggggagtggaggccagagggtcatcaccatagtgactgatggagtccctctgggtaatatccaaacttcaatccctactggaggcattggccacccatttattgtaactgtgcaagatggacagcaagttctaactgtacctgctggtaaggttgcagaggagactgtaattaaagaggaagaagaagagaagttgccactaacaaagaaaccaaggataggagagaagacaaacagtgtggaggaaagcaaggaaggcaatgaaagagagctactacagcaacaactccaggaggccaatcgaagagcccaggaataccgacaccagctcctaaagaaagagcaggaagcagaacagtaccgtcttaagctggaggccatagcccgacagcagcccaatggagttgatttcaccatggttgaagaggtggctgaggtagatgctgtagtagtcacagagggggagttggaagagagagagacaaaagtgactgggtcagcaggggccaccgggcctcccactagggtttccatggcaactgtttcatcttaatatgcaagggccacaatttgcactgtgttcatattaatcctcttttaaaaaaggaaatatacagaagacaaacattgtataaaaactaagagtgtctttaagaagaaaactatagcagggtacaatgcttgggctcaggaagtttctctgtgcaactagaaaattcaaagccatatttagggaacattttttctgaggggccaaaagaataaaggaccaaatttcttagctcatatcattgctttaaacatagaagtaaaagaatactgcatgttgtgggttgannnnnnnnnnnnaaataactgactttctcacaaaagattttaagataacatttctaatatatatgcaccaatatatatgcctttaataattataccatcaagtgacctgaaaatgccccttagatttatgatgcgtatctgttggaaaaaccaattggaagggaagttagacaagctttggggaagagaaaaggaatatagtccatttccaaaggagcaggaactcccaaccttaagttaatttcactgaagagaattttcccnnnnnnnnnnnnnnnnggaaacaaaggggattttaacttcnnnnnnnnnnnnngggggggnnnnnnnnnntttttttaaacttgggccggggggtaaaccccttgatctcgaactttttggatggcaaagggggggggaatctctttctaggaaattaaccctctcttttgtaaattcttatcactcgg

SEQ ID NO: 2854 - DNA, 1335 bp, Homo sapiens
atgattgaagacaataaggagaacaaagaccattccttagaaaggggaagagcaagtctcattttttccttaaagaatgaagttggaggacttataaaagccctgaaaatctttcaggagaagcatgtgaatctgttacatatcgagtcccgaaaatcaaaaagaagaaactcagaatttgagatttttgttgactgtgacatcaacagagaacaattgaatgatatttttcatctgctgaagtctcataccaatgttctctctgtgaatctaccagataattttactttgaaggaagatggtatggaaactgttccttggtttccaaagaagatttctgacctggaccattgtgccaacagagttctgatgtatggatctgaactagatgcagaccatcctggcttcaaagacaatgtctaccgtaaacgtcgaaagtattttgcggacttggctatgaactataaacatggagaccccattccaaaggttgaattcactgaagaggagattaagacctggggaaccgtattccaagagctcaacaaactctacccaacccatgcttgcagagagtatctcaaaaacttacctttgctttctaaatattgtggatatcgggaggataatatcccacaattggaagatgtctccaactttttaaaagagcgtacaggtttttccatccgtcctgtggctggttacttatcaccaagagatttcttatcaggtttagcctttcgagtttttcactgcactcaatatgtgagacacagttcagatcccttctataccccagagccagatacctgccatgaactcttaggtcatgtcccgcttttggctgaacctagttttgcccaattctcccaagaaattggcttggcttctcttggcgcttcagaggaggctgttcaaaaactggcaacgtgctactttttcactgtggagtttggtctatgtaaacaagatggacagctaagagtctttggtgctggcttactttcttctatcagtgaactcaaacatgcactttctggacatgccaaagtaaagccctttgatcccaagattacctgcaaacaggaatgtcttatcacaacttttcaagatgtctactttgtatctgaaagttttgaagatgcaaaggagaagatgagagaatttaccaaaacaattaagcgtccatttggagtgaagtataatccatatacacggagtattcagatcctgaaagacaccaagagcataaccagtgccatgaatgagctgcagcatgatctcgatgttgtcagtgatgcccttgctaaggtcagcaggaagccgagtatctaa

SEQ ID NO: 2855 - DNA, 3093 bp, Homo sapiens
ttttttcaccaccttatcaaatttattattccaatggcactagtacagctggaggtgctcatggtgacaccgcacaggacttcctgcctgctagaaatcatctacccgcgtgttcctttcccctttctggggcaaaagccactgcgggccatgtacccaaataaacctcttaatgcgtttgttaaaattagtttggacatctgagtttccctctgaagaaatggaaaaagtgttgggtgtcccatcccgcctccccctccccgaccggcccattaagtccctactaagagggcgtgtctgctgcctccggactctggaaataaatattgaaagaaacggcatcaagtgttatggttgagtgatggcacgcagcgggccccagaaacctctcaggggagcgtcgctgtgtcgggacagtctccaggtgtcgtctgagaattcgaggacataattcgaggacgtggtgctgtgggtgctgcgagtccccggggcggcaggcgctgcaggaagggccgcctacaatttgtccaggaagttgtccagggcagggatgccttctttcaggcccttgcgcttgcgggtctccgccaccacctggctggggcggctgctgttgtcgaaggggtctccgggcaggatctgccagtggtcaaacacacactgggggaacgcctggccgcccgtgttggacctcaggtcagcggtgaagccaaaggactcgttgacgggcagataggccttgaccacaaacatgggggtgccggccacctgggactcctcgaacacgtggccccgcttcctgttcaaaaccccgtagatgccaccgaccacctgctctggacactggatctccacaaggtagatgggctccatgaggcgtggctgggcggtcagcacactggcgtagaggcagcgccgtgctgtggggatgatctggccccctccgcggtggatggcgtcggcgtgcagggtgacgtcgtggacgtcgaagcgcacaccccgcatgttctcctcacacagtgcgccctccttggtggcccactggaagccggccaccacactgtccttgatctcgttgaggtactgcacacccttggtgatgtcggtgaggatgttggggccggtgccgtcgggcccaaagcaccagatcttgcgggcctcagccacgtcccactcgtacttctcggccaggtagcgcgcccgctgcttgagctcctgacgggcggacacctcgcctttatcgatgtcctcggccaggccgtcggggaagggccgcgccttcatgtacagccggttgtgcttgttgggggacttggagaggcagagcacgttcgactcttcactgaccgtctcgcggtacgagacgaccgggtcagatttcttgatggggatgcaggcgtggtcctcctccaggtccttcaggcagatctccaggtgcagctcgccggcgcccgcgatgatatgctctcccgactcctcgatgatgcactgcaccatggggtcggacttggccagccgcttcagcccctccaccagcttgggcaggtcagccgggttcttggcctccacggccactctgacaacagggctgacgctgaacttcatcacccgcatgttgtgcgcgtgctcgaaggtggtgatggtgcccgtcttcaccaggaactggtccacgcccacgaggcccacaatgttcccacaaggcacatcctcgatgggctccacgtagcggcccatcatcaagattgttctctggattggcttcaggtagaggtcctccttcttcccaggggtatagttgggccccatgatcctgaccttcaggccagtggagaccagccccgagaagactcgtccaaaggcgtagaaccgacctttgtcggaggttggcaccattttggaaatatacatcataagagggcctttggggtcacagcttttaatgcccatggcagcctcgtcgtccgggggcccctcgtacaggagctcgcagcggtacttctgggccgtcacaggggagggcaggtggatggtgatcatctgcaacaaggcgtctccggcaggcagccagcggcgcatcacagccttcagcaggggtttgccttctttgtccttgtcctcgctgtccagtttgatgtccagtttctctatcagttttgctgtctcctctttcttgaaattcatgatcgcatcaaacaccttgaagatggggtccaggatcagctggcagaaggtgcgtggcagcttcttcccttcggggctggtggctgacttgctgaacttgccgttggctgggtcaaagtacctgtcaccccacagcttcttcatcatgtcctctactttcttggcccgctcggcaggccccaactggccctcccccttggcggcgaacttggccacatacatctcggcaaactgcttcagggtgaaggcccacccgtggaggccagacccaaagcccacggtaccgaggacaggatcgatcatgatgttgcccatggggccgctctcgccctcgccgtaggtggagatgatgacgttcacgttctccacgatgcgctggaaagtctggtagagctcctcgggctccagctgcagctccagcagggcgcggtccatcttgttcatcatcagcacaggcttgatgcgctcggcaatggcctgccgcagcactgtctccgtctgcacgcacacgcctgacacgcagtccaccaccaccaatgcgccatcggtgactcggagggcagcagtcacctccgaggagaagtcgacatgcccgggggagtcaatgaggttgatgaggaagccggcaccgtccttgctctgcttgatgaagttcaagtcattctccgagagctcgtagaagagggagatggcagttgacttgatggtgatgcaacgctcctgctcgtccttccgggtatcagtgaagcgtgtctccccggcccgggccgaggcgatgatgcccgccttgcacaccagggagtctgtcagcgtggacttgccatggtccacgtgggcgatgacagacatgttgcggatgttggccttcttgtccatgatggcgcggatctgatccaccgtaaaattaaccat

SEQ ID NO: 2856 - DNA, 753 bp, Homo sapiens
ctcttcaaccaggagccgagatttctgttgctctgaagccatccaggggtctttaaccagaagagagaggagagcctcaggagttaggaccagaagaagccagggaagcagtgcaatggcttcaaaaatcttgcttaacgtacaagaggaggtgacctgtcccatctgcctggagctgttgacagaacccttgagtctagactgtggccacagcctctgccgagcctgcatcactgtgagcaacaaggaggcagtgaccagcatgggaggaaaaagcagctgtcctgtgtgtggtatcagttactcatttgaacatctacaggctaatcagcatctggccaacatagtggagagactcaaggaggtcaagttgagcccagacaatgggaagaagagagatctctgtgatcatcatggagagaaactcctactcttctgtaaggaggataggaaagtcatttgctggctttgtgagcggtctcaggagcaccgtggtcaccacacagtcctcacggaggaagtattcaaggaatgtcaggagaaactccaggcagtcctcaagaggctgaagaaggaagaggaggaagctgagaagctggaagctgacatcagagaagagaaaacttcctggaagtatcaggtacaaactgagagacaaaggatacaaacagaatttgatcagcttagaagcatcctaaataatgaggagcagagagagctgcaaagattggaagaagaagaaaagaagacgct

SEQ ID NO: 2857 - DNA, 416 bp, Homo sapiens
tgggaaagcattcagttgtttcacatacctttctcaacatagaaggactcacatggctgaaaaaccttatgaatgtaaaacatgtaagaaagccttcagtcattttggtaacttaaaagtccatgaaaggattcacactggagagaagccatatgaatgtaaggaatgcaggaaagcattctcttggctcacttgccttctgcgacatgaaagaattcacactggaaagaaatcttatgaatgtcaacaatgtggtaaagccttcactcgttctcgtttccttcgaggacatgaaaaaactcacactggagagaagatgcatgaatgtaaggaatgtgggaaggcactgagttctctcagttccttgcatagacataaaaggactcactggagagatactctataaatgtggaaaa

SEQ ID NO: 2858 - DNA, 407 bp, Homo sapiens
atgaatgtaaactgcttagcacctcacctgtgagagcaagcattctgaaggtgctagctttcattattactttggcatctctggacttacgcgttttcttgggctgcctcttcggcttttgagacctttctgtagcaatatatcatctcgatgagcagccacaaggtgaggaagaccagaaggatgtacatcatgatttctgagaccacagaggtgaagtcctctccagctgaaagaaagagaatgaggttcagaatatgcaaatccagcaaacctagagccgtcattggagccatatttttaagtacagcttaaataaagactgagtaaagaaactcaagaagatgtcaaaggtattccaaatcctgactctcccgcccattggctttctcactgactgtcatcac

SEQ ID NO: 2859 - DNA, 2031 bp, Homo sapiens
cggcaccgatccgcaattcccggatcgacgatttcgtgcgcagagtggagtcaaaggcaaccagtgctcgctgcggtctctggggatcgggaccgcggcggcggcccgcgagcgggatgttccggggcttgagcagttggttgggcttgcagcagccggtggcaggcggtgggcagcccaatggagatgctccacccgagcagccgtccgagacggtggctgagtctgcggaggaggagctgcagcaagcgggagaccaggagctcctccaccaggccaaagacttcggcaactatttatttaactttgcatctgctgccacaaaaaagataactgaatcagttgctgaaacagcacaaacaataaagaaatccgtagaagaaggaaaaatagatggcatcattgacaagacaattataggagattttcagaaggaacagaaaaaatttgttgaagagcaacatacaaagaagtcagaagcagctgtgcccccatgggttgacactaacgatgaagaaacaattcaacaacaaattttggccttatcagctgacaagaggaatttccttcgtgaccctccggctggcgtgcaatttaatttcgactttgatcagatgtaccccgtggccctggtcatgctccaggaggatgagctgctaagcaagatgagatttgccctcgttcctaaacttgtgaaggaagaagtgttctggaggaactacttttaccgcgtctccctgattaagcagtcagcccagctcacggccctggctgcccaacagcaggccgcagggaaggaggagaagagcaatggcagagagcaagatttgccgctggcagaggcagtacggcccaaaacgccacccgttgtaatcaaatctcagcttaaaactcaagaggatgaggaagaaatttctactagcccaggtgtttctgagtttgtcagtgatgccttcgatgcctgtaacctaaatcaggaagatctaaggaaagaaatggagcaactagtgcttgacaaaaagcaagaggagacagccgtactggaagaggattctgcagattgggaaaaagaactgcagcaggaacttcaagaatatgaagtggtgacagaatctgaaaaacgagatgaaaactgggataaggaaatagagaaaatgcttcaagaggaaaattagctgttcctgaaatagaagaataatccttaacagtctgcaaactgacattaaattctagatgttgacaattactgaatcagaaggcatgaaagagtataattttatgaaattcaaaattattcttttttcaagttgaaacttgcctcttctactttaaaaaagtatatagaacagttacttctaataatcagaaagagatgttttatagaacatttctttaatataaagttagagatgtcttcataggcagtatggctatctttgccacagaaacataagtaaaattttagagttctgttttccatgaggtcaaaaatataatttattcctcagtcatggttttctaaatatctgtactccacattccattttaattgatatgagggtgttaaagtacctacttaatggggttgattactacaaaaatgaccaaattataccaaagaacttaagaggaagcactttcagaactattcacttgccaggtattttctaaaattccacctgaaagccaaaagataaaataaataagttgattttaatgatataagcatcacacaattttacattaagaaatactgtgcaggccatgcgtggtggctcaggcctgtgatcccagcactttgggaggccgaggtgggcggatcaccggaggtcaggagttcgagaccagccttgccaacatggtgaaaccctgtctctactgaaaatacaaaagttggccgggcatggtggcgggcacctgtgatcccagctactagggaggcttttgaacccgggaggcggaggttgcggcgagctgggatcgcgccactgcactccagcctgggtgatagagtgagattcagtctcaaaa

SEQ ID NO: 2860 - DNA, 1104 bp, Homo sapiens
  misc_feature (1)...(1104): n = a,t,c or g
tttttttttcgtgaggaagggctcatgccccttatttatgggaaccatttcattctaacagaataaaccgagaaaggaaaccagagctgggactgctgccgtctgtccggtagagtgaagcaagggggctggaatagggcctgttcagcccctgtccctgctgaaacggctgtgggaggctgggccctgggacgccctctcatagcgtccagcgatccagacaaataggagagccgtgacggcctgaatgccagccagcaggaagaagtagaggtccatccggcaattgttgatgttcccaaagtccttggggcagtgcagccagcccccgggcaaggacagcagtgccactaggctggagcccaacagtgagcccacccccgacaggcagaagaagatgcccatgatggcgccctgcatggagcgcggggcctctgagtaggcaaactccaggcctgggatgctggcaaagatctcactgatcccaatgagcaggtactgagggatctgccaccagatggacagtggtgccgcgttgtacaggacctccccaatctgctgggacacggtctcgttgtggtggatgtagtgtaagcgctccatctccaggactcctgccacaatgacggaggtaaaaccaaagaacatccccagcgccatcttctgcagagcagagggaagcagcttgcaccgcagcagtaaagggtcgatcaagcggtccttcagagggaccagaatcagcaccaccacaacattggccaggaggagccaggcttccgggatctgggcaggaggaagtcaggagaggcaggctagcagagtgcaaggagcctggctgcagtcaggagacctggactctagactggccctgggtgaccctggggtccagctcctttccctctctggagttcatgctcctcagctgtgtaaccagggagtgggattatgtagagatggcaaataggttcctcttgtattctaacttttatcaattggtagtggctgattatggaacatttatgggctcagcataaaaaaagtcatgattgactagtgatgtctccgaattcccccactggatacgaactcgagnnnngccgctcc

SEQ ID NO: 2861 - DNA, 2901 bp, Homo sapiens
gccctgaggattcagccccacaatattcacgcctcttcccaaacgcatctcagcacatcacgccgagctacaactacgcgcccaacccggacaaacactggatcatgcgctacacggggcccatgaagcccatccacatggaattcaccaacatgctccagcggaagcgcttgcagaccctcatgtcggtggacgactccatggagacgatttacaacatgctggttgagacgggcgagctggacaacacgtacatcgtatacaccgccgaccacggttaccacatcggccagtttggcctggtgaaagggaaatccatgccatatgagtttgacatcagggtcccgttctacgtgaggggccccaacgtggaagccggctgtctgaatccccacatcgtcctcaacattgacctggcccccaccatcctggacattgcaggcctggacatacctgcggatatggacgggaaatccatcctcaagctgctggacacggagcggccggtgaatcggtttcacttgaaaaagaagatgagggtctggcgggactccttcttggtggagagaggcaagctgctacacaagagagacaatgacaaggtggacgcccaggaggagaactttctgcccaagtaccagcgtgtgaaggacctgtgtcagcgtgctgagtaccagacggcgtgtgagcagctgggacagaagtggcagtgtgtggaggacgccacggggaagctgaagctgcataagtgcaagggccccatgcggctgggcggcagcagagccctctccaacctcgtgcccaagtactacgggcagggcagcgaggcctgcacctgtgacagcggggactacaagctcagcctggccggacgccggaaaaaactcttcaagaagaagtacaaggccagctatgtccgcagtcgctccatccgctcagtggccatcgaggtggacggcagggtgtaccacgtaggcctgggtgatgccgcccagccccgaaacctcaccaagcggcactggccaggggcccctgaggaccaagatgacaaggatggtggggacttcagtggcactggaggccttcccgactactcagccgccaaccccattaaagtgacacatcggtgctacatcctagagaacgacacagtccagtgtgacctggacctgtacaagtccctgcaggcctggaaagaccacaagctgcacatcgaccacgagattgaaaccctgcagaacaaaattaagaacctgagggaagtccgaggtcacctgaagaaaaagcggccagaagaatgtgactgtcacaaaatcagctaccacacccagcacaaaggccgcctcaagcacagaggctccagtctgcatcctttcaggaagggcctgcaagagaaggacaaggtgtggctgttgcgggagcagaagcgcaagaagaaactccgcaagctgctcaagcgcctgcagaacaacgacacgtgcagcatgccaggcctcacgtgcttcacccacgacaaccagcactggcagacggcgcctttctggacactggggcctttctgtgcctgcaccagcgccaacaataacacgtactggtgcatgaggaccatcaatgagactcacaatttcctcttctgtgaatttgcaactggcttcctagagtactttgatctcaacacagacccctaccagctgatgaatgcagtgaacacactggacagggatgtcctcaaccagctacacgtacagctcatggagctgaggagctgcaagggttacaagcagtgtaacccccggactcgaaacatggacctgggacttaaagatggaggaagctatgagcaatacaggcagtttcagcgtcgaaagtggccagaaatgaagagaccttcttccaaatcactgggacaactgtgggaaggctgggaaggttaagaaacaacagaggtggacctccaaaaacatagaggcatcacctgactgcacaggcaatgaaaaaccatgtgggtgatttccagcagacctgtgctattggccaggaggcctgagaaagcaagcacgcactctcagtcaacatgacagattctggaggataaccagcaggagcagagataacttcaggaagtccatttttgcccctgcttttgctttggattatacctcaccagctgcacaaaatgcattttttcgtatcaaaaagtcaccactaaccctcccccagaagctcacaaaggaaaacggagagagcgagcgagagagatttccttggaaatttctcccaagggcgaaagtcattggaatttttaaatcataggggaaaagcagtcctgttctaaatcctcttattcttttggtttgtcacaaagaaggaactaagaagcaggacagaggcaacgtggagaggctgaaaacagtgcagagacgtttgacaatgagtcagtagcacaaaagagatgacatttacctagcactataaaccctggttgcctctgaagaaactgccttcattgtatatatgtgactatttacatgtaatcaacatgggaacttttaggggaacctaataagaaatcccaattttcaggagtggtggtgtcaataaacgctctgtggccagtgtaaaagaaaatccctcgcagttgtggacatttctgttcctgtccagataccatttctcctagtatttctttgttatgtcccagaactgatgtttttttttttaaggtactgaaaagaaatgaagttgatgtatgtcccaagttttgatgaaactgtatttgtaaaaaaattttgtagtttaagtattgtcatacagggttcaaaaccccagccaatgaccagcagttggtatgaagaacctttgacattttgtaaaaggccatttcttgggaaaaaaaaaaaa

SEQ ID NO: 2862 - DNA, 2901 bp, Homo sapiens; identical to SEQ ID NO: 2861

SEQ ID NO: 2863 - DNA, 1257 bp, Homo sapiens
atggtcttctcggcagtgttgactgcgttccataccgggacatccaacacaacatttgtcgtgtatgaaaacacctacatgaatattacactccctccaccattccagcatcctgacctcagtccattgcttagatatagttttgaaaccatggctcccactggtttgagttccttgaccgtgaatagtacagctgtgcccacaacaccagcagcatttaagagcctaaacttgcctcttcagatcaccctttctgctataatgatattcattctgtttgtgtcttttcttgggaacttggttgtttgcctcatggtttaccaaaaagctgccatgaggtctgcaattaacatcctccttgccagcctagcttttgcagacatgttgcttgcagtgctgaacatgccctttgccctggtaactattcttactacccgatggatttttgggaaattcttctgtagggtatctgctatgtttttctggttatttgtgatagaaggagtagccatcctgctcatcattagcatagataggttccttattatagtccagaggcaggataagctaaacccatatagagctaaggttctgattgcagtttcttgggcaacttccttttgtgtagcttttcctttagccgtaggaaaccccgacctgcagataccttcccgagctccccagtgtgtgtttgggtacacaaccaatccaggctaccaggcttatgtgattttgatttctctcatttctttcttcatacccttcctggtaatactgtactcatttatgggcatactcaacacccttcggcacaatgccttgaggatccatagctaccctgaaggtatatgcctcagccaggccagcaaactgggtctcatgggtctgcagagacctttccagatgagcattgacatgggctttaaaacacgtgccttcaccactattttgattctctttgctgtcttcattgtctgctgggccccattcaccacttacagccttgtggcaacattcagtaagcacttttactatcagcacaacttttttgagattagcacctggctactgtggctctgctacctcaagtctgcattgaatccgctgatctactactggaggattaagaaattccatgatgcttgcctggacatgatgcctaagtccttcaagtttttgccgcagctccctggtcacacaaagcgacggatacgtcctagtgctgtctatgtgtgtggggaacatcggacggtggtg

SEQ ID NO: 2864 - DNA, 3821 bp, Homo sapiens
tttcgtcggcagtggcggcgcgtaggaggcggtcttgggcgtctttggtactggcttttttaggggtctgcctggggattacccttgctgtggatagaagcaactttaagacctgtgaagagagttctttctgcaagcgacagagaagcatacggccaggcctctctccataccgagccttgctggactctctacagcttggtcctgattccctcacggtccatctgatccatgaggtcaccaaggtgttgctggtgctagagcttcaggggcttcaaaagaacatgactcggttcaggattgatgagctggagcctcggcgaccccgataccgtgtaccagatgttttggtggctgatccaccaatagcccggctttctgtctctggtcgtgatgagaacagtgtggagttaaccatggctgagggaccctacaagatcatcttgacagcacggccattccgccttgacctactagaggaccgaagtcttttgcttagtgtcaatgcccgaggactcttggagtttgagcatcagagggcccctagggtctcgcaaggatcaaaagacccagctgagggcgatggggcccagcctgaggaaacacccagggatggcgacaagccagaggagactcaggggaaggcagagaaagatgagccaggagcctgggaggagacattcaaaactcactctgacagcaagccgtatggccccatgtctgtgggtttggacttctctctgccaggcatggagcatgtctatgggatccctgagcatgcagacaacctgaggctgaaggtcactgagggtggggagccatatcgcctctacaatttggatgtgttccagtatgagctgtacaacccaatggccttgtatgggtctgtgcctgtgctcctggcacacaaccctcatcgcgacttgggcatcttctggctcaatgctgcagagacctgggttgatatatcttccaacactgccgggaagaccctgtttgggaagatgatggactacctgcagggctctggggagaccccacagacagatgttcgctggatgtcagagactggcatcattgacgtcttcctgctgctggggccctccatctctgatgttttccggcaatatgctagtctcacaggaacccaggcgttgcccccactcttctccctcggctaccaccagagccgttggaactaccgggacgaggctgatgtgctggaagtggatcagggctttgatgatcacaacctgccctgtgatgtcatctggctagacattgaacatgctgatggcaagcggtatttcacctgggaccccagtcgcttccctcagccccgcaccatgcttgagcgcttggcttctaagaggcggaagctggtggccatcgtagacccccacatcaaggtggactccggctaccgagttcacgaggagctgcggaacctggggctgtatgttaaaacccgggatggctctgactatgagggctggtgctggccaggctcagctggttaccctgacttcactaatcccacgatgagggcctggtgggctaacatgttcagctatgacaattatgagggctcagctcccaacctctttgtctggaatgacatgaacgaaccatctgtgttcaatggtcctgaggtcaccatgctcaaggatgcccagcattatgggggctgggagcaccgggatgtgcataacatctatggcctttatgtgcacatggcgactgctgatgggctgagacagcgctctgggggcatggaacgcccctttgtcctggccagggccttcttcgctggctcccagcgctttggagccgtgtggacaggggacaacactgccgagtgggaccatttgaagatctctattcctatgtgtctcagcttggggctggtgggactttccttctgtggggcggatgtgggtggcttcttcaaaaacccagagccagagctgcttgtgcgctggtaccagatgggtgcttaccagccattcttccgggcacatgcccacttggacactgggcgacgagagccatggctgttaccatctcagcacaatgatataatccgagatgccttgggccagcgatattctttgctgcccttctggtacaccctcttatatcaggcccatcgggaaggcattcctgtcatgaggcccctgtgggtgcagtaccctcaggatgtgactaccttcaatatagatgatcagtacttgcttggggatgcgttgctggttcaccctgtatcagactctggagcccatggtgtccaggtctatctgcctggccaaggggaggtgtggtatgacattcaaagctaccagaagcatcatggtccccagaccctgtacctgcctgtaactctaagcagtatccctgtgttccagcgtggagggacaatcgtgcctcgatggatgcgagtgcggcggtcttcagaatgtatgaaggatgaccccatcactctctttgttgcacttagccctcagggtacagctcaaggagagctctttctggatgatgggcacacgttcaactatcagactcgccaagagttcctgctgcgtcgattctcattctctggcaacacccttgtctccagctcagcagaccctgaaggacactttgagacaccaatctggattgagcgggtggtgataataggggctggaaagccagcagctgtggtactccagacaaaaggatctccagaaagccgcctgtccttccagcatgaccctgagacctctgtgttggtcctgcgcaagcctggcatcaatgtggcatctgattggagtattcacctgcgataacccaagggatgttctgggttagggggagggaaggggagcattagtgctgagagatattctttcttctgccttggagttcggccctccccagacttcacttatgctagtctaagacccagattctgccaacatttgggcaggatgagagggctgaccctgggctccaaattcctcttgtgatctcctcacctctcccactccattgataccaactctttcccttcattcccccaacatcctgttgctctaactggagcacattcacttacgaacaccaggaaaccacagggcccttgtcgccccttctctttcccttatttaggagccctgaactcccccagagtctatccattcatgcctcttgtatgttgatgccacttcttggaagaagatgagggcaatgagttagggctccttttccccttccctcccaccagattgctctcccacctttcatttcttcctccaggctttactcccctttttatgccccaccgatacactgggaccaccccttaccccggacaggatgaatggatcaaaggagtgaggttgctaaagaacatccttttccctctcattctacccttttcctctccccgattccttgtagagctgctgcaattcttagaggggcagttctacctcctctgtccctcggcagaaagacgtttccacacctcttaggggatgcgcattaaacttcttttgcccccttcttgtcccctttgaggggcacttaagatggagaaatcagttgtggtttcagtgaatcatggtcacctgtatttattgctaggagaagcctgagggtggggggagatgatcatgtgtgctcggggttggctggaagccctgggtggggggttgggggaggactaatggggagtcggggaatatttgtgggtattttttttacttcctcttggttcccagctgtgacacgttttgatcaaaggagaaacaataaagggataaaccataaaaaaaaaa

SEQ ID NO: 2865 - DNA, 1727 bp, Homo sapiens
  misc_feature (1)...(1727): n = a,t,c or g
cgagcgcggaacgcgaggggctgctggggtgtttgtcgcagcgggttttcctcggcggtttgcggagctgctaggatggagcaggttgcggagggagcaagggtgaccgcagtccctgtgtcagctgccgacagcactgaggagttggccgaagtcgaagaaggagttggagtagtgggcgaagataatgacgcagccgcgagaggagcggaggcctttggcgacagtgaggaggacggagaggatgtgttcgaggtggagaagatcctggacatgaagaccgaggggggtaaagttctttacaaagttcgctggaaaggctatacatcggatgatgatacctgggagcccgagattcacctggaggactgtaaagaagtgcttcttgaatttaggaagaaaattgcagagaacaaagccaaagcagtcaggaaggatattcagagactatccttaaataacgacatatttgaggcgaactctgatagcgatcagcaaagtgagacaaaagaagatacttccccaaagaagaaaaagaaaaaattgaggcagagagaagagaaaagcccagatgatctgaaaaagaaaaaagcaaaggccgggaagctaaaagacaagtccaaaccagacctggagagctccttggaaagtttagtttttgatttaaggacaaagaaaagaatttctgaagccaaagaagaactaaaggagtccaaaaagcccaaaaaagatgaagtaaaagaaacaaaagaattaaagaaagttaaaaagggtgaaataagagatttaaagacgaaaacaagagaagatcccaaagaaaatagaaaaacaaaaaaagaaaaatttgtcgaatcccaggtggaatctgaatcaagtgtacttaatgattctccctttccagaggatgacagtgaagggctacattccgacagcagagaagagaaacaaaacactaaaagtgcaagagagagagcagggcaggacatggggctggagcatggctttgagaagcccctagacagtgccatgagtgctgaggaggataccgatgtcagaggcaggaggaaaaagaagaccccgagaaaggctgaggacactagagagaacaggaagctagagaacaagaacgctttcttagagaagaaaactgtgcctaaaaagcagaggaatcaagacagaagcaaaagtgctgcagagttagagaagctgatgcctgtatctgcccaaacgccaaagggccggaggttgagcggggaagagagaggcctctggtccacggactcagccgaggaggacaaagaaaccaaaagaaatgaatccaaaaagcccaaaaaagatgaagtaaaagaaacaaaagaattaaagaaagttaaaaagggtgaaataagagatttaaagacgaaaacaagagaagatcccaaagaaaatagaaaaacaaaaaaagaaaaatttgtcgaatcccaggtggaatctgaatcaagtgtacttaatgattctccctttccagaggatgacagtgaagggctacattccgacagcagagagaagagaaaagcccagatgatctgaaaaagaaaaaagcaaaggccgggaagctaaaagacaagtccaaaccagacctggagagctccttggaaagtttagtttttgatttaaggacaaagaaaagaatttctgaagccaaagaagaactaaaggagtccaaaaagcccaaaanaaaaaaaaaa

SEQ ID NO: 2866 - DNA, 4165 bp, Homo sapiens
ttttttttttttatcattatattcttttatttatagactctgagagcaaggacccaagcacagcctggtgctcttggatagagaagaaagcagctattgtccacactcagaggttgctgaggtgccctcccccactgatctggaatgatctacactgctagtgaagaggagggatggcaagctgactaaataagaaggcagggaaagaaagtccgctttagttctgagggctgtgacattagatgagagtggagccctgggcatgtcagccagccttctgtgtaacgcccgcccaggtcccattgtgtctgttctcttggtcctccactgttgcccacatcttcctccaggctgcttaagtgcccctcctggagtgcatgagtaggtcgcgttgcagcccagcctccaggctggaggtcagtctggctgtgggagggtcggtcagcagagtcaatttgttgaaaacacctctgccaaagtagtcagcaatcacagaaaagctgtcattggagcacttgagctgatgctggaattgatcatggagatctcgtttctgttcctgggcccggatcatatccatgaccttccggttttcagggaggcaggtggggcagtcagcatcactttccgagtaactctcaaagcagtgttggtggaaggagtggccacacaggaagtggactgagggcaactccaaggcactgttacagatgctgcacttggtcttttggaaaatcttaggatccccaaccccccgccgctcctttccccgtttctccagcagagggcgcaggcccaaaggttccgccgaccccgccccagcctggccccgccccgccccggcgtaggggcggggaagacgggcacagaaacctggccgcggctttccgggagctgtgggcacgcgagctgctcgaagccggtggcccggggatcgtcgctgcccagtccggccgcggccggccgcttccccgagcttaccagtaagccggtccgcctccgggacgcgccccgcccgccccgggctcgcgcgctctgaaggggcgcgtcccgcgcactcccggcgccgcccactcccctccccacggccgctcctccctccgcccggatagccggcggcggcggcggcggcggcggcggcggcggcggcggcggccgggagaggcccctccttcacgccctgcttctctccctcgctcgcagtcgagccgagccggcggacccgcctgggctccgaccctgcccaggccatggccggcaacgtgaagaagagctctggggccgggggcggcagcggctccgggggctcgggttcgggtggcctgattgggctcatgaaggacgccttccagccgcaccaccaccaccaccaccacctcagcccccacccgccggggacggtggacaagaagatggtggagaagtgctggaagctcatggacaaggtggtgcggttgtgtcagaacccaaagctggcgctaaagaatagcccaccttatatcttagacctgctaccagatacctaccagcatctccgtactatcttgtcaagatatgaggggaagatggagacacttggagaaaatgagtattttagggtgtttatggagaatttgatgaagaaaactaagcaaaccataagcctcttcaaggagggaaaagaaagaatgtatgaggagaattctcagcctaggcgaaacctaaccaaactgtccctcatcttcagccacatgctggcagaactaaaaggaatctttccaagtggactctttcagggagacacatttcggattactaaagcagatgctgcggaattttggagaaaagcttttggggaaaagacaatagtcccttggaagagctttcgacaggctctacatgaagtgcatcccatcagttctgggctggaggccatggctctgaaatccactattgatctgacctgcaatgattatatttcggtttttgaatttgacatctttacccgactctttcagccctggtcctctttgctcaggaattggaacagccttgctgtaactcatcctggctacatggcttttttgacgtatgacgaagtgaaagctcggctccagaaattcattcacaaacctggcagttatatcttccggctgagctgtactcgtctgggtcagtgggctattgggtatgttactgctgatgggaacattctccagacaatccctcacaataaacctctcttccaagcactgattgatggcttcagggaaggcttctatttgtttcctgatggacgaaatcagaatcctgatctgactggcttatgtgaaccaactccccaagaccatatcaaagtgacccaggaacaatatgaattatactgtgagatgggctccacattccaactatgtaaaatatgtgctgaaaatgataaggatgtaaagattgagccctgtggacacctcatgtgcacatcctgtcttacatcctggcaggaatcagaaggtcagggctgtcctttctgccgatgtgaaattaaaggtactgaacccatcgtggtagatccgtttgatcctagagggagtggcagcctgttgaggcaaggagcagagggagctccctccccaaattatgatgatgatgatgatgaacgagctgatgatactctcttcatgatgaaggaattggctggtgccaaggtggaacggccgccttctccattctccatggccccacaagcttcccttcccccggtgccaccacgacttgaccttctgccgcagcgagtatgtgttccctcaagtgcttctgctcttggaactgcttctaaggctgcttctggctcccttcataaagacaaaccattgccagtacctcccacacttcgagatcttccaccaccaccgcctccagaccggccatattctgttggagcagaatcccgacctcaaagacgccccttgccttgtacaccaggcgactgtccctccagagacaaactgccccctgtcccctctagccgccttggagactcatggctgccccggccaatccccaaagtaccagtatctgccccaagttccagtgatccctggacaggaagagaattaaccaaccggcactcacttccattttcattgccctcacaaatggagcccagaccagatgtgcctaggctcggaagcacgttcagtctggatacctccatgagtatgaatagcagcccattagtaggtccagagtgtgaccaccccaaaatcaaaccttcctcatctgccaatgccatttattctctggctgccagacctcttcctgtgccaaaactgccacctggggagcaatgtgagggtgaagaggacacagagtacatgactccctcttccaggcctctacggcctttggatacatcccagagttcacgagcatgtgattgcgaccagcagattgatagctgtacgtatgaagcaatgtataatattcagtcccaggcgccatctatcaccgagagcagcacctttggtgaagggaatttggccgcagcccatgccaacactggtcccgaggagtcagaaaatgaggatgatgggtatgatgtcccaaagccacctgtgccggccgtgctggcccgccgaactctctcagatatctcaaatgcgagctcttccttggtctgtttgtcctggaaagggatccctaaccacaaaatgtcactgaaggttcccaagttcccgagaggcctccaaaaccattcccgcggagaatcaactctgaacggaaagctggcagctgtcagcaaggtagtggtcctgccgcctctgctgccaccgccctcacctcagctctccagtgagatcgagaacctcatgagtcaggggtactcctaccaggacatccagaaagctttggtcattgcccagaacaacatcgagatggccaaaaacatcctccgggaatttgtttccatttcttctcctgcccatgtagctacctagcacaccatctccctgctgcaggtttagaggaccagtgagttgggagttattactcaagtggcacctagaagggcaggagttcctttggtgacttcacagtgaagtcttgccctctctgtgggatatcacatcagtggttccaagatttcaaagtggtgaaatgaaaatggagcagctagtatgttttatta

SEQ ID NO: 2867 - DNA, 2951 bp, Homo sapiens
  misc_feature (1)...(2951): n = a,t,c or g
cggacgcgtggggagcatggacggtgccatggggcctcgggggctgctgttgtgcatgtacctggtatctctcctcatcctgcaggccatgcctgccctgggctcggctacaggcaggtccaagagcagcgagaagcgacaggctgtggacaccgctgtcgatggcgtgttcatccggagtttgaaagtcaactgcaaagtcacctctcgcttcgcccactatgttgtcaccagccaagtggtcaacactgccaatgaagccagggaagtggccttcgacctggaaatccccaagacagcattcatcagtgactttgccgttacagcagatggaaacgcatttatcggagacataaaggacaaggtgactgcatggaagcagtaccggaaagcagctatctcaggagagaatgccggccttgtcagggcctcggggagaactatggagcaattcaccatccacctcaccgtcaatccccagagcaaggtcacgtttcagctgacttatgaggaagtgctgaagagaaaccatatgcagtatgaaattgtcatcaaagtcaagcccaagcagctggtgcatcattttgagattgatgtggacatcttcgagccccaggggatcagcaagctggatgcccaggcctctttcctgccgaaggaactggcagcccaaactatcaagaagtccttctcaggaaaaaagggtcatgtgctgttccgtcccaccgtgagccagcagcagtcctgccccacatgctctacatccttactgaacgggcacttcaaggtgacctacgatgtcagtcgagacaagatctgcgacctcctggtggccaataaccactttgcccacttctttgccccccaaaacctgacaaacatgaacaagaacgtggtttttgtgattgacatcagtggctccatgagaggccagaaagtgaagcagaccaaggaggcactccttaaaattctgggggacatgcagccaggggactactttgacctggttctttttgggactcgagtacaatcgtggaagggctcgctggtgcaagcatctgaggccaacctacaagcagctcaagactttgtgcggggcttttccctggatgaggccacaaacctgaatggaggtttgctccggggaattgagatcttgaaccaagttcaggaaagcctcccagaactcagcaaccatgcctcaatactcatcatgttgacagatggcgatcccacagagggggtgacggaccgttcccaaatcctcaagaacgtccgcaacgccatccggggcaggttcccgctctacaacctgggtttcggccacaatgtggactttaactttctggaggtcatgtccatggagaacaacggacgggcccagagaatctacgaggaccatgatgccacccagcagctgcagggtttctacagccaggtagccaaacccctgctggtggatgtggatttgcagtacccccaggatgctgtcttggccctgacccagaaccaccataaacagtactacgaaggctcagagattgtggtggccgggcgcattgctgacaacaaacagagcagcttcaaggctgatgtgcaggcccatggggagggacaagaattcagtataacctgcctagtggatgaggaggagatgaagaaactgctccgagagcgtggccacatgctggagaaccacgtcgagcgcctctgggcctacctcaccatccaggagctgctggccaagcggatgaaggtggacagggaggtgagggccaacctgtcatcccaggccctgcggatgtcgctggactatgggtttgtgaccccactgacctccatgagcatcaggggcatggcggaccaggacggcctgaagcccaccatcgacaagccctcagaggattctccgcctttggagatgctgggacccagaaggacgttcgtgctgtcagccttgcagccttctcctactcattccagctccaatacccagcggctgccagaccgagtgaccggcgtggacacagaccctcacttcatcatccacgtgccccagaaagaggacaccctgtgcttcaacatcaatgaggagcctggtgttatcctgagcctggtacaggaccccaacacaggcttctcagtgaatggacagctcattggcaacaaggccaggagccctgggcagcatgacggcacgtacttcgggcggctgggaatcgcaaaccctgccacggactttcagttggaagtgactcctcagaacattacgctgaaccccggctttggtgggcctgtgttttcctggagggaccaagctgtgctgcggcaggacggggtggtggtgaccatcaacaagaagaggaacctggtggtgtctgtggacgacggtggcaccttttgaggttgtttttgcaccgagtgtgggaaggggagctcgggtcnaccaggacttcctggggcttctaatgtgctgggacaagtcaatcgggatgtcaagcccgggacgcaagggctgctgggggcaaatttttccaccccattcggtttttgaaagtgtcttgacatccacccccaggctccgacccccaaaaagcccaaatgcccacgatggtggtgaggaacccgcccggcctcacggtcacccaggggtttgcaaaaagactacagcaaggacccgtggcatggggccgaggtgtcctgctggttcatttcacaacaatggggcttgaattcaccgattgtgcctacactgattatattcgtccccgacatcttctgagccctctgggccagcaacgcctgttccntgcccccgggggccaaggcagaggaggaggacgacatcctgacctgctgctgaggctgtacctccttgacctaagctggttcctttgtgtcaaagcacctcatgccttcccattaaagagaggccgtgtccaaaaaaaaaa

SEQ ID NO: 2868 - DNA, 3318 bp, Homo sapiens
gagcttgcgccagtctcttcgcggcgtccaccacttagacgcaagttgctgaagccggccggggagaaggtgttgttgccggagctgagaccgggcggccacagtccgcagggatgaacctcgagttgctggagtcctttgggcagaactatccagaggaagctgatggaactttggattgtatcagcatggctttgacttgcacctttaacaggtggggcacactgcttgcagttggctgtaatgatggccgaattgtcatctggggatttctttgacaagaggcattgcttaaaataaatttagtgcacacatccatccagtgtgttctttatgctggagccgagatggtcataaactcgtgagtgcttccactgataacatagtgtcacagtgggatgttctttcaggcgactgtgaccagaggtttcgattcccttcacccatcttaaaagtccaatatcatccacgagatcagaacaaggttctcgtgtgtcccatgaaatctgctcctgtcatgttgaccctttcagattccaaacatgttgttctgccggtggacgatgactccgatttgaacgttgtggcatcttttgataggcgaggggaatatatttatacgggaaacgcaaaaggcaagattttggtcctaaaaacagattctcaggatcttgttgcttccttcagagtgacaactggaacaagcaataccacagccattaagtcaattgagtttgcccggaaggggagttgctttttaattaacacggcagatcgaataatcagagtttatgatggcagagaaatcttaacatgtggaagagatggagagcctgaacctatgcagaaattgcaggatttggtgaataggaccccatggaagaaatgttgtttctctggggatggggaatacatcgtggcaggttctgcccggcagcatgccctgtacatctgggagaagagcattggcaacctggtgaagattctccatgggacgagaggagaactcctcttggatgtagcttggcatcctgttcgacccatcatagcatccatttccagtggagtggtatctatctgggcacagaatcaagtagaaaactggagtgcatttgcaccagacttcaaagaattggatgaaaatgtagaatacgaagaaagggaatcagagtttgatattgaagatgaagataagagtgagcctgagcagacaggggctgatgctgcagaagatgaggaagtggatgtcaccagcgtggaccctattgctgccttctgtagcagtgatgaagagctggaagattcaaaggctctattgtatttacccattgcccctgaggtagaagacccagaagaaaatccttacggccccccaccggatgcagtccaaacctccttgatggatgaaggggctagttcagagaagaagaggcagtcctcagcagatgggtcccagccacctaagaagaaacccaaaacaaccaatatagaacttcaaggagtaccaaatgatgaagtccatccactactgggtgtgaagggggatggcaaatccaagaagaagcaagcaggccggcctaaaggatcaaaaggtaaagagaaagattctccatttaaaccgaaactctacaaaggggacagaggtttacctctggaaggatcagcgaagggtaaagtgcaggcggaactcagccagcccttgacagcaggaggagcaatctcagaactgttatgaagaccttcgaagttcttcattctttctcactttgccatcatgtggcctctggacactgtggtcagtcatttgaaaattgactttaatttaaaacaaaggcctgtgcctcccacccaggaggtgggagggtgaattttatgtttaaatgaagaagtgaattatggaagaagagtatacgaccttcccttccctttcaagcataagtccaaatagactctcaggaatgaagatttgtgaagacatcagataggaattttgactcatttaaactttgatgcttagttatgttgctggagaaaagatacttatgttttgctcatctaacttcattgtacccagcgtcattttgacatgtcatttcctatctcccatttgccttcggtcctcaatgcatgtctttgagtgacttcttatctgaaattttgctactggtatcctaggaaagcttttgttggatactctcattttaaacttctcctctccccagatacctcctatatttccatattgtgtgcaaaggatgggcaaaaaagaaagtgcttgaaagatttcaaattttcagaaagggaacaacgaaggccctctcttcctctcataccacgttttgctcaagaagctgggctgtaacaattcagggttttcccttgttttcctctcattgcatgtttccctccaatattggttcattgtcatcaatcatggtttttgaagatagctagttttatccatctccagcaaagaatcatcaatagtttatattgctttacctgtgctggcttccagagatggaaacaaacccaggtgtctctcaacaagctacttttttactggggtgggggaatctatgcaaggagtaaagtaaaaccatccagaatcaaagcagcaaccacatagttcaaatcaaagatcaaggtgaattttttgtatcactgcctgtggaaatctatcctcatcagtcattgcatttttccctgcctatacctgtgctcctttttcttactgtgttttcagtcacttcctttctgtgaaaggttgcttagctttttttttgacatttgttgttctttatataaaaataacagattggatagatgtgtacatttggtgtttgaaattctctgaaaatcccattaggaaaccaggtgtgaaaagggctcagtagcttctctgagtggcgtttttagctgactggaagtgcttaatctggatcgtctttttttttttttttttttttcaatattttaaaaggagaatttaaatactgtgcttactgtgaaatatatcagttggtgagccgggcgtggtgggtcacgcctgtaatcccagcactttgggaggccaaggcgggttgatcacccgaggtcaggagttcaagaccagcctggccaacatggtgaaagcctgtatctattaaaagacaaaaattagctgggcgtggtggtacatgcctgtaatcccagctacactggaggctgagtcaggagaatcacttgaacgtgggaggcagaggttgcagtgagtggagatcgcaccactgccctccagcctaggtgacagaatgagactctatctcaaaaaaaaaa

SEQ ID NO: 2869 - DNA, 2617 bp, Homo sapiens
caagggccctttacattgcgttcttaacggttcagtcaccttaaccgttattattcacttgcgggcgagaagtccgagctagggatcctgaaaaggagggaacaattgttgtagcaggtctaaaagttcaggtccagccccggtttctctggattctgtgcttctccatggaggaaactcaaggagaactgacaagttcttgtggttctaaaaccatggccaatgtatctttggcatttagggatgtgtccatagacctctcccaagaggagtgggagtgcctggacgctgtgcagagggacttgtacaaggatgtgatgttggagaactacagcaacctggtctcactggatttggaatacaagtatattaccaagaatttgctttcagaaaagaatgtttgcaaaatctatttatctcaattgcagacaggggaaaaaagtaaaaacaccatccatgaggacaccattttcagaaatggtttgcagtgtaaacatgaatttgagagacaagagagacatcagatgggatgcgttagtcaaatgctaatccaaaaacaaatatctcatcctctacatccaaaaattcatgctagagagaaatcatatgaatgtaaggaatgtagaaaggcctttagacaacagtcataccttattcaacatctgagaattcacactggtgagagaccctataaatgtatggaatgtggaaaggccttttgtcgagtgggagaccttagagtacatcacacaatccatgctggggagagaccctatgaatgtaaagaatgtgggaaggcctttagacttcattatcaccttactgaacatcagagaatacattctggtgtgaaaccctacgagtgtaaggaatgtgggaaagcctttagtcgtgttagagaccttagagtacatcagacaattcatgctggagagagaccctatgaatgcaaagaatgtgggaaggcctttagacttcattatcaactaactgaacatcaaagaattcatactggtgagaggccttatgaatgtaaggtttgtggcaagacctttagggtacaacgacatattagtcaacatcagaaaattcatactggtgtcaaaccctataaatgtaatgaatgtgggaaggcctttagtcatggctcataccttgttcaacatcagaaaattcatactggtgaaaaaccctacgaatgtaaagaatgtggtaagtcctttagttttcatgcagaacttgctcgacatcgtagaattcatactggtgagaaaccctatgaatgtagagaatgtggaaaagcctttcgtcttcaaacggaacttactcggcatcatagaactcatactggtgagaaaccctatgaatgtaaggaatgtgggaaggcctttatttgtggttatcaacttactttacatctgagaactcacaccggtgagattccctatgaatgtaaggaatgtggaaaaaccttcagtagtcgctatcatctcactcaacactacagaattcatactggtgagaaaccctacatatgtaacgaatgtggaaaagcctttcgtcttcaaggagaacttacccgacatcacagaattcatacatgtgagaaaccctatgaatgtaaggaatgtgggaaggcttttattcatagcaatcaatttatttcacaccagcgaattcacaccagtgagagcacctacatatgtaaagaatgtgggaagatttttagtcgtcgctataatcttactcaacattttaaaattcatactggtgaaaaaccctacatatgtaatgaatgtgggaaagcctttcgatttcaaacagaacttactcagcatcacagaattcatactggtgaaaaaccctataaatgtacagaatgtgggaaggcctttattcgtagcactcatctcacgcaacatcacagaattcatactggtgagaaaccctacgaatgtacggaatgtgggaagacgtttagtcggcactatcatcttactcaacatcacagaggccatactggtgagaagccctacatatgtaatgaatgtgggaatgcttttatttgcagttatcgacttacattacatcaaagaattcacactggtgagcttccatatgaatgtaaggaatgtggaaagacctttagtcgtcggtatcatcttactcaacattttagacttcatactggtgagaaaccttatagctgtaaagaatgtgggaatgcctttcgtcttcaagcagaacttactcgacatcacatagttcacacgggtgagaaaccctataaatgtaaagaatgtgggaaagccttcagtgttaattcagaacttactcgacatcacagaattcatactggtgaaaaaccctatcaatgtaaagaatgtggaaaagcctttattcgtagtgatcaacttactttacatcagagaaatcatattagtgaggaagtcctatgcataatgtaaagagaatacgatggcctttagaaaatgccctttagcagagaatttgtaatttaagaaattttctgtttgttacggaacatgtgggaatcccttttacttcatgctcacaatttatcagaaattatttcgtatgttaaagagtcgaaaga

SEQ ID NO: 2870 - DNA, 1050 bp, Homo sapiens
ccggcctgacctctcgatccttcagcacttcagaggttaattttgttgggggatcggatttctttcctggcctggggaatggtgatccctgctagctagtcctttagttacagagttgctgggtgcctgggattccctggcccagtgtgggctggctcagctggctaaaggacttgccatcctgtgagattcattcagcttctttgtccgctgttctccaagggccgcaatgtagtgaaatgctctggcctaagaaccttacaagctgggacgacagcagctccgtcagcagcggcatcagcgacaccatagacaacctcagcactgatgacatcaacaccagctcctccatcagctcttatgccaacacacctgcctcctctcgaaaaaacctggatgtgcagactgatgctgagaagcactcacaggtggagaggaattccctgtggtctggtgatgatgtcaagaaatcagacggaggctcagacagcggcataaaaatggagccaggttccaagtggaggcggaatccttctgatgtgtctgacgagtccgacaaaagcacgtcgggcaagaagaatcctgtcatctcccagacaggctcatggcggcgaggcatgacagctcaggtgggcatcaccatgccaaggacgaaggcttcagccccggcaggcgcactgaagaccccaggaactggtaagaggccggggctgtcttggccctggggcaccaacgccagcagctcctccgcagttagcaaggatggcctgggctttcagtctgtcagcagcctccacaccagctgtgagtccatcgacatctccctcagcagtggaggggtccccagccacaattcttccactggcctcatcgcctcctccaaggacgactccttgactccctttgtcagaactaacagtgtgaagaccacactgtcagaaaggttggtgctgtgcctctggctgcctttctcagaaagacacccttccaaaaataaaaagattagcttaggaatcccaaatgtcgaatagcctttgcctgtaagatttc

SEQ ID NO: 2871 - DNA, 3239 bp, Homo sapiens
tttcgtgggggagacggagccccaggagtgttgaagcctggaaatcccctcccctttcccctcccccctttacagtatccccctccctccaccctttcccattctgataatctggccatgactagcagaagcacagctaggcccaatgggcaaccccaggccagcaaaatttgccagttcaaattggtcctgctgggagaatctgcagtgggaaagtcaagcctggtattacgttttgtcaaagggcagttccatgagtaccaggagagcaccattggagcggccttcctcacccagtccgtttgtctagatgacacaacagtgaagtttgagatctgggacacagctgggcaggagcgatatcacagcttagcccccatgtactacaggggtgcccaagctgcaatcgtggtttacgacattactaatcaggaaacctttgcccgagcaaagacatgggtgaaggaactacagcgacaggccagtccctagcatcgttgttggcctggcagggaacaaagctgacctggccaacaaacgtatggtggagtatgaagaggcccaggcatatgcagatgacaacagcttattgttcatggagacttcagccaagacagctatgaacgtgaatgatctcttcctgggcaatagcttaagaagttgccaaaagagtgaacccccagaatcttggaaggttgcagcaggccgaagccggggtgtggatctccatgaacagtccccagcagaacaagagccagtgttgtagcaactgagggggtggctagcagcaaacaagtatggagctagcacaagagctaagaaataaccgccatcgcctacccctcgacacacaacccctacggtaacagcacactgagccctggctcccaagggctgtctcctgacagctccgtcatggcactttttaacgcttcagcaacaaacaccaggcagctggtggccctggcctcctaccccctactctggggcttgggggtcaactccccccaggacttaccttccaaaacaaacttccttcactttgtattataggtacaagacagcgacttacgtatcttttctcctcctccctagtgttcctccccattttttcagaaaacacttctgactcctgtcccttccccttctgcttttggtcagtccctgttcttgagcctcttttctcctctccccaggatgcagaaagtggtgaacccaggaactgaggaaggaggtttccagttcatttacattaagggccctgggggagaataaagctcagagcaggagggagtaaggaaacatttcctttttgtttttatttggttggagtttctcatatttgaaaacattgcggtatccatgatttggccttgtggagggtgttcctaggtagaggtgagaatggggaggcaagatctcaggcaccaggcaggaggtgccttgtaagctaactgggcggaggtggaggtgcagtgtcaactgtggctctgtaactcttcaaaggcccagtttcccctcacgcagcctcttaggtagcgtttcccctaatggtgtttcccctaatcgtgggggttggaccccagagtcttccaaagaattttcactggttgcctgcatctttggctctgctgtgatctgattggaggagggacagtttctggtacccatcctctgatttatacatatgcattttttcccctctggcctttagatggcctcagccccagccaccatatacccctgcagtttgcactttaattgatggtagttcagttggggtacttgttttatggaagttttgattgatttacttgccctcccaccttctttttaattcaatgaaatctgaggttaatgcgaggttcgaggagaggttatagataaaactaccagtggcagctactcaagtcctatctccactgttagcttcctccaactctaattattaacctatattcttgccaagctaactattgactataggtttgcctttcctggagaattaattgagcaattgaggagtgtctcaggatagcacaggccaaggtaggggagtaaaaaggaggtcaggcaaaagggaggagttttctgtcctttcccaggtttcacactcaatttgatatccattaccatgtcttttctacttccttgtaaataggtatgatctttattcccactgtacagtctgttctatcctctgcctcccatcaggccctgtttctttgttcctttgttaatatcttgaatttagtccctccatccttaatccccccatccctccccatcatgcaaccagtggtttaatccatgtaccaataggggctagtaccacagaggcctcctgtggtgccctcgtatcataccacctgttcctgtggagagggaatgaccggcactgaaggtaccttacaactggctcatattatcagaggaccttggtcctttctaaatctctagtctctcttcatatccttcatcaggtgttttaagatgtctctgagaagccatcaaggcaaaagagaactttaagttccttgttccagcccggagttttgggaaagaaagaaaggaaaggtcacagtgacctaggattggaaccttcctgcccttttggcttgcagactgccttctatcccagaacagctgagaaatctatgaagctgagattctgaaggacccagcttaggttcttccacttaggcctcaattcccttccttttccaggggcagccttagttcccatggccctgaaacacacacatttcccccttcctttcccagaagccactggccccccatagcacccagtgcatcctttttacaagtggaagaactaggatggctttccaaagtcttctagaaatgaagttctttctctgtgcagctttcccccttggagcaggagtgaagatgtttcattatcttgggcctgggaaaccacttccccaggcttctccctccccccacccccataggaacaggatttggccttagcttctgggcctatcggctgccttccctctacttcctaccacctcttctgccttcctttgagctctgttgggcttggggatcttagttttcttttgtttatttcccagctcatttttttcttctggtcagtttttttaagggggggtgttgtggttttttgtttttgttttgcttctgagaaagcatttgcctttcttcctctcccaacataacaatcgtgggtaacagaatgcgactgctga

SEQ ID NO: 2872 - DNA, 2837 bp, Homo sapiens
ttttttttttttgactgttcatggccatctttattcccagtgctggctatcccaaaatactgccaggccacagccaacccccacctttgccaatgtgactgggtcaccaccccatacaccaaagcagccttgagccctgccccaccccctgccctgcggaagccaagtccccagctataaaaccctgcccctcctggtggcccaggaccctcaaagatgcacacaggggccccagcgaggggcccctccgtcattagccttctcctccaggctgggctgccaagcagcctggagctgagtctgtcccttggacgctgggccacgtcaccttctcctccagaaggcttcacctatgggcccaggaagtcctccttccgatagcccttcgcccggaagtcacggtggagcttgttgtactgccacaggttggccaggaggctggatgctgcccgggaggacttctcactgtcggggctgtcccgcttcttcttgatgaagatgagctttcggagtccgtcaaaatacagcaggtctcgggcaagcgaatggggctggccaaccaacccaggttgttgaacacagctatgaatgttgaaccagcacctcggctgggggcgacttctcacccacgctgcctggcagcttctcgaatcaggtggctccaccaccttcgtggacatctcgtccttgttcctagcgttccgagacaggtttcggatgaggccagtcagtgagcgcagctggtggtggtcggcggtcctgacacggtctagcagggggttcagaatacgctcctgctccagggccaggcggcttagcccccccggcccccttgggttcgcctcccgtgatgttctgcagcgccccggcggccgcctccgtcgtgtgccggttgagctcgcagcgctgcagcagccggttgtacagccccacgatctgggggctccacagccactcgaggcccttggggtccttggacacctccgcgaaggtgagcgcatcggcggcgaggggcagctcgcgcagccgccggctctgcggcgtgaagcagcccacgacctctcccggcggcgcccccgccaggtccctgcggccgcgaccctccagccgctgcagcgcggacggcggcatctcgtcgtagaggcggtaggacaggttccgcaggacgcacaccgcgttctccacgctcttgtcctcgcatttgcccgcgtccagggcgtggttgatagaggtgaccagggcgtccaccagcccgtggcactcccgcatcttctggcgagtggcctgagaggctgagctgaggttcctggggaagccggtggcgttgtagaagatctccgcctccgaggcgttctgctggatgaggggggggacccccagcccccgacaagggggctcaaacaccaaggtcttgtgagctgcttccagcggtgtcttcttggccaggcggtccttcaggtggtcgctggatgaaaggttccacaggatccctgtgacatttttgcgaagctcatcatcctgctcccgcagtgtccgcagcagctcgaagatcccgttctcctccaccagggccagcttgttgtcagcgttgtcgtagatgaggttgcgcatggcacctgtggcatggcgctgcacttcctggttggcgtggttgaagagcttcaccagcctaggcacggcctgaaggctgcgggcctgcttcttggcggctgcatcgctgtagcacttgtgctggatgtaggccgctcccagcacctgcaggttggggtctgaagccatgaggtacttgactgctgagggcaggtcaatgtcatcaaaaccgctgctgagtctctgcagggttcggtggctaccgtagctgttgaacccatgcacgtccggcaggtggcccgagtcagccaggctgaggctgaggctgcgcacagatggcgctcgagccactggctccaggacggcccccggcactgccccgcctaccccgcggctccggtggctgctctggaatcgctgcagggtccgcacggcaggggcacggatggtccggctcggggaaacctcagtggcctcgggccagtccagcccccctgcccggctggagctggagctggcctggcgctcgtacgcaaaggccctgtaggtggaggtggccgcaggctccagctgctcagacaccaggctgtagcggtcgtccaggcccccgggccccagccgcagcgagcgcagggagagtgtgtcatagtcggcccggctcccaaccccaccgcgctcatggaaggacacgggcctggtgggcatgggaggggtgggctgggcacccccgtacccagcggccccaaaggcgctgcccccgttgtgggctgaactcagcctccgactgcagctcagatccacggcggagcgggaggaccaggaggctgggctgtaggccggcttggcgatgggccggaagcccgaggtcttgtccccactcaggccctgagagcgagagctgaagccagcctgcagggtgtggtactgccccctggatgtgcctctggcagtctcggcctcaggctcgggctcagcggccccgttgtgccgcggctgctgtcccagctgcaagaggcgggcgcggacctgctcctggacgcgggctgcccgcagccgctcggcctccggcccctcggcgccccggcggtccagctgcaggtcagagggcagcgccagggagcacacgccggcctcaggctgcagggccgacagcaggaagttaccgtcctgcatggcggcaggtccaccgggcctgggcctggcggccgcctccaaacccaactatcttcacgtcctgtccggaattc

SEQ ID NO: 2873 - DNA, 1195 bp, Homo sapiens
  misc_feature (1)...(1195): n = a,t,c or g
atttttttttccattttcataaacagatctttataatcatgtaaattaaacaattttgtctttaggagacgcgcacacagaacatagaggtaagagctagaataccagcaatcttaggaaggcaaaattaaatcatcttttgggagaagagagaaaattgtgaggagaaggtgccagtgtcaaagattggcttggcgaggttattttctctctgggagtctgggaggtgatgagctcctaccgctcactgcctctgttgtcttgcctattggttcctttctgggcaaggaagaacgttgtctctcttttagagttttgtaggcctctgtcagtaatccgtggaagacagctgtcctggggcccagaatggcaagttctgtaagtgaatgttttctgttgggatgtcatcatggaaaggctcaggtgtagtctggaatttgggttgatgaagactcattctataactcatacaattctcaaaggatgcttttggatcatctgggattttcattgttcttggttgtaccattttcatttcttgacatgtggagcacagctgttggtttctgagcagcatggagtcacactggttcctcctggcctcagacttgctatcagctgaagcctggcctccaagaagagctgctccatttctatctggagaagggatgagggcattgaagagtcgtggaaggcagctgtgacaggctactttaaaggcaacgcaaacatttgagacgccatgtcctgcaggcctcatttcctccattctgtcttgctttctttcccagccctgaaacccaggtctttggtctttttcttctgttgcattcccttctcactcggtttccttacgaccagctcagcagcaataacaggaatggagagggaattgtccacattcacagtacaatgctctggttttatcaggtctagagccagaggcactcggaatgttaatggggccctcatttcccaagcagctgtcctctggatagcagatggcagttgtgacaggagagtgacagcaacctatgtgtagcctggccaaggtatgatgcagatttcagccagtccccagaagccaaaaacacatttgacaattggaaacatcctcataccctaggacaatatctgctgcggtgtctaagggctgaacatcatccngaagccatgggccttcttgaacccttgg

SEQ ID NO: 2874 - DNA, 4379 bp, Homo sapiens
gaatcctggtcgacgattcccgcctttccagcatgcaggggctgctcaggtaagggggacgctcctccttgcccgccgcactcattcattaagtggcactgctcagtggtgcgggggtgggcgtgcttccgtgggctgggcgctgggttcgcggcgcgccctcctgctgcctccccggagctcccgggccagtagcgtttagtcacatcaagaaatagaacagaattcagccatggccccaagaaagagaggtggacgaggtatttcattcatcttttgctgtttccgaaataatgatcacccagaaatcacgtatcggctgcgaaatgatagcaactttgcgcttcagaccatggaaccagcattgcccatgccccctgtggaggagctggatgtcatgttcagtgaactggtggatgaactggacctcacagacaaacacagagaagccatgtttgcacttccagctgagaaaaaatggcaaatatactgtagcaagaaaaaggaccaggaagaaaacaagggagctacaagttggcctgaattctacattgatcagctcaattccatggctgctagaaaatctctgctggctttagagaaggaagaagaagaagaaagaagtaaaactatagagagtttaaagacagcactgaggacaaaaccaatgaggtttgtaaccagattcatcgacttggatggcctatcatgtatcctcaactttctaaagaccatggactacgagacctcagagtctcgaatacatacttctctcattggctgtataaaagcgttaatgaacaactctcaaggccgggctcacgtcctggctcattctgagagtattaatgtaattgctcagagtctgagcacagagaacattaaaacgaaggtggccgtgctggaaatcttgggcgccgtgtgcctggttcccgggggccacaagaaggttctgcaggccatgctgcactaccagaagtatgccagcgaaaggacccgctttcagacattaattaacgacttggataaaagcactgggcggtatcgagatgaagtgagtctcaagactgccatcatgtccttcattaatgcagtgctcagccaaggtgcaggagtggagagtttggactttagacttcatcttcgctatgaaatttctgatgttaggaattcaccctgtaatggataaattaaggaaacacgaaaattcaacattagataggcatttagacttttttgaaatgctccgaaatgaagatgaactagaatttgccaaaagatttgaactggttcacatagacacaaaaagtgcaactcagatgtttgagctgaccaggaagaggctgacacatagtgaagcttacccgcatttcatgtccatcctgcaccactgcctccaaatgccttacaagaggagtggcaacactgttcagtactggctactactagatagaattatacagcagatagttatccagaatgacaaaggacaggaccctgactccacacctttggaaaactttaatattaagaatgtcgtacgaatgttggttaatgaaaatgaagttaagcagtggaaagaacaagcggaaaaaatgagaaaagagcacaatgagctacaacagaaactggaaaagaaagaacgagaatgtgatgctaagactcaagagaaggaagagatgatgcagaccttaaataaaatgaaagagaaacttgaaaaggagactactgagcataagcaagtcaagcagcaggtggcggacctcacagcacagctccatgagctcagcaggagggccgtctgtgcttcaatcccaggtggaccctcgcctggagcaccaggagggccctttccttcctctgtgcctggatctctccttcctcccccaccacccccacctctaccaggtgggatgcttccccctccaccgcctcccctccctccaggtggccctcctcctcccccagggcctcctcccttaggggcaatcatgccacctcctggtgctccaatgggcctagcactgaagaagaaaagcattcctcagcccacaaatgccctgaaatccttcaactggtctaaactgcccgagaacaaactggaaggaacagtatggaccgaaattgatgatacaaaagtcttcaaaattctagatcttgaagacctggaaagaaccttctctgcctatcaaagacagcaggatttctttgtgaacagtaactccaagcagaaagaagcagatgccattgatgacactctgagttccaaacttaaagttaaagagctttcggtgattgatggtcggagagctcagaattgcaacatccttctatcgaggttgaaattatccaatgacgaaatcaaacgggcaattctaacaatggacgaacaggaagatctgcccaaggacatgttggaacagctcttgaaatttgttcctgaaaaaagtgacattgacctattggaggaacataaacatgaactggatcggatggccaaggctgataggttcctttttgagatgagccgaattaatcactatcagcaaaggttgcaatcgctgtacttcaaaaagaagtttgcagagcgtgtggcagaagtgaaacctaaagtggaagcaattcgttctggctcagaagaggtgtttaggagtggtgccctcaagcagttgctggaggtggttttggcatttggaaattatatgaataaaggtcaaagagggaatgcatatggattcaagatatctagcctaaacaaaattgctgacacaaaatccagcatcgacaaaaacattacccttttgcactatctcatcactattgtggaaaataagtaccccagtgttctcaatctaaatgaagaattgcgagatattcctcaagctgcgaaagtaaacatgactgagctggacaaagaaataagtaccttgagaagtggcttgaaagcagtagagacagagctggaatatcagaagtctcagcccccacagcccggagataagtttgtgtctgttgtcagccagttcatcacagtagccagcttcagcttctctgatgttgaagaccttctagcagaagctaaagacctgtttactaaagcagtgaagcactttggggaagaggctggcaaaatacaaccagatgagttctttggcatttttgatcaatttcttcaagctgtgtcagaagccaaacaagaaaacgaaaatatgagaaagaaaaaggaggaagaagaacgtcgagctcgcatggaagctcagctcaaagaacaacgtgaaagggaacgtaaaatgagaaaagctaaagagaatagtgaagaaagcggagagtttgatgaccttgtttcagctttacgctcaggagaagtgtttgacaaagacctttctaaattgaaacggaatcgcaaacgtattaccaaccagatgactgacagcagcagagagagaccaatcacaaaacttaatttctaattttccatgaatacttttttttagaaagctcattagcagccctctaaagtgactagaacgtttcattacactgccttgcaatccaaacagtggcaattttttccttcatctgtgagtgaatgtgtgaacgtgtgtatgtaaatgtatgtgtgtatatattaaaaaatgtatatagatgtctgagtgttgtctggagacctatacgtatggttaaaaagatttatgttaatgtatgtgctccaaaacctttcgtgtatgcattcacattgagtgtggctcattttctttccccgaacgccatgactgttcagaagcacaatactatctcctgaaagagataagagacattccctagattcaaaggcaaaacagaagaaacaaacaaacaaacaaacaaagcttgcaaaatattttatggtttccaagcttgatatcctttaaaattattttcattgatggaactggagttgttggaaaaacatagatttaaaatgatttttgatagctgacattgtgatgttgatgtatcacatcagtaaataggaccagctttgaatttctgacattggtgtggggatacagtctgtaaatgtttattgagaaccatcttgcacacaatttgaattatgtagaatgtcaatcaagtttttgbtatatttaaaagttggacatcaattttttcccctgatttcatccaagttatctctgccaagtgctcttgataatttcttcagatttttggaaaaaaacactatataaavtgcaatccatgctttttttaaagaacaacattgccagagtatgcttgttctaacaatatagatatataaaccttaaaaataataaaatatctcacccaagacttaaaggaagaattctctgaagggataaagattactaaaaaaaaaa

SEQ ID NO: 2875 - DNA, 1278 bp, Homo sapiens
ttttttttttttctcagaacattcacctttaattctgttacaggttccagtatttgcgctggccctagtcagctgtgggtaagagtcacccatgggcaagagtggggaggggactgctcccccatgaaccacatcctcagtgttggccaaataccagcgtgttgggtaggcttcctgtgtccaccaggcctggccatgtcctgcacagtatagcttggacctctgggcctgaaccagggtgagcatcaaggcccccatttctcctcaccacggggtcgcttgtcagctccaggagccagtctggccccactgagaacttttcagtcgagggcctgatgagtcttgggaatgcgcttctgcaagagggcccaggctttctccacctggcgttgggtgatatgcggctcccacaaggtgctgagcaccacgtggctctgttccacaagctgctgcccgctcatctggctctgcagccggctttgagccgcggcttcactgaggccatccctctccacaatgcgtcttacagcctcagtctctgggatgacagcagtccacacctcatggaccaggttctgccagccggcttcaagcaacacagcggcatcaatcacacacacacgctttccctcagccacagcccgatccatctcctctcgggccagctttgcgataattggccacataatgtccgtgagtatcttcagctgcttcttattcccaaacacccggctgcctaggaccttcctgttgatgatgccatctttatggagaatatctgttccaaaggcctccaccacaggctggtaggcagggccacctggggcataggcccgatgacccaggtggtcactgtcaatgacaaacgcccccaggcccttcagtcgctgagctattgagctcttcccagagccactgatgccagtcagcccaattacatagagacatgtggggagctctggcctttcatatggaggccgaagcaggttccccaacattcgctggcggaagctggaggagctgactttgtcctcttcattctctgtatgtctgaggtccttcagcagctggatctggtacaaagcaagttcctccaggtcattctcaaggcggaagcggttgatggccatccccccacgataggtctcctcgctgaccaccaggaactccagggaggggtcagagccagcgggcccataggggtccagcagggggatgacatcaaaagtcaaggagggcttgatgtccaccaggaattcactcagatgttccacacgt

SEQ ID NO: 2876 - DNA, 4351 bp, Homo sapiens
atggggcagaagtctgttggtgcctcctatgtccagattccgttggtgcctcctttgtccaggcaccccaaaggactgggccatgaagacagatggagctcctattgtctatcatcactggctgcccagaatatttgtacaagtaaactgcactgccctgctgcccctgagcacacggacccgtccgaaccgcggggcagtgtgtcctgctgctccctgctgcggggactgtcctcagggtggtcctcacctctgcttccggcccctgtgtgcaaccctaacaaggccatcttcacggtggatgccaagaccacagagatcctggttgctaacgacaaagcttgcgggctcctggggtacagcagccaggacctgattggccagaagctcacgcagttctttctgaggtcagattctgatgtggtggaggccctcagcgaggagcacatggaggccgacggccacgctgcggtggtgtttggcacggtggtggacatcatcagccgtagtggggagaagattccagtgtctgtgtggatgaagaggatgcggcaggagcgccgcctatgctgcgtggtggtcctggagcccgtggagagggtctcgacctgggtcgctttccagagcgatggcaccgtcacgtcatgtgacagtctctttgctcatcttcacgggtacgtgtctggggaggacgtggctgggcagcatatcacagacctgatcccttctgtgcagctccctccttctggccagcacatcccaaagaatctcaagattcagaggtctgttggaagagccagggacggtaccaccttccctctgagcttaaagctgaaatcccaacccagcagcgaggaggcgaccaccggtgaggcggcccctgtgagcggctaccgggcatctgtctgggtgttctgcaccatcagtggcctcatcaccctcctgccggatgggaccatccacggcatcaaccacagcttcgcgctgacactgtttggttacggaaagacggagctcctgggcaagaatatcactttcctgattcctggtttctacagctacatggaccttgcgtacaacagctcattacagctcccagacctggccagctgcctggacgtcggcaatgagagtgggtgtggggagagaaccttggacccgtggcagggccaggacccagctgaggggggccaggatccaaggattaatgtcgtgcttgctggtggccacgttgtgccccgagatgagatccggaagctgatggaaagccaagacatcttcaccgggactcagactgagctgattgctggaggccagctcctttcctgcctctcacctcagcctgctccaggggtggacaatgtcccagaaggaagcctgccagtgcacggtgaacaggcgctgcccaaggaccagcaaatcactgccttggggagagaggaacctgtggcaatagagagccccggacaggatcttctgggagaaagcaggtctgaaccagtggatgtgaagccatttgcttcctgcgaagattctgaagctccagtcccagctgaggatgggggcagtgatgctggcatgtgtggcctgtgtcagaaggcccagctagagcggatgggagtcagtggtcccagcgggtcagacctttgggctggggctgccgtggccaagccccaggccaagggtcagctggcggggggcagcctcctgatgcactgcccttgctatgggagtgaatggggcttgtggtggcgaagccaggacttggcccccagcccctctgggatggcaggcctctcgtttgggacacctactctagatgagccgtggctgggagtggaaaacgaccgagaagagctgcagacctgcttgattaaggagcagctgtcccagttgagccttgcaggagccctggatgtcccccacgccgaactcgttccgacagagtgccaggctgtcaccgctcctgtgtcgtcctgcgatctgggaggcagagacctgtgcggtggctgcacgggcagctcctcagcctgctatgccttggccacggacctccctgggggcctggaagcagtggaggcccaggaggttgatgtgaattcgttttcctggaacctcaaggaactctttttcagtgaccagacagaccaaacgtcatcaaattgttcctgtgctacgtctgaactcagagagacaccctcttccttggcagtgggctccgatccagatgtaggcagtctccaggaacaggggtcgtgtgtcctggatgacagggagctgttactactgaccggcacctgtgttgaccttggccaaggccgacggttccgggagagctgtgtgggacatgatccaacagaaccgcttgaggtttgtttggtgtcctctgagcattatgcagcaagcgacagagaaagcccaggacacgttccttccacgttggatgctggccctgaggacacgtgcccatcagcagaggagccaaggctgaacgtccaggtcacctccacgcccgtgatcgtgatgcgcggggctgctggcctgcagcgggagatccaggagggtgcctactccgggagctgctaccatcgagatggcttacggctgagtatacagtttgaggtgaggcgggtggagctccagggccccacacctctgttctgctgctggctggtgaaagacctcctccacagccaacgcgactcagccgccaggacccgcctgttccttgccagcctgcccggctccacccactctaccgctgctgagctcaccggacccagcctggtggaagtgctcagagccagaccctggtttgaggagccccccaaggctgtggaactggaggggttggcggcctgtgagggcgagtactcccaaaagtacagtaccatgagcccgctgggcagtggggccttcggcttcgtgtggactgctgtggacaaggaaaaaaacaaggaggtggtggtgaagtttattaagaaggagaaggtcttggaggattgttggattgaggatcccaaacttgggaaagttactttagagatcgcaattctatccagggtggagcacgccaatatcatcaaggtattggatatatttgaaaaccaagggttcttccagcttgtgatggagaagcacggctccggcctagacctcttcgctttcatcgaccgccaccccaggctggatgagcccctggcgagctacatcttccgacaagtgagagcagggccagagccgtctagtgtcagcagtgggatacctgcgcttgaaggacatcatccaccgtgacatcaaggatgagaacatcgtgatcgccgaggacttcacaatcaagctgatagactttggctcggccgcctacttggaaaggggaaaattattttatactttttgtgggaccatcgagtactgtgcaccggaagttctcatggggaatccctacagagggccggagctggagatgtggtctctgggagtcactctgtacacgctggtctttgaggagaaccccttctgtgagctggaggagaccgtggaggctgccatacacccgccatacctggtgtccaaagaactcatgagccttgtgtctgggctgctgcagccagtccctgagagacgcaccaccttggagaagctggtgacagacccgtgggtaacacagcctgtgaatcttgctgactatacatgggaagaggtgtttcgagtaaacaagccagaaagtggagttctgtccgctgcgagcctggagatggggaacaggagcctgagtgatgtggcccaggctcaggagctttgtgggggccccgttccaggcgaggctcctaatggccaaggctgtttgcatcccggggatccccgtctgctgaccagctaaacaccaatttcttcctgcttttctccacttggtttggaaaatcacacagttttcaggctccatctgtttggagaaaatacattctgaagcatccccaattcaccttctaaaaactcatgtgcaggtttgataaacaccagaacagaagacagtgatgctgtattattttagatttattacatagatttggaattcacttttttcatgacctagaaaaaaacattccagtgttcaactgttttatattattaaagggcttttaatttgtgaacttctgaaggcatgagtgttttctctttctacttttgtatatgtgcatgttttgtttcctctgacttggtatatgctcatctgagtgacggatatgtgaaatttgtagaactggttagtcaaatggccagactatttcattaatttatttcctcaaatgcttttcaaattaaagcacctttgttagtaaacagttaa

SEQ ID NO: 2877 - DNA, 4351 bp, Homo sapiens; identical to SEQ ID NO: 2876

SEQ ID NO: 2878 - DNA, 4142 bp, Homo sapiens
gaattcgcggccgctcgacgctcagcagagctaccagctgccctgttggcttcgctggtcggatcgtcctcctggccccgccaaacaggcggggggagcggccccgactgtggggccatggcagtagtctcctcgttctccgccgccgctagcctagctgagtcgccggcttctgcgctaggggctcccaccgcctccgcaggctaaggagccgctgccaccaacgagctgtgagggttactatgctccctctttgccgccgtctcctcctcttgcccgcgcaggcacccctctggctgctcagtcctgcctcagtgtcaaaccagaagagaagtaaaattcaacaaaaatttatgtgtggagttccttcttaaaagaagaaaaaagtgattatttagactatggatcggagcaaacggaattcaattgcaggatttcctccacgtgtggagccgtcttgaagagtttgaaggaggtggtggaggagaaggaaatgtgagccaggtgggaagagtttggccatcttcgtatcgagctcttataagtgcctttttcagactgacgcgtttggatgatttcacctgtgaaaaaatagggtctggcttcttttctgaagtgttcaaggtacgacaccgagcttctggtcaggtgatggctcttaagatgaacacattgagcagtaaccgggcaaacatgctgaaagaagtacagctcatgaatagactctcccatcccaacatccttaggtatatcaactccgggaacctggaacagttgctagacagtaacctgcatttgccttggactgtgagggtaaaactggcctatgacatagcagtgggcctcagctaccttcacttcaaaggcatttttcatcgggacctcacatctaagaactgcctgataaagagggatgagaatggttactctgcagtggtagctgactttggcctggctgagaagatccccgatgtcagcatggggagtgagaagctggccgtggtgggttccccattctggatggcacctgaggttctccgagatgagccctataatgaaaaggcagatgtgttctcttatggtatcatcctctgcgagatcatcgcccgcatccaggccgatccggactatcttccccgcacagagaatttcgggctggactatgatgctttccagcacatggtgggagactgtcccccagattttctgcaacttactttcaactgctgtaacatggatcccaaactgcgcccatcttttgtggagattgggaagaccctggaggaaattctgagccgcctacaggaagaagagcaggagagggataggaagctgcagcccacagccaggggactcttggagaaagcacctggggtgaagcgactaagctcactggatgacaagatcccccacaagtcaccatgcccaagacgtaccatctggctgtctcgaagccagtcagatatcttttcccgtaagcccccacgtacagtgagtgtcttggacccatactaccggccacgagatggtgctgcccgcacccccaaagtcaacccttttagtgctcgccaggacctcatggggggcaagatcaagttttttgacctgcccagcaagtctgtcatctctctggtatttgacctggatgcaccagggcccggaactatgcccctggctgactggcaggagcccctggccccacctattcgccggtggcgttccttgcctggttcgcctgagttcttgcatcaagaggcttgtccatttgtgggccgggaagaatcgctatctgatgggcccccaccacgcctaagtagtctcaagtacagagttaaagagatcccaccattccgggcatctgccctaccagctgctcaagcccatgaggctatggactgctccattctccaggaagaaaatggttttgggtccaggccccaggggaccagtccatgccctgcgggtgcttctgaggagatggaggtagaagaaaggccagcaggctcaactccagccaccttctccacctcaggcataggcctgcaaacccagggaaagcaggatgggtgagggggtttagtccctgcctcaccttggggatggaccttcagctgaaaccatatggccccctaggtgcacagccttgattcttccctggagcctacagagcaggcaggctaggccaagccaggctcaacttctgggctcccagtgcccattggctgtgtatgacgggaggcagcagtgagaggccttcctagttagggccaacagctgataccaagcctctgaaatccagcaaggaggtctgcctcccaccagaccctctccagtgtacttccccagataggaccagaggatgtctagttctaggctgagctggcaggcagctattaccccggttctttccccaccccaggtctgtctcttgccttttcttggggcatataagctactgagtggaacatggagctgatcaagaggccgtaacggtcatggctgtttcccagacctgaatattggggtgcttcttgccagtattctaagacatttgagtaattgctgtttgcacttactgcatggtcagaccacgtcactacatttctatgcaaggggacagcaaggcagcgtggtggtcatggctcttagctaacctattcaaagaccttttcctgttgattaatctattttcatatttataaaggagtcttaatgttctgccccataagactttcaaccttgtggttgggagtggggctggttttgtaggccctagggcctgcttctatgtatttatcaacatgtgatacattcaattggttaaatggtttatacagggactgatttgcttcccttcctgccctggctgggagctttggggaacagtctgtcccttacagagctgcaataagaaataaccaaagatgaagctggtcaaatattttcataacttgacttctgttgattttttttttttgtaaaactttcccaaggacattttcagacttaaaaataaagtcagtgttacaggtgctggtcagccttcttacttgtacctcaaacactgggataaaggaggcggtccagggcaatgcagtgatgtctgtcaagacattccccctcccctaaactcagtagcagttgaggatgacatttcaggctagagagacccaaaatacctctgttccacctgagagcaaggtgggaagttgcatcagctacttgccccaagtgagcttcatcttctggattgtggggctttgggagggaacgaggaggaactgggctcttggggccactgtgaggggtacagctttgcccactcaaatataccttattgtggcattcagggagccagggtccagagctgcagggctgcggtccctggctcacttccacataggccatcacataacctgtcataaaggcatcaaaaccagcccggtgcaatccatccccaggcactgggttaggactggcttggctccctggcacttctgaggtagctctatcagctatttcaggccttgctgccttaatccccatctctaagtcatttttgttgccttgcttggagtgaggcaggttcctagtttcatcggcagccacctcctgctcggtttcttcaggcttgatgctatccccacagacctgcttcttgggaggaccatccttagcttccccagaggtctgtgtccccggtaggttcaataaagccctcttccgtttttccctacgtcgtcgccgtcgccgcttgtcctctgccgcagcctcatcagtgtcaatgataaggtcaatatcgtgagactgaggacactgtggtcccagggggcaccagccataagccgagaagttgtcacagatgctggtgggatgaggacggtgggttgctgggggcaggcagcagcggtaatcaatatggtccctcatgctggaaggatagttgcagaactccagggtaaggtgtgggctgccagctgcccgctgcttcccattttcccgttcactgcaacagcgcaagagggtaatggtccactagcatataagctccataagagcagggttttgtggtctgttttgttcactgctgaatcctcagcacctaaaacactgcctgggcacatggtaggagctcaataaat

SEQ ID NO: 2879 - DNA, 4142 bp, Homo sapiens; identical to SEQ ID NO: 2878

SEQ ID NO: 2880 - DNA, 911 bp, Homo sapiens
tttcgtggaacatggactctgactcttgcgccgccgccttccacccggaggaatactcccccagttgcaagaggcgcaggaccgtggaagacttcaacaaattctgcacctttgtcttggcctatgctggctacatcccttatccgaaggaggaactccctttaaggagcagccccagccctgctaacagcactgctggtaccattgacagcgacggctgggacgcgggtttctcagacatcgcgtcctcagtgcccttgccagtctctgaccgctgctttagccacctgcagcctactctcttgcagcgagccaagcccagtaacttcctgctggacagaaagaaaacggacaagctgaagaagaagaagaagaggaagcgcagggacagtgatgcgcctgggaaagaggggtacagggggggcttgctgaagctggaagccgctgacccctacgtggagacccccacgagtcccaccttgcaggatatcccccaggctcccagcgacccctgctcgggctgggactccgatactccctcgagtggatcttgtgccactgtgtcacctgatcaggtcaaagaaataaaaactgaaggcaaacggactatcgtccggcggaagcccagctgatggcgaggaatgatgggaatttctcttccctccttgagagtatctttccttccagatgacgattcctgggacctcgtgacctgcttctgcatgaagccatttgccggccgccccatgatcgagtgtaatgagtgccacacctggattcacctgtcctgtgcgaaaatccggaaatccaatgttccagaagtgtttgtctgccaaaagtgccgggactccaagtttgacatccgccgttccaaccgctcgcggacgggctcccggaagctgttcctggac

SEQ ID NO: 2881 - DNA, 7290 bp, Homo sapiens
cccaggagaggctgcggagccgcagccgcccagaccgcgcagcgcgggaggcaggttccgcacgtgggaggcagcccaagcgcactgagcgcgtggagcagttcctgaccattgcgcggcgccgcggcaggaggagcatgcctgtctccctggaggattctggtgagcccacgtcctgccccgccacagacgccgagacagcctccgagggcagcgtggaaagcgcttctgagaccagaagcggcccccagtctgcttccacagctgtgaaggaacgaccagcctcttctgaaaaggtgaaaggaggggatgaccacgatgacacctccgatagtgacagcgatggcctgaccttgaaagagcttcagaatcgccttcgcaggaagcgggaacaggagcccactgagaggcccctgaaagggatccagagtcgcctgcggaagaagcgccgggaggagggtcccgccgagactgtgggctccgaggccagtgacactgtggagggcgtcctgcccagtaagcaggagcccgagaacgatcagggggttgtgtcccaggctgggaaagatgacagagagagtaagttggagggaaaggcggctcaggacatcaaagatgaggagcctggagacttgggccgaccgaagcctgaatgtgagggttacgaccccaacgccctgtattgcatttgccgccagcctcacaacaacaggtttatgatttgctgtgaccgctgtgaagaatggtttcatggcgattgtgtgggcatttctgaggctcgagggaggcttttggaaaggaatggggaagactatatctgcccaaactgcaccattctgcaagtgcaggatgagactcattcagaaacggcagatcagcaggaagctaaatggagacctggagatgctgatggcaccgattgtacaagtataggaacaatagagcagaagtctagcgaagaccaagggataaagggtagaattgagaaagctgcaaatccaagtggcaagaagaaactcaagatcttccagcctggtcccgggcctgtccccacccagctgcctgtcctctggcaggtattggaaattgctgtgtctagaagcatctctgccttcacactcttgcactgcattagctgcaaggtgatagaggcgcctggtgcctcaaaatgtattggccccgggtgctgtcacgtggcgcagcccgactcggtgtactgcagtaatgactgtatcctcaaacacgccgcagcgacaatgaagtttctaagctcaggtaaagaacagaagccaaagcctaaagaaaagatgaagatgaagccagagaagcccagtcttccgaaatgcggtgctcaggcaggtattaaaatctcttctgtgcacaagagaccagctccagaaaaaaaagagaccacagtgaagaaggcagtggtggtccctgcgcggagtgaagcactcgggaaggaagcagcttgtgagagcagcacgccgtcgtgggcgagcgatcacaattacaatgcagtaaagccagaaaagactgctgctccctcgccgtcactgttgtataaatccacgaaggaagacaggaggtccgaggagaaagcggcagccacggcagcctcaaagaaaacagcccctccaggctccacggtgggcaagcagcctgcacctagaaacctcgtgccaaagaagtcttcttttgctaatgtggcagcagccacaccagccattaaaaagccaccctcaggtttcaagggcaccatccccaagaggccatggctctccgctaccccatcgagtggtgcttcagctgccaggcaggccggaccggcacctgcagcggcgacggctgcctccaagaagttccctggctccgctgctttggtgggagccgtaaggaagccagtggtaccttctgttccaatggcctcgccagccccaggacgccttggggctatgagtgctgcaccatcgcagccaaattcacaaattcggcaaaatatcagacgctccttaaaagagattttgtggaaaagttccttttttttattctgttcagagtcaatgacagcgatgacttaatcatgacagaaaacgaagtaggaaaaattgccctccatattgagaaggagatgtttaacttgtttcaagttacagataatcggcttacaagagtaaatatcgcagcatcatgttcaacttgaaggaccctaaaaatcagggactcttccatcgtgttctgcgtgaggaaatctctttggcgaaacttgtgagactgaagccagaagaacttgtatctaaagagctttccacgtggaaagagaggccagcgagatctgtgatggagtccagaactaaactgcacaatgaaagcaagaagacggcccccaggcaggaggccatccccgatctggaggactctccgccagtgtcggattcagaggaacagcaagagtcagcacgtgctgtccctgagaagagcacagcgccgcttctcgacgtcttcagcagcatgttgaaagacaccaccagtcagcaccgcgcacacctcttcgatctcaactgtaaaatttgcacaggccaggttccctccgcagaagatgagccagctccgaaaaaacaaaaattgtcagcttctgttaagaaagaagacttaaaatcaaagcatgacagctctgcacctgacccagctccggattcagctgatgaggtgatgccggaggctgtgcctgaagttgcctctgagccaggcctagaaagtgcttctcatccaaatgtggacagaacgtatttccctgggcctccaggagatggccatcccgagccctccccgctggaagacctgtccccctgcccagcctcctgtgggagcggggtggtcaccaccgtcacagtgtccggccgggaccccaggaccgctccaagcagttcatgcacagccgtggcctccgcagcatcccgcccagacagcacccacatggtggaagccagacaggatgtgccgaagcctgtcttgacttctgtgatggtgcccaagtccatactagctaagccatcctcatctcctgacccaagatacctgtcagttcctccgtcaccaaatatcagcacttcagaatcacgttcccctccagagggagacacgaccctctttttgtctcgactcagcaccatttggaaaggatttattaacatgcagagtgtggcaaaatttgtcactaaggcgtatcctgtctctgggtgttttgattacctcagtgaggatttgcctgacacaattcacattggtgggaggatcgcaccgaagacagtttgggattatgttggcaaactcaagtcttctgtgtctaaggagctctgtctgatccgcttccaccccgccacagaggaagaggaggtcgcctatatctctctctactcctatttcagcagccgtggccgctttggtgttgtagctaataacaacaggcacgtcaaggacctctacctgatcccgctgagcgcccaggaccctgttccatccaaactcttgccctttgagggaccaggtaagcgccggctttctgggtggaggtgaggcccacctgcacctgcacccctcctcccactgacatgccctgctgagtcctgaccagcccagggctctctgggagcaggagttaggagcacagacgcagcggttagcaataggattcatctttgagggcgtaggactgtggcacgagaagtacccctgattcacagcataaattgtcttaggagagttttttagagagggaaaaacccacagcctgcaaccagctcatcttggcctcaggtcagagaagactcagtgcccaggagcccaaggctcagccagaaagggaggtgacactcccagcggccctgctctttcctctagacagactcgggagccagcacacaccgggaagtggctccatcagggatcacttctctaacagggatggatttccaggagacttaacaataatgacatagaaaactatttctagaaataattattttaaaatctgcagctcaaattgtaatagttcattcatctttggcaagctattttgtgtttgcacgttccttggaaagtactgtatttaaacgattatttacaaatagcctaaaatacatctttgtcaagggttgagggtgattccaggggccacgtgctctgttagtgaccagctctttcatagccccttagaagaagctgatgtgacttcagttaggggttagtatctgatgcccaactgaagtgtctccgtggccatgcagtccccagaggattggtgttctctcaaagcgggtgtgtggatcacacagtgtcctctaaagtgcttcgtcataaaggcaggtgctgtctggaccctgtgcctcagtgccctctgtccctgtcaccaggcctcggcgggtgttcctgccatagctgtgcagggtgttcccacccacacccctcatgccgcaccctagctagctggggtcctgtaggggccactccacatcttgggcgggacttctgtcgccccaggcacagcccacgttcctactggagcccattcttcacagctggagtgggctcagcctatgcctgtgttgtggaattatatgtccataaagggattggttggtatcagtaatttcagggttaaatatttgctggcgtagtgcattaaattattttagtgccagataaatttttaaaagcaaagtgctttagtgtgtcccctcaaatcctacttgggataaagagatgccacctaatgggtggcagaaaggaccctggtagaggttcttggtgttgcttgtgaagagctctggccagctccacgtgaccagggagaggaaaagcccggccctcctggaggtgaagaccgagaagctggcctctccgcacctgtgaagacccactggtcagttgcaagtgcgacagtgtgtgcactcagtgcagacactgcagcacctcagcacctccctaccggggtggaaagagcactttttctttacagaaacatgattcttagatagcgagcctcccctttttaaaacaattgaagcgatatttcatcctttcttgagcttctctccctgctcatctccaaacttggagctgtcaggtgagcacaggttgtagggtgttgagcgagccccggcgcatgccgggcaccgggttccccacactgggcagtgacggggcccagggaggccaccagaggagcggcgcctccattctccccacagcaagggctggctgtgcaggtgcagccccggggcagagggaaaggacaggtctcccagcacctcccggatggcaccgggacaaggagggctgggctggggtcactcaccttgtctgctgagtgcgatggcaccaaccacccacactgtcagctccgcgaccagctgggggaacgtcacactcgcccaccaaggcacttgctgaggccacgacgccgcctgacggggacacacaaaagccccagggactttgatccacgataaagagcagaggcgtctgggtaaagtaacacagggcaagggactttagaaaagtaacagctagtgaaacctttccatacacttcagaaatgttttaacttaagacttcagtataatgttaacttctcctgatgtccttgttgacatgaatgcgtgtgcgtgaaatctcacacacttccatggtcactaaacagccttcaccccgggccaggccatcgggtactcggcccgcttcacgtactgattacttgacttggcgttttctagatataaacatgtacatgtgtgtcctggctttgtggtgtaaatgtgtagtgcgtgtgcatgtgcgcgcgtgtgtgtgtgtaaggctaggtcctggcacgtttcccctgtctcagcggaccctgtcctcacggagatagcccagaagcccttggacagcacaggccacacctgagggtgctgatggtggtgactccacagagctgtggtcaggggtgagcatgtgctgcgcagcttggagtcacgcccccagaagtgctgggtgagggtctgcaggacccagctccattccacagcctcagttctctgcggcacatgcagcacaggcctgaaggagacctggcgccccagccttgagctgcccgtctgcatcagggcactgatgtgggagcatcttcccctggggatgttaaggagaaggtcctgttgggggtagagattcacgcagaaaagagtgactgactcgtccgtgtgcctcagtttataccacacaattgcaggtgtccatgcctcccacacatggggacctagtgggttttgacagcgtggtgtccagtcctagccccctcagtgcttgctgttcacacttaagcaagtgaaggcctgaaggtgcccagctgtgccctcaggggaaacttaagtcacccgccctgtcagcacttggcccttgtcgggcagtgagagtggagctgcccccgcagcaccctcaggagccatgcagttcacagcagtagctggatctccctgaggacatttgtccttgcatatcttaatgatttgtccacagaaacaccgggttgtcttcctctgcccctctgccccgcagtgggggcactctctgtaactcagcatcacagtggggggcagctgggaggcctggttccaggtgaccttctccacctagatgttcaccccactcagttccagctttaccaacagggccccccgcaggaacttggggtcgcagagtcccggcctgtctcagggccttgttcatggaagggagatgagtcaggttgaaagctcatcgtgtagggttctgtgcggggcccttacaggactggaccgcagccaagatgcctgcctgttaaccatgcccagcccccgtcatttccgcgtgaagccgcaggcctcggagccttggtctgaaatgcctgtggagtaacctcggtccataaacatgggtgcacagtctgttctccccaagtacagggcaggaggaaacaccgccctctgtagctgctcgaatggaaagggctcttttctctgaggtctttatacattagaaagctcttctgggaagaatgtttgaatccatagtgtctttctgtattcacttttaattgctttctaaattagctgagaaattctgacttgaaatattgtcaggtaagcatttcttcagttttcatgtgtgtatgtaacagtagctttgcatggaaattgtaatcagagtcaaatacagtattgaatggaatgtactgccttctcctcctaaatcaataaacatctttcatgg

SEQ ID NO: 2882 - DNA, 3486 bp, Homo sapiens
cgcccagcagcccgtgggcaggcgcggcggagcgagcggggccggcggcgggcgccgagggacgccgaggcctcgggcgggggctggcccggggttccaggtctccagtgggggctgcagactaagcaaaatgaggcggttcctgaggccagggcatgaccctgtgcgggagaggctcaagcgggacctgttccagtttaacaagacggtggagcatggcttcccgcaccagcccagcgccctcggctacagcccgtccctgcgcatcctggccatcggcacccgttctggagccatcaagctctacggagccccaggcgtggagttcatggggctgcaccaggagaacaacgctgtgacgcagatccacctcctgcccggccagtgccagctggtcaccctgctggatgacaacagcctgcacctttggagcctgaaggtcaagggcggggcatcggagctgcaggaggatgagagcttcacactgcgtggacccccaggggctgcccccagtgccacacagatcaccgtggtcctgccacattcctcctgcgagctgctctacctgggcaccgagagtggcaacgtgtttgtggtgcagctgccagcttttcgtgcgctggaggaccggaccatcagctcggacgcggtgctgcagcggttgccagaggaggcccgccaccggcgtgtgttcgagatggtggaggcactgcaggagcaccctcgagaccccaaccagatcctgatcggctacagccgaggcctcgttgtcatctgggacctacagggcagccgcgtgctctaccacttcctcagcagccagcaactggagaacatctggtggcagcgggacggccgcctgctcgtcagctgtcactctgacggcagctactgccagtggcccgtgtccagcgaagcccagcaaccagagcccctccgcagcctcgtgccttacggtccctttccttgcaaagcgattaccagaatcctctggctgaccactaggcagggggttgcccttcaccatcttccagggtggcatgccacgggccagctacggggaccgccactgcatctcagtgatccacgatggccagcagacggccttcgacttcacctcccgtgtcatcggcttcactgtcctcacagaggcagaccctgcagccacctttgacgacccctatgccctggtggtgctggctgaggaggagctggtggtgattgacctgcagacagcaggctggccaccggtccagctgccctacctggcttctctgcactgttccgccatcacctgctctcaccacgtctccaacatcccgctgaagctgtgggagcggatcattgccgccggcagccggcagaacgcacacttctccaccatggagtggccaattgatggtggcaccagcctgaccccagccccaccccagagggacctgctgctcacagggcacgaggacggcacggtgcggttctgggatgcctcgggtgtctgcctgcggctgctctacaaactcagcactgtgcgcgtgttcctcaccgacacggaccccaacgagaacctcagtgcccagggcgaggacgagtggcccccactccgcaaggtgggctcctttgacccctacagtgatgacccccggctgggcatccagaagatcttcctctgcaagtacagcggctacctggctgtggcaggcacggcagggcaggtgctggtactggaactgaatgacgaggcagcggagcaggctgtggagcaggtggaggccgacctgctgcaggaccaagagggctaccgctggaaggggcacgagcgcctggcagcccgctcagggcccgtgcgctttgagcctggctttcagcccttcgtgttggtgcagtgtcagcccccggctgtggtcacctccttggccctgcactctgagtggcggctcgtggccttcggcaccagccatggctttggcctctttgaccaccagcagcggcggcaggtctttgttaagtgcacactgcaccccagtgaccagctggccttggagggcccactctcccgcgtcaagtccctcaagaagtccttgcgtcagtcattccgccggatgcgtcggagccgggtgtccagccggaagcggcacccggctggccccccaggagaggcacaggaggggagtgccaaggctgagcggccaggcctccagaacatggagctggcgcctgtgcagcgcaagatcgaggctcgctcggcagaggactccttcacaggcttcgtccggaccctgtactttgctgacacctacctgaaggacagctcccggcactgcccctcgctgtgggctggcaccaatgggggcaccatctatgccttctccctgcgtgtgcctcccgccgagcggagaatggatgagcctgtgcgggcagagcaggccaaggagatccagctgatgcaccgggcgccggtggtgggcatcctggtgctcgacggacacagcgtaccccttcccgagcccctcgaagtggcccatgatctgtcgaagagccctgacatgcagggaagccaccagctgctcgtcgtatcagaggagcagttcaaggtgttcacgctgcccaaggtgagtgccaagctgaagttgaagctgacggccctggagggctcaagagtgcggcgggtcagcgtggcccacttcggcagtcgtcgagccgaggactacggggagcaccacctggcagtccttaccaacctgggcgacatccaggtggtctcgctgcccctgctcaagccccaggtgcgctacagctgcatccgccgggaggacgtcagtggcatcgcctcctgcgtcttcaccaaatatggccaaggcttctacctgatctcaccctcggagtttgagcgcttctctctctccaccaagggggctggtggagccccggtgtctggtggattcagcagaaaccaagaaccaccgccctggtaacggtgcgggccccaagaaggccccgagccgagccaggaactcagggactcagagtgatggcgaggagaagcagcccggcctggtgatggagcgcgctctgctcagtgatgagagagcggcaactgggcgttcacatcgagccgccgtggggtgcagcctcagcaatggcggagcagagtgagtggctgagcgtccaggctgcgcgatgagcacacactactactgatggcctttcgggggtccctgccccaaccggagaggccggtgcacagggccccgccaggggctgggggcatcccggcttccacaatgcagctgctctgggcctcgggagaggagagaccccagtcccctgggctgcccttcccgggcctcgtctgtctgggtcctttggtcaatgttgcacagtttttattgctcccatccctttttgtagtgggctgggttttaagttataaatgttaactgcctctgggtgaaaaagtttttaataaacacctattacctcttgaaa

SEQ ID NO: 2883 - DNA, 3486 bp, Homo sapiens; identical to SEQ ID NO: 2882

SEQ ID NO: 2884 - DNA, 5254 bp, Homo sapiens
ggtgactcaggaggacccctggtctgcgaggagccctctggccggttctttctggctggcatcgtgagctggggaatcgggtgtgcggaagcccggcgtccaggggtctatgcccgagtcaccaggctacgtgactggatcctggaggccaccaccaaagccagcatgcctctggcccccaccatggctcctgcccctgccgcccccagcacagcctggcccaccagtcctgagagccctgtggtcagcacccccaccaaatcgatgcaggccctcagtaccgtgcctcttgactgggtcaccgttcctaagctacaagaatgtggggccaggcctgcaatggagaagcccacccgggtcgtgggcgggttcggagctgcctccggggaggtgccctggcaggtcagcctgaaggaagggtcccggcacttctgcggagcaactgtggtgggggaccgctggctgctgtctgccgcccactgcttcaaccacacgaaggtggagcaggttcgggcccacctgggcactgcgtccctcctgggcctgggcgggagcccggtgaagatcgggctgcggcgggtagtgctgcaccccctctacaaccctggcatcctggacttcgacctggctgtcctggagctggccagccccctggccttcaacaaatacatccagcctgtctgcctgcccctggccatccagaagttccctgtgggccggaagtgcatgatctccggatggggaaatacgcaggaaggaaatgccaccaagcccgagctcctgcagaaggcgtccgtgggcatcatagaccagaaaacctgtagtgtgctctacaacttctccctcacagaccgcatgatctgcgcaggcttcctggaaggcaaagtcgactcctgccaggtgagtggcatcaaggcgctgtacgagtcggagctggccgatgcccggagagtcctggatgagacggctcgagagcgtgcccggctgcagatagagattgggaagctgagggcagagttggacgaggtcaacaagagcgccaagaagagggagggcgagcttacggtggcccagggccgtgtgaaggacctggagtccctgttccaccggagcgaggtggagctggcagctgccctcagcgacaagcgcggcctggagagtgacgtggctgagctgcgggcccagctggccaaggccgaggacggtcatgcagtggccaaaaagcagctggagaaggagacgctgatgcgtgtggacctggagaaccgctgccagagcctgcaggaggagctggacttccggaagagtgtgttcgaggaggaggtgcgggagacgcggcggcggcacgagcggcgcctggtggaggtggacagcagccggcagcaggagtacgacttcaagatggcacaggcgctggaggagctgcggagccagcacgacgagcaagtgcggctctacaagctggagctggagcagacctaccaggccaagctggacagcgccaagctgagctctgaccagaacgacaaggcggccagtgcggctcgcgaggagctgaaggaggcccgcatgcgcctggagtccctcagctaccagctctccggcctccagaagcaggccagtgccgctgaagatcgcattcgggagctggaggaggccatggccggggagcgggacaagttccggaagatgctggacgccaaggagcaggagatgacggagatgcgggacgtgatgcagcagcagctggccgagtaccaggagctgctggacgtgaagctggccctggacatggagatcaacgcctaccggaagctcctggagggcgaggaggagaggctgaagctgtcccccagcccatcctcgcgcgtcaccgtctcacgagccacctcgagcagcagcggcagcttgtccgccaccgggcgcctgggccgcagtaagcggaagcggctggaggtggaggagcccttgggcagcggcccaagcgtcctgggcacgggcacgggtggcagcggtggcttccacctggcccagcaggcctcggcctcgggcagcgtcagcatcgaggagatcgacctggagggcaagtttgtgcagctcaagaacaactcggacaaggatcagtctctggggaactggagaatcaagaggcaggtcttggagggggaggagatcgcctacaagttcacgcccaagtacatcctgcgcgccggccagatggtcacggtgtgggcagctggtgcgggggtggcccacagccccccctcgacgctggtgtggaagggccagagcagctggggcacgggcgagagcttccgcaccgtcctggttaacgcggatggcgaggaagtggccatgaggactgtgaagaagtcctcggtgatgcgtgagaatgagaatggggaggaagaggaggaggaagccgagtttggcgaggaggatcttttccaccaacagggggacccgaggaccacctcaagaggctgctacgtgatgtgaacccacactcctcatccacacacctttctttacccagagccactgaaaactatttttatatcattggctttctttagttcttgatacatttctagagaatttctaagcgaactgccagaacgtgtgggtgggtctcccccagccctccctcctggcgggtctcctccagcctcacttcgctgccacttcgccgctgccccggagacttttcaatcccaccccactcctcatctcaccatttggtcaaattggaagcccagggccaggacccggaggtttagaagatgcttgggcttggagggaggagggccggcgaggctagcgaggggacaggagacggccctgctgcggacggagcgcggaaactgcgtaggaattcagtggtggtgggttttttttaaggctttctacaaaaccaaattcagaatccaggcgtcgacctggtggggcccggggccaagcctgcattctggctgcccagcttcggacagcgggaactcctcaggcagccacgcagcgggtgtgggccagcatggggatggcgtggcccccagggcgggttttcactccgctgcctgggcttccagattcccgttctggcagcgcaccggccgggtttctcggaccgttgactttatttgggggagttttcccgcagttcagttcctgactgtgcagggccaacagggcaggggaggggaagacctggggaaggaagaatgaggacagtcccgtcgtaagacctgtcacaacaataagcagggaggggagatgtggaggggacacatctggttgccttggaggcagaagctgtgagtttcagaacagctgtctgcagggaacgccaccatgttgaccctctggaggagagcgctgtggagcccctcccgtgttccagctccgtctgccctgtgcctatatatacacatgcgtctatccatactgtgcttttatctgtgattttctcgctgaaaccatgtttctcagacaggccaaggccacctgactcctatcacgacgcacccaagcccctcagtccagcttcccaatgcctggcaccccccttcggcaatagctcaccgtttacaccctccctcatagatacacagaagttatttttttaatggatatttatttttttacattggtcagtacacaggtcaggagctcacgccagggccttgaggacaggctgaccctcctccccggggtggcgtggggctggggcaccctccgacggcagagcctccttcagaaagtgcagctcaagtcttaaagacaccaaaactgagccatgggcacgcgccgtctccgggccatggcgttcactgcagggcgggggcggcaccgctcccctgtgactgcatcccgcctccctggggacctgcctgtggcaggaaggaatggggggccccagccccaggccgggaaggagccagcggccgacaaagcagaaacacccgctgctccacgtagcccctgctcgctgtccttgctctcagaagtcccggtcccatgtagatagaggggggcgcatcttaccaaagcatttcctcctggaggctacgccgctgtgctcccagtcaggcggctggtagggagctttgcctgccccggggataccctctgccagccgctggaagtgggaatgctggcgacagactgtgtcctctttcccaccttcatagcaggaatcacccggacccgactggctgggcttcgtgctagcgagggttctgggggtgggtcttggtgatcttgtcctatggggagtctgcagtggtctcagccacatcctatgtattttggctctggaggagcaaagctgtatcctggagttggtctgtgatttgccgacagccttgcaggctgggctcagggacaaagtcccccccaaaacccgcaggtcctcatgtccagacgctgcccagtcctgtcctgaaaacagcacgccccaggcccacagaaccccccaccctacatttgccttgggtggagctgggggtggtcctaggactgcgggtgcccttagctgaagggggtggggagaagcgtggactgggcagcctgtgggtaattggaggttcattgagaattgagtctttggaaacactaagaaaatcaaatttttaaaagttatttatggcctgggaaacaatttgcatttgtccccaaatacgcttagctgtgtgccgcttagaacgatgcgaaaccatccctctgtgtaagcccgtgccgtgtgactcgaagcctagcgccctccctgcgaagcatcagacgccacccagccctggggggaggcccacgcctgctggaccaacgcgggttctggggtgcacagcgccaggttaacgctgaagcctgccccgctgagcccaggagccgggaggcctgcgggctgacccagaatccgatcatgcacctgtcctcatgccagcggctttggctggggttggtctgaagcctgcacgcggcagttctttgttaaagatctgagggactcctcagtcctggggcgtcgccgcctgcagcctcttccaagccctgcgtccagcgagcgtcacagcacaacctgcaaaaacggagctgggctgcagctggggctggcatggactttcatttcagagattcggtttttaagaagatgcatgcctaatgtgttcttttttttttccaatgatttgtaatatacattttatgactggaaacttttttgtacaacactccaataaacattttgattttaaaaaaaaaa

SEQ ID NO: 2885 - DNA, 2123 bp, Homo sapiens
  misc_feature (1)...(2123): n = a,t,c or g
aggtaccgcgccggaattcccggggacggtcgcaaggattacattcgcctgacccggcccggcttgaccctgcccgggcgcgccatgttcgcgcgtgggtcccggaggcgccgctccgggcgtgcgcctccagaggcagaggacccagaccggggccagccctgcaactcctgtagggagcagtgccctggcttcctgctccacggctggagaaagatctgccagcattgcaaatgcccgcgggaggagcatgcagtgcacgcggtgcctgtggacctggaacgcatcatgtgtcggctaatctcggacttccagcgccactccatctccgacgacgactcaggctgtgcatcggaggagtatgcctgggtgcccccaggccttaagccggagcaggtatatcaatttttcagctgcctcccagaggacaaggtcccctacgtcaacagtcctggggagaaatacaggatcaagcagctgctgcaccagctgcccccacacgacagtgaggcacagtactgcacagcacttggaagaaggaggaaaagaaagagctccgagcctttagccagcagcggaagcgggagaatcttggggccttggcatcgtgcgcatcttcccggtgaccatcacttggggccatcttgtgaggagtgcggaaagcagattggaggtggggacatcgcagtgttttgccagccgtgcaagccttgggttgctgnttggacaaccaagttgctttcgtgtgtaccacgtgccaggaactgctggttgacctcatctacttctaccatgttggcaaggtctactgcgggcgtcaccatgccgaatgcctgcgtccacgctgccaagcctgtgacgagatcatcttctcccctgagtgcacggaggctgagggccgccactggcacatggatcacttctgctgctttgagtgtgaagcttcactaggagggcagcgctatgtcatgcgtcagagccgcccccactgctgcgcctgctacgaggcccgccacgcggagtactgtgatggctgtggggagcacatcggcctggaccaaggccagatggcttacgagggccagcactggcatgcctcagaccgctgcttctgctgtagtcgctgtgggcgggccctgctgggccgcccattcctgccacgccgaggcctaatcttctgctctcgagcctgcagccttgggtccgagcccacagctccagggccgagccgccgcagctggagtgccggccctgtcacagccccacttgcagcctccacagcctctttctctgctgtgaagggggcatcagagaccaccaccaaaggcaccagcacagagttagcgccagctacaggccctgaggagccctcccgctttctgagaggggctccccaccgccactccatgccggaactggggctccgcagtgtccccgagccgcccccagagtcccccggccagcctaacctgcgcccagatgatagtgccttcggtcgtcagagcaccccacgcgtcagcttccgcgaccctctggtgtctgaaggaggcccgcgccggaccctgagtgcacccccggcccagcgccgcaggccacgcagtcccccacccagggcccccagccgtcgccgccaccatcatcataatcaccatcaccatcacaaccgccacccaagcagacgtcgccactatcaatgtgacgcgggatcagggtcagactcggaatcttgctccagctcgccctccagttccagttccgaatcatcagaggatgatggcttcttcctaggagagcgcatccctctgcccccgcatttgtgcaggcccatgcctgctcaggacactgcaatggagaccttcaactccccatctttatcgctccccagggactctcgcgcagggatgcctcgtcaggcccgagacaagaactgcatcgtggcttgaaggcaggccgtcctggagggggctccattctccagtcagagtagatgatgaggcccatgcccctcacccccacgccccgcccctacaacctaagtcataaatcctcttcctccctcctttatcagattggttctatttttggttctggtttagagacttggtctaccctattggccaggc

SEQ ID NO: 2886 - DNA, 6844 bp, Homo sapiens
tttcgtgtggagggtcttctatgtccatgcctcgtgcatgcctcctagggcaaggtcctgggaaggagcccatgccccagtgggaatgcatgtggcagaggcacacgcatgctcctcacagcagcaacaaatgccccctgcacagttttggatgttggagtggctgctgcacctgtgcgctttcctatctacacccagcttcccccactggtgttgctgctccaatcctcacggttctattgcagataaacccgaggagatagtcccggcctccaagccctcccgcgctgctgagaacatggctgtggaaccgagggtggcgaccatcaagcagcggcccagcagccggtgcttcccggcgggctcagacatgaactctgtgtacgaacgccaaggaatcgccgtgatgacgcccactgttcctgggagcccaaaagccccgtttctgggcatccctcgaggtacgatgcgaaggcagaaatcaatagacagcagaatctttctatcaggaataacagaggaagagcggcagtttctggctcctccaatgctgaagttcaccagaagcctgtccatgccggacacctctgaggacatcccccctccaccgcagtctgtgcccccgtccccaccaccaccttccccaaccacttacaactgccccaagtccccaactccaagagtctacgggacgattaagcctgcgttcaatcagaattctgccgccaaggtgtcccccgccaccaggtccgacaccgtggccaccatgatgagggagaaggggatgtacttcaggagagagctggaccgctactccttggactctgaagacctctacagtcggaatgccggcccgcaagccaacttccgcaacaagagaggccagatgccagaaaacccatactcagaggtggggaagatcgccagcaaagccgtctacgtccccgccaagcccgccaggcggaaggggatgctggtgaagcagtccaacgtggaggacagccccgagaagacgtgctccatccctatcccgaccatcatcgtgaaggagccgtccaccagcagcagcggcaagagcagccagggcagcagcatggagatcgacccccaggccccggagccaccgagccagctgcggcctgacgaaagcctgaccgtcagcagcccctttgccgccgccatcgccggagccgtccgcgaccgtgagaagcggctggaagccaggaggaactccccggccttcctctccgcagacctgggggatgagcatgtgggcctggggccacccgcccccaggacgcggccctccatgttccccgaggagggggattttgctgacgaggacagcgctgagcagctgtcatcccccatgccgagtgccacgcccagggagcccgaaaaccatttcgtgggtggcgccgaggccagtgctccgggtgaggctgggaggccgctgaattccacgtccaaagcccaggggcccgagagcagcccagcagtgccctccgcgagcagcggcacagccggccccgggaattatgtccacccactcacagggcggctgcttgatcccagctccccgctggccctggcactctccgcaagggaccgagccatgaaggagtctcaacagggacccaaaggggaggcccccaaggccgacctcaacaaacctctttacattgataccaaaatgcggcccagcctggatgccggcttccctacggtcaccaggcagaacacccggggacccctgaggcggcaggagacggagaacaagtacgagaccgacctgggccgagaccggaaaggcgatgacaagaagaacatgctgatcgacatcatggacacgtcccagcagaagtcggctggcctgctgatggtgcacaccgtggacgccactaagctggacaacgccctgcaggaagaggacgagaaggcagaggtggagatgaagccagacagctcgccgtccgaggtgccagaaggtgtttccgaaaccgaaggtgctttacagatctccgctgcccccgagcccaccaccgtgcccggcagaaccatcgtcgcggtgggctccatggaagaggcggtgattttgccattccgcatccctcctccccctctggcatccgtggacttggatgaggattttatttttacagagccattgcctcctcccctggaatttgcaaatagttttgatatccccgatgaccgggcagcttctgtcccggctctctcagacttagtgaagcagaagaaaagcgacacccctcagtccccttcgttgaactccagccaaccaaccaactctgcagacagcaagaagccagccagtctttcaaactgtctgcctgcctcattcctgccaccccctgaaagctttgacgccgtcgccgactctgggatcgaggaggtggacagccggagtagcagcgaccaccacctcgagacgaccagcactatctccaccgtgtctagcatctccaccctgtcttccgaaggtggagagaatgtggacacctgcacagtctatgcagatgggcaagcatttatggttgacaaacccccagtacctcctaagccaaaaatgaagcccatcattcacaaaagcaatgcactttatcaagacgcgctcgtggaagaagatgtagatagctttgttatccccccgcccgctcccccgcccccgccgggcagtgcccagcctgggatggccaaggttctccagccaaggacctccaagttgtggggcgacgtcacagagatcaaaagcccgattctctcaggcccaaaggcaaacgttattagtgaattgaactctatcctacagcaaatgaaccgagagaaattggcaaagccgggggaaggactggattcaccaatgggagccaagtccgccagcctcgctccaagaagcccggagatcatgagcaccatctcaggtacacggagcacgacggtcaccttcactgttcgccccggcacctcccagcccatcaccctgcagagccggccccccgactatgaaagcaggacctcaggaacaagacgtgccccaagccctgtggtctcgccaacagagatgaacaaagagaccctgcccgcccccctgtctgctgccaccgcctctccttctcccgctctctcagatgtctttagccttccaagccagcccccttctggggatctatttggcttgaacccagcgggacgcagtaggtcgccatccccctcgatactgcaacagccaatctcaaataagccttttacaactaaacctgtccacctgtggactaaaccagatgtggccgattggctggaaagtctaaacttgggtgaacataaagaggccttcatggacaatgagatcgatggcagtcacttaccaaacctgcagaaggaggacctcatcgatcttggggtaactcgagtcgggcacagaatgaacatagaaagggctttgaaacagctgctggacagataaggacggctgctctccacctcgcagactgctcttgttataagtagagatgggctcgtgctgaaacatctgaatgccaagcgaagtctgtgagcatcaaccccactccatgggtttgtctcctggtacccaaagaaatactgagttgtgtccacaacatggctgggtcttcagacccctggctcaccatgtgggtgtcttgggcagtttctatcacacatgggacaaggggagggagtttttctaacatggaaaaagattcccagcctgccgcccagcatgcaggtggcctcgctttgccgggtccgtgaggctccccgtcaattttgcacgggatcctagctcttgtaggcagacaccagtgcactctagatacctcctgagacctccgtcctctgctttccgggcagctctcaccaccccaggccccggcatgaggcctttcctcagtcctgtggcctctcagaggacacctgatgctcacctgcccctctttctcctgcacttggcttgcagtgagatgctcccagatgcatttgtccagtgccccatcatgggcctgaaaggcagagaaactttttcctacacagattcttttccccatctcctcctgtggtttgcatccatggctctttggccatgaggttcctggcagtgctgggagtttggatgggatcgtgcccagctttgcttagctttctttatttctgcaaatctgttagcataattccaaggtggccaagcagatgtcacatggagttagtcaaagcacaaagtcacgattccacaatggaggggagacctggccaagggagccagccagcgtgcaactgcccaagctccaggtctccaggacaagagcagttgtctgccatgagcacccatccaggatggagaataagggcttctctgcctctcagaattctttttaattgaagatgtcttgagctctgcaaagatcagagcaggtgagcatccactttgacatgaaggacaagaagacgcatggctcatggcgggcacatgcggctgccagtgagacagcgtctcctctgggagctgggcgggcacagcatcctcagttctgtgcccagccaagggtgagcatctctgctgagacagtccttttgctctcggaggccagggaagatggtacttagaggcttttcccctatcgctctgggtgtctaggaatcccaccagcttgtcttaacagtacaacagcttctttgaggacccagtgggtatggagtatagacagaacccagggttgagaacagaaggtgggcggcaggatcagagtgaaagcagaggcgtgaggagaggaaagcagggaggtctcctgggctgccaggtcagcctctctggcaaggctttcttgagccccgcccctttctttccccggagtccctccaccccataacaatacctcgaatttccaaaagaggtcaccagatgcacatgggccgcaaaacacacagtcaggcttccagcacattctcccccatttggaggatactcgaatgtcaggtttttggttttattattatttcagaactagctcagcccatctctaattataaaacatggttttgttttttttttttcctttttttcttgattaggtctggaacagctctagaatgaacacataaaatttagcaatttaaaatctttctttactgcaagtttaaatagttgtacagatagtttataagcacaatattttaagaaaaaaaagtggctggtctactaggcagcctttgtgccacttcagtgctagaaagttaaagaaaaaaaaacttttgtgatttaataatactatttctgtgggaataattataaaagtatgaccttttttaaatcaacctttatttggatgcatctgaaccagcagagctgtggtttattattttctatctttgctaggaacttcgtcattgaagggacaatttcttcaaagtggttacaattcataatgcagcagtttctccaaaaacaaaaacaaaacacacaccacacacacgcgcttttccagtcacacacccctgatgttggaaccaagtttttggaccttctgttccaaaaccttttgcaggtcaatctttgtatttgaaatgatccaatccaacttgaagtcaattgaatattaaggcggttttacttccgtgtgctttcagtttttccatcatgaggatgaatgaggcattactctagataaaatttccaagacaggatactacaggtggcctgctgaggctgccccatattttagaaaatgtaaaaatggtggtttggccattaatttgtcttccatttgatgataccgcaaaattccgtgagtccattcctttggcatggcactttccctgggcctacagttggtattacctctgtgctcagtgccaggcaaaacactagctcaaaggagagtcaaggaaaccgctggcagacgataaccagtcgaaactcgtgacttcggtttgttgaactttggcagccagttggtgagggccagatgttattccctttcttaaagatactccaagccacatgccactaaccacaagcaagctggctgcaagactaaagagctgataacatagtttatttttacactgtcttattatagagaagtaatagacctatcagaacctgcactgaccaacaaataaacacatgttgccaagatgaatcggtctctatctctatctgcttattttggtactgaaaagcaatagttcctcattcaaatcaccacccactgttctccccctttgggacatgttaggacgaggccctattccatgcccctctttaatggtggaacaaatgttaaactgctcatctaaagatcatgttgatattattccaggttttaagatcaacttttgttacatactgtaatttaaataaactgcatttacatgcctagtttctgtaatattgtgtatacaaaacccaaatctctcaaaatgtaaattatgtatacctgccaagataccttttccagggtgtctgcgcacattttaagttaattcacataatataaaaattactcaatgtgactgttgatttgcctgaactttaccatatcacaaagtgaattatttgtgatactttagttaataaaatggtaaatttttttctcagttattgaacaagcaagcattatccagttgatctggcaatgactttttgtgtgtgggccacaatattgattttcccattaacaattttttttgttttttaaatactaatatgtttcacactatagtttgtgtaacaacacgtgttcgcattatctatgttgctgttacttttgtgcttttattctttttagactttataaaaaaaaaa

SEQ ID NO: 2887 - DNA, 2340 bp, Homo sapiens
ggatgtcccccacagcccaacctgaacaccttgagttgaatcacgctcagcttggcacgagggggaagaccaaattgatagactggactttattcgaaaccagatgaaccttttaacactggatgttaagaaaaaaatcaaggaggttaccgaggaggtggcaaacaaagtttcatgtgcaatgacagatgaaatttgtcgactgtctgttttggttgatgaattttgttcagagtttcatcctaatccagatgtattaaaaatatataaaagtgaattaaataagcacatagaggatggtatgggaagaaatttggctgatcgatgcaccgatgaagtaaacgccttagtgcttcagacccagcaagaaattattgaaaatttgaagccattacttccagctggtatacaggataaactacatacactgatcccttgcaagaaatttgatctcagttataatctaaattaccacaagttatgttcagattttcaagaggatattgtatttcgtttttccctgggctggtcttcccttgtacatcgatttttgggccctagaaatgctcaaagggtgctcctaggattatcagagcctatctttcagctccctagatctttagcttctactcccactgctcctaccactccagcaacgccagataatgcatcacaggaagaactcatgattacattagtaacaggattggcgtccgttacatctagaacttctatgggcatcattattgttggaggagtgatttggaaaactataggctggaaactcctatctgtttcattaactatgtatggagctttgtatctttatgaaagactgagctggaccacccatgccaaggagcgagcctttaaacagcagtttgtaaactatgcaactgaaaaactgaggatgattgttagctccacgagtgcaaactgcagtcaccaagtaaaacaacaaatagctaccacttttgctcgcctgtgccaacaagttgatattactcaaaaacagctggaagaagaaattgctagattacccaaagaaatagatcagttggagaaaatacaaaacaattcaaagctcttaagaaataaagctgttcaacttgaaaatgagctggagaattttactaagcagtttctaccttcaagcaatgaagaatcctaacaatagagattgctttggtgaccatgataggaggaaacgaaacttgtaagattggaacagttgttatttttatgaaattactttaaatatgaattgtactaactgtacctaaatagcaaagccctgtgtagattctggtaatgatctgtctcagggtatgtgtatttttgaagagtgttatgtccttagttttaattttgagtaaagaaaaggctaaaatcatgaattagttacaagcaacagtaccaacttatgtgacccctgaggggtggggctgtgagctcttaatttgtttttgattctgaaaaactctgcttcctggcatccaggagttagagattgagcctttcatcttctttctcaaaactagtttttgatgctttctttcatgggaatagtcacttttttatttagtaaatcgcattgctggaaccaccaaggagtgtggaatgtccttgagtgtattatttatgcaagtcacagtcacgttgccatcatggcagctatgtgaaacactaataaatgtgtttttactttttattcccattaaaactgatgtaaaacaggataaaggcttgttatagtcacttataagtatctgggtctaagtaatttccttagatgtttctaaagaaacattttcagctttgctcccattatgattccaataaggaacgctttcctagtgcaattttaggagtaaagtttgaagagataaaaatagccaaagataggagacgtctgaattttgaatgataaacagtgatgttttaaaaaagctgttgttcttcaggaggcatttgcctaggatattgctggattataccccattggaggcttttaattttatttgtatgaattttccaggatttcattaaaaattattattgtattttttaccttaatgaaagattttgggttcaaatatctttctatattaaaagctgattgagtctgtacatatgtaaattatgcctagtggaggttctgttgactttcttccccactgtggaagaggccagttttgcctccatttgcacattcatttcagttatttctgatccataaatataacatttacaaaattcttccttgagctggtggaaatgcctcaccagtttcctctttaatgaatcaaataaaatctttaactgatgttaaaaaaaaaa

SEQ ID NO: 2888 - DNA, 2340 bp, Homo sapiens; identical to SEQ ID NO: 2887

SEQ ID NO: 2889 - DNA, 3226 bp, Homo sapiens
ttttttttttttttatttaattttttaataaaccataaaatttaaatattcaaatgaaaagaaacaaaaatagattatttaagccagcatgaatttctggttttactcttcctctagggcattgtaggcttgacttacctggggattagagtagtaaagctatgatgctgggtacaataatgaatgagggaggtaaaaatggggcaatgtcttgcataaaatttactttcaaatctaggatcagaagttcactcaagcctactgcaaaggcctgacactggttttttgtctgtataaaactactctgggctttttaccacactttcttcatcacagcttaggtgttccctggcattctgatccttttgctcactaaagctcacttcaatctgtcaaaacatcaagggggaaaatccccaaaatgaaccgacgaataaacactcttaatgtgaacaatcatattcagaccagcctcttgtgcaaaaatacaagtcagtggattttttatccttacataactcaaatattgctatttttttcctgcctttactaaaatggcactttcgtttacatcaaccaattattttctacttgcttctaagtttctgagattgtatgctgtactggctattctttttgattaagctttacaatttccattccagaatatctggtctttgaccaactttatctaattttgtgaagaaatgtgctattaatcagtgaaaatcgcaaaaggaaaaagaaaaggaagcaatgaacaatagtagaatctcacttcagcatttgtataattttttataagaaaaacattcatttttattatgggatctaaaaccatgatcgtgtctgatactgtaagccttttagcgtactcaaatgggtcaacattcaatatggacagccagctagctcacaagaaatgaaatgtaatgcacaaatatgtttgactggtaaaatcccagaggcttggtaataaagtgcagcaaactttccttatattgaataagaactccagtaacctctggatatttttggtaaaaattaaagaaaaggtactgcagtcaagagacaggtaatctttaaacttcaaaagactggctgccagggaccacagtgaaaaattagacctggagccaatgaaaaacactagcttggaaggaatgggtttttccaaaaatgcaaaattagcatttacagatgcttaggatactatgatttgacaggcttacagtgataaaacaacaaagatgaacagttacaatatttatacgtgtagtgtgtaaagaacacaggttttttaattggcagcaagaaattctatgacagcttctgagacaagtaatcctatgccctatatccaccccatgccaatgacgaccagtcaaaatggtaacacagagtaaaaagtgatctactgtatgtgagtcagaaagtacttgaaaagtgacaaaactgtatgttattaaatgccaaaacatatttagaggctttatttaaaaatctctcactgttcattatcaaagttacaagattgcataccaatagacagactgtaaacataggaaattttcgttaaggaaagatgggtttactgtaattcaatcttttacaaaaaattacttgcaagttattgataacagaatttctcttttactttcttaattctcttgaaaattaaaccaatgtttccactttcatgagctaaagttcaaccatggtcaccttaggaaatacccctgtttatttgttaatcagaaatacaaatcgagtggcacatacttccattttcttcttaggccaaaggtttcagcttcattatattttacagaagaccttcagtggtccggtaagtctttcatgtcacagctgaggtttaatgatggcagtggaggaaagcagaggtgatgcaaagtaagaccagcccagttgccttatctgacatggaatctttttcctgtctggcttgcagcagcgaagtgtttctggtcaggttgcctccaccaaacctgattgaagcaaaagggtgacatgctctgataaatcccatttaaggatgattctgttcaggcaaatagttgatccttcaatctgttggctgtgggatgatactaatatgaagaaaattatccgggtagctcagatgttcactcagccactgcagaggtgtttccaacattggctcaattccatgaatcatcacttgattctttttttccccatcttcaggatcaatagcagaaggacaaacttctttgaggagatctcctagtgtgtgcaactgtccatctgcagccacaggacgaaacagcttctgaatgaaaggtctttcagtcgttgtctgatatattctaaaggggatataacgaaatccattttcttctgcaggatattccatgagtttccgattgatggcccaaaactggtcaaatctgtcattttgcaatcccatccagagttgcttgtgatcttttttctgcatttcattgattacttgacttttatgttttaaagcatcagcttctttcatacatgacataaaatgagcttcaattgcatccttagatggacagtgcagaaggtctttttctggaaaactcttaaaatgtactgtgatgttccaaggaagagctgaacttgatgcaagaagatcaaatagcaaaccaattggataatgccatttcagtggtgtgccttcatattcaaaccatatctcactaatgtcttcttgtctcataaccttctgaaagtgctttttcactttgtcagttaccaacgtcaaataacttactcttggcaaaagcaaatagtatggttctgcttccctttcagttatctcatcctgatatagcgtgaaacaagttggaattcgtccaaaccacacatctcgaagcacatctttgtcatctgtcattcttccaggagttaaagcagtacatacaggctaaattcttatttcaaccaaagccaaacctactccaagctatggctcctccttccggctccccgcactggtggggacgcccagattccgcgctccggtggggcggcggggcaagctgcccgcctgacacactgtcctgcggggacgcggtagcaggactccaggaagcccgcgcagccgcaaaaagcaccggcgcggaggtcggagctgaaccctgctgcacttccgccctctggtatccagcgaatacaaccggcaacgctgcggagccctggcacgaaa

SEQ ID NO: 2890 - DNA, 1086 bp, Homo sapiens
cgtcgactttttttttttttaatttttaaatggttaactttatttgatgtctcgccaaataacatatatatgctgtaatgttcattgaaattaaagattccatgagacaagtttaaattaaatgttcacactaaatattttgtaatgacattttaatcttagaatactatatttttgcttgttgaaaacatagttgagtaaaattatttcagtgtcagacatttttagtagcacgtacagtcgcttagctttcagaacagaaagttccttttcaccctactctgctactattattctagtatacatagtcttaagaacatacagtatctattgttcagtgtgttacaatttttctcttctattagtatctaatactaaaattagagtattcaagcttagagatggttttttcattagaaaagtttgtgcggtcaatgcgagaactagggcttccaaccttgctcagccaggacttcatggaattgactttgtcttctggcccctgcacttggcctgtcacggtgcctttgctggtattcttcacccagccaaccactcctattttcctagcttcatcttctgtatacattctgaagcaaacaccctgcactcttccgaacacctcgtagtccacggatttgagtgactgggcggtagacatggcggcggcgagccctctgttgaggagccggagaggggctcggggcgcagcgactgcggcggctgcgagagggaggggacacatgggactgcttggcgcaccccgcgcctgtcaccggtcccggacgctagcgcgccggggtcacgcgtcggaagcggcaaatgagactgcggggcctgggagcgagggcagccggggacgccaggagggaagaggccgctgggccccaggcatcctaggcctctcttcccggactggggaggatgctgtctccacagcgctccctaccatttaattgatcaaggtactctgttctcaaagttagtaaataaaagccggatgctgtgcccaaaaaaagagtggcttcccccagctttattaaagtgtaattgacaaataaaagttgggtatatttgtggtgtaaa

SEQ ID NO: 2891 - DNA, 1230 bp, Homo sapiens
caaaacttttcttttctttttttggcatgcaggctctttttactgttctgggcagtgttttgcaatgtgtgacccctccgcactgttggtgaacatacagacctcctatatgggcacccaagcccaggccagtgtgagaaccttggcgggggggtggggaggatgagaaggggaggcccctagcctgactcagaggtgaagactgctaggccctgctgtccttggggtacgactgtcagggcctctacctccccgcccccgcgggtgggcttctggaagtggatctccaggacgtcatgcagctccgggccatccaagatatcaggaatgttgagcaccagtaccgagcggggaactggctgcgacctgatctcagccttctggatctccccattcacatacggagagactctcagagggacttgctgcccacccagtggcactgtgaactggccgatttggcacagacgctgagccactccatccctagcaaaccccagcatgacactccctggcagtagctcccgaacgtccacatcgccacctccgttcctagtcttgccaaagaagatctctagcttgtccagcagctcctcctcactcagcctgaggctggcaggaaatccagtgaccaacaccctccggccactcaactggctggacaccatcacctggatggtggtgaccatgggcagctccaagggctggacctgcacccgcagccggcactcctccatgttgatcgtgtgctccttttgttgcagcacctgctcagccactttggggtcatcaaaggtgatcagagcagagcccgcaagcagagggcagtggatccgcaaattggaaactaaagacttaggcacttccgggtcctgctgggtgtgtcctcggaataccagggggatcttgggcactgaaaatgggaccttgtctttgggggagtccccgagctcctttctcagctgctgcaggtcccacagcctcatcttgagtctggcctgctcctcctgaagggcgtggagggcggcatccagtggggctgacatgggtctcgggtctgtttggcaagagctgaggcttcagagctgggcacagtggcagaattcacagcaactgaactcttgtttgtaccccccaaagggctgtggtctctctcagccccagcaagacccgaaatacacctcaggaggctctgctcgcaggctgtttgcttccactttcatttccgtg

SEQ ID NO: 2892 - DNA, 460 bp, Homo sapiens
aattcaaaacacacttgataactgaaggatgatgaagtgtccacaggctttactagctatcttttggcttctactgagctgggtgagcagtgaagacaaggtggtacaaagccctctatctctggttgtccacgagggagacaccgtaactctcaattgcagttatgaagtgactaactttcgaagcctactatggtacaagcaggaaaagaaagctcccacatttctatttatgctaacttcaagtggaattgaaaagaagtcaggaagactaagtagcatattagataagaaagaactttccagcatcctgaacatcacagccacccagaccggagactcggccatctacctctgtgctgtggaggcacagtgctccctagtcacctgcagcctgtactcaaattctacagctgaggctctgcaactgtaagatggggaacttgctacattgagcaag

SEQ ID NO: 2893 - DNA, 2192 bp, Homo sapiens
cgaaggcgttcagactcttagctgaacgcggagctgcggcggctatgctgtggagcggctgccggcgtttcggggcgcgcctcggctgcctgcccggcggtctccgggtcctcgtccagaccggccaccggagcttgacctcctgcatcgacccttccatgggacttaatgaagagcagaaagaatttcaaaaagtggcctttgactttgctgcccgagagatggctccaaatatggcagagtgggaccagaaggagctgttcccagtggatgtgatgcggaaggcagcccagctaggcttcggaggggtctacatacaaacagatgtgggcgggtctgggctgtcacgtcttgatacctctgtcatttttgaagccttggctacaggctgcaccagcaccacagcctatataagcatccacaacatgtgtgcctggatgattgatagcttcggaaatgaggaacagaggcacaaattttgcccaccgctctgtaccatggagaagtttgcttcctactgcctcactgaaccaggaagtgggagtgatgctgcctctcttctgacctccgctaagaaacagggagatcattacatcctcaatggctccaaggccttcatcagtggtgctggtgagtcagacatctatgtggtcatgtgccgaacaggaggaccaggccccaagggcatctcatgcatagttgttgagaaggggacccctggcctcagctttggcaagaaggagaaaaaggtggggtggaactcccagccaacacgagctgtgatcttcgaagactgtgctgtccctgtggccaacagaattgggagcgaggggcagggcttcctcattgccgtgagaggactgaacggagggaggatcaatattgcttcctgctccctgggggctgcccacgcctctgtcatcctcacccgagaccacctcaatgtccggaagcagtttggagagcctctggccagtaaccagtacttgcaattcacactggctgatatggcaacaaggctggtggccgcgcggctgatggtccgcaatgcagcagtggctctgcaggaggagaggaaggatgcagtggccttgtgctccatggccaagctctttgctacagatgaatgctttgccatctgcaaccaggccttgcagatgcacgggggctacggctacctgaaggattacgctgttcagcagtacgtgcgggactccagggtccaccagattctagaaggtagcaatgaagtgatgaggatactgatctctagaagcctgcttcaggagtagaacccacacttgttctggcctggtgttcagtgcgactgcagtcagtgttgagtggtgccatgtgggccgctctattccaaaggaatcatggattagacccaagggctgagctcctctagggcaggacctgcaccctgtgtgttggcaccagcatcgggtcttggactggggcagaatccccagtggaaccggaagagctggactgatgagaaacatcagaagaacacatactaccttgttttcctaatgccagaagggtgaccagtgaagattcaccgtcaaaccatgaaagtcctttcttggatccactttatcttgattagtctgcattttactagttcactggatccctcctctaggggcctggggactttcactgatgctcttcctgattctagagcaaaggtgtgggaaggggaaatggaggaatgccctcctgtctgtgtcgttctctgtgccacagctacagatgcagaaggtttctctggatagcacacctctgaatgtaaatcatgataaaatggatatttggaaacttactcctaagctgtgatttagggtgtatttctacttctggactgcctcaatatcaagggctgagacttttgaattttgaatattcgttgggtttcatgttaagaagcctgtggtctaggagtgctattcagtgtttcttttcctgataaacactttgaatattttttttgtgtttttgtttccttttctgaagctgttcctccttttaaatatttttaatcacattgataaaatctatccttcaccacctctggttctactatagttgatttttattttaaatgtttaattgtatttgattaaacacttaactggattttggaataataaaactctcgtccaatttggcttttaaaaaaaaaa

SEQ ID NO: 2894 - DNA, 1014 bp, Homo sapiens
tcggcctgacttcccgggtcgacgatttcgtcttccggctgtcaagctcccggccgggctgactcaagcggaggcgcgcggaacagtcgccgaggcgattcccgcccaggctcctgtaaccgccaggcagtggccccgccatgtcccagccccggaccccagagcaggcactggatacaccgggggactgccccccaggcaggagagacgaggacgctggggaggggatccagtgctcccaacgcatgctcagcttcagtgacgccctgctgtccatcatcgccaccgtcatgatcctgcctgtgacccacacggagatctccccagaacagcagttcgacagaagtgtacagaggcttctggcaacacggattgccgtctacctgatgacctttctcatcgtgacagtggcctgggcagcacacacaaggttgttccaagttgttgggaaaacagacgacacacttgccctgctcaacctggcctgcatgatgaccatcaccttcctgccttacacgttttcgttaatggtgaccttccctgatgtgcctctgggcatcttcttgttctgtgtgtgtgtgatcgccatcggggtcgtgcaggcactgattgtggggtacgcattccacttcccgcacctgctgagcccgcagatccagcgctctgcccacagggctctgtaccgacgacacgtcctgggcatcgtcctccaaggcccggccctgtgctttgcagcggccatcttctctctcttctttgtccccttgtcttacctgctgatggtgactgtcatcctcctcccctatgtcagcaaggtcaccggctggtgcagagacaggctcctgggccacagggagccctcggctcacccagtggaagtcttctcgtttgacctccacgagccactcagcaaggagcgcgtggaagccttcagcgacggagtctacgccatcgtggccacgcttctcatcctggacatctggtgaggaccccgcgtcacctgccccagctatt

SEQ ID NO: 2895 - DNA, 699 bp, Homo sapiens
ggcttactcactatagggctcgagcggccgcccgggcaggtgcagaacagaacactttctcatgtccagggtcagattacaagagcactcaagactttactgacgaaaactcaggaaatcctctatcacaaagaggtttggcaactaaactaagacattaaaaggaaaataccagatgccactctgcaggctgcaataactactacttactggatacattcaaaccctccagaatcaacagttatcaggtaaccaacaagaaatgcaagccgtcgacaatctcacctctgcgcctgggaacaccagtctgtgcaccagagactacaaaatcacccaggtcctcttcccactgctctacactgtcctgttttttgttggacttatcacaaatggcctggcgatgaggattttctttcaaatccggagtaaatcaaactttattatttttcttaagaacacagtcatttctgatcttctcatgattctgacttttccattcaaaattcttagtgatgccaaactgggaacaggaccactgagaacttttgtgtgtcaagttacctccgtcatattttatttcacaatgtatatcagtatttcattcctgggactgataactatcgatcgctaccagaagaccaccaggccatttaaaacatccaaccccaaaaatctcttgggggctaagattctcaagcc

SEQ ID NO: 2896 - DNA, 369 bp, Homo sapiens
ggcacgagagaactgtgttcactaacaacctgaaacagacaccatggtgcacctgactcctgaggagaagtctgccgttactgccctgtggggcaaggtgaacgtggatgaagatgccggtgacgatctgtgccagatactggtggacagacctaggctccgtatatgattttaacaacaggtaatctctagggagaatgattgtagggaggactatcattttcttcttttttgggcatctggattttttcttacaatgaacatattacttgagcagatttttttaatgcaggtgagaaaagcgatactaggaagaatggattcaaaggttgtgaccatgtaaccatgcatttgttaaaagccgtccag

SEQ ID NO: 2897 - DNA, 1100 bp, Homo sapiens
ggccctgccctgaaggctggtcacttgcagaggtaaactcccctctttgacttctggccagggtttgtgctgagctggctgcagccgctctcagcctcgctccgggcacgtcgggcagcctcgggccctcctgcctgcaggatcatgcccaccaccgtggacgatgtcctggagcatggaggggagtttcactttttccagaagcaaatgtttttcctcttggctctgctctcggctaccttcgcgcccatctacgtgggcatcgtcttcctgggcttcacccctgaccaccgctgccggagccccggagtggccgagctgagtctgcgctgcggctggagtcctgcagaggaactgaactacacggtgccgggcccaggacctgcgggcgaagcctccccaagacagtgtaggcgctacgaggtggactggaaccagagcacctttgactgcgtggaccccctggccagcctggacaccaacaggagccgcctgccactgggcccctgccgggacggctgggtgtacgagacgcctggctcgtccatcgtcaccgagtttaacctggtatgtgccaactcctggatgttggacctattccagtcatcagtgaatgtaggattctttattggctctatgagtatcggctacatagcagacaggtttggccgtaagctctgcctcctaactacagtcctcataaatgctgcagctggagttctcatggccatttccccaacctatacgtggatgttaatttttcgcttaatccaaggactggtcagcaaagcaggctggttaataggctacatcctgattacagaatttgttgggcggagatatcggagaacagtggggattttttaccaagttgcctatacagttgggctcctggtgctagctggggtggcttacgcacttcctcactggaggtggttgcagttcacagttgctctgcccaacttcttcttcttgctctattactggtgcatacctgagtctcccaggtggctgatctcccagaataagaatgctgaagccatgagaatcattaagcacatcgcaaagaaaaatggaaaatctctacccgcctcccttca

SEQ ID NO: 2898 - DNA, 1620 bp, Homo sapiens
gcgcctcgccgggtctccgcttatcacacctcaggtgcggtgggcttcgggtggggggcctgcagctagctgatggcaagggaggaatagcaggggtggggattgtggtgtgcgagaggtcccgcggacggggggctcgggggtctcttcagacgagattcccttcaggcttgggccgggtcccttcgcacggagatcccaatgaacgcgggcccctggaggccggtggttggggcttctccgcgtcggggatggggccggtaccctagcccgtttccagcgcctcagtcgggtccccatgccctcagaggtggcccggggcaagcgcgccgccctcttcttcgctgcggtggccatcgtgctggggctaccgctctggtggaagaccacggagacctaccgggccatcgttgccttactcccagatcagtggcctgaatgcccttcagctccgcctcatggtgcctgtcactgtcgtgtttacgcgggagtcagtgcccctggacgaccaggagaagctgcccttcacccgttgtgcatgaaagagagattcctcctgaaatacaaaatgaaaatccaaatgccgtttcccagaaggcctatcggagggctttggacccatgaggaaggaggccctgtcatcgggcagtgtgcaagaggcagaagccatgttagatgagcctcaggaacaagcggagggctccctgactgtgtacgtgatatctgaacactcctcacttcttccccaggacatgatgagctacattgggcccaagaggacagcagtggtgcgggggataatgcaccgggaggcctttaacatcattggccgccgcatagtccaggtggcccaggccatgtctttgactgaggatgtgcttgctgctgctctggctgaccaccttccagaggacaagtggagcgctgagaagaggcggcctctcaagtccagcttgggctatgagatcaccttcagtttactcaacccagaccccaagtcccatgatgtctactgggacattgagggggctgtccggcgctatgtgcaacctttcctgaatgccctcggtgccgctggcaacttctctgtggactctcagattctttactatgcaatgttgggggtgaatccccgctttgactcagcttcctccagctactatttggacatgcacagcctcccccatgtcatcaacccagtggagtcccggctgggatccagtgctgcctccttgtaccctgtgctcaactttctactctacgtgcctgagcttgcacactcaccgctgtacattcaggacaaggatggcgctccagtggccaccaatgccttccatagtccccgctggggtggcattatggtatataatgttgactccaaaacctataatgcctcagtgctgccagtgagagtcgaggtggacatggtgcgagtgatggaggtgttcctggcacagttgcggttgctctttgggattgctcagccccagctgcctccaaaatgcctgctttcagggcctacgagtgaagggctaatgacctgggagctagaccggctgctctgggctcggtcagtggagaacctggccacagccaccaccacccttacctccctggcgc

SEQ ID NO: 2899 - DNA, 2369 bp, Homo sapiens
  misc_feature (1)...(2369): n = a,t,c or g
ttttttttttttggggagcaggaggttttattgtaaagaggccgattgtacagagcaaagtttgtttctgaacacggggggctgggtggtgggacccagaggtccagagctgggtgaaggatgaggggtggcatcgccccatccaggcagtgggcagggcagggaggactaaacggctgcctcccagttcccttccctgcccctcattactgggtaagagggagccaggctatttccacggatccaggagaatatagcaggagaccctcaccaccccacaccatgccccaaggatacgggaggtgccccagtctggcttttgcagtcggccagctcccagcctcctcgaggagcagcctggccacacctttttcccctggagcctggaacagctggctttgggttaggaggctggaagcacccccttaccctgtccaggcacctcaagggacagcccgtggttccctggtcaaaccccttagggcacagtgacccattggcttctgcctctggggctgggtagcacaggagtgggtgggcactgaggggccagcactgagccaggtcttaaagagggagtccgagtgttgggggcagtggtctctggtgggggcatagccccagagatggggctcctgtgagtccagcctaggggttgagggggatctgagccagttcacattgtcctggccacaggggtctctagggcatgacactcagggccactctgcctgttccaggccctgatcgtggtaatttaaagctcagaatggtggatgggggaagcctcagggaccaaggccctgccttcccctagactgagcccctcgtcggcttcatcctcacacccgctgtatctcaaacagcttcacgtcggtgtcgtaccagacaggggggtccacattcctcagatagatgacgccccacatgtaggtgcggaaccacatggcagtgcccgagttggcctggtacttgcggatgaggatggggtggggcacgggcagcagccccaccagggtgccatgctgcaggaaccgcaggatctcagactcatccgtcaggcccttgtcgatgcagatcttctccacctgcggaaccagcacctgcagcagcctcatgatggtctgcagcggcagcttcgacttccaggagaggacccactctggcgttgggctccactgcccactggctgatgaggtggacggtcgccgctgctccctccatgcctggctgggctcccccttagccgggctgccatcctccaagctctgctggggctcaggttccagggaccgcaaggtgccatcctctgacacctgggacttctcggtcagcttgtcaatgcctggagtagccaccagactggtcttgagggtgcctggctctgcaggggcagcggggcgggagccctccatggaggtgcccctccctgggagccggtgcgagacaagggctcaggtgtccgccggcgccgctgcagggccttgtgaatggtgggcgggtccgtgggcaggttggccagctggtggaagatgctgcgcttgcggatgatggcgtagaccaggttggagttgccatcaaattggtactggatgatgttgttgaagacctccaggaggaagaagaccaggtggtggttctgggcggcagagaagaggaaccaggtggtggagaaggcctccagcaggtgcagcaacttgttggcggtcaccatggacaggctcttgaggtagggggacacgttgaccacgatggtgagcaggcagtcgaagaggggctgcaaccgctggtgcccgctggtgatgatcttgtggaacacccacaatgagcaggtcggcgtgggtccctgtgaagactgggatgtccatgggcacgcggattgagtagggtttgttcagccgcaccccgaagttncgctccccgctcagaagcagcaagatgaagacaccaatgtgcatcaggcccacccgagactgatcggcccgggcatcgttgaggaagaagaggatggggacaaggatgtctaggacgtcgctgctcttcagcacgaagaagaggaatttctaggggtgcggggaggggccaagtgggctgagttcaagggaggggcagctctgccccacccccctcagtctgacactgtccctgcccccgggttattggggcagctgctctccatctccctgcagggcccctcgaggctggcccaccttgttgaagtcgcagagcttccagaagagaactagcagctcctggtggaactggatcttcttggtggagttaggcaggtaggtctggagcagggggttggacagcagccgggctatacccttgaggatgaactggaagtcctcctcacgatggatgcg

SEQ ID NO: 2900 - DNA, 871 bp, Homo sapiens
  misc_feature (1)...(871): n = a,t,c or g
aatggcccccgggcccccttcagccaagagggacagagcacaggccccccacccctgataccacgcctagggcagcacggagcacaaggtcgcattccccctctgaaccccggacaaggacctggccccaacaaagatgactcccgcggccctccaaaccatcacatgggcccgatgtcagagaggcggcatgagcagagcggcgggcctgagcatgggcccgagagggggcctttgcggggtggccaggactgcaggggtccccctgataggcgtggccctcacccagacttccccgatgacttcagcagaccagatgacttccaccctgacaagcgctttggccaccggttacgtgaatttgaggggcgaggaggacctttaccgcaagaagagaagtggaggcgagggggccctgggcctccgtttccccctgatcacagggaattcagcgagggggatggccggggtgcagcccgaggccctccgggggcatgggaaggccgcaggcccggaggatgaacgtttcccccgggatcccgaggacccacgttttcgagggcgcagaagaagaaagtttcagaagaggagccccgccgaggcatgagggccgtgctccccccagaggaagggatggttttcctggtcctgaagactttggtccagaggagaattttgatgcttctgaggaagcggcccgaggacgagatctcagaggtcgaggtcggggtaccccacgaggtgagcgagttactaaagacacctggtctggaaggatagggtgcagaatacactggttgtgaatacaccaggaacagtctgagtgcagcattgtttgctctgttgtgtangaggaaggaagggtttactt

SEQ ID NO: 2901 - DNA, 1501 bp, Homo sapiens
  misc_feature (1)...(1501): n = a,t,c or g
gcggccgccggcgggccgggcccgcgcacagcgcccgcatgtacaacatgatggagacggagctgaagccgccgggcccgcagcaaacttcggggggcggcggcggcaactccaccgcggcggcggccggcggcaaccagaaaaacagcccggaccgcgtcaagcggcccatgaatgccttcatggtgtggtcccgcgggcagcggcgcaagatggcccaggagaaccccaagatgcacaactcggagatcagcaagcgcctgggcgccgagtggaaacttttgtcggagacggagaagcggccgttcatcgacgaggctaagcggctgcgagcgctgcacatgaaggagcacccggattataaataccggccccggcggaaaaccaagacgctcatgaagaaggataagtacacgctgcccggcgggctgctggcccccggcggcaatagcatggcgagcggggtcggggtgggcgccggcctgggcgcgggcgtgaaccagcgcatggacagttacgcgcacatgaacggctggagcaacggcagctacagcatgatgcaggaccagctgggctacccgcagcacccgggcctcaatgcgcacggcgcagcgcagatgcagcccatgcaccgctacgacgtgagcgccctgcagtacaactccatgaccagctcgcagacctacatgaacggcttcgccccacctacagcatgtcctactcgcagcagggcacccctggcatggctcctggctccaatgggttcggtggtcaagtccgaggccagctccagcccccctgtggttacctcttcctcccactccagggcgccctgccaggccggggacctccgggacatgatcagcatgtatctccccggcgccgaggtgccggaacccgccgcccccagcagacttcacatgtcccagcactaccagagcggcccggtgcccggcacggccattaacggcacactgcccctctcacacatgtgagggccggacagcgaactggaggggggagaaattttcaaagaaaaacgagggaaatgggaggggtgcaaaagaggagagtaagaaacagcatggagaaaacccggtacgctcaaaaagaaaaaggnnnnnnnnnnnntcccatcacccacagcaaaggacagctgcaaaagaaaacaccaatcccatccacactcacgcaaaaaccgggatgccgacaagaaaacttttatgaaaaagatcctggacttttttttgggggactatttttgtacagagaaaacctgggaagggtggggaggccggggaaatggaccttgtatagatctggaggaaagaaagctacgaaaaactttttaaaagttctaagggtacggtaggagctttgcaggaagtttgcaaaagtctttaccaataatatttaaaggtaggctccaaacgaacaaaaaaattggttaaaatttggaacgaattttgtgacagttttttggaaaaacacgggcaaccaa

SEQ ID NO: 2902 - DNA, 772 bp, Homo sapiens
ttttttttttttgagctttcagatttgcttttattggtagggaaattccagagtggggagccacccaggaggagacaggggtgccgaggcttctgggagtctggaagctcccggatggagaggcttacagcccccagccttccccagcaggagcacaggcaggggactggccaagtctgtcagctcagagcaggaccggcttcagggcctgacttcggtctcctcttgacccgccccggaggcttgtggggggcctctgtgtttgcagctctcctgaacagagctagatgagggtgggaggcccccgttggctcacacagtggatgctaccatctccggcctcttggatgtggagctctgtgccagagtcaacagtctccagggtgggccccgaagttgttggtagcgttctcaaggccgaaatctgcttctccctcagattctggtctgtgccgttttcttctgggataggctgaataagatgattaggatgatcaatgcgagcagcagcaccgccatcacagcccccacgatcccatacacgaggctcttggcgatgttgaattcacaggtctctccccagtaccagtgtgtgttcgtatttgggcacaggcagcgggggccactgcgttgcagctgacatgtgcccaggttacagttcatttgcgacttcgttcctttggtgcacttgttcacacaggccagcttcccatccaagacatccacatagtagaactgggtatatccttcggcagccttctgggtgcattgc

SEQ ID NO: 2903 - DNA, 770 bp, Homo sapiens
gagtagattttcgggtcaaaaccttgctggtggacaacaagtgctttgtgctgcagctctgggacacagctggccaagagaggtaccacagtatgacgcgacagctgctccgcaaggctgacggggtggtgctcatgtacgacatcacctcccaggagagctttgcccacgtgcgctactggctagactgtctccaggatgcagggtcggatggggtggtcatccttctcctgggaaacaagatggactgtgaggaggaacggcaagtgtccgtggaagctgggcagcaactggcccaggaactgggggtctattttggggagtgcagtgccgccttgggtcacaacatcctggagcctgtagtaaacctggccaggtcactcaggatgcaagaagaaggcctgaaggactcgctggtgaaggtggcccccaagaggccgcccaagagattcggctgttgctcctgatcacctgtcctgtcctgggtaggatggacacccatggggtttcctgtccctcagctcctgtcctttgttcctggacagcaacgacacagaggaccagcttggaggttcaggaaaacccttctcaactcaggactcggatcccagagcagggccgcatcacctctgcctttcacactccaaaggagggctttgctgagtgaacaaggcttgaggggcaggggtatggcaaaactctccaaacaaagaaagtctagaaaaacgacttaaggaaaatacaccaaaatattggccgcaaaaaaaaaa

SEQ ID NO: 2904 - DNA, 3410 bp, Homo sapiens
ttttttttttttgcacaggcaaaaaagtttatctggttgcctctgggtaggataccttttttctttttctctattttatacatcctgacaattatttccaagatgatacatgcctcaaaacaaacaaaacccctcgagacacactccccagcccccagggaaggcatgtgtctgggctgtgtaggggcttccgctctcctgggggtagctctgccacggtctctggggtcttggcatctgtcacagaaccctagtggttacagggctcactgtcccacagccccaggccacacggtgatgtgctgtggcccaggggaggccaccctggactcctggtcaggatctgcccacatgaggaagtgcgccttggggtagggccacaggctggctcagaggtgcccttctctccacagccagtcccaggagggagctgggttctggtttatgcgacgtcagagggacggcagggagtggagggcaagctagaaaagcccaagcttgttgtttcagccattttaatacattcaagaatatttactagaacaacatttaaacgtatcgtcggtccgcagaagcctgggatcgagagaaatagaaacgcgactggcccttttgcagtaaagcttgtgcttgaagggagaagaggcaaagtggcttcttggagacttcgtgccagatgccacaggactgagagcatctccaaatgtcactttaaacacgtgtgaggcatctataggcattcctaaagcccacagtgtccctaaggatccctattagacgaggccaaaagggcaatgctttcttggaaccctctcccttgcagctctgcacgcaaacattccccaagggaggggcccgaggcaagcctctagataggcggggccaagccctccccgtgcccaccctctttccctgttgctgacctcaggcctgatgctggacccatgagactcccagagggaaaacacagatacagcccatccatccatggccaccttcctccagaagatcctggggacccctacccccccatcccatgaggcaccagggctgggctcgcatggccagcaagggataaagttgggaactgcagaccaggggaagccccctcattcttagggcaaaacagcccctgaaggacaaaataaataaaccaaaccatgaccagacagctggatccggacaggtggagtggcctctgtgaaggcaaatgagagcaaaagtgggaactgaggacacctaagtggagagacacttaaaaacagtaattctcacatgaacatcagtggctcatgccaacagcagagctggccatcaacagaggaacagcaacaaaaacacaactcagacagggggcgggacggggccaggagtctgcgggggtctctgatatgctttgtggcatgactttgcttgcctggcctctcctttcttagctgaaaacaggcatttcaccaaagggcatccagccagcggcagcagcctgagctcccaggctgacatctgggcagggctgatgggcagcttctggccatctggtgaccaggtgtgccgccagctgcacccacatgcacagcccctttcctaataaccacattctaggttacgtagacacgttaaactcctattctagaacatcgtgcttgaatgcagacccctcagcccacaatcgggctggctgggcctcctgtgagcccctcattgcatccagtctgtggggcagtgaccccgcttccactggtggctggtcttcctcatggtgctatgcaggtgccaaacacagttatattctcaaaggtacaggtcttgtctggacattgttcaaaccaatagctactgcgttaggcacacgggagatccctattcccaaaaatagctgttgagttctggcctgagagcatctccagtgaccacctttaaataaggctttggttcaaacagcatggacccagcacctggggagggtgggcacagggggcatggacccagtacctggggagggcgggcatggtggtaggagacaactcaaccactgagtcttggaggtcctgccttggccatggagggcagtggctgccctcacaagaagagttaaggcactttctttaactctggcctaggagaattatgtcttagtgactcagtgagtttaaatgacactgcctgggctccctaaagttgtttacttttctcctatttcctgctttattccttgctctcaccatgctaatgtacagatgttgtttagatttctatgcttattgaaaacaatgtaactttggtactaatcagaacaggagcgaccttttccagcattgctcgtaacaaaacaaaaatgttaactagaaaaactccttatgatgaagaaatctaaagccagagctgggactccaaaccccttccaggctggaagacaggtcgctgagtccaggcaaggggcccccgtaactgcttcccgccagaaagcccagccgcgtgagtgcagcagcagcaccccagccctggcgtgcccgcaccacgccctctagatactctcctagctcaggctgaacacgcctggattgtgtcggccggggcagccccgtcaggtgtggggcagctgacccacgtctgtggtgaacatgctcctccaaactaggacggtgaagggcccagggcgctgggaactgccaggcgctgactctccttctgggttctcaccagcaccggaacccaccccagccaatagtcaggaagtgccgcggccgagccttcatcaaccctagtgagtttcccacagaactgaatcccttttcccaaattcagctgtgcatgagccctttttgtttggtgccctggagcactagtgtagttcaatattctcttcagaaggaaaactccagcagccaccggcctgcaggatgtgtgctgagcccacatgacctgaatggacgggtcatgtgggaggggccctggtgggagctgtgggccacacggctgagttcttccaatacggaagccccgagctggaggctcacacgctgtggggcagcccagagttgctggaagctttacaggggtgcgtagctaatggcgtcggtgtcgctcggtcgctgtggaggggtacccccgctattggggcggctcctcccggcatgctcaggtctcaaagtacttgtagatcgccgtcacatacagcatcacgttctgccagtcgggtcgttcagtccgtaccatttcattaatgtccagtgtggatttgatgccgacactttcagctgcctggaaagccagcatgaagttccttctcttatcctggctgttcagttcttgatatggaatgtgggcagggagatatgtatgcaggagggcacagaaggccagcccatcattccagctgctgctgaagtttgtaatgtcaatattctgcc

SEQ ID NO: 2905 - DNA, 1811 bp, Homo sapiens
  misc_feature (1)...(1811): n = a,t,c or g
ctcgtcgtgacagccatcactgccatcctggctttccccaatgaatacactcggatgagcacaagtgagctcatttctgagctgtttaatgactgtggccttctggactcctccaagctctgtgattatgagaaccgtttcaacacaagcaaagggggtgaactgcctgacagaccggctggcgtgggagtctacagtgcaatgtggcagctggctttaacactcatactgaaaattgtcattactatattcacctttggcatgaagatcccttctggcctctttatccctagcatggctgttggtgctatagcaggtcgacttctaggagtaggaatggaacagctggcttattaccaccaggaatggaccgtcttcaatagctggtgtagtcagggagctgattgcatcacccccggcctttatgcaatggttggggctgcagcctgcttaggtggggtgactcggatgactgtttctcttgttgtcataatgtttgaactgactggtggcttagaatacatcgtgcctctgatggctgcagccatgacaagcaagtgggtggcagatgctcttgggcgggagggcatctatgatgcccacatccgtctcaatggatacccctttcttgaagccaaagaagagtttgctcataagaccctggcaatggatgtgatgaaaccccggagaaatgatcctttgttgactgtccttactcaggacagtatgactgtggaagatgtagagaccataatcagtgaaaccacttacagtggcttcccagtggtggtatcccgggagtcccaaagacttgtgggctttgtcctccgaagagatctcattatttcaattgaaaatgctcgaaagaaacaggatggggttgttagcacttccatcatttatttcacggagcattctcctccattgccaccatacactccacccactctaaagcttcggaacatcctcgatctcagccccttcactgtgactgaccttacacccatggagatcgtagtggatattttccgaaagctgggactgcggcagtgcctggttacacacaacgggcgattgcttggaatcattaccaaaaaggatgtgttaaagcatatagcacagatggcgaaccaagatcctgattccattctcttcaactagaatcatagagttctggatgtaaagcgggaaggacattacagaccatggatatgttgtattaactgggtacccaaaacacattttccatatttggatggtgaagtcacattagtgtgttgtctctttcctacaagttaaccagttgcactacataatctctggaaattaattttctctttaggagaaattatagttaggcttccatgatgttacatttaggaaggtatcatgaaaggtttaaataaggttggctatgggtgtnaattatatttgcctttttaaaagatttttttaacttaaaaagtagttagccaatatgcaatcactgaaaactatgcaagagaaattccaaccgtcctgacctataacctgtaggaaaccgacgaaaaagtcactcttttgggatctaactgttgttactggaagacgaaggtaaactaaggggctttgcttttcaaaccagagaaaggaaagccagaaggaaaagagtaatggtattttctagactgtgaagattcagttcaaatgttatccttgttcctgttacaatatttagcattattagtttgttatgtgtgtatgtttatgttaattttaatttctgattataagacaatgctgctttggttaatctcttctaaaggaattta

SEQ ID NO: 2906 - DNA, 627 bp, Homo sapiens
  misc_feature (1)...(627): n = a,t,c or g
tcttggtgctggacaggcatctttgttttgggaacaaccaacctaagattggagggctcttggtacaggagcctttggggccctggatttaatactacgacagccactttgggctttggagccccccaggccccagtaggggatgtggctctaaatcagccggacatgtgcgtctaccgaagagggaggaagaagagagtgccttacaccaaactgcagcttaaagaactggagaacgagtatgccattaacaaattcattaacaaggacaagcggcggcgtatctcggctgctacgaacctatctgagagacaagtgaccatttggtttcagaaccgaagagtgaaggacaagaaaattgtctccaagctcaaagatactgtctcctgatgtggtccaggttggccacagacagcttagaagccattcggttgtctccaaaaggcctttggaaagacttgaatatgtatttaattccccccaccccctgccaatggtggcaaattttgtgaattgtttttctctcttccccttatctggctctaaaaccttctgctgcccaacctgactttgtagttctgaattttacttggttattnatggntnntgtcttgcctaggtttttaa

SEQ ID NO: 2907 - DNA, 3918 bp, Homo sapiens
gcgcggaggagggggcgaccacaagatggcggacctctcgctgcttcaggaggacctgcaggaggacgcagacggatttggtgtggatgactacagctcagagtctgatgtgattattataccttcagccctggacttggcctccacaaagatgaaatggttgaacgccccctgggaagattgggacaaagtatgctgcaagtgagaaccatatttaaccagacaaaatggtggccccggagtttgcctcgatacccttgagggaaagtctgcgatgatgaaagagattgtattgctgttttgggaaagaattagccagattgggccgatgattcagaaccaacttgtgagagcggctgaattggaacaggtgcctcacatcgcactgtttttgttcaagaaaacccgcctttcaattaccatatgctttttttcaaaattcttactaccctattgtgggttagataccttggcagatcagaattaatcaggtgaggaaaacaagtcaggcagctttgcttggctctgttggagcaggagctcattgaacgatttgatgtggagaccaaagtgtgccctgtcctcatagagctgacagccccagatagcaatgatgatgtgaaaacagaagctgtggctataatgtgcaaaatggctccccatggttgggaaggatattacagagcgtcttatcctccctaggttttgtgagatgtgctgcgattgcagaatgtttcacggttcggaaaggtctgtgctgccaattttggagatatttgcagtgtagttggccagcaagctactgaagaaatgttgctgcccagatttttccagctttgttctgataatgtatggggagtccgaaaggcttgtgctgaatgcttcatggcggtttcatgtgcaacatgtcaagaaatccgacggaccaaattatcagcactttttattaatttgatcagtgatccttcacgttgggttcgccaagcagcttttcagtctctgggacctttcatatctacttttgctaatccatctagctcaggccagtattttaaagaagaaagcaaaagttcagaagagatgtcagtagaaaacaataaaaggaccagagatcaagaagccccagaggatgtacaagtcaggccagaggatactccttcagatctcagtgttagtaattccagtgtcatactggaaaacacgatggaagaccatgctgctgaggcatccgggaagcctctaggtgaaattagtgttccactggacagctctttactttgtactttgtcctcagaatctcaccaggaagcagctagtaatgagaatgataaaaaacctggtaactacaaatctatgttacgaccagaggttggcaccacttcacaagattcagctctcttagatcaggaattgtataactccttccatttctggaggactcctcttcctgaaatagatctagacatagagcttgaacagaactctgggggaaaacccagcccagagggaccagaggaagaatctgagggccctgtgcccagttctccaaacatcaccatggccaccagaaaggaactggaagaaatgatagaaaatctagagccccacattgatgatccagatgttaaagcacaagtggaagtgctgtccgctgcactacgtgcttccagcctggatgcacatgaagagaccatcagtatagaaaagagaagtgatttgcaagatgaactggatataaatgagctaccaaattgtaaaataaatcaagaagattctgtgcctttaatcagcgatgctgttgagaatatggactccactcttcactatattcacaacgattcagacttgagcaacaatagcagttttagccctgatgaggaaaggagaactaaagtacaagatgttgtacctcaggcgttgttagatcagtatttatctatgactgacccttctcgtgcacagacggttgacactgaaattgctaagcactgtgcatatagcctccctggtgtggccttgacactcggaagacagaattggcactgcctgagagagacgtatgagactctggcctcagacatgcagtggaaagttcgacgaactctagcattctccatccacgagcttgcagttattcttggagatccaattgacagctgcagatctggttccaatttttaatgggtttttaaaatgaccgtcgatgaagtcaaggataggtgttcttaaacacttgcatgattttctgaagcttcttcatattgacaaaagaagagaatatctttatcaacttcaggagtttttggtgacagataatagtagaaattggcggtttcgagctgaactggctgaacagctgattttacttctagagttatatagtcccagagatgtttatgactatttacgtcccattgctctgaatctgtgtgcagacaaagtttcttctgttcgttggatttcctacaagttggtcagcgagatggtgaagaagctgcacgcggcaacaccaccaacgttcggagtggacctcatcaatgagcttgtggagaactttggcagatgtcccaagtggtctggtcggcaagcctttgtctttgtctgccagactgtcattgaggatgactgccttcccatggaccagtttgctgtgcatctcatgccgcatctgctaaccttagcaaatgacagggttcctaacgtgcgagtgctgcttgcaaagacattaagacaaactctactagaaaaagactatttcttggcctctgccagctgccaccaggaggctgtggagcagaccatcatggctcttcagatggaccgcgacagcgatgtcaagtattttgcaagcatccaccctgccagtaccaaaatctccgaagatgccatgagcacagcgtcctcaacctactagaaggcttgaatctcggtgtctttcctgcttccatgagagccgaggttcagtgggcattcgccacgcatgtgacctgggatagctttcgggggaggagagaccttcctctcctgcggacttcattgcaggtgcaagttgcctacacccaataccagggatttcaagagtcaagagaaagtacagtaaacactattatcttatcttgactttaaggggaaataatttctcagaggattataattgtcaccgaagccttaaatccttctgtcttcctgactgaatgaaacttgaattggcagagcattttccttatggaagggatgagattcccagagacctgcattgctttctcctggttttatttaacaatcgacaaatgaaattcttacagcctgaaggcagacgtgtgcccagatgtgaaagagaccttcagtatcagccctaactcttctctcccaggaaggacttgctgggctctgtggccagctgtccagcccagccctgtgtgtgaatcgtttgtgacgtgtgcaaatgggaaaggaggggtttttacatctcctaaaggacctgatgccaacacaagtaggattgacttaaactcttaagcgcagcatattgctgtacacatttacagaatggttgctgagtgtctgtgtctgattttttcatgctggtcatgacctgaaggaaatttattagacgtataatgtatgtctggtgtttttaacttgatcatgatcagctctgaggtgcaacttcttcacatactgtacatacctgtgaccactcttgggagtgctgcagtctttaatcatgctgtttaaactgttgtggcacaagttctcttgtccaaataaaatttattaataagatctatagagagagatatatacacttttgattgttttctagatgtctaccaataaatgcaatttgtgacctgtattaatgatttaaagtggggaaactagattaaaatatttgtcttttaactagttaaaaaa

SEQ ID NO: 2908 - DNA, 2562 bp, Homo sapiens
gggatgggggcggagtccagggcgtgggggggccggtttgttgtggtcgccattttgctggttgcattactgggtaatcggggccctggcttgccgcgtccgccggataccctcagccagtgggcaggtctgagctcgggctccccgagcagtttgagtccccttgcccgctccttcaggtctcagcggcggtggcagccgaggtgcaggatgcaagaaggcgccccccggccgggctcccgctccaggcctcgctcccctgcggccctctgagcccaccatggccgtcccaccgggccatggtcccttctctggcttcccagggccccaggagcacacgcaggtattgcctgatgtgcggctactgcctcggaggctgcccctggccttccgggatgcaacctcagccccgctgcgtaagctctctgtggacctcatcaagacctacaagcacatcaatgaggtatactatgcgaagaagaagcggcgggcccagcaggcgccaccccaggattcgagcaacaagaaggagaagaaggtcctgaaccatggttatgatgacgacaaccatgactacatcgtgcgcagtggcgagcgctggctggagcgctacgaaattgactcgctcattggcaaaggctcctttggccaggtggtgaaagcctatgatcatcagacccaggagcttgtggccatcaagatcatcaagaacaaaaaggctttcctgaaccaggcccagattgagctgcggctgctggagctgatgaaccagcatgacacggagatgaagtactatatagtacacctgaagcggcacttcatgttccggaacccacttgtgcttggtatttgagctgctgtcctacaacctgtacgacctcctgcgcaacacccacttccgcggcgtctcgctgaacctgacccggaagctggcgcagcagctctgcacggcactgctctttctggccacgcctgagctcagcatcattcactgcgacctcaagcccgaaaacatcttgctgtgcaaccccaagcgcagcgccatcaagattgtggacttcggcagctcctgccagcttggccagaggatctaccagtatatccagagccgcttctaccgctcacctgaggtgctcctgggcacaccctacgacctggccattgacatgtggtccctgggctgcatccttgtggagatgcacaccggagagcccctcttcagtggctccaatgaggtgtgcccccaggaaggggtcgaccagatgaaccgcattgtggaggtgctgggcatcccaccggccgccatgctggaccaggcgcccaaggctcgcaagtactttgaacggctgcctgggggtggctggaccctacgaaggacgaaagaactcaggaaggattaccagggccccgggacacggcggctgcaggaggtgctgggcgtgcagacgggcgggcccgggggccggcgggcgggggagccgggccacagccccgccgacctaccctccgcttccaggacctggtgctgcgcatgctggagtatgagcccgccgcccgcatcagccccctgggggctctgcagcacggcttcttccgccgcacggccgacgaggccaccaacacgggcccggcaggcagcagtgcctccacctcgcccgcgcccctcgacacctgcccctcttccagcaccgccagctccatctccagttctggaggctccagtggctcctccagtgacaaccggacctaccgctacagcaaccgatattgtgggggccctgggccccctatcacagactgtgagatgaacagcccccaggtcccaccctcccagccgctgcggccctgggcagggggtgatgtgccccacaagacacatcaagcccctgcctctgcctcgtcactgcctgggaccggggcccagttacccccccagccccgataccttggtcgtcccccatcaccaacctcaccaccacccccggagctgatggatgtgagcctggtgggcggccctgctgactgctccccacctcacccagcgcctgccccccagcacccggctgcctcagccctccggactcggatgactggaggtcgtccacccctcccgcctcctgatgaccctgccactctggggcctcacctgggcctccgtggtgtaccccagagcacagcagccagctcgtgaccctgccccctccctggggcccctcctgaagccataccctcccccatctgggggccctgggctcccatcctcatctctctccttgactggaattgctgctacccagctggggtgggtgaggcctgcactgattggggcctggggcaggggggtcaaggagagggttttggccgctccctccccactaaggactggacccttgggcccctctccccctttttttctatttattgtaccaaagacagtggtggtccggtggagggaagaccccccctcaccccaggaccctaggagggggtgggggcaggtagggggagatggccttgctcctcctcgctgtacccccagtaaagagctttctcacaaaaaaa

SEQ ID NO: 2909 - DNA, 422 bp, Homo sapiens
  misc_feature (1)...(422): n = a,t,c or g
cttcatttccagcaacacttatgaatttgcagtgatttttctcacattgctactaccattttggtgaccagaggagtactacccattctccccaacattgcaacaactcttttttttcctcctagattctgacatggggtctcggcctgagtctatgggatgtagaaaaaacacagtgccaaggccagcatctccaacagaagcaggtactgacccccaaaccttcttacacacttgggtgtctgaatgcagagactaaatgggtgcaccaagagtttaatcaatgaacggatgtattgacatcactctattctgtatccatggactctcctttaatcttttaacccaattatccagctcataaatatgggaagctcctcagatgggccattgtcacaagaaagaaggcanaatcactgcaa

SEQ ID NO: 2910 - DNA, 1119 bp, Homo sapiens
gtccgtcacccacgcgtcggagaactgccaactactttccaagtggccacatcagtttttattcccctggcagtgtatgagagtttcagcttctccacattcaggtatcttagtctggctctgggtgccccatcaccattcccgtttccttccaggagctgctccggacacaggaggagcttaaggaactgtaggcagaacggcagagccaggaggtggctgggcgacaccgggaccgggagttggagaagcagctggcggtcctgagggtcgaggctgatcgaggtcgggagctggaagaacagaacctccagctacaaaagaccctccagcaactgcgacaggactgtgaagaggcttccaaggcaaggctaagatggtggccgaggcagaggcaacagtgctggggcagcggcgggccgcagtggagacgacgcttcgggagacccaggaggaaaatgacgaattccgccggcgcatcctgggtttggagcagcagctgaaggagactcgaggtctggtggatggtggggaagcggtggaggcacgactacgggacaagctgcagcggctggaggcagagaaacagcagctggaggaggccctgaatgcgtcccaggaagaggaggggagtctggcagcagccaagcgggcactggaggcacgcctagaggaggctcagcgggggctggcccgcctggggcaggagcagcagacactgaaccgggccctggaggaggaagggaagcagcgggaggtgctccggcgaggcaaggctgagctggaggagcagaagcgtttgctggacaggactgtggaccgactgaacaaggagttggagaagatcggggaggactctaagcaagccctgcagcagctccaggcccagctggaggattataaggaaaaggcccggcgggaggtggcagatgcccagcgccaggccaaggattgggccagtgaggctgagaagacctctggaggactgagccgacttcaggatgagatccagaggctgcggcaggccctgcaggcatcccaggctgagcgggacacagcccggctggacaaagagctactggcccagcgactgcaggggctggagcaagaggcagagaa

SEQ ID NO: 2911 - DNA, 1347 bp, Homo sapiens
tttcggcgcagtttcctacaggcccggaaacggatcgtgttgggtgaaggtgacggcgtcgagcgacctctctgacctcatctcctgcctgtgtcctcctcgctccctctgctccagccaagcatgcgtccttcctgttcctgggccgagcttgctcctgcctcaaggccttcacgtgggctgtgcctctgctggaactcgctggcccctcagctgcagcattgacttccaaagactcctggcacatgaggaagaaacccagaagaggagagcaaaggagtcaggaatggcttttactcagttgacattcagggacgtggccatcgaattctctcaagatgagtggaaatgcctgaactctacacagaggactttatacagggatgtgatgttggagaactacaggaacctggtctccctggatctgtctcgtaactgtgtaatcaaggaactagcaccacaacaggaaggtaacccaggagaagtattccacacagtgacattggaacaacatgaaaaacatgacattgaagagttttgcttcagggaaatcaagaaaaaaatacacgactttgactgtcagtggagagatgatgaaagaaattgcaacaaagtgactacggccccaaaagaaaatcttacttgtaggagagaccaacgcgatagaagaggtataggaaacaagtctattaaacatcagcttggattaagctttctaccacatccccatgaactgcagcagtttcaagctgaagggaaaatttatgaatgtaaccatgttgagaagtctgtcaaccatggttcctcagtttcaccaccccaaataatttcttctaccatcaaaacccatgtttctaataaatatgggactgatttcatctgttcttcattactcacacaagaacagaaatcatgcattagggaaaaaccttacagatatattgagtgcgacaaagccttgaatcatggctcacacatgactgtacgtcaggtaagtcattctggagagaaaggatataaatgtgatctgtgtggcaaggtctttagtcaaaaatcaaaccttgcgcgtcattggagagttcatactggagagaaaccatacaaatgtaatgaatgtgacagaagtttcagtcgcaactcatgccttgcactacatcggagagttcacactggagagaaaccttacaaatgttatgagtgtgacaaggtcttcagtcgaaattcatgccttgcactacatcagaaaactcatattggagagaaaccttacacgtgtaaagagtgtgggcaagcctttagtgtgaggtcaacacttaccaaccatcaggtaattcatagtgacaagaa

SEQ ID NO: 2912 - DNA, 2012 bp, Homo sapiens
gacgggcgatggctgtggtccttctgctaatgcaaacaacaaaacgggcacactagtcacccccgagggaggccaccatcactgtaactgttggccaaagctacaaaagaagcgagggaatccaaccgagcgcagcgacactgagaacagcttcccctgccttctgcggcggcagaagtgaagtgcctgaggaccggaaggatggtgcagtcctgctccgcctacggctgcaagaaccgctacgacaaggacaagcccgtttctttccacaagtttcctcttactcgacccagtctttgtaaagaatgggaggcagctgtcagaagaaaaaactttaaacccaccaagtatagcagtatttgttcagagcactttactccagactgctttaagagagagtgcaacaacaagttactgaaagagaatgctgtgcccacaatatttctttgtactgagccacatgacaagaaagaagatcttctggagccacaggaacagcttcccccacctcctttaccgcctcctgtttcccaggttgatgctgctattggattactaatgccgcctcttcagacccctgttaatctctcagttttctgtgaccacaactatactgtggaggatacaatgcaccagcggaaaaggattcatcagctagaacagcaagttgaaaaactcagaaagaagctcaagaccgcacagcagcgatgcagaaggcaagaacggcagcttgaaaaattaaaggaggttgttcacttccagaaagagaaagacgacgtatcagaaagaggttatgtgattctaccaaatgactactttgaaatagttgaagtaccagcataaaaaaatgaaatgtgtattgatttctaatggggcaataccacatatcctcctctagcctgtaaaggagtttcatttaaaaaaataacatttgattacttatataaaaacagttcagaatatttttttaaaaaaaattctatatatactgtaaaattataaatttttttgtttgtaatttcaggttttttacattttaacaaaatattttaaaagttataaactaacctcagacctctaatgtaagttggtttcaagattggggattttggggtttttttttagtatttatagaaataatgtaaaaataaaaagtaaagagaatgagaacagtgtggtaaaagggtgatttcagtttaaaacttaaaattagtactgttttattgagagaatttagttatattttaaatcagaagtatgggtcagatcatgggacataacttcttagaatatatatatacatatgtacatattctcatatgtaaagtcacaaggttcatttatctttctgaatcagttatcaaagataaattggcaagtcagtacttaagaaaaaagatttgattatcatcacagcagaaaaaagtcattgcatatctgatcaataacttcagattctaagagtggattttttttttttacatgggctcctattttttcccctactgtcttgcattataaaattagaagtgtattttcagtggaagaaacatttttcaataaataaagtaaggcattgtcatcaatgaagtaattaaaactgggacctgatctatgatacgctttttttctttcattacaccctagctgaaggacatccagttccccagctgtagttatgtatctgccttcaagtctctgacaaatgtgctgtgttagtagagtttgatttgtatcatatgataatcttgcacttgactgagttgggacaaggcttcacataaaaaattatttcttcacttttaacacaagttagaaattatatcccatttagttaaatgcgtgatttatattcagaacaacctactatgtagcgtttattttactgaatgtggagatttaaacactgaggtttctgttcaaactgtgagttctgttctttgtgagaaattttacatatattggaagtgaaaatatgttctgagtaaacaaatattgctatgggagttatc

SEQ ID NO: 2913 - DNA, 382 bp, Homo sapiens
  misc_feature (1)...(382): n = a,t,c or g
cagccatggtctaagccgggcgcctcacctgtcagccgcaccggctccagcgctcgcctctcgcccttgcttctccagcgctccttgctcgcaaggcgggggaggcggcggcccagccacgatgatacatttcatattgctcttcagtcgacaagggaaattacggctacagaaatggtacatcactctccctgataaagagaggaagaagatcacccgggaaattgttcagattattctctcccgtggtcacaggacaagcagttttgttgactggaaggagctaaaacttgtttataaaaggtatgctagtttatatttttgctgtgcaatagaaaaatcaggacaatgagctcttgacgctagagaatgtgcatcgttn

SEQ ID NO: 2914 - DNA, 1855 bp, Homo sapiens
gggcaaagataaatagagtcacaaaaaacagaacattgatggccacaacagcaacctggtcaatatttccttggggaacctgagcttcatctgtacttgcttcttcaaaattaatacttttacactgtcttcctgagtcatccacacgatgttctcttagtatggcaaggatcagaataatatttaaaattcccaggaaggcgctaagtaaaactggtgttgtatacatgtttatctgcagtttaatcacatcccatgtcacacctttttctccaaggaatgtaaaacaagtctgaaaaactgctccaattcccaacaatccacgagcaaccagcatgtagtatttattatgagaagctgggatgtggagatatgcatagaggcagttggctgccacggaaatcaagatggagacaataagaggctcttttcttggtctataattagaccataaaccaaatataggtgaagctaccatttggccaagactatatgaagcaataacccagcccaaaaaacttgtatcagctgtcggatcaatcttttggagatatggccatatggacatcatcactacagaaaaccctacactgctgagaaacatagtaagatataaaatcctaatagatctccatcggctcttataatgctcttcagtctctaaaatgtcccattctctgcttccaggtgtgtcgcctaagagcggctcctgttcactttcgttccgcaggccggccatagttacactccctacaaggcgtcttgcgcccaactctcgcgacacctgctttctcccatcccgggtggcgtgaagctggcaaaacaagcctgtaagtgcgcgtgcgcacctgacggtcagacgtaggcggaacgccccgaggtcataggcggggtcacgcggaaggccgggcagcgcagggcgaaaggaggctgtgtcctcagcctcctccctcggcacgcgcctcccatcctgacggggactgagagcccaggagagctcggggcgtgtccaaactgccgcgccgccctgctccgggtttgtcttcctccctccgtttctccttccgctgtatctagcatttcggttcctggaaaggttaccggagctgcgattggggctgggaccaaagttgagtcctggaaagggagcctggagagcggcggtgctgggaggcccggccagctcgatcgcaggcttccacctggcggccaatgcttgtttgctactgatgggtgtgagcaagttagatattctataccggagacttctcctaacaaaactttttatcagaggatggggaaggccagaagatctcaaaagactctttgaattcagaaagatgattggaaatcgggaaagatgccagaatctggtttcaagcgattatccagtacacattgataagattgaagagcaatcagattgtaagatcttagatggacactttgtttcccccatggctcactatgtgcctgatatcatgccaattgaatctgttattgcaaggttccaatttattgtgcctaaagaatggaacagcaaatatagacctgtatgcattcatcttgctggaacaggagatcatcattactggaggcgacgaacactaatggcccgtcctatgattaaagaagcccgaatggcttctttattgttagaaaacccttattgatgacgtcagactattcacagaagaagaaatgaaactggtgcacagatataaagaaatgttcaacgttgctggtaataaatgtagagttaaaacaacaatgatcaaatatttaaaaaaaaacagtactggtgaggctgctttgaaatgggcactcttgttactaatgactgaaaattagttca

SEQ ID NO: 2915 - DNA, 718 bp, Homo sapiens
agggtgtgaagcgtgtgctttagtttcgtgggaggcctggcatccccgagagggaggggaaaggtaaccactcctttgtggaggtcgccagggtcattgtcgtggatttgcacagtcggctgggcggtgcaatggcggaaagaaaaggaacagccaaagtggactttttgaagaagattgagaaagaaatccaacagaaatgggatactgagagagtgtttgaggtcaatgcatctaatttagagaaacagaccagcaagggcaagtattttgtaaccttcccatatccatatatgaatggacgccttcatttgggacacacgttttctttatccaaatgtgagtttgctgtagggtaccagcgattgaaaggaaaatgttgtctgtttccctttggcctgcactgtactggaatgcctattaaggcatgtgctgataagttgaaaagagaaatagagctgtatgttgcccccctgattttccagatgaagaagaggaagaggaagaaaccagtgttaaaacagaagatataataattaaggataaagctaaaggaaaaaagagtaaagctgctgtaaagctggatcttctaaataccagtggggcattatgaaatcccttggcctgtctgatgaagagatagtaaaattttctgaagcagaacattggcttgattatttcaacgcactggctattcaggatttaaaaagaatgggtt

SEQ ID NO: 2916 - DNA, 379 bp, Homo sapiens
tttcgtgcgactctcggtcgtgcagcggcggcgagcgctctcgagcggctgcgggacgcgaggtttccggagctgagctcaatgtgcagcaatggatgacgacagcctggatgagctgtggcccggagcccagggccggatggacacccacaggtcggccctgcggacccggcaggtgactttgaagaaagcagcgtgggcagcagtggggactctggggacgacagtgacagcgagcatggagatggcacagacggagaagacgagggggcgtctgaggaggaagacctggaagacagatctggttccgaggattctgaagacgacggggagacattgctggaggtagcgggtactcaggggaaactggaagccgctg

SEQ ID NO: 2917 - DNA, 1053 bp, Homo sapiens
gtaaaggctttgatgagaggagctctggcttttgctcagggcctttggcaccccaccctccagcccccaggaatgcaggcgctcaaagcctgtggctaggctgcccgaagcgcgtgccgcagttcttctggagtgggagcagggggacagagctttgggtagaggagggtcacctgcaaagctggaatgccaggggagtgggcggtgcctccagctcctgggggccagggtgtctccatacctcatgggcctgagcctgggcaggggtctggagtgcacatagcccccaggcagggagagggcagtgacaggacagagccactcatctgtcccaaagctgcacccaaggggtgtcagcaaccccaacctactgacctactttgggaccacaggcccatctagtgcaaatgaggcccagaaaggagaaatgctttgctcaacagccacagtaggctgacgtaacctatgtaatgtagggtcagggtgggcctgagggatgagccaggtggtgggcaggtgacacaccaggtcccctcctggcctctgccccacccagccctctcctgcacggctaccagaagatgtccgggaagaacagactagccctgagtagggagtgtggtcaggtgcagaggagggcaggggcccggatcctggcccagaaacactctaaaacagaatccgatcctgagatgatccaaatcaaacagaaacttgacggaaatagtagagtctgaaaatgatgcactctgcgcacacatatacaagacacacacacacacacgaatccacgcacacgaggcacaccccactcatgctctcggtctctggttacacacccacaccccccctactcctgtattcagatgccctccatggcccaccctcccacccagcagagcgccagagcctggtgccagggactcagtgccgactgctgacgtgaagggtgtagaaagcccagggctcagggacgtagatgacacccgggtacttcttcctgagaacagggtcattccacagccaggcgccggcggtgggtgcgacggacac

SEQ ID NO: 2918 - DNA, 1409 bp, Homo sapiens
  misc_feature (1)...(1409): n = a,t,c or g
ttttttttttttaccgtcctcacactttattgttagctgttctttaagtttctcacacattattggcaattatgtaaaaatcaagaacctctataaaacaacctggctttccaggtggaattccgcatacagccaaaactggattccagtgtggccagacaacgcccatgtcccaatttaagagtcgctgtcctcaccaccatccggagtggcctctctgtcagtgtgtgatgtggccagggcagtgtccacctgaacttcctcctcatcggactgaacaacgggggactccccaccctcactgatgtcccgggtggccgagtcggtgcaggtggaggaagaagaaggtggcttggctcttaattctgagggatttggaacctggagggtaatctcattctgacaggtactggattcaggccctaaggcgggggacagcacagtgttctcttctcctccagagttcaggaagacgtccagggcctcctggtccgatatgtccatcaggtccatctgctccagcatgtccacgttcacttccatggatgacatgctgcctatgggctctcgccgctctgcaatctgcaggtagccagtggacaggtactgctccatgtcctgctggaaggcttcctcaaaaaacttctgccgctccttcagcttcatttgctgggtgtgctccatttccaggaccttctgggcgtgctctgcatctagttcagctttgaaggtttcaagttccttcctcttatttttcttgtaattctccagttgctgggactgcatatgtttgcatctttctaattcacactgcccacataagtcttccagatgcagcaggttgttctctacctcctcaaaactcgcctctaaatgagtcagatttgctgtcatggattctaagtctgcgattaaagctgggagctgctggagctgctcttgcagctccacgaggcttgtctttttcttctcccagtgcgcagaaagcatgaccacctcgctatccaccagctctccagcacttgcacagtctttggctcttctgtgaagtgcagcccatgtatcctcatacctgctaagtaattctaatccagcagagtactttggcaaaaatggaacagtcctgggtttgcttttcacttttgcttctcttgacttgtcacttaaagtcttcagcccggaggtgaaatcctgctgcacgctcagcagccgctcgcgaagggtctccagcattgccgccgccgccggtctcctctcctcaggcctcgggctgctgctgcctctgtcgccccctgggtcccacgccgccaaccccgcgctgtcaccgcgcgccccgcactcccactaccggccccgcccccggtgtggtcctcgccgccgccctcgtacnaagcagggggtaagccggt

SEQ ID NO: 2919 - DNA, 396 bp, Homo sapiens
tttcggcgagccactaccattctgctgagaaggaaaagttcgctttttctttaagagattaaaacaatatgcgcaatcctcacctctctagcaatcactatttaaatctggcaagaactgaaacagtctttgcaagaatggaatccgtaaaacaaaggattttggccccaggaaaagaggggctaaagaattttgctggaaaatcactcggccagatctacagggtgctggagaagaagcaagacaccggggagacaatcgagctgacggaggatgggaagcccctataggtgcccgagaggaaggcgccgctgtgcgactgcacgtgcttcggcctgccccgccgctacattatcgccatcatgagcggcctgggcttctgcatctccttcggtc

SEQ ID NO: 2920 - DNA, 1077 bp, Homo sapiens
taaagatttaattctccatatgagtaagttagcgtgtatcatcagaaactatctagaactgtgtgcacagactgctactggttttccaagttgaatatacttgagtatcttaaaatatttcatcaactttctaaaacatcaagaaaagctctctatacaaataccatggccgattataattattttgttttccatccttttaaaaatattttctgctttgcatcccattattattttgagtatcttttcattcgcagtttgatgttcattgcgttggcttacagctaacattcatttcatacgttttgatgcttagctgaaaaattacaataaattctccaatgaaattatgtatctttatttaatgaaaatgcctgctgcgtaccaaggtatgtactagggcatctggggtaagtaaaaacaaacacatagagcctgcctggagaagctcatggtctgatggaaagataagcaagaagagttaatttctaatcaatatgataaaaaggtcagagagcagtttctgaaaaacatgtttttgagttgagtcctgaaagacaaggagatgttagtaaagcagagaagggagaattcattctagaaagatcagacagtgtgtgggaagggcagagtctgaaaagagcatgccccatttggagaagcatcaagaagcccacgtgttagaagcaccggccccatgagacaaagacacagctagagagattgactaggccatgtcggaatgtcctcttattttatacatacataagcatatagatacatatagccaaagttacctttttaatgatcttttttacccagtgtattctggaggtcgaatggtcacatatgaacatctccgagaggttgtgtttggcaaaagtgaagatgagcattatcccctttggtaagttttgtttggaaaataatatgctgttgccccaaatgccttaatgtttattaggtttatgtaaaattgtacatttgtacccaaattgccttaagttatggacttaaaataataattacaatataagtccagataattgagcatttactgcagatgtatacagacat

SEQ ID NO: 2921 - DNA, 910 bp, Homo sapiens
ctgcgctactgccggagcggggcggttatggcggctccatattaacagcctcctcctcctccgccgccgccgccgtctcctcctcctcctcctttccctcccgcccgcgctctaagccatctccgccttcaccctgacgcctgcctcttcccctcacctttccccctcccctgttctaccatgcccggcatgatggagaaagggcccgagttactggggaagaaccgatcggccaacggcagcgccaagagcccggcaggcggcggcggcagcggcgcctcgtccaccaacggcgggctgcactactcagagcccgagagcggctgcagcagcgacgacgagcacgatgttgggatgagagtcggagccgaataccaagctcggatccctgaatttgatccaggtgctacaaagtacacagataaagacaatggagggatgcttgtatggtctccatatcacagtatcccagatgccaaattggatgaatacattgcaattgcaaaggaaaagcatggctacaatgtggaacaggcacttggcatgttgttctggcataaacataacattgagaagtcccttgctgatctccctaatttcactccctttccggatgagtggacagtggaagataaagtcctatttgaacaagcctttagttttcatggaaagagctttcacaggattcagcaaatgcttccagataagacaattgcaagccttgtaaaatattactattcttggaaaaaaactcgctctaggacaagtttgatggatcgccaggctcgtaaactagctaatagacataatcagggtgacagtgatgatgatgtagaagaaacacatccaatggatgggaatgatagtgattatgatcccaaaaaagaagccaaaaaagagggaatgtctt

SEQ ID NO: 2922 - DNA, 513 bp, Homo sapiens
gaaagtctgtaactgctgcagccaggaattagaaacttcttttacctatgtggacaaaaacatcaacttggagcagcggaaccggagctcgccatcagcaaaagggcataatcaccctggggagcttggctgggaaaatccaaatgagtggtcccaagaggctgccatatctttgatatctgaagaggaggatgatacaagttcagaagccacgtcttcagggaagtctatagactatggtttcatcagcgccatcttgttcttggtcactgggatcctgctcgtgatcatctcttacatcgtcccacgggaagtgactgtggaccccaacactgtggcagcccgggagatggagcgcctggagaaggagagtgcgaggctgggggctcacctggaccgctgtgtgattgcggggctctgcctcctcacgctggggggcgtcatcctgtcctgcttgttaatgatgtccatgtggaagggggagctctatcgtcgaaacagatttgcctcttc

SEQ ID NO: 2923 - DNA, 412 bp, Homo sapiens
gtcatcgcccccgactgtggagaagtgtccggggtagccccgttacaggaatgtgtttctgatcatctgaatcttaatcatgtccaactgcctgcaaaatttcctgaaaattacaagcactcgtcttctatgttcaagattatgccaacagttaagaagtaaaaggaagtttttcggaactgtgccaatatccagattgcataggcgagttgtcattacaggcattggcttagtgactcctcttggtgttggaactcacctggtttgggatcgtcttatcggaggagagagtggaattgtttcactggttggtgaagagtataagagtatcccttgcagtgttgctgcttatgtgccaagaggtagtgatgaaggtcagttcaatgaacaaaactttgtgtccaaatcagat

SEQ ID NO: 2924 - DNA, 746 bp, Homo sapiens
gtaaccactgtgtagtaattcctttaactcggaactctgctggggtggcccttgaccctatcctaagaacctttaactcggaactctgttggggtggagggcccctcttttcagccggtgtcttgccttccattctcccttcatcctgctcaacaccccgaagctggtgaaaacagcagagctgcccccggatcggaactacgtgctgggcgcccaccctcatgggatcatgtgtacaggcttcctctgtaatttctccaccgagagcaatggcttctcccagctcttcccggggctccggccctggttagccgtgctggctggcctcttctacctcccggtctatcgcgactacatcatgtcctttggactctgtccggtgagccgccagagcctggacttcatcctgtcccagccccagctcgggcaggccgtggtcatcatggtggggggtgcgcacgaggccctgtattcagtccccggggagcactgccttacgctccagaagcgcaaaggcttcgtgcgcctggcgctgaggcacggggcgtccctggtgcccgtgtactcctttggggagaatgacatctttagacttaaggcttttgccacaggctcctggcagcattggtgccagctcaccttcaagaagctcatgggcttctctccttgcatcttctggggtcgcggtctcttctcagccacctcctggggcctgctgccctttgctgtgcccatcaccactgtgg

SEQ ID NO: 2925 - DNA, 793 bp, Homo sapiens
tttcgtgcggcggggcggccggcggcggccatgggagatatcccagttgtgggcctcagctcctggaaggcttctccagggaaagtgaccgaggcagtgaaagaggccattgacgcagggtaccggcacttcgactgtgcttacttttaccacaatgagagggaggttggagcagggatccgttgcaagatcaaggaaggcgctgtaagacgggaggatctgctcattgccactaagctgtggtgcacctgccataagaagtccttggtggaaacagcatgcagaaagagtctcaaggccttgaagctgaactatttggacctctacctcatacactggcccatgggtttcaagcctcctcatccagaatggatcatgagctgcagtgaactttccttctgcctctcacatcctcgagtgcaggacttgcctctggacgagagcaacatggttattcccagtgacacggacttcctggacacgtgggaggccatggaggacctggtgatcaccgggctggtgaagaacatcggggtgtcaaacttcaaccatgaacagcttgagaggcttttgaataagcctgggttgaggttcaagccactaaccaaccagattgagtgccacccatatcttactcagaagaatctgatcagtttttgccaatccagagatgtgtccgtgactgcttaccgtcctcttggtggctcgtgtgagggggttgacctgatagacaaccctgtgatcaagaggattgcaaaggagcacggcaagtctcctgctcagattttgatcc

SEQ ID NO: 2926 - DNA, 705 bp, Homo sapiens
ggcattgggcctggaaccccgggtcgacgatttcgtctgagagggacgcgtgccgcggagccaggcttactacgtgacccggacaccaggcatacgctaggggcagtcagctgtgccttctctttcggagttgttccgtgctcccacgtgcttccccttctccactggctgggatcccccgggctcggggcgcagtaataatttttcaccatgcatcggaaaaaggtggataaccgaatccggattctcattgagaatggagtagctgagcggcaaagatctctctttgttgtagttggggatcgaggaaaagatcaggtggtaatacttcatcacatgttatccaaagcaactgtgaaggctcggccttcagtgctgtggtgttataagaaagagctggggtttagcagtcaccggaagaaaagaatgcgacagctgcagaagaaaataaagaatggaacactgaacataaagcaggacgacccctttgaactcttcatagcagccacaaacattcgctactgctactacaacgagacccacaagatcctgggcaataccttcggcatgtgtgtgctgcaggattttgaagccttaactccaaacttgctggccaggactgtagaaacagtggaaggtggtgggctagtggtcatcctcctacggaccatgaactcactcaagcaattgtacacagtgactatg

SEQ ID NO: 2927 - DNA, 723 bp, Homo sapiens
atgcggggcggggagcgcgggcggccggggagggcggcggcccctttaagagcaggccacgccccctcccctcctcccgttcgctgccagcggtcggtggcggccgctacggtgctgacaagatggcggctggcggagctgtcgctgcggcgcccgagtgccggcttctcccctacgcgctacacaagtggagctccttttcctccacctaccttcccgagaacattttagtggacaaaccaaatgaccaatcttcaagatggtcttcagagagcaactatcctccccagtacttgattctaaagctcgaaaggcctgctatagttcagaatatcacatttggaaaatatgagaaaactcatgtttgcaatttgaagaaatttaaagtctttggtggaatgaatgaagaaaatatgacagagctgttgtccagtggcttaaagaatgattataacaaagaaacattcaccttgaagcataaaattgatgaacagatgttcccttgtcgattcattaaaatagttccactcttgtcctggggacccagctttaactttagcatctggtatgttgaacttagtggcattgatgatcctgatatagtacaaccttgtctcaactggtatagcaagtaccgtgaacaggaagctattcgcctttgcctaaaacacttcagacaacacaactatacagaagcttttgagtcactgcaaaagaaaacct

SEQ ID NO: 2928 - DNA, 637 bp, Homo sapiens
  misc_feature (1)...(637): n = a,t,c or g
tttcgagaagaaacagctccgccgtccttcgctttttttgctgggctgctgctccttcggcatcatggcgccgtcgctgtggaaggggctggagggcatcggtctctttgccctagcccacgccgccttttccgctgcgcagcatcgttcttatatgcgattaacagaaaaagaagatgaatcactgccaatagatatagttcttcagacacttctggcctttgcagttacctgttacggtatagttcatattgcaggagagtttaaagacatggatgccacttcagaactgaaaaataagacatttgatacggtaaggaatcacccatccttttatgtatttaatcatcgtgggtccgagtacttttccggcccttcggatacagcaaattcttcaaaccaagatgcattgtcctctaacacatcattgaagttacgaaaactcgaatcactgcgtcgttaagatttttacaaattataataataggacaggacacagagctggaatattggagtttggggtataaaacactcctccctgcccccattagtatttatattgatctttcagacctactttagtaaaaaaaaccatggcccttgtttatatactgttaanccaatcattaatgcagtg

SEQ ID NO: 2929 - DNA, 367 bp, Homo sapiens
ccaggacggtgtggctcatgcggcgccggcctcacctgcggtgtcccagatggagatgttgtaggagcgccactgcttcaggtagaaggcgccgcccaccgtgctgaccgtgtccgggaagcgccgctccatataccgctgcagcagcgacgtcttccccacgttcatgtcccccaggagcacgatcttgctgtcgggcttcctcatcttcccgtaagaacccccagcgcccccgcgccctctccccgaggctggccggctcgtgcgccctgggcgcagctggaggagcggaccccggactcgccgggacccggattctcgtgaacgctccgggaccttcgcctccggacgcccgggagctcaagag

SEQ ID NO: 2930 - DNA, 7545 bp, Homo sapiens
  misc_feature (1)...(7545): n = a,t,c or g
cctggcataagggttggaattacaagtcagacagggctgagcagcaatcttcaagaaaattgctctaaattggccttcattagctctcacggcactgaaaaacaactccaatgcatgcctatggaagggagaggcagagcctctagctccatttcagacctgcaaggaaagggctttgagaagggaactggggagaagcacgttccaggtgtgggttcagctcggcactcgccacaggcctccgcaggtggctctccttggcagcgaggcaaggcgcaaacccgctggcttgggaagcctgaccctggcaggaagcgacgccggggttctccgcaagaagaaggcggcctccgggtgtcggccgcagccaggctactgtgctccggggcaaaccgctgcaaagtcctagtgaggcagaactcgacccccaacactcagcagcctgccgtccacccatccacacccccgtctcgccccctgccccaagctggcagatgccttgtcgcccctctaagaccgcacccggattgggtggctgcaaagacgctcgccaaagcgctcagagccccagggaagccgtggcgcctggcagctccctctcctctgggagatctgggggcgccagggctgccggggcctagcacagcgccgagaaccctcagcgtcgaggagccgggtgtcgagtgcaatcagctctgtctctatgcggatgtcacagatccagtgctctgcttgggacagaaggacccgggtgttgaaggcaagcattgtgaaaaggaaaaaatttcttcttcaaaggagctgaagcatgttcatgcaaaaagtgaaccaagtaaacctgcccggagactttcagagtctttgcatgtagttgacgaaaacaaaaatgaatccaaaatagaaagagaacataaaagacggacatctacccctgttatcatggagggggtacaggaagagactgacacaagagatgtaaaaaggcaagtagaacgctcagaaatttgcaccgaagagccccagaaacagaaaagcacacttaaaaacgaaaagcatctaaagaaagatgattctgaaacaccacatttgaaaagcctacttaagaaagaggtgaaatcctccaaggagaagcctgaaagagagaaaactccatcggaagacaaattgtctgtgaaacataaatataaaggtgattgtatgcataaaacaggtgatgagactgagcttcactcttctgagaaaggtttaaaagtagaggaaaatattcaaaagcaaagtcaacaaacaaagctttcttcagatgataaaaccgaacgaaaaagtaaacataggaatgaaaggaaattatcagtattaggcaaagatggaaagccagtttctgaatatattataaaaacagatgagaatgttcgtaaagaaaacaacaaaaaagagagacgcttgtcagctgaaaaaactaaggcagagcacaaatcaagaaggtcaagtgattctaaaattcagaaagattctctgggttccaagcaacatggtatcacattacagagaagaagtgaaagttattcggaagataagtgtgatatggactccactaacatggatagtaatttgaaaccagaagaggttgttcacaaggagaaacgacgaacaaagagcttgttagaagagaaacttgtgttgaagtctaaatcaaaaactcaaggcaaacaggtaaaagttgtagaaacagaattacaagaaggtgccacaaaacaggcaaccactccaaaaccagacaaggagaagaacacagaagaaaatgactcagaaaaacagcgtaagtctaaagttgaagacaaaccttttgaagaaactggtgttgaacctgtattagagactgcttcttcttcagcacatagtacacagaaggattctagtcatagagccaagttaccattagcaaaggagaaatataagagtgataaagactccacttccaccaggcttgagagaaagttgtcagatggccacaaaagcagaagcttaaagcatagtagtaaagacataaaaaagaaggacgaaaataaatcagatgacaaggatggtaaagaagttgacagtagtcatgaaaaggccagaggtaatagttcactcatggaaaagaaattaagtagaaggttgtgcgaaaatcggagaggaagcttgtcacaagaaatggccaaaggagaagaaaaattagcagcaaacactttgagcactcccagcggttcctcccttcagagaccaaaaaagagtggtgatatgacattgatccctgaacaagagccaatggaaattgattctgagccaggtgttgaaaatgtgtttgaagtatctaaaacccaagacaaccgcaataataattctcaccaagacattgactctgaaaatatgaaacaaaaaacttctgccactgttcaaaaggatgaattgagaacttgcacagcagattcaaaagcaacagctccagcttataagccaggccgtggaacaggagttaatagtaattctgaaaagcatgccgatcatagaagcaccttgaccaagaaaatgcatatacaaagtgctgtgtccaaaatgaaccctggggagaaagaacccattcatagaggaactactgaagtgaatatagattctgaaactgttcatagaatgttactgagtgccccatcagaaaatgatagggtacagaagaatttgaaaaacacagctgctgaagaacatgttgctcaaggagatgccactcttgaacattccacaaatttagactcctcaccatccttaagttcagtgactgttgtgcctctgagggaatcgtatgatccagatgtaattcctctgtttgacaaaagaactgttttggaaggtagcacagccagcacctcccctgcggatcactctgctctccctaaccaaagtctgactgttagggaatcagaagtccttaagacaagtgacagcaaagaaggtggtgaaggtttcacagtagatacaccagcaaaagcaagcatcactagcaaaagacacattccagaagctcaccaggctactttattggatggtaaacaaggaaaggtaatcatgcctcttggaagtaagttaacgggcgtgattgtggaaaatgagaatattaccaaagaaggtggcttagtggacatggccaagaaagaaaatgacttaaatgcagagcccaatttaaagcagacaattaaagcaacagtagagaatggcaagaaggatggcattgctgttgatcatgttgtaggcctgaatacagaaaaatatgctgaaactgtcaaacttaagcataaaagaagcccaggtaaagtaaaagacatatcaattgatgttgaaagaaggaatgaaaacagtgaggtagacaccagtgctggaagtggctctgcaccctctgttttacaccaaaggaacggacaaactgaggatgtggcaactgggcctaggagagcagaaaagacttctgttgccactagtactgaagggaaggacaaagatgtcaccttaagtccagtgaaggctgggcctgccacaaccacttcttcagaaacaagacaaagtgaggtggctttgccttgcaccagcattgaggcagatgaaggcctcataataggaacacattccagaaataatcctcttcatgttggtgcagaagccagtgaatgcactgtttttgctgcagctgaagaaggtggggctgttgtcacagagggatttgctgaaagtgaaaccttcctcacaagcactaaggaaggggaaagtggggagtgtgctgtggctgaatctgaggacagagcagcagacctactggctgtgcatgcagttaaaatcgaagccaatgtaaatagcgttgtgacagaggaaaaggatgatgctgtaaccagtgcaggctctgaagaaaaatgtgatggttctttaagtagagactcagaaatagttgaaggaactattacttttattagtgaagttgaaagtgatggagcagttacaagtgctggaacagagataagagcaggatctataagcagtgaagaggtggatggctcccagggaaatatgatgagaatgggtcccaaaaaagaaacagagggcactgtgacatgtacaggagcagaaggcagaagtgataactttgtgatctgctcagtaactggagcagggccccgggaggaacgcatggttacaggtgcaggtgttgtcctgggagataatgatgcaccaccaggaacaagtgccagccaagaaggagatggttctgtgaatgatggtacagaaggtgagagtgcagtcaccagcacggggataacagaagatggagaggggccagcaagttgcacaggttcagaagatagcagcgaaggctttgctataagttctgaatcggaagaaaatggagagagtgcaatggacagcacagtggccaaagaaggcactaatgtaccattagttgctgctggtccttgtgatgatgaaggcattgtgactagcacaggcgcaaaagaggaagacgaggaaggggaggatgttgtgactagtactggaagaggaaatgaaattgggcatgcttcaacttgtacagggttaggagaagaaagtgaaggggtcttgatttgtgaaagtgcagaaggggacagtcagattggtactgtggtagagcatgtggaagctgaggctggagctgccatcatgaatgcaaatgaaaataatgttgacagcatgagtggcacagagaaaggaagtaaagacacagatatctgctccagtgcaaaagggattgtagaaagcagtgtgaccagtgcagtctcaggaaaggatgaagtgacaccagttccaggaggttgtgagggtcctatgactagtgctgcatctgatcaaagtgacagtcagctcgaaaaagttgaagataccactatttccactggcctggtcgggggtagttacgatgttcttgtatctggtgaagtcccagaatgtgaagttgctcacacatcaccaagtgaaaaagaagatgaggacatcatcacctctgtagaaaatgaagagtgtgatggtctcatggcaactacagccagtggtgatattaccaaccagaatagcttagcagggggtaaaaatcaaggcaaagttttgattatttccaccagtaccacaaatgattacacccctcaggtaagcgcaattacagatgtggaaggaggtctctcagatgctctgagaactgaagaaaatatggaaggtaccagagtaaccacagaagaatttgaggcccccatgcccagtgcagtctcaggagatgacagccaactcactgccagcagaagtgaagagaaagatgagtgtgccatgatttccacaagcataggggaagaattcgaattgcctatctccagtgcaacaaccatcaagtgtgctgaaagtcttcagccggttgctgcagcagtggaagaaagggctacaggtccagtcttgataagcaccgccgactttgaggggcctatgcccagtgcgcccccagaagctgaaagtcctcttgcctcaaccagcaaggaggagaaggatgaatgtgctctcatttccactagcatagcagaagaatgtgaggcttctgtttccggtgtagttgttgaaagtgaaaatgagcgagctggcacagtcatggaagaaaaagacgggagtggcatcatctctacgagctcggtggaagactgtgagggcccagtgtccagtgctgtccctcaagaggaaggcgacccctcagtcacaccagcggaagagatgggtgacaccgccatgatttccacaagcacctctgaagggtgtgaagcagtcatgattggtgctgtcctccaggatgaagatcggctcaccatcacaagagtagaagacttgagcgatgctgccatcatctccaccagcacagcagaatgtatgccaatttccgccagcattgacagacatgaagagaatcagctgactgcagacaacccagaagggaacggtgacctgtcagccacagaagtgagcaagcacaaggtccccatgcccagcctaattgctgagaataactgtcggtgtcctgggccagtcaggggaggcaaagaaccgggtcccgtgttggcagtgagcaccgaggaggggcacaacgggccatcagtccacaagccctctgcagggcaaggccatccaagtgctgtttgtgcggaaaaagaagagaagcatggcaaggagtgccccgaaataggaccatttgcaggaagaggacagaaagagagcactttacacctcataaatgcagaagagaagaatgtattgttgaactcccttcagaaagaagataagagcccagagacagggacagcagggggcagtagcacagcaagttattcagcaggaaggggcttagaggggaatgctaactcacctgcccacctgagaggaccagaacagacgtctgggcagacggctaaggattcctctgtcagcagcattcgctatttggcagcagtaaacaccggtgctataaaagctgatgacatgccacctgttcaagggaccgtggctgagcattcctttcttcctgctgagcagcaggggtctgaagacaacttgaaaaccagtaccaccaaatgtattactggccaagaatcaaaaattgctccttcccacacaatgatccctccagctacttacagtgtagctctgttggctcctaaatgtgagcaggacttgactataaagaatgattatagtggcaaatggactgatcaagcatctgctgagaaaacaggagatgataacagcacaaggaaatcattccctgaggaaggagacataatggttactgtgtcttctgaagaaaatgtgtgtgacataggcaatgaagagtctccattgaatgttttgggaggattgaaactgaaagccaacttgaaaatggaggcttatgtgccttcagaggaagagaaaaatggtgaaattctggcaccaccagaaagtctgtgtgggggaaagccaagtggaatagctgaactccagagggagcctttgttggtgaatgaatcactaaatgttgaaaattcaggcttcagaacaaatgaagaaattcatagcgaatcttataacaaaggagagatatccagtggtagaaaagacaacgcagaagccataagcggtcacagtgttgaagcagatcctaaagaggttgaagaggaagaaaggcatatgcctaaaagaaaaagaaagcagcattatctctcttcagaagatgaaccagatgataatccagatgtcctggattccagaatagaaacagcacaaaggcagtgtcctgaaacggagccacatgncacaaaggaagagaactccagagatttggaagaattacctaaaaccagttctgagacaaatagcactacctcaagggtcatggaagaaaaagatgaatatagcagcagtgaaactactggtgaaaagccagagcagaacgatgatgacaccataaaatctcaggag

SEQ ID NO: 2931 - DNA, 7545 bp, Homo sapiens; identical to SEQ ID NO: 2930
  misc_feature (1)...(7545): n = a,t,c or g

SEQ ID NO: 2932 - DNA, 773 bp, Homo sapiens
tggccccttcggcgtcctctggccctctgcgaagcctgggcccgttactgcggttgaggccaggcccccagacgcatcagaccctgaaggactgcgtggtgggagccctgcaccgctcctggccccgggccccctggatccgtcggggcgcctccacccagctgttagcatgatgtcttacctcaaacaacccccatacggcatgaacgggctgggcctggccgggcccgccatggacctcctgcacccatccgtgggctatccggccactccgcggaagcagcggcgggagcgcaccaccttcacgcgttcacagctggacgtgctcgaggcgctcttcgccaagactcgctaccctgacatcttcatgcgggaggaggtggcgctcaagatcaacctgccggagtctagagtccaggtctggttcaagaaccgccgcgccaaatgccgccagcagcagcagagcgggagcggaaccaagagccgcccagccaagaagaagtcctctccagtgcgggagagctcgggctccgaaagcagtggccaattcacgccgccagctgtgtccagctctgcctcgtcctctagctcggcgtccagctcttccgccaacccagcggctgcagcggctgcgggactagttgttgcaaagctgccctgccctcttcacatcttctccctctgtgtatttattgaagagaaccgcttggtttcaggaagctgggcgcgggatatccgaagtgtggaggaaacagacaagtcagggtacagag

SEQ ID NO: 2933 - DNA, 776 bp, Homo sapiens
ccggaatatcccgggtcgacgatttcgtcctccgggtctgaggaggcttctaaaagggcctcacatgccccgggagccacgtggatacagaacgagggttcccgctctcagagagttggtccccagttcccatgcagggagtggagcctctgagcactgccagaacaacaggcagggttctcgacagcacagagcctcacgcaatgtgcaggcaggtggtgctctcgctccaccacggcacctctgcggtctctgcagccgtttgcatttcctgaaaccggatcttagtgtcagagccgcccccagccgggcgggcgcctcagtcatggccctgcgcaaggaactgctcaagtccatctggtacgcctttaccgcgctggacgtggagaagagtggcaaagtctccaagtcccagctcagggtgctgtcccacaacctgtacacggtcctgcacatcccccatgaccccgtggccctggaggaacactttcgagatgatgatgacggccctgtgtccagccagggatacatgccctacctcaacaagtacatcctggacaaggtggaggagggggcttttgttaaagagcactttgatgagctgtgctggacgctgacggccaagaagaactatcgggcagatagcaacgggaacagtatgctctccaatcaggatgccttccgcctctggtgcctcttcaacttcctgtctgaggacaagtaccctctgatcatggatcctgatgagggggaatacctgctgaaaaggtactcag

SEQ ID NO: 2934 - DNA, 444 bp, Homo sapiens
ggaattcgatggcaggacttggtctgccttggaggcagtcgtgcccaggagcagaaacccctgcagcagctgtggaacgccatcctgctggtggccatgctcctgtgcacaggcctcgtggtccaggcccagcggcaggcgtcgcggcagagccagcgggagctcggaggccaggtggacctgtttaagcgccgcgtggtgcggagactggcatccctcaagacacggcgctgccggctgagcagggcagcgcagggcctcccagatccgggtgctgagacctgtgcggtgtgcctggactacttctgcaacaaacagtggctccgggtgctgccctgtaagcacgagtttcaccgagactgtgtggacccctggctgatgctccagcagacctgcccactgtgcaaattcaacgtcctggggaaccgctactccgatgattag

SEQ ID NO: 2935 - DNA, 426 bp, Homo sapiens
cgtgttctcacagctattaaccacactctgaaagaaaacctcaggaaattctacaagggcaagaaggacaagcccctggacctgcggcctaagaagacacgtgccatgcgccgccggctcaacatgcacgaggagaacctgaagaccaagaagcagcatcggaaggagcggctgtacccgctgcggaagtacgcggccaaggcctgaggggcgcatggtcaataaagcacagctggctgagaaagaaaagatatgatgcaatgatctaaaaccctggggggcgtttttaatataaccgtaggggggccgactgttattgggttaagcaaactattaattttcttctttattaggcgacaattaatacgttgtaggtgacttctggaaaggactattaatttgagtgggataaaacatggagacaag

SEQ ID NO: 2936 - DNA, 1086 bp, Homo sapiens
cgttgctgtcgctcctttgtggcccctctgcaagagaaggtggtctttggattatttttcttaggagccattctctgcctttctttttcatggctcttccacacagtctactgccactcagagggggtctctcggctcttctctaaactggattactctggtattgctcttctgattatgggaagttttgttccttggctttattattctttctactgtaatccacaaccttgcttcatctacttgattgtcatctgtgtgctgggcattgcagccattatagtctcccagtgggacatgtttgccacccctcagtatcggggagtaagagcaggagtgtttttgggcctaggcctgagtggaatcattcctaccttgcactatgtcatctcggaggggttccttaaggccgccaccatagggcagataggctggttgatgctgatggccagcctctacatcacaggagctgccctgtatgctgcccggatccccgaacgctttttccctggcaaatgtgacatctggtttcactctcatcagctgtttcatatctttgtggttgctggagcttttgttcacttccatggtgtctcaaacctccaggagtttcgtttcatgatcggcgggggctgcagtgaagaggatgcactgtgatacctaccagtctccagggactatgaccctaaaccagggcctgcggcacttgcggggcctccctgctggctactgaatgccagtaaccagaggagccccaaaactttgacagcctcgtgggctttgtgacggcccaggggctctgcgtggtacatgactgagaagagaaaaacaaaaataaatcatacctcaaaggatggagtgcatcaattgggagaaaaggagacatagcccaaaccctggcttattcttgggatctactgattgcgggctctgcaagacccttggcaaactggcttctgatccatatcatatttatttgtagaagatggcgaaacagtttagctggtggttctttcttctccctttctctctctctatgacaataatacaaaccaatttaataaaggagttgaaagaaaaaaaaaa

SEQ ID NO: 2937 - DNA, 1586 bp, Homo sapiens
tttttttttggtggttctcaaactgtgttcctagaagcatcccatgtgcccccaggccaagaggtccaggttctaccccgacccacatcccctgaatcagagcagcttttttttttttttaaaaattttgatctgtttcacacattatatttgtttgaacttcccatgtttaaaaattttgaagaaaatccctggagtagacaatccctagagcactgacatgctgtggtccaaggttcaccaggaacagtgcctgtgccctgccacatggcggggttccttcaagcctctggtgatgaaggtgctcagggaaaggaggacggaggggcgcggaaggacccagccactgctggccaccctggcctctgctctgtgttcacgggggagcagactctggggaggcgcccctcctcaccacggcctgcaggccgggctggagcctgcgccttcaggggccttgcatctccagctggaccccctggcacaggatgtgctgcagtagcccgttgaccacatccagagtctcgtccttctccagcacgatgtcataggagtccatgtagcgctcccgccgctcctccaccttgtcattcaggaagccaattttgagaatgttctgcacaccaggaaccccatcggccatggtgaggtccccgatagagtctcccagcaggatgacattggttttgccctcaagttgctggaagtaaccacagttctcacacgcagagctgttcttgttgtatgtgtgtatgagctggcccttaaatccctggagaaaaccatcttcattaaaatccatgtagttagacacgatgtggatgttggggtggaacactttcatctgtcggataatttcttccaggatatcaccaatgcccgcagaaaagatgaaaaggggaatgttgttatggtagagtgtgttgaagaaggtcttatatccctccctgagcattgcattggactctctaaccacctgggctatctgaaacttctgaatcttctgctgacataggagattgtgcgctttggtccaccattccaccatatgaggtagcttctccttgacggtccggtgtgggtcgatctcaattgggtaatagtggtgaaggagcgctgtgagctctttccgacactcctcactgatgatcttgctattatccagaatattgtaagaagaagggcatcgctttccattatatgcaaacctgctcaaggtcatgtcaaaatcagaaatcacctgtaaccggtctccgccgcccttgcggagggcgcccacgatctcctgcacccgcccaggctgccgcatcaggaccgtggccttcatcagggtgctcacctgtcccgagacccgagagaaccactgaaccctgcgccacgctgggcccgaggggagcccggggctcgctcgggcgcgcgtgtgaggcggggccggggtgcgcgagggggcggctactggcctgggtgaagcggcggtgcctcggtgaccagctggggggctcgaagcgccccgggggtcggagtccgggcccgccccactccggacgcttcctccctcctcacctccacaaccatcccgttcgagg

SEQ ID NO: 2938 - DNA, 412 bp, Homo sapiens
ggggaagatttatcagcgtgcatttggcggacacagcctcaagtttggaaagggcgtgcaggcccatgggtgctgctgtgtggctgatcggaccggtcactcaatattgcacacctcatatgggagggaaaggccggcacccgtccacctgagacaggacacgtaacgttgtggctaggggggaccgcggggaccgggttagcgtgcccagtgagtcagccacagattgcgtaaaaagcaacagagaacagtggtgtggggcacatgcagcgactgtggaggtgacaggagcttacgtgtgccttgagaagatgctctttaaggcctgtgggaaatgttgcctctatgttggaaagttgaattgataatcttatataccaggctttcacttgggatatgtgacactcagcct

SEQ ID NO: 2939 - DNA, 3611 bp, Homo sapiens
ggaacatgctacgcatgcttacgccaagcttggcacgaggcggagacaccgagaggtcactgtgtttgtacccacctggcagcttaagaagaaccggagggtgagagagagccactttctgacgaagctacactcgctcaagatgctttcaatcacaccctcccagcttgagaatggcaagaagatcaccacctacgattataggttcatggtaaagctggcagaggagacagatggcatcattgtcaccaatgagcagattcacatcctgatgaatagttccaagaaactgatggtcaaagatcgcttgctgcctttcacctttgcggggaatctcttcatggtgcctgatgaccccctgggccgtgatggccccaccttggatgagtttctgaagaagccaaacaggttggacactgacattggcaacttcctgaaggtgtggaagacccttcctcccagctcagccagtgtcactgagctgagtgatgacgctgactctgggcccctggagagtctgccgaatatggaagaagtcagggaagagaaggaggagaggcaggatgaggagcagagacaggggcagggcacacagaaggcggctgaggaggacgaccttgactcttcgctggcgtcagtgttcagggtggagtgcccgtccctttcggaggagatcctgcggtgcctcagcctccatgatccccctgatggggccctggacatcgacctcctgccaggggcagcttctccctacctgggcatcccctgggatggaaaggctccctgccagcaggttcttgcccacctggcccagctcaccatccccagcaacttcaccgcactctccttcttcatgggcttcatggactcccacagggatgccatccctgactatgaagccctagtgggccccctgcacagcctcctcaagcagaagcctgactggcagtgggaccaggagcatgaggaggccttcctggccctgaagcgagccctggtgtctgccctctgcctgatggcccccaactcccagctgcccttccgcctggaggtgaccgtgagccacgtggccctgacggccatcctccatcaggagcactcagggaggaagcaccccatagcctatacctcaaaacccctcctccctgatgaggagagccagggcccccagtcagggggtgacagcccctatgctgtggcctgggccctcaagcatttttcccgctgcattggagacaccccggtggtcctggacctttcctatgcctcccggaccactgcggaccctgaggtgcgggagggccgcagggtttccaaagcttggttgatccgatggtccctcttggttcaggacaaaggcaagagggccctggaattggccctcctccagggcctgctgggggagaaccgcctgctcacccccgcggcctccatgcctcgcttcttccaggttctgccgcctttctctgacctgtccacgttcgtctgcatccacatgtcgggctactgcttctaccgtgaggatgagtggtgtgctggctttggtctctatgttctatcgcccaccagcccccctgtctccctttccttctcctgctccccttacacgccaacctatgcccacctggcagccgtggcctgcggcctggagcgctttggccagtccccactcccagtggttttcctcactcactgcaactggatcttcagcctcctgtgggagctcctgcccctctggagggctcggggcttcctctcctctgatggggctccactccctcacccaagcctgctctcctacattatatccctcacctctggcctctcatcccttccgtttatctaccgaacctcctaccggggctctctgtttgctgtgacagtggacaccctggccaagcagggtgcccaggggggtgggcagtggtggagtttgccaaaggatgtgccagcccctacagtgagtccccatgccatgggcaagaggcccaatttgctggcattacagctgagtgacagcaccctggccgacatcattgccaggctgcaggctgggcagaaactgtctggctcctcaccgtttagttctgcctttaactcactcagcctcgacaaggagagtggcctgcttatgttcaagggagataagaagcccagggtctgggtagtcccgacgcaactccggagggatctgattttctctgtgcatgacattcccttgggggcccaccagaggcccgaagagacctacaagaagttgcgtttgctggggtggtggcctgggatgcaggagcatgtgaaagattactgcaggagctgcttgttctgcatcccccgaaatctcataggcagcgagttgaaggttattgagtccccatggcccctcaggtcgaccgccccctggtcgaacctgcagatcgaggtggtgggcccggtcaccataagtgaggagggccataagcatgtacttattgtggctgacccaaacaccaggtgggtggaggcattccccctgaagccctacacacacacggctgtggcccaggtgctgcttcagcatgtgtttgcaaggtggggtgttcctgtgaggctggaggcagcccaggggccccagtttgcccggcacgtccttgtgagctgtgggctggccctgggagcccaggtggcctccctgagtcgggacctccagttcccctgcctgacgagctcaggggcctactgggaattcaagagggccctcaaggagttcatcttcctgcatgggaagaagtgggcggcctccctgcctttgctgcacctggccttcagggcctcctccactgatgccacaccgttcaaggtcctgaccgggggtgagtcaaggctcacggagcccctgtggtgggagatgagcagcgcaaacattgaagggctcaagatggacgtcttcctgctacagctggtgggggagctgctggagctccactggagggtggctgacaaggcgagtgaaaaggccgagaacaggcgtttcaagcgggagagccaggagaaggagtggaatgtgggtgaccaggtccttttgctgtccctccccaggaatggcagcagtgccaaatgggtgggtcccttctatatcggggaccggctgagcctgtcactctataggatatggggcttcccaaccccagagaagctggggtgcatctatcccagcagtctgatgaaggcctttgccaagagtggcaccccgctgtccttcaaggtcttggagcagtgagcgggagcagcgggggtgccccctgccccagggccgtgggtttctgctgctaggcctccccctgtcccagcagtgctctcagtccactgggggccctcagttgtgccttttgtagagaacttgcttcataaagctttgctgaattgccttgaactagggaccagcatccccatggaaacatccccagtttggggtacttggagaatttgccaaaggctgtcagatatgggtccctggcagttttacactgggaaatagagtgctcctctaggctataccaggctcagtgtcttctccccaagtatcctctttccccttcacatgtaggtgtgtggtggtgtgcacacacact

SEQ ID NO: 2940 - DNA, 1922 bp, Homo sapiens
atgggaagtgtcacagttcggtatttctgttatgggtgcctttttacatctgcgacctggacagttttgctttttgtttatttcaacttcagtgaagtgactcagccacttaagaatgtgcccgtcaaggggtctgggccccacggaccatctccaaaaaaattctatccccgtttcactcgaggcccaagtcgagtgctcgagccacagttcaaagcaaacaaaattgacgatgtgatagacagtcgtgttgaagatccagaagaaggccacttgaaattctcttctgaattaggtatgatttttaatgaacgcgatcaagagttgagagacttgggctatcagaaacatgcttttaatatgcttatcagtgaccgcttgggctaccacagagatgtgccagacacaaggaatgcagcgtgtaaagaaaagttctacccacctgacctgccagctgctagtgttgttatctgtttctataatgaagcgttttctgccttgcttcggacagtgcacagtgtcatagaccgcacgccagcacacctgcttcatgagatcatccttgtggatgatgatagtgactttgatgatttgaaaggagaactagatgaatatgtccaaaaatacctccctggaaaaattaaagtcataagaaatacaaagcgtgaggggttgattcgagggagaatgattggcgcggcccacgcgacaggagaagtccttgtgttcctggacagccactgtgaagtgaatgtgatgtggctgcagcccttgctggccgccatccgtgaggaccggcacaccgtggggtgcccagtgattgacatcatcagcgccgacacgctggcctacagctcgtcccctgtcgtccgcggagggttcaactggggactgcacttcaaatgggatcttgtccccctttctgagctaggacgagcggagggagccactgcaccaataaagtcaccaacaatggctggaggtttgtttgccatgaacagacagtatttccatgaacttggacagtatgatagtggcatggatatctggggaggagaaaatttggaaatatcatttcggatctggatgtgtggcggtaagctcttcatcatcccttgctctagagtaggacacattttccgaaaaaggcgaccatatggatctcccgaaggccaggacaccatgacacacaactctttgcggctggcacatgtctggttggatgaatacaaggagcagtatttttccttaagacctgacctgaagacgaaaagctatggcaatatcagtgagcgtgtggaactgagaaagaagttgggctgtaaatcatttaaatggtatttggataatgtatacccagagatgcagatatctgggtcccacgccaaaccccaacaacccatttttgtcaatagagggccaaaacgacccaaagtccttcaacgtggaaggctctatcacctccagaccaacaaatgcctggtggcccagggccgcccaagtcagaagggaggtctcgtggtgcttaaggcctgtgactacagtgacccaaatcagatctggatctataatgaagagcatgaattggttttaaatagtctcctttgtctagatatgtcagagactcgctcatcagacccgccacggctcatgaaatgccacgggtcaggaggatcccagcagtggacctttgggaaaaacaatcggctataccaggtgtcggttggacagtgcctgagagcagtggatcccctgggtcagaagggctctgtcgccatggcgatctgcgatggctcctcttcacagcagtggcatttggaaggttaaggtggatgctgtggcgggaacgttgcttcatcaggcgttgcctccggtgtggagtttggggctttaggaaagcctgggttgggtggagcagaacc

SEQ ID NO: 2941 - DNA, 5418 bp, Homo sapiens
  misc_feature (1)...(5418): n = a,t,c or g
tttttggataatgaaactttttatatctgttttgcacaaatccccaccaagtaatttcagcataaagcaaaccaaatggcagacgaaatgatgttaggtatccttgtaggtttacttcataatacataacctctaatccatgtccatcttcttgtttctgcttttaattctgccatttcctcttaaaatttagggtttaacaaagacaacagggctgtttgccaaatcgcagctattaattcacagcatagaaaagtcaaagctatagcaaaaaattgctaatctgcacaactttaaaaaatagttcagtacatttttgttataaaattcatttacaggaggttattcacatgtacttgtcaaatttactcctgataattcacaaaaacatacaactcaacaaactgtgcacaataaatccaaggcaaattatatacaaagaaacaaaacaagcttttaagtagcacatattcatttgaaataactaatattgaaagaagacagggaactttcttttaatgccatggcaaagacgaagcgaagagccacacttcacaccttgtaaaaagaatagccctgttcaacaacgctgcgctgacagccacatcaggaggggccacggtgaacataggaaatggctttggcaaatacttgtaccaactggaacgagtgaagtttcaaaagtaatgtgaggtacaactgcattccgctgtgaaaggccgtcacaggacacaggctcgtctgttagaaaggatgatctagttctaccattaattcttgcagaatcagatctgctgagtggtgaaccaacaggtgaacacaacgtaagaacaggcatcaaacttcactggaaataatattgttcagtgtgtggcggcaaaatatgcattttagagaaaacttatttctcaaatcatgtgttaatagtattaacatgagcagcgtgagagacatcctgaccccaacgtttttgcccatgccctccctttagaagcttaggagtttgtacattccctaagtggtcagcactacaagtgtctgctaaaatgggcacttcatcaagataacaggaaagcaaacttaaagtaacgagatttcttcccaaaggcacatggaagaagctgatagagcccttgacccagacagaatgggacccatccctacccgtcctgaactgtcgcacactgcatggccaaagacaaactctccacccccacagaggaagcagtggctgactctggggacaaagcactccaggaagtcacctgctccctgggtttcaggagtattcagttgaccgtctggacaccagtgagggagacacaggtaatgaaatcaaatgctcaaacttttggcaaccgaaagttgttttttaaagctctttataatctgctcaagtagaatttctaacacaaaacccttttttgcttaaaaagcagatgacaaaggaaatgtcaaataatgcacatgaatcttcagctattttcctacccccaaatgagatatggggctgcacagcattcattacagatccctagtttttacaactgtcaactgtacattctcatgtttaggatactccagttcactgcgtggatatttggaaaactggacaaaatcaggcagcccacccctcccttgtcccgagattcctcgatctccattcaccatgaccaattttttcccccacaaaagcactattaccttttattagtagctggaaacacctatcagatattctaaacagcatgtatttttaccaggtagatgatttctgaagatcacaggaagtctaccactctcttcccagttctgaactcctctggttacgcttcattttaaatcgggtgcttctttcccgcccaaaatattctatttggcctgccccagtggttcccaagctgcctggtgatcagaatcccttgggaaatgttgaacacacagcttcccaggctttctggaaaactagttagatctgtctgacaatctgtaagctgaggcgattcttccacagctgacccagcgctaatctagcatttggcaaccaaatgtctgtacctcaccagtcacacaaggctcacaatatgctgggagcatttgaatgatagctcaagaattattctttcactccatattcttctctctcaagaagattaggaattttagctagggaactatgtgcatactgaaacaggtaaatgaactcatcacagaaatataataccctgggccaatgcactctatctaaaaatgcaccatgtcagcaaaactttacctaacataaccgtgctgcccaaagtgtcccctaggagactccaggtttttggggggttttttgctttttttaatagagccagagacacctgacccaccagcactaactcagcttattccaagctaggctgttaaataattatctgtcttgctctaacaatggttgaaaggacccgccctcctcccatcttttttttttttggtaatataaagtttgttctgttgaaaactgattaacattttaaacagggggaaagaaaagcggtctactagattaaattttaaaaggattttgttatttgctatacaaatatacatttcaacttttacaacattcactccagtctgacctccttgtctatagaagactaagagatcaacatttccagtctctgacttcaaggacattattacggatacacaatgccctctgaaagcttttgcaaatgacagaaaatactgaagatgaccagaggctcaggtgttaaggatgcattttccatgttttccaacagcacacaaactccttacaaaaaacaagcttatctagatggtcccacgagctggtcatcttcagtttacaatatgctgtggctgctggcccatgtcactgggctttcctataaaagctttcttttcttggaactgctgtcctcctgctccagtgtcctcttgtcccacctagagttcctcctggtgtgatgggtctcggaaccacacttctcctgctccccttcactgaaagccctggcctctctcctgtgacagagctcctcttccgggtcatcacatttgctctgacacgtggaagcctcgggactggcagctggaggttcgccccgcacgggaggtttgtggctgctcagagcagccactacagcagcgggctgctgtacatggctcaggtcctggtgaacgacagggaagcccggctcgcccgtaggaggtgttgctccaggatgctgggggctcgagggttgtggatcccaaaggaatattcctcctttgacctcaatgcccatcctcttcagcagtcgtgggtcctgaagttggtcatgaacaggaggtctttcagggtcctttgaagtaacagtaagagtaatttccttggagtcagagggtgtgtggtatagagaagcagcaacagatgtcttggcaaatccactgtctagcttgctgctgggcaaaccaccctggggtctggacccctctggggctatggtaggagggtgagtgagacttctctgcagcacaggcttgagtttcagaatcttcactgcatcatgtctatagtttttgtcacaggtcttaataatggcaccacgcttctgagcatcctgaatcagctgattccaatgctggttttccatcagggtcctcaaatgtccgaggatgaagaggctgtacttggctcgtgtgatggtgacattcaatctctgcaaacttgccaggaatccaattgaaccttggatgctatttgctctgacacacgtaacaataacacaatccttctgccgaccctggaatgcatccacagtgtctacttctgctggtccttttctatcgaactctttgtccaaatccttctgaatcatcgtcttctgggccttgtaatgagttattatgccaatgtttcgaaaactaacatcctttcttttgtctttaataagcttaattatttccatcaccagttttatttcttgaacatttatatatgagtcattatcccgtctttctgaaccatctccaacatcaaacacaaggtatggctgaaatggccaatctgatgaacatcgaatggcttctgtctgtctatttgtttttaagtttctgttataaacataattagaagggaagaggcatatgtctggatgcatcctgtactgaacagtgagctgtagaatgggcagcctgctgatcatgttgtgttctacattctcttccagcagtctgcagaagcgagccatcattgactggtcgtagccatactcctgtgctttcatagagatgactgtcggagggagctgcttaggatctcctactaggatgagcttattgcagcgatggatgagtggagtaagagtctcaatttcacaagactgtccagcctcatcaacaatgacacagctgaaggggacacccccttgcccacggaaagcagactcaagtagtaaaccaccacttgtgctcaacgtgcagcagatgatatgggactctaagatgatgatactctgtgttttctgtgggcgtccttgaacctctttaattttagaagcaagttcctgcctttccttagaaactttggaaatgttttcatctaattcttgcctctgtatttcccgtccacctcggcatagagctcgctgccgggaaagctcatccagctgataatctagaaattcctttcttttatgcatcgcctgaacatgagaaggtaactcttttttcattctgtggtttacttggctgtccaaactgaactttagaacctcactattaatagacttttctggacccagtcgtactaaatttatatctccacagtttcctaaaggattcttcttgtctttacatttttctttgaattcaaggataatttttttcatgagttcatcaacagctgcattggaaggtgcacacacgaggacacggttttgtttgattttggcattggagttttcgtctgaatgccccttcctctggttctctgtcagtagacgatagaggaggccaacaatagtttttgattttcctgttccaggtggtccatgaatcaagcagattttggcaactgatggtgagtgtttcaccatagcatatgcagtttctattgctttcttttgatcttcattgaaatctcttaagtacgcaataattctctcagatgttgtagtcagtaaatcttttgtacagaagtccatagggtttggattcagaacagctctagccagttggttccgactacccaacagagacatggctttcaacttcctttgtgtagttaccagagaactgattacaatacaattcacaagttcgtttaaattggccggaaagttctcttgagtctggatggaaaggtaacactcagttttggaattccaccgcacttannnanggnctacaatanagggctcgatggcg

SEQ ID NO: 2942 - DNA, 436 bp, Homo sapiens
  misc_feature (1)...(436): n = a,t,c or g
cggtccggaagtcccggctggacccacgcgttcgggcgtcctcgtggaattgacatcgtctttaaaccctgcgaggcaatccctgacgcaccggcgggatgcccagggaagacagggcgacctggaagtccaactacttccttaagatcatccaactattggatgattatcccaaacgtttcattgtgggagcaaacaatgtgggctccaagcagatgcagcagatccgcatgtcccttcgcgggaaggctgtggtgctgatgggcaagaacaccatgatgcgctaggtttncctggggcgcgccctccccgcaccctggggctccccagctgtaacaccttccccccacggctttaggcgcagggtggggggcaccccaacacacaaatgccgcgggagagctcctgaccatggggtcacgcccttggccggatg

SEQ ID NO: 2943 - DNA, 545 bp, Homo sapiens
  misc_feature (1)...(545): n = a,t,c or g
ngagtagcagaatggttagccttcgtgctttctgcttaaggcagctgtcagtttgcatgtccatgggtcagagtgtggataatcgtggtatagcaaagtgtcactatcaccaaggggaggcaaagtagttgcagtcaaaattaggttgtaccacttaatagtattgagttcatccgaactggtgaggtcgagacaggctgatctgttggtcctgttggttgatgtgatcaagaaggtcatcggaatgacagctaccagtgaaatgatccacaccacagcacaggctacaactgcacatcgagttttgtgaatggaaaagcagctcattgggtgaatgatcacacagtagcggaagatgctgaaacaggtgaggaagaggatgctgctatacaggttgaaatggaagctgaagcggataaacttacacatgaaatctccaaagatccagttttcgccactggcatagtagtgaatcaggaaggggaggctggtcagataacagcagatctgtgcagggccaggttcagcattaatagatgggctgn

SEQ ID NO: 2944 - DNA, 1852 bp, Homo sapiens
ggggaagaggcagtgggagggggggcggagggcgggggcttcggggtgggcgcccagggtagggcaggtggccgcggcgtggaggcagggagaatgcgactctccaaaaccctcgtcgacatggacatggccgactacagtgctgcactggacccagcctacaccaccctggaatttgagaatgtgcaggtgttgacgatgggcaatgacacgtccccatcagaaggcaccaacctcaacgcgcccaacagcctgggtgtcagcgccctgtgtgccatctgcggggaccgggccacgggcaaacactacggtgcctcgagctgtgacggctgcaagggcttcttccggaggagcgtgcggaagaaccacatgtactcctgcagatttagccggcagtgcgtggtggacaaagacaagaggaaccagtgccgctactgcaggctcaagaaatgcttccgggctggcatgaagaaggaagccgtccagaatgagcgggaccggatcagcactcgaaggtcaagctatgaggacagcagcctgccctccatcaatgcgctcctgcaggcggaggtcctgtcccgacagatcacctcccccgtctccgggatcaacggcgacattcgggcgaagaagattgccagcatcgcagatgtgtgtgagtccatgaaggagcagctgctggttctcgttgagtgggccaagtacatcccaggtttctgcgagctccccctggacgaccagggggccctgctcagagcccatgctggcgagcacctgctgctcggagccaccaagagatccatggtgttcaaggacgtgctgctcctaggcaatgactacattgtccctcggcactgcccggagctggcggagatgagccgggtgtccatacgcatccttgacgagctggtgctgcccttccaggagctgcagatcgatgacaatgagtatgcctacctcaaagccatcatcttctttgacccagatgccaaggggctgagcgatccagggaagatcaagcggctgcgttcccaggtgcaggtgagcttggaggactacatcaacgaccgccagtatgactcgcgtggccgctttggagagctgctgctgctgctgcccaccttgcagagcatcacctggcagatgatcgagcagatccagttcatcaagctcttcggcatggccaagattgacaacctgttgcaggagatgctgctgggagggtcccccagcgatgcaccccatgcccaccaccccctgcaccctcacctgatgcaggaacatatgggaaccaacgtcatcgttgccaacacaatgcccactcacctcagcaacggacagatgtgtgagtggccccgacccaggggacaggcagccacccctgagaccccacagccctcaccgccaggtgcgtcagggtctgagccctataagctcctgccgggagccgtcgccacaatcgtcaagcccctctctgccatcccccagccgaccatcaccaagcaggaagttatctagcaagccgctggggcttgggggctccactggctccccccagtccccctaagagagcacctggtgataccgtggtcacggcaaaggaagacgtgatgccaggaccagtcccagagcaggaatgggaaggatgaagggcccgagaacatggcctaaggcacatcccactgcaccctgacgccctgctctgataacaagactttgacttggggagaccctctactgccttggacaactttctcatgttgaagccactgccttcaccttcaccttcatccatgtccaacccccgacttcatcccaaaggacagccgcctggagatgacttgagccttac

SEQ ID NO: 2945 - DNA, 6046 bp, Homo sapiens
cgggtcctcagcctggaatcaccccttgagaaggaccccagagtcctcggcgcccagtccgtcccccgaggcagggcactgaaggggttaagtcccctggggctggattccgccttccggcttttcccagaccccagagccggtccctggaacactgcagtcctgagctctgggatggagcccgagactgcgctgtggggcccggatctgcagggtccggaacagagccccaacgatgctcacagaggtgccgagagtgaaaacgaagaggagagccctcggcaggaaagttctggggaggagatcatcatgggagacccggctcagagtccagaatccaaggactcaacagagatgtccctggagagatcctcccaggacccctctgtcccccagaaccccccaaccccactgggtcactccaatcccttggaccaccagatccccctggaccccccagccccggaggtagtccctaccccatctgactggaccaaggcctgcgaggccagctggcagtggggcgctctcaccacatggaacagccccccagtcgtccccgccaacgagcccagcctgcgggagctggtgcagggccgcccggcgggggcggagaagccctacatctgcaacgagtgcggcaagagcttcagccagtggtccaagctgctgcggcaccagcgcatccacacgggagagcggcccaacacctgctccgagtgcggcaagagcttcacgcagagctcgcacctggtgcagcaccagcgcacgcacaccggcgagaagccctacaagtgccccgactgcggcaagtgcttcagctggagctccaacctggtgcagcaccagcgcacgcacacgggagagaagccctacaagtgcacggagtgcgagaaagccttcacccagagcaccaacctcatcaagcaccagcgatcccacaccggcgagaagccctacaagtgcggcgagtgccgccgggctttctaccgcagctcggacctcatccagcaccaggccacccacacaggcgagaaaccctacaagtgccccgagtgcgggaagcgcttcggccagaaccacaacctcctcaagcaccagaagatccacgcgggcgagaagccataccgctgcaccgagtgcgggaagagcttcatccagagctcggagctgacccagcaccagcgcacgcacacaggcgagaagccctacgagtgcctagagtgcggcaagagcttcggccacagctccaccctcatcaagcaccagcggactcacctgcgcgaggacccgttcaagtgcccagtgtgcggcaagaccttcaccctgagcgccacgttgctgcggcaccagcgcacgcacacgggcgagcggccctacaagtgcccagagtgcggcaagagcttcagcgtcagctccaacctcatcaaccaccagcgcatccaccgcggcgagcggccctacatctgcgccgactgcggcaagagcttcatcatgagctccacccttatccgccaccagcgcatccacaccggtgagaagccctacaagtgttccgactgcggcaagagcttcatccgcagctcccaccttatccagcaccgccgcacgcacaccggcgagaagccctacaagtgccccgagtgcggcaagagcttcagccagagctccaaccttattacccacgtccgcacgcacatggacgagaacctgttcgtgtgctccgactgcgggaaggccttcctggaagcccacgagctggagcagcaccgggtgatccatgagagggggaagaccccagcgcgtagggcccagggcgacagcctgctggggctcggggacccctccctgctgaccccgccgccgggagccaagccgcacaagtgtctcgtgtgcggaaagggcttcaacgacgagggcatcttcatgcaacatcagaggatccacatcggagaaaacccctacaaaaatgcagacggcctcatcgcacacgcagcccccaaacctcctcagttacgatccccaaggctccctttcagagggaattcctaccccggggctgcggagggcagagcggaggcccccggacagccccttaagccgccggagggtcaggagggcttcagccagaggcgggggctgctgtcctccaagacctacatctgctcccactgcggagagagcttcctggatcgctctgtgctcctccagcatcagctcacccacggcaacgaaaagccctttctctttcctgattatagaattggcctaggggaaggcgcagggcccagccccttcttaagtgggaagccctttaaatgccctgaatgcaaacaaagctttggcctcagctctgagctgctgctgcaccagaaagtccatgcaggcgggaagagctcccataagagtccagagctggggaagagctcttccgtcctcctggagcatctcaggagccccctgggggccagaccctaccgctgctcagattgcagggcctccttcctcgaccgcgtggccctcacccggcaccaagaaacccacacccaggaaaaaccccccaatcccgaggacccccctccagaggcagtcaccctgtccacagatcaggaaggtgagggcgagacccctacccccacagagagcagcagccatggggaagggcaaaaccccaaaaccctagtggaagaaaagccctatctgtgccccgagtgtggagccggcttcacagaagtcgcagccctcctgctccataggagctgccacccaggtgtctccctgtgaaatgggtctggagaccaggggcctcgctctctccagagaggaacactggattttttcccccaaaaaaattacatggggaagggaggataaccctatcagatggtagtggagtggaggagaaagaaccctgggaaaaaatagtgcttttacatcagtgatgagaaaccctataaaattgttggtgggaagcacttataaggcagtagagaaaaactgttgggttagaaaccctataaatatgtaggaaaaaaaaaagccctttaagtctgtagcagaaaaaccctataaaccatagtggataaaagccctattaattgtaggaagaggtcccaatatgtctctgaacaaccctataaaattgtatcaaaatccttaggaaaatcctatagggtcggggaagtaccgcaatggcactgacccgggagtaacgaccctcagatgatgcagaaaacacctctccctcactgttccacaatgttctctcccagcagccctggacagttctcatggaggaagatgctcagctgggggagtggtgtgggaactgggtggaactgaaaaggaagaaaataggagaaaaataagtgaccaggggctctggagcccccagaggagataagacagagactaggaagaaaaggtcccactcactgcactggggtccttggggtttgaggacaatgttagatgcattgtgtgttttagggaaagaggcctatggaatcccttatcaaaaccccaaaatggggaagaaaaaacaaattggcaagcctttttaaaggctgaagtttggggtgcagaaacatggtcagtataagaatactgagaaaccaccacaaaaattagggggaagcagggggcagtttctgttagattgctttgaggggagcaaaccaaggtggggaaactgctcacatggaacccagctaactccaggccccttcttgcttccggaagcttgcgaaactgcaagtagcaggcaggtcccagctctcagagtgcaagggttctccccacaccaggcaggaccaccctttctccctgcccagccagggacttctactctgcaaggcctccagggatggcggttgcctcccaccacattctcaggtctcaccttcaggaggtttttcctgaaatctaactgccgccagtggcagctcatttcctcaaattctgtcctcagtggagagggagaaccgctgctagtcgacctccaaagaataaagcccttcagagacttagggcctgcgtgtgggcctccccagccttctccaagtcatcagggccacagaatttcttagaaagctttgattagccagcaacttgattttaaacttcagctattcatctttgttggtagcaaggctgccccgcaggataaggcagccctcctccctggtggggatccagacaccccacagactgagccacaggtccctgaagagtccgcagaggccgtatcaccctcttcaccctggtacctggagccctccagggttgtgagatccagcccaatctcagccttgagatggatgggatggattccactcacttggctcccctctcctccttggccagaaaccttcagaaggaaacagaaggatgagaaagcctcccttgccaggcccatctcacctcccacaccacacagttacacattcataaacagccaagcctgctcacaggcctgggcatatgtggctggggagagactgttgccctatgagatggtggaagacagaaaactcttgaatgaaacatctgtaacaagactcccactccctaatcctggagaccccttcaaaaggagaggactctgctcagcgctgggtcagaaaggaagtgcttgccaaccccagtaatgcgctgtcctggagtaagaggactgagatgccagctgtggggcccgtcaggagtcacgtctcaagagaggggtgacccagatttttgcaaagctgtggaagagacctctaattccatgacctaaagtttcacacaacctttatgcaaatccttcgccatttgtctatcctggccccagcaggatgaccctcacatttaaaaggatcaaaatctcaaacattgtgggaggaaaacgccaggcctgctggggagagggagaaggcaggcctcaggattgtgcggagaaccatgttgccatctgcataacgccccagcctatccaagtgccaggaagggaagcactactgaggggggtgctgcctgtgggtctcttcctaacagaacgccaacgaagggggtgccctgtaagaatgagaagtctgccaagtctaaggagatgtccccctccccaagatggtagcagaaactgaagttgtaaagacaaacctctcgcaaagccagaagcagatgctctcaaaaacaggcctaaggaatctgttcccagaagaggcctggggagcagcttttggggctcagaggccagtctggggggaggcaggcagtgtgactgaaggccggcgcaggcctgtttcggactagggtgtagcatatttagtaggatgctcacatgttgtagggatgggtgagggctaaggggcttggctcttgtacgggatggatgatgtgagcgcacagttcgtagggtcaggcgtcttgcggtaggaaaggggcagggttcgatacctctggggtgtggcgtgttctctcttgcccacctccccaagctcctttaaccaggagcttccctcccagagtgagctacgtcttgggaggattgaagcagggaggtggcagtggctagagttgctcagatcggctcagatgaaggcccaggggtcaaagcatttgctcaccacaactgagtctggaaggcactgtgcagccaaaccctcttgtccaatcacatgcaggccccaggcccctcagaaacgccctggtggagggaggagcccaacagatagggtcagggagtcagtggggaaagcagaggggagagcttagagtgaaacttgaaactgctatggacatggaggtcagatgggaacttggaactgggcatgaatcctgaatggtggggaaacttgaagccatcacagccaagaggtggggttccatgacctgccctgaggtcagcagctcccagactcctttgccctcactagggaagccccagtcaccggacttgtccccatggagtgaagagaggccccatttttgagtgttgtgtgtccaaaacagtgttgtgtcactggtggtcgatgttgcttagttgaagagaataaagggaataagattt

SEQ ID NO: 2946 - DNA, 595 bp, Homo sapiens
ttttttatcagttaatagtatttattattatttgtggtcaccaatgccaattaaaacaataattaaatagaacatgatgaaataattcaatggtaggaaaaaaaaaaatctggcctacaagtgaacatggaaagtaaaagtaaatatttagaaagtgaaatcaggagtggaaaaaagctccagcatctcaccatggggtcttccaaagccagcagtactggagatgtttattgttcaaagatggacttgcttgggttgggattctccaactagagccagaggggagattctctgcttcccgttccgaccaaagggtaaatgaacccagcacctatgctggcccggacatcactgataggtaagatgaagtcacttggcacaccttttttgtcaggttggtgagacagagaaagatcggtctttgccatgcagatgggcaaatttccaaaaccctgtaagaaaggaaagaaaatgtgttcactgatatagatgtgagtctcctgtgtttttcaatttgcactttatacagtctcggcagcaatggtatgccagctcagatcgaggcacatgcaggagctgcttgttactacttgtt

SEQ ID NO: 2947 - DNA, 419 bp, Homo sapiens
  misc_feature (1)...(419): n = a,t,c or g
ccgccagactannnaaaaagacgggattttttatcctgctggcctgccttcactgtcctgggggaagctcggggagaccaggtggactggagtaaactgtacagagacactggtctggtgaagatgtccaggaaaccacgagcctccagcccattttccaacaaccacccatcaacaccaaagaggcgaggaaggggaaagcatcctctcatccctggcccagaagccctatcaaagttcccaagacaacccataagggaaaagggacccgtcaaggaagttccaggaacaaaaggctctccctaaaagaccaccgcttcaaaaaaacctgaggaatggagggggccaacactatccagccactctgaccagccgaaccaagaactcaatcaaaatgcgccacagcaggaccatcaggg

SEQ ID NO: 2948 - DNA, 419 bp, Homo sapiens; identical to SEQ ID NO: 2947
  misc_feature (1)...(419): n = a,t,c or g

SEQ ID NO: 2949 - DNA, 1546 bp, Homo sapiens
tcgacccacgcgtccgagcattgggacagtgctctacaactggcaaagcatttggccccagaccagataccttttatatcaaaagaatatgctattcagcttgaattcgcgggtgattatgtaaatgctttggctcattatgagaaaggaataacaggtgataataaggaacatgatgaagcttgtctggctggagtggcccagatgtccataagaatgggagacatacgtcgaggggttaaccaagccctcaagcatcccagcagggtccttaaaagagactgtggagccatattggagaatatgaagcaattttcagaagcggcccaactgtatgaaaaaggtctctactacgataaagcagcatctgtttacatccgctctaagaattgggcaaaagttggtgatcttctgccccacgtttcttctcctaagatccatttgcagtatgccaaagccaaggaagcagatggaagatacaaagaagctgttgtagcttatgaaaatgcaaaacagtggcaaagtgtaatccgcatctatctggatcacctcaataatcctgaaaaagctgtcaatattgttagagagacccagtctctggatggagccaaaatggtagccaggttttttttacagcttggtgactatgggtctgccatccagtttcttgtcatgtccaaatgcaacaatgaagctttcacactggctcagcaacacaacaaaatggaaatctatgcagatattattggttctgaagacactactaatgaagactatcaaagcattgccttatactttgaaggagaaaagagatatcttcaggctggaaaattcttcttgctgtgtggccaatattcacgagcacttaaacacttcctgaaatgcccaagctcggaagataatgtggcaatagaaatggcaattgaaactgttggtcaggccaaagatgaactgctgaccaatcagctgatagaccatctcctgggggagaacgatggcatgcctaaggatgccaagtacctgttccgcttgtacatggctctgaagcaataccgagaagctgcccagactgccatcatcattgccagagaagagcagtctgcaggcaactaccggaatgcacacgatgttctcttcagtatgtatgcagaactgaaatcccagaagatcaaaattccctccgagatggccaccaacctcatgattctgcacagctatatactagtaaagattcatgttaaaaatggagatcacatgaaaggggctcgcatgctcattcgggtggccaacaacatcagcaaatttccatcacacattgtacccatcctgacgtcaactgtgattgagtgtcacagggcaggcctgaagaactctgctttcagcttcgcagctatgttgatgaggcctgaataccgcagcaaaatagatgccaaatacaaaaagaagatcgagggaatggtcaggagacccgatatatctgagatagaagaggccacgactccatgtccattctgcaaatttcttctcccagagagtgaactcctca

SEQ ID NO: 2950 - DNA, 1585 bp, Homo sapiens
attgacgggtccatccacgcgtccgattgtctgtatcagacatcatgggagcagatccagggcgacatcaaagggaagcatgagtctccaggaccagaggggcttggatgcagatgatcatcatctgggcactgctggatactgaagttctcattatgttgcctagactggtctcaaacctccggcttcaagagatcctctcacctcgaccttcaaattactgggattacaggcatgagccaccatgtcctaccagactttgttaaaagaggaacaggccaggcatcgtgggctcacatgaacactcatgccccagaagtaaacaagtgttagccaaccaggaggcctatcctccccctaacctcacccaaagccatctctgtgccctcccccttgcaggggaaacagcacacactagtgaaatcttgtcttagtgtgtccggaattggtgggttcttggtctcactgagttctagaatgaagctgcagaccctcgcagtgagtgttacagctcttaagttctggtcagcctatgtgccatgccagacccaggaccgggatgccctgcgcctcaccctggagcagattgacctcatacgccgcatgtgtgcctcctattctgagctggagcttgtgacctcggctaaagctctgaacgacactcagaaattggcctgcctcatcggtgtagagggtggccactcgctggacaatagcctctccatcttacgtaccttctacatgctgggagtgcgctacctgacgctcacccacacctgcaacacaccctgggcagagagctccgctaagggcgtccactccttctacaacaacatcagcgggctgactgactttggtgagaaggtggtggcagaaatgaaccgcctgggcatgatggtagacttatcccatgtctcagatgctgtggcacggcgggccctggaagtgtcacaggcacctgtgatcttctcccactcggctgcccggggtgtgtgcaacagtgctcggaatgttcctgatgacatcctgcagcttcttgaagaagaacggtgggcgttcgtgatggtgtctttgttccatggggagttaatacagtggcaacccatcaggccaatgtgttccactgtggcagatcacttcgaccacatcaaggctgttcattggatccaagttcatcgggattggtggagattatgatggggccggcaagtacaggaagaaaacaacatgcaaagccccttggaggacaagttcccggatgagcagctgagcagttcctgccactccgacctctcacgtctgcgtcagagacagagtctgacttcaggccaggaactcactgagattcccatacactggacagccaagttaccagccaagtggtcagtctcagagtcctccccccacatggccccagtccttgcagttgtggccaccttcccagtccttattctgtggctctgatgacccagttagtcctgccagatgtcactgtagcaagccacagacaccccacaaagttcccctgttgtgcaggcacaaatatttcctgaaataaatgttttggacatagaaacagaaaaaa

SEQ ID NO: 2951 - DNA, 883 bp, Homo sapiens
cacgagaccaccccggctgtggtgcaaagcgtcctcctggagagggggtggaataagtttgataagcaggagcagaacgcggaggactggaacctgtactggaggacatcctctttccgaatgaccgaacacaacagtgttaaaccgtggcagcagctaaaccaccaccctggaaccaccaagcttaccaggaaagactgtttggccaaacacctgaagcacatgaggaggatgtatggcacttccctgtaccagttcatccccctgacgttcgtcatgcccaatgactataccaagttcgtggctgaatactttcaggagaggcagatgctgggcaccaagcatagctattggatttgcaagcctgctgagttatctcgtgggagggggatactaattttcagtgactttaaagacttcatctttgatgatatgtacatagtgcagaaatatatctccaatcctttacttattggcagatataaatgtgatctccgcatctatgtttgtgttactggctttaagcctttgaccatttatgtttatcaggaagggttggttcggtttgccacggaaaagtttgacctcagtaatttgcaaaacaattatgcccatttgaccaacagcagcatcaataaatccggggcctcttatgagaagatcaaagaagtgattggtcatggttgtaaatggacgctcagcagatttttttcctaccttcgtagctgggatgtggacgatctgcttttgtggaagaaaatccaccgcatggttattctcaccattctcgccattgcaccatctgtcccctttgctgccaattgctttgagctctttgggtttgatattttgattgatgacaacgaattccaccgcactggac

SEQ ID NO: 2952 - DNA, 441 bp, Homo sapiens
ctggtggaattcgaagcaaagggtgtagctgatgtgcagattgggattgaatgtgggaatgagggtgtgatgggagtgattggaaatattgcagccctgcatagtctccatcagggatgtgacaaagtggataatctctaccacgtgagaaacttccaacattacttgcaaatcagatttaatgaataaaataaagctgtagcacttggcacattcattgggacccttacccaaacattatcaatattgtgtacgttatctttattatcaggtcacaaaagatgtcataaaagaatttgcagatgacggcgtcaagtacctggaactaaggagcacacccagaagagaaaatgctactggaatgactaaaaagacttatgtggaatctatacttgaaggtataaaacagtccaaacaagaaaacttggacattgatgttag

SEQ ID NO: 2953 - protein, 106 aa, Homo sapiens
  misc_feature (1)...(106): Xaa = any amino acid or nothing
ISEHRIEASGNYLAQRLTSSFLRGLSSWKSNPLMLCGWTILLTLTMVQGEPXGPKGIPGFHTNSSYPHWGTVAKPPAGDXDLLPAPGQEGTPLFTRXSLCTYCPID

SEQ ID NO: 2954 - protein, 150 aa, Homo sapiens
REELGKDLFDCTLYVLLKYDDFNADKHLALEEFYRAFQVIQLSLPEDQKLSITAATVGQSAVLSCAIQGTLRPPIIWKRNNIILNNLDLEDINDFGDDGSLYITKVTTTHVGNYTCYADGYEQVYQTHIFQVNVPPVIRVYPESQARRAG

SEQ ID NO: 2955 - protein, 58 aa, Homo sapiens
  misc_feature (1)...(58): Xaa = any amino acid or nothing
FYSAFLVADKGIVTSKHNNDTQHIWESDSNEFSVIADPRGNTLGRGTTITXVSIPPSL

SEQ ID NO: 2956 - protein, 164 aa, Homo sapiens
RTKTDVYILNLAVADLLLLFTLPFWAVNAVHGWVLGKIMCKITSALYTLNFVSGMQFLACISIDRYVAVTKVPSQSGVGKPCWIICFCVWMAAILLSIPQLVFYTVNDNARCIPIFPRYLGTSMKALIQMLEICIGFVVPFLIMGVCYFITARTLMKMPNIKIS

SEQ ID NO: 2957 - protein, 133 aa, Homo sapiens
EETGVREKRRERMKEKMWQNVLCCTLQTAVILKLFQNKVLNILKNFFLSPLDTRKNKVFKKWAGGPGAVAHACNPSTLGGRGGRITKSGDRDHPGQHGETRSLPACWAQWKSLALPVSRAPGRQGSLVVFPLP

SEQ ID NO: 2958 - protein, 160 aa, Homo sapiens
CTKCKADCDTCFNKNFCTKCKSGFYLHLGKCLDNCPEGLEANNHTMECVSIVHCEVSEWNPWSPCTKKGKTCGFKRGTETRVREIIQHPSAKGNLCPPTNETRKCTVQRKKCQKGERGKKGRERKRKKPNKGESKEAIPDSKSLESSKEIPEQRENKQQQ

SEQ ID NO: 2959 - protein, 141 aa, Homo sapiens
  misc_feature (1)...(141): Xaa = any amino acid or nothing
LSMLSTISTEHRLSVLWPIWYCCHCPTHLSAVMCVLLWALSLLQSILEWMFCSFLFSDVDSDNWCQILDFLTAVWLIFLILVLCGFTLVLLVRIICGSQKMPLTRLYVTILLTGLVFLFCSLPLSIQXFLLYWIEKDLDDL

SEQ ID NO: 2960 - protein, 115 aa, Homo sapiens
  misc_feature (1)...(115): Xaa = any amino acid or nothing
EKRKTSYSQCLNSKQRNVSMRPSIWIHVHLKPPCRLVELLPFSSALQGLSHLSLGTTLPVXGHLRFRLRNLPQSLRTVILPERNEEQNLQELSHNADKYQMGDCCKEEIDDSIFY

SEQ ID NO: 2961 - protein, 657 aa, Homo sapiens
  misc_feature (1)...(657): Xaa = any amino acid or nothing
EKGKVKDAGAEQWISLSLSCKGSWETQFSNHLNSLTPPTSVRRMPLITTVTLLKMVARHHMKLLCSKAFSTQLQQKIFLHSQMGIHHQSVCMKLKPNTSHIISILMGQPMALVQLETLAPLTIIIQKFQTQDHMKFWKNLPLHSHHLTPSVPQTVIPKKTGSPEIKLKITKTIQNGRELFESSLCGDLLNEVQASEQXNQSIESRKEKRKKSNKHDSSRSEERKSHKIPKLEPEEQNRPNERVDTVSEKPREEPVLKEGSPSSANTIFCSNNGSVHWFKFQVGDLVWSKVGTYPWWPCMVSSDPQLEVHTKINTRGAREYHVQFFSNQPERAWVHEKRVREYKGHKQYEELLAEATKQASNHSEKQKIRKPRPQRERAQWDIGIAHAEKALKMTREERIEQYTFIYIDKQPEEALSQAKKSVASKTEVKKTRRPRSVLNTQPEQTNAGEVASSLSSTEIRRHSQRRHTSAEEEEPPPVKIAWKTAAARKSLPASITMHKGSLDLQKCNMSPVVKIEQVFALQNATGDGKFIDQFVYSTKGIGNKTEISVRGQDRLIISTPNQRNEKPTQSVSSPEATSGSTGSVEKKQQRRSIRTRSESEKSTEVVPKKKIKKEQVETVPQATVKTGLQKGSADRGVQGSVRFSDSSVSAAIEETVD

SEQ ID NO: 2962 - protein, 520 aa, Homo sapiens
  misc_feature (1)...(520): Xaa = any amino acid or nothing
SASPPPPPPPPPSRFPFSGAPGARDRSGPLGSEPQRNPGARPRTLEATVTPPGSVGAMSSSGLNSEKVAALIQKLNSDPQFVLAQNVGTTHDLLDICLKRATVQRAQHVFQHAVPQEGKPITNQKSSGRCWIFSCLNVMRLPFMKKLNIEEFEFSQSYLFFWDKVERCYFFLSAFVDTAQRKEPEDGRLVQFLLMNPANDGGQWDMLVNIVEKYGVIPKKCFPESYTTEATRRMNDILNHKMREFCIRLRNLVHSGATKGEISATQDVMMEEIFRVVCICLGNPPETFTWEYRDKDKNNKKIGPITPLEFNREQHVKPLFNMEDKICLVNDPRPQHKYNKLYTVEYLSNMVWRGEKLFYNNQPIDFLKKMVAASIKDGEAVWFGCDVGKHFNSKLGLSDMNLYDHELVFGVSLKNMNKAERLTFGESLMTHTMTFTAVSQSRDDSGMVLFTKWRVGEFQWGEDHGHKGYLCMTDXVGSLEYVYEVVVWDRKHVPEEVLAVLGAGNPFVLPAWDPMGALAE

SEQ ID NO: 2963 - protein, 150 aa, Homo sapiens
  misc_feature (1)...(150): Xaa = any amino acid or nothing
RHYDSAGKITLKIAKNYLEQRAVGGASPRLAQSVLTCSREPILENSLTSLIEYLHNALEHDMRLRFNNDRMKTTIKETSTXLSNSYLVFPLMXSLTYLMKMSFERCTARNKMFVNSPFTKVDNYCTSSWKKFYLKCYFSLNTIKKEKKMT

SEQ ID NO: 2964 - protein, 817 aa, Homo sapiens
  misc_feature (1)...(817): Xaa = any amino acid or nothing
FDTYRGLPSISNGNYSQLQFQAREYSGAPYSQRISAITTVSVAWKVLSGKIGEGAEGNCKCVISEGAWAVCPTQPCGKAKPDKHLKDLLSKLLNSGYFESIPVPKNAKEKEVPLEEEMLIQSEKKTQLSKTESVKESESLMEFAQPEIQPQEFLNRRYMTEVDYSNKQGEEQPWEADYARKPNLPKRWDMLTEPDGQEKKQESFKSWEASGKHQEVSKPAVSLEQRKQDTSKLRSTLPEEQKKQEISKSKPSPSQWKQDTPKSKAGYVQEEHKKQETPKLWPVQLQKEQDPKKQTPKSWTPSMQSEQNTTKSWTTPMCEEQDSKQPETPKSWENNVESQKHSLTSQSQISPKSWGVATASLIPNDQLLPRKLNTEPKDVPIACASAXGFLPLQPPFRRIHVLRKEKLQDLMTQIQGTCNFMQESVLDFDKPSSAIPTSQPPSATPGXPRRHLKEQNLSVKVIFFQGAVTVFNVNAPLPPRKEQEIKESPYSPGYNQSFTTASTQTPPQCQLPSIHVEQTVHSQETANYHPDGTIQVSNGSLAFYPAQTNVFPRPTQPFVNSRGSVRGCTRGGRLITNSYRSPGGYKGFDTYRGLPSISNGNYSQLQFQAREYSGAPYSQRDNFQQCYKRGGTSGGPRANSRAGWSDSSQVSSPERDNETFNSGDSGQGDSRSMTPVDVPVTNPAATILPVHVYPLPQQMRVAFSAARTSNLAPGTLDQPIVFDLLLNNLGETFDLQLGRFNCPVNGTYVFIFHMLKLAVNVPLYVNLMKNEEVLVSAYANDGAPDHETASNHAILQLFQGDQIWLRLHRGAIYGSSW

SEQ ID NO: 2965 - protein, 817 aa, Homo sapiens; identical to SEQ ID NO: 2964
  misc_feature (1)...(817): Xaa = any amino acid or nothing

SEQ ID NO: 2966 - protein, 489 aa, Homo sapiens
  misc_feature (1)...(489): Xaa = any amino acid or nothing
DYVLTAELHRQRSPGVSFGLSVFNLMNAIMGSGILGLAYVMANTGVFGFSFLLLTVALLASYSVHLLLSMCIQTAYLGPXTNYFMVLPAHXLTCLPLIEFLQSLXNSLXAVTSYEDLGLFAFGLPGKLVVAGTIIIQNIGAMSSYLLIIKTELPAAIAEFLTGDYSRYWYLDGQTLLIIICVGIVFPLALLPKIGFLGYTSSLSFFFMMFFALVVIIKKWSIPCPLTLNYVEKGFQISNVTDDCKPKLFHFSKESAYALPTMAFSFLCHTSILPIYCELQSPSKKRMQNVTNTAIALSFLIYFISALFGYLTFYDGTTKAQRGEVTCHRIKDKVESELLKGXXXIPXSHDVVVMTVKLCILFAVLLTVPLIHFPARKAVTMMFFSNFPFSWIRHFLITLALNIIIVLLAIYVPDIRNVFGVVGASTSTCLIFIFPGLFYLKLSREDFLSWKKLGVGCFCLLSFKTSILRNSLSVYIILPASRKSIYFKI

SEQ ID NO: 2967 - protein, 1072 aa, Homo sapiens
  misc_feature (1)...(1072): Xaa = any amino acid or nothing
SGIVVRALWREKKPGGGRRVKRRNPGRQAVGHTEEDPPRVGTPWKEHTGPGPQEGSTMEAAHAKTTEECLAYFGVSETTGLTPDQVKRNLEKYGLNELPAEEGKTLWELVIEQFEDLLVRILLLAACISFVLAWFEEGEETITAFVEPFVILLILIANAIVGVWQERNAENAIEALKEYEPEMGKVYRADRKSVQRIKARDIVPGDIVEVAVGDKVPADIRILAIKSTTLRVDQSILTGEYVSVIKHTEPVPDPRAVNQDKKNMLFSGTNIAAGKALGIVATTGVGTEIGKIRDQMAATEQDKTPLQQKLDEFGEQLSKVISLICVAVWLINIGHFNDPVHGGSWFRGAIYYFKIAVALAVAAIPEGLPAVITTCLALGTRRMAKKNAIVRSLPSVETLGCTSVICSDKTGTLTTNQMSVCKMFIIDKVDGDICLLNEFSITGSTYAPEGEVLKNDKPVRPGQYDGLVELATICALCNDSSLDFNEAKGVYEKVGEATETALTTLVEKMNVFNTDVRSLSKVERANACNSVIRQLMKKEFTLEFSRDRKSMSVYCSPAKSSRAAVGNKMFVKGAPEGVIDRCNYVRVGTTRVPLTGPVKEKIMAVIKEWGTGRDTLRCLALATRDTPPKREEMVLDDSARFLEYETDLTFVGVVGMLDPPRKEVTGSIQLCRDAGIRVIMITGDNKGTAIAICRRIGIFGENEEVADRAYTGREFDDLPLAEQREACRRACCFARVEPSHKSKIVEYLQSYDEITAMTGDGVNDAPALKKAEIGIAMGSGTAVAKTASEMVLADDNFSTIVAAVEEGRAIYNNMKQFIRYLISSNVGEVVCIFLTAALGLPEALIPVQLLWVNLVTDGLPATALGFNPPDLDIMDRPPRSPKEPLISGWLFFRYMAIGGYVGAATVGAAAWWFLYAEDGPHVNYSQLTHFMQCTEDNTHFEGIDCEVFEAPEPMTMALSVLVTIEMCNALNSLSENQSLLRMPPWVNIWLLGSICLSMSLHFLILYVDPLPMIFKLRALDLTQWLMVLKISLPVIGLDEILKFVARNYLEGXLFPLLHLXARVTDPEDERRK

SEQ ID NO: 2968 - protein, 803 aa, Homo sapiens
  misc_feature (1)...(803): Xaa = any amino acid or nothing
GARSCSRLGRCTFPLWKGREMEVRKLSISWQFLIVLVLILQILSALDFDPYRVLGVSRTASQADIKKAYKKLAREWHPDKNKDPGAEDKFIQISKAYEILSNEEKRSNYDQYGDAGENQGYQKQQQQREYRFRHFHENFYFDESFFHFPFNSERRDSIDEKYLLHFSHYVNEVAPDSFKKPYLIKITSDWCFSCIHIEPVWKEVIQELEELGVGIGVVHAGYERRLAHHLGAHSTPSILGIINGKISFFHNAVVRENLRQFVESLLPGNLVEKVTNKNYVRFLSGWQQENKPHVLLFDQTPIVPLLYKLTAFAYKDYLSFGYVYVGLRGTEEMTRRYNINIYAPTLLVFKEHINRPADVIQARGMKKQIIDDFITRNKYLLAARLTSQKLFHELCPVKRSHRQRKYCVVLLTAETTKLSKPFEAFLSFALANTQDTVRFVHVYSNRQQEFADTLLPDSEAFQGKSAVSILERRNTAGRVVYKTLEDPWIGSESDKFILLGYLDQLRKDPALLSSEAVLPDLTDELAPVFLLRWFYSASDYISDCWDSIFHNNWREMMPLLSLIFSALFILFGTVIVQAFSDSNDERESSPPEKEEAQEKTGKTEPSFTKENSSKIPKKGFVEVTELTDVTYTSNLVRLRPGHMNVVLILSNSTKTSLLQKFALEVYTFTGSSCLHFSFLSLDKHREWLEYLLEFAQDAAPIPNQYDKHFMERDYTGYVLALNGHKKYFCLFKPQKTVEEGGKPXGSCSDVDSSLYLGESRGKPSCGLGSRPIKGKLSKLSLWMERLLEGSLQRFYIPSWPELD

SEQ ID NO: 2969 - protein, 357 aa, Homo sapiens
  misc_feature (1)...(357): Xaa = any amino acid or nothing
KGLSPDQVLSAFAPLDCEMWLKVFTTFLSFATGACSGLKVTVPSHTVHGVRGQALYLPVHYGFHTPASDIQIIWLFERPHTMPKYLLGSVNKSVVPDYGIPYTSSPXCHPMASLLINPLQFPDEGNYIVKVNIQGNGTLSASQKIQVTVDDPVTKPVVQIHPPSGAVEYVGNMTLTCHVEGGTRLAYQWLKNGRPVHTSSTYSFSPQNNTLHIAPVTKEDIGNYSCLVRNPVSEMESDIIMPIIYYGPYGLQVNSDKGLKVGEVFTVDLGEAILFDCSADSHPPNTYSWIRRTDNTTYIIKHGPRLEVASEKVAQKTMDYVCCAYNNITGRQDETHFTVIITSVGMCDIQGRDPNKT

SEQ ID NO: 2970 - protein, 289 aa, Homo sapiens
  misc_feature (1)...(289): Xaa = any amino acid or nothing
HSALLTHSSFCVFTLCQDFFTYSSMSEEVTYADLQFQNSSEMEKIPEIGKFGEKAPPAPSHVWRPAALFLTLLCLLLLIGLGVLASMFHVTLKIEMKKMNKLQNISEELQRNISLQLMSNMNISNKIRNLSTTLQTIATKLCRELYSKEQEHKCKPCPRRWIWHKDSCYFLSDDVQTWQESKMACAAQNASLLKINNKNALEFIKSQSRSYDYWLGLSPEEDSYSWYESGXYNQPSAWVIRNAPDLNNMYCGYINRLYVQYYHCTYKQRMICEKMANPVQLGSTYFREA

SEQ ID NO: 2971 - protein, 458 aa, Homo sapiens
  misc_feature (1)...(458): Xaa = any amino acid or nothing
VPNYLPSVSSAIGGEVPQRYVWRFCIGLHSAPRFLVAFAYWNHYLSCTSPCSCYRPLCRLNFGLNVVENLALLVLTYVSSSEDFTWVPGXGRSGEVFPEGTGLPLPHSDLPTSWCGHSLQCGSQSSFPPAIHENAFIVFIASSLGHMLLTCILWRLTKKHTVSQEDGLSLAGAPRQPRRKSRTSVLRIRVMVRWELSSNGNPGRGVLGLGLGLGNKLRVVGQNLGLXHCVWVVWETGEXKRWRLQMGIEXGVASRRQXVRNSVRGLVCHNSSAPPMYMGFFSPTVFGGGVGGXLHVTFILHPPEVEAAGIPLLLGPSLPQRQGREHIVVILAAPACAPFHDRXWEPREIRPSPXELGLRGEPTLSYPASCRVIRQPIPXDRKSYSWKQRLFIINFISFFSALAVYFRHNMYCEAGVYTIFAILEYTVVLTNMAFHMTAWWDFGNKELLITSQPEEKRF

SEQ ID NO: 2972 - protein, 496 aa, Homo sapiens
GGILSGRDGRTALPRPREPAERTAGLRRDMRPQELPRLAFPLLLLLLLLLPPPPCPAHSATRFDPTWESLDARQLPAWFDQAKFGIFIHWGVFSVPSFGSEWFWWYWQKEKIPKYVEFMKDNYPPSFKYEDFGPLFTAKFFNANQWADIFQASGAKYIVLTSKHHEGFTLWGSEYSWNWNAIDEGPKRDIVKELEVAIRNRTDLRFGLYYSLFEWFHPLFLEDESSSFHKRQFPVSKTLPELYELVNNYQPEVLWSDGDGGAPDQYWNSTGFLAWLYNESPVRGTVVTNDRWGAGSICKHGGFYTCSDRYNPGHLLPHKWENCMTIDKLSWGYRREAGISDYLTIEELVKQLVETVSCGGNLLMNIGPTLDGTISVVFEERLRQMGSWLKVNGEAIYETHTWRSQNDTVTPDVWYTSKPKEKLVYAIFLKWPTSGQLFLGHPKAILGATEVKLLGHGQPLNWISLEQNGIMVELPQLTIHQMPCKWGWALALTNVI

SEQ ID NO: 2973 - protein, 369 aa, Homo sapiens
SVPRAGGDMETGAAELYDQALLGILQHVGNVQDFLRVLFGFLYRKTDFYRLLRHPSDRMGFPPGAAQALVLQVFKTFDHMARQDDEKRRQELEEKIRRKEEEEAKTVSAAAAEKEPVPVPVQEIEIDSTTELDGHQEVEKVQPPGPVKEMAHGSQEAEAPGAVAGAAEVPREPPILPRIQEQFQKNPDSYNGAVRENYTWSQDYTDLEVRVPVPKHVVKGKQVSVALSSSSIRVAMLEENGERVLMEGKLTHKINTESSLWSLEPGKCVLVNLSKVGEYWWNAILEGEEPIDIDKINKERSMATVDEEEQAVLDRLTFDYHQKLQGKPQSHELKVHEMLKKGWDAEGSPFRGQRFDPAMFNISPGAVQF

SEQ ID NO: 2974 - protein, 527 aa, Homo sapiens
MQFGRAHGDCVSGAQLCGCPSMDDYMVLRMIGEGSFGRALLVQHESSNQMFAMKEIRLPKSFSNTQNSRKEAVLLAKMKHPNIVAFKESFEAEGHLYIVMEYCDGGDLMQKIKQQKGKLFPEDMILNWFTQMCLGVNHIHKKRVLHRDIKSKNIFLTQNGKGKLGDFGSARLLSNPMAFACTYVGTPYYVPPEIWENLPYNNKSDIWSLGCILYELCTLKHPFQANSWKNLILKVCQGCISPLPSHYSYELQFLVKQMFKRNPSHRPSATTLLSRGIVARLVQKCLPPEIIMEYGEEVLEEIKNSKHNTPRKKTNPSRIRIALGNEASTVQEEEQDRKGSHTDLESINENLVESALRRVNREEKGNKSVHLRKASSPNLHRRQWEKNVPNTALTALENASILTSSLTAEDDRGGSVIKYSKNTTRKQWLKETPDTLLNILKNADLSLAFQTYTIYRPGSEGFLKGPLSEETEASDSVDGGHDSVILDPERLEPGLDEEDTDFEEEDDNPDWVSELKKRAGWQGLCDR

SEQ ID NO: 2975 - protein, 930 aa, Homo sapiens
PPGEPGAGRGALSPCGPLSGPPPLPGREAGGTCGQPVNPVFDLSRRNPQEDFELIQRIGSGTYGDVYKARNVNTGELAAIKVIKLEPGEDFAVVQQEIIMMKDCKHPDIVAYFGSYLRRDKLWICMEFCGSGSLQDIYHVTGPLSELQIAYVSRETLQGLYYLHSKGKMHRDIKGANILLTDNGHVKLADFGVSAQITATIAKRKSFIGTPYWMAPEVAAVERKGGYNQLCDLWAVGITAIELAELQPPMFDLHPMRALFLMTKSNFQPPKLKDKMKWSNSFHHFVKMALTKNPKKRPTAEKLLQHPFVTQHLTRSLAIELLDKVNNPDHSTYHDFDDDDPEPLVAVPHRIHSTSRNVREEKTRSEITFGQVKFDPPLRKETEPHHELPDSDGFLDSSEEIYYTARSNLDLQLEYGQGHQGGYFLGANKSLLKSVEEELHQRGHVAHLEDDEGDDDESKHSTLKAKIPPPLPPKPKSIFIPQEMHSTEDENQGTIKRCPMSGSPAKPSQVPPRPPPPRLPPHKPVALGNGMSSFQLNGERDGSLCQQQNEHRGENLSRKEKKDVPKPISNGLPPTPKVHMGACFSKVFNGCPLKIHCASSWINPDTRDQYLIFGAEEGIYTLNLNELHETSMEQLFPRRCTWLYVMNNCLLSISGKASQLYSHNLPGLFDYARQMQKLPVAIPAHKLPDRILPRKFSVSAKIPETKWCQKCCVVRNPYTGHKYLCGALQTSIVLLEWVEPMQKFMLIKHIDFPIPCPLKMFEMLVVPEQEYPLVCVGVSRGRDFNQVVRFETVNPNSTSSWFTESDTPQTNVTHVTQLERDTILVCLDCCIKIVNLQGRLKSSRKLSSELTFDFRIESIVCLQDSVLAFWKHGMQGRSFRSNEVTQEISDSTRIFRLLGSDRVVVLESRPTDNPTANSNLYILAGHENSY

SEQ ID NO: 2976 - protein, 930 aa, Homo sapiens; identical to SEQ ID NO: 2975

SEQ ID NO: 2977 - protein, 455 aa, Homo sapiens
YSLRKGITFKLAGAMVHIKKGELTQEEKELLEVIGKGTVQEAGTLLSSKNVRVNCLDENGMTPLMHAAYKGKLDMCKLLLRHGADVNCHQHEHGYTALMFAALSGNKDITWVMLEAGAETDVVNSVGRTAAQMAAFVGQHDCVTIINNFFPRERLDYYTKPQGLDKEPKLPPKLAGPLHKIITTTNLHPVKIVMLVNENPLLTEEAALNKCYRVMDLICEKCMKQRDMNEVLAMKMHYISCIFQKCINFLKDGENKLDTLIKSLLKGRASDGFPVYPEKILRESIRKFPYCEATLLQQLVRSIAPVEIGSDPTAFSVLTQAITGQVGFVDVEFCTTCGEKGASKRCSVCKMVIYCDQTCQKTHWFTHKKICKNLKDIYEKQQLEAAKEKRQEENHGKLDVNSNCVNEEQPEAEVGISQKDSNPEDSGEGKKESLESEAELEGLQDAPAGPQVSEE

SEQ ID NO: 2978 - protein, 1724 aa, Homo sapiens
SDDLRTGLFQDVQDAESLKLPGVYEVLFYNETEDCPGMMLWRYPEPRGLTLVRITPVPFNTTEDPDISTADLGDVLQDPCSLEYWDELQKVFVAFREFNLSESKVCELQLPDINLVNDQKKLVSSDLWRIVLNSSQNGADDQSSASESGSQSTCDPLVTPTALAACTRVDSCFTPWFVPSLCVSFQFAHLEFHLCHHLDQLGTAAPQYLQPFVSDRNMPSELEYMIVSFREPHMYLRQWNNGSVCQEIQFLAQADCKLLECRNVTMQSVVKPFSIFGQMAVSSDVVEKLLDCTVIVDSVFVNLGQHVVHSLNTAIQAWQQNKCPEVEELVFSHFVICNDTQETLRFGQVDTDENILLASLHSHQYSWRSHKSPQLLHICIEGWGNWRWSEPFSVDHAGTFIRTIQYRGRTASLIIKVQQLNGVQKQIIICGRQIICSYLSQSIELKVVQHYIGQDGQAVVREHFDCLTAKQKLPSYILENNELTELCVKAKGDEDWSRDVCLESKAPEYSIVIQVPSSNSSIIYVWCTVLTLEPNSQVQQRMIVFSPLFIMRSHLPDPIIIHLEKRSLGLSETQIIPGKGQEKPLQNIEPDLVHHLTFQAREEYDPSDCAVPISTSLIKQIATKVHPGGTVNQILDEFYGPEKSLQPIWPYNKKDSDRNEQLSQWDSPMRVKLSIWKPYVRTLLIELLPWALLINESKWDLWLFEGEKIVLQVPAGKIIIPPNFQEAFQIGIYWANTNTVHKSVAIKLVHNLTSPKWKDGGNGEVVTLDEEAFVDTEIRLGAFPGHQKLCQFCISSMVQQGIQIIQIEDKTTIINNTPYQIFYKPQLSVCNPHSGKEYFRVPDSATFSICPGGEQPAMKSSSLPCWDLMPDISQSVLDASLLQKQIMLGFSPAPGADSSQCWSLPAIVRPEFPRQSVAVPLGNFRENGFCTRAIVLTYQEHLGVTYLTLSEDPSPRVIIHNRCPVKMLIKENIKDIPKFEVYCKKIPSECSIHHELYHQISSYPDCKTKDLLPSLLLRVEPLDEVTTEWSDAIDINSQGTQVVFLTGFGYVYVDVVHQCGTVFITVAPEGKAGPILTNTNRAPEKIVTFKMFITQLSLAVFDDLTHHKASAELLRLTLDNIFLCVAPGAGPLPGEEPVAALFELYCVEICCGDLQLDNQLYNKSNFHFAVLVCQGEKAEPIQCSKMQSLLISNKELEEYKEKCFIKLCITLNEGKSILCDINEFSFELKPARLYVEDTFVYYIKTLFDTYLPNSRLAGHSTHLSGGKQVLPMQVTQHARALVNPVKLRKLVIQPVNLLVSIHASLKLYIASDHTPLSFSVFERGPIFTTARQLVHALAMHYAAGALFRAGWVVGSLDILGSPASLVRSIGNGVADFFRLPYEGLTRGPGAFVSGVSRGTTSFVKHISKGTLTSITNLATSLARNMDRLSLDEEHYNRQEEWRRQLPESLGEGLRQGLSRLGISLLGAIAGIVDQPMQNFQKTSEAQASAGHKAKGVISGVGKGIMGVFTKPIGGAAELVSQTGYGILHGAGLSQLPKQRHQPSDVHADQAPNSHVKYVWKMLQSLGRPEVHMALDVVLVRGSGQEHEGCLLLTSEVLFVVSVSEDTQQQAFPVTEIDCAQDSKQNNLLTVQLKQPRVACDVEVDGVRERLSEQQYNRLVDYITKTSCHLAPSCSSMQIPCPVVAAEPPPSTVKTYHYLVDPHFAQVFLSKFTMVKNKALRKGFP

SEQ ID NO: 2979 - protein, 804 aa, Homo sapiens
AWLFPASVLCPRCLTGSAVGSAEWKSLVVLFPFSSRPTLGHLDSKPSSKSNMIRGRNSATSADEQPHIGNYRLLKTIGKGNFAKVKLARHILTGKEVAVKIIDKTQLNSSSLQKLFREVRIMKVLNHPNIVKLFEVIETEKTLYLVMEYASGGEVFDYLVAHGRMKEKEARAKFRQIVSAVQYCHQKFIVHRDLKAENLLLDADMNIKIADFGFSNEFTFGNKLDTFCGSPPYAAPELFQGKKYDGPEVDVWSLGVILYTLVSGSLPFDGQNLKELRERVLRGKYRIPFYMSTDCENLLKKFLILNPSKRGTLEQIMKDRWMNVGHEDDELKPYGEPLPDYKDPRRTELMVSMGYTREEIQDSLVGQRYNEVMATYLLLGYKSSELEGDTITLKPRPSADLTNSSAPSPSHKVQRSVSANPKQRRFSDQAGPAIPTSNSYSKKTQSNNAENKRPEEDRESGRKASSTAKVPASPLPGLERKKTTPTPSTNSVLSTSTNRSRNSPLLERASLGQGFHPEWAKTALTMPGSRASTASASAAVSAARPRQHQKSMSASVHPNKASGLPPTESNCEVPRPRQVCWGSCTAPQRVPVASPSAHNISSSGGAPDRTNFPRGVSSRSTFHAGQLRQVRDQQNLPYGVTPASPSGHSQGRRGASGSIFSKFTSKFVRRNLNEPESKDRVETLRPHVVNSGGNDKEKEEFREAKPRSLRFTWSMKTTSSMEPNEMMREIRKVLDANSCQSELHEKYMLLCMHGTPGHEDFVQWEMEVCKLPRLSLNGVRFKRISGTSMAFKNIASKIANELKL

SEQ ID NO: 2980 - protein, 1102 aa, Homo sapiens
NCLLLQAKGFHGEIEDLQQWLTDTERHLLASKPLGGLPETAKEQLNVHMEVCAAFEAKEETYKSLMQKGQQMLARCPKSAETNIDQDINNLKEKWESVETKLNERKTKLEEALNLAMEFHNSLQDFINWLTQAEQTLNVASRPSLILDTVLFQIDEHKVFANEVNSHREQIIELDKTGTHLKYFSQKQDVVLIKNLLISVQSRWEKVVQRLVERGRSLDDARKRAKQFHEAWSKLMEWLEESEKSLDSELEIANDPDKIKTQLAQHKEFQKSLGAKHSVYDTTNRTGRSLKEKTSLADDNLKLDDMLSELRDKWDTICGKSVERQNKLEEALLFSGQFTDALQALIDWLYRVEPQLAEDQPVHGDIDLVMNLIDNHKAFQKELGKRTSSVQALKRSARELIEGSRDDSSWVKVQMQELSTRWETVCALSISKQTRLEAALRQAEEFHSVVHALLEWLAEAEQTLRFHGVLPDDEDALRTLIDQHKEFMKKLEEKRAELNKATTMGDTVLAICHPDSITTIKHWITIIRARFEEVLAWAKQHQQRLASALAGLIAKQELLEALLAWLQWAETTLTDKDKEVIPQEIEEVKALIAEHQTFMEEMTRKQPDVDKVTKTYKRRAADPSSLQSHIPVLDKGRAGRKRFPASSLYPSGSQTQIETKNPRVNLLVSKWQQVWLLALERRRKLNDALDRLEELREFANFDFDIWRKKYMRWMNHKKSRVMDFFRRIDKDQDGKITRQEFIDGILSSKFPTSRLEMSAVADIFDRDGDGYIDYYEFVAALHPNKDAYKPITDADKIEDEVTRQVAKCKCAKRFQVEQIGDNKYRFFLGNQFGDSQQLRLVRILRSTVMVRVGGGWMALDEFLVKNDPCRAKGRTNMELREKFILADGASQGMAAFRPRGRRSRPSSRGASPNRSTSVSSQAAQAASPQVPATTTPKILHPLTRNYGKPWLTNSKMSTPCKAAECSDFPVPSAEGTPIQGSKLRLPGYLSGKGFHSGEDSGLITTAAARVRTQFADSKKTPSRPGSRAGSKAGSRASSRRGSDASDFDISEIQSVCSDVETVPQTHRPTPRAGSRPSTAKPSKIPTPQRKSPASKLDKSSKR

SEQ ID NO: 2981 - protein, 1102 aa, Homo sapiens; identical to SEQ ID NO: 2980

SEQ ID NO: 2982 - protein, 687 aa, Homo sapiens
MAAGGAEGGSGPGAAMGDCAEIKSQFRTREGFYKLLPGDGAARRSGPASAQTPVPPQPPQPPPGPASASGPGAAGPASSPPPAGPGPGPALPAVRLSLVRLGEPDSAGAGEPPATPAGLGSGGDRVCFNLGRELYFYPGCCRRGSQRWHTPLTPFLPPLKSIDLNKPIDKRIYKGTQPTCHDFNQFTAATETISLLVGFSAGQVQYLDLIKKDTSKLFNEERLIDKTKVTYLKWLPESESLFLASHASGHLYLYNVSHPCASAPPQYSLLKQAWGFSFYAAKSKAPRNPLAKWAVGEGPLNEFAFSPDGRHLACVSQDGCLRVFHFDSMLLRGLMKSYFGGLLCVCWSPDGRYVVTGGEDDLVTVWSFTEGRVVARGHGHKSWVNAVAFDPYTTRAEEAATAAGADGERSGEEEEEEPEAAGTGSAGGAPLSPLPKAGSITYRFGSAGQDTQFCLWDLTEDVLYPHPPLARTRTLPGTPGTTPPAASSSRGGEPGPGPLPRSLSRSNSLPHPAGGGKAGGPGVAAEPGTPFSIGRFATLTLQERRDRGAEKEHKRYHSLGNISRGGSGGSGSGGEKPSGPVPRSRLDPAKVLGTALCPRIHEVPLLEPLVCKKIAQERLTVLLFLEDCIITACQEGLICTWARPGKAFTDEETEAQTGEGSWPRSPSKSVVEGISSQPGNSPSGTVV

SEQ ID NO: 2983 - protein, 1210 aa, Homo sapiens
RRFRLSAHRAQPCCRCRGLEMPRGVFQQLSNLVLQELNANLSNLTSAFEKATAEKIKCQQEADATNRVILLANRLVGGLASENIRWAESVENFRSQGVTLCGDVLLISAFVSYVGYFTKKYRNELMEKFWIPYIHNLKVPIPITNGLDPLSLLTDDADVATWNNQGLPSDRMSTENATILGNTERWPLIVDAQLQGIKWIKNKYRSELKAIRLGQKSYLDVIEQATSEGDTLLIENIGETVDPALDPLLGRNTIKKGKYIKIGDKEVGVPPQVPPDPTHQVLQPTLQARDAGSVHLINFLVTRDGLEDQLLAAVVAKERPDLEQLKANLTKSQNEFKIVLKELEDSLLARLSAASGNFLGDTALVENLETTKHTASEIEEKVVEAKITEVKINEARENYRPAAERASLLYFILNDLNKINPVYQFSLKAFNVVFEKAIQRTTPANEVKQRVINLTDEITYSVYMYTARGLFERDKLIFLAQVTFQVLSMKKELNPVELDFLLRFPFKAGVVSPVDFLQHQGWGGIKALSEMDEFKNLDSDIEGSAKRWKKLVESEAPEKEIFPKEWKNKTALQKLCMVRCLRPDRMTYAIKNFVEEKMGSKFVEGRSVEFSKSYEESSPSTSIFFILSPGVDPLKDVEALGKKLGFTIDNGKLHNVSLGQGQEVVAENALDVAAEKGHWVILQNIHLVARWLGTLDKKLERYSTGRHEDYRVFIRAEPAPSPETHIIPQGILENAIKITNEPPTGMYANLYKALDLFTQDTLEMCTKEMEFKCMLFALCYFHAVVAERRKFGAQGWNRSYPFNNGDLTISINVLYNYLEANPKVPWDDLRYLFGEIMYGGHITDDWDRRLCRTYLAEYIRTEMLEGDVLLAPGFQIPPNLDYKGYHEYIDENLPPESPYLYGLHPNAEIGFLTVTSEKLFRTVLEMQPKETDSGAGTGVSREEKVKAVLDDILEKIPETFNMAEIMAKAAEKTPYVVVAFQECERMNILTNEMRRSLKELNLGLKGELTITTDVEDLSTALFYDTVPDTWVARAYPSMMGLAAWYANLLLRIRELEAWTTDFALPTTVWLAGFFNPQSFLTAIMQSMARKNEWPLDKMCLSVEVTKKNREDMTAPPREGSYVYGLFMEGARWDTQTGVIAEARLKELTPAMPVIFIKAIPVARMETKNIYECPVYKTRIRGPTYVWTFNLKTKEKAAKWILAAVALLLQV

SEQ ID NO: 2984 - protein, 486 aa, Homo sapiens
FVLFPGIAMETPGASASSLLLPAASRPPRKREAGEAGAATSKQRVLDEEEYIEGLQTVIQRDFFPDVEKLQAQKEYLEAEENGDLERMRQIAIKFGSALGKMSREPPPPYVTPATFETPEVHAGTGVVGNKPRPRGRGLEDGEAGEEEEKEPLPSLDVFLSRYTSEDNASFQEIMEVAKERSRARHAWLYQAEEEFEKRQKDNLELPSAEHQAIESSQASVETWKYKAKNSLMYYPEGVPDEEQLFKKPRQVVHKNTRFLRDPFSQALSRCQLQQAAALNAQHKQGKVGPDGKELIPQESPRVGGFGFVATPSPAPGVNESPMMTWGEVENTPLRVEGSETPYVDRTPGPAFKILEPGRRERLGLKMANEAAAKNRAKKQEALRRVTENLASLTPKGLSPAMSPALQRLVSRTASKYTDRALRASYTPSPARSTHLKNPGPVGCRPPQSTPGAPGSATRTPLTQDPASITDNLLQLPARRKASDFF

SEQ ID NO: 2985 - protein, 569 aa, Homo sapiens
ASTQEAGLLSPPGVGAQRCWNFVACLPVRACADMASNDYTQQATQSYGAYPTQPGQGYSQQSSQPYGQQSYSGYSQSTDTSGYGQSSYSSYGQSQNSYGTQSTPQGYGSTGGYGSSQSSQSSYGQQSSYPGYGQQPAPSSTSGSYGSSSQSSSYGQPQSGSYSQQPSYGGQQQSYGQQQSYNPPRGYGQQNQYNSSSGGGGGGGGGGSYGQDQSSMSGSGGGGGGGGGGGSGGGGGYGNQDQTGAAGSRGYRQQDRGGRCRGGSGGGGSGGAAGYNRSSGGYEPRGRGGGRGGRGGMGGSDRGGFNKFGGPRDQGSRHDSEQDNSDNNTIFVQGLGENVTIESVADYFKQIGIIKTNKKTGQPMINLYTDRETGKLKGEATVSFDDPPSAKAAIDWFDGKEFSGNPIKVSFATRRADFNRGGGNGRGGRGRGGPMGRGGYGGGGSGGGGRGGFPSGGGGGGGQQRAGDWKCPNPTCENMNFSWRNECNQCKAPKPDGPGGGPGGSHMGGNYGDDRRGGRGGYDRGGYRGRGGDRGGFRGGRGGGDRGGFGPGKMDSRGEHRQDRRERPY

SEQ ID NO: 2986 - protein, 569 aa, Homo sapiens; identical to SEQ ID NO: 2985

SEQ ID NO: 2987 - protein, 159 aa, Homo sapiens
GGAKAGGAPHPFTLPFRHVGGLSAAPEEVEGMLWAGARQHGRNWRKRETSPGTQGPLPPVPRVPPGPDGPHAIAPTLSWAIPRQQCSPQPGRLNALPPDRCSGPHFGDRAPESCFPGACSVSGACAFKGTRPACPPQEPSLRSSRNRLREGQTFGRMEI

SEQ ID NO: 2988 - protein, 337 aa, Homo sapiens
MGNDSVSYEYGDYSDLSDRPVDCLDGACLAIDPLRVAPLPLYAAIFLVGVPGNAMVAWVAGKVARRRVGATWLLHLAVADLLCCLSLPILAVPIARGGHWPYGAVGCRALPSIILLTMYASVLLLAALSADLCFLALGPAWCLRFSGACGVQVACGAAWTLALLLTVPSAIYRRLHQEHFPARLQCVVDYGGSSSTENAVTAIRFLFGFLGPLVAVASCHSALLCWAARRCRPLGTAIVVGFFVCWAPYHLLGLVLTVAAPNSALLARALRAEPLIVGLALAHSCLNPMLFLYFGRAQLRRSLPAACHWALRESQGQDESVDSKKSTSHDLVSEMEV

SEQ ID NO: 2989 - protein, 1349 aa, Homo sapiens
KSQLFCFWVGKAGDILSGDQDKEQKDPYFVETPYGYQLDLDFLKYVDDIQKGNTIKRLNIQKRRKPSVPCPEPRTTSGQQGIWTSTESLSSSNSDDNKQCPNFLIARSQVTSTPISKPPPPLETSLPFLTIPENRQLPPPSPQLPKHNLHVTKTLMETRRRLEQERATMQMTPGEFRRPRLASFGGMGTTSSLPSFVGSGNHNPAKHQLQNGYQGNGDYGSYAPAAPTTSSMGSSIRHSPLSSGISTPVTNVSPMHLQHIREQMAIALKRLKELEEQVRTIPVLQVKISVLQEEKRQLVSQLKNQRAASQINVCGVRKRSYSAGNASQLEQLSRARRSGGELYIDYEEEEMETVEQSTQRIKEFRQLTADMQALEQKIQDSSCEASSELRENGECRSVAVGAEENMNDIVVYHRGSRSCKDAAVGTLVEMRNCGVSVTEAMLGVMTEADKEIELQQQTIESLKEKIYRLEVQLRETTHDREMTKLKQELQAAGSRKKVDKATMAQPLVFSKVVEAVVQTRDQMVGSHMDLVDTCVGTSVETNSVGISCQPECKNKVVGPELPMNWWIVKERVEMHDRCAGRSVEMCDKSVSVEVSVCETGSNTEESVNDLTLLKTNLNLKEVRSIGCGDCSVDVTVCSPKECASRGVNTEAVSQVEAAVMAVPRTADQDTSTDLEQVHQFTNTETATLIESCTNTCLSTLDKQTSTQTVETRTVAVGEGRVKDINSSTKTRSIGVGTLLSGHSGFDRPSAVKTKESGVGQININDNYLVGLKMRTIACGPPQLTVGLTASRRSVGVGDDPVGESLENPQPQAPLGMMTGLDHYIERIQKLLAEQQTLLAENYSELAEAFGEPHSQMGSLNSQLISTLSSINSVMKSASTEELRNPDFQKTSLGKITGSYLGYTCKCGGLQSGSPLSSQTSQPEQEVGTSEGKPISSLDAFPTQEGTLSPVNLTDDQIAAGLYACTNNESTLKSIMKKKDGNKDSNGAKKNLQFVGINGGYETTSSDDSSSDESSSSESDDECDVIEYPLEEEEEEEDEDTRGMAEGHHAVNIEGLKSARVEDEMQVQECEPEKVEIRERYELSEKMLSACNLLKNTINDPKALTSKDMRFCLNTLQHEWFRVSSQKSAIPAMVGDYIAAFEAISPDVLRYVINLADGNGNTALHYSVSHSNFEIVKLLLDADVCNVDHQNKAGYTPIMLAALAAVEAEKDMRIVEELFGCGDVNAKASQAGQTALMLAVSHGRIDMVKGLLACGADVNIQDDEGSTALMCASEHGHVEIVKLLLAQPGCNGHLEDNDGSTALSIALEAGHKDIAVLLYAHVNFAKAQSPGTPRLGRKTSPGPTHRGSFD

SEQ ID NO: 2990 - protein, 538 aa, Homo sapiens
ERLRPGQRAIRGPVPAAGACASLPPRAGPAQGRHAALGGAEPGSHLHCGVRLQRREEPGGQQRLLPQRGGSAQTGHQHPGPYECQCPGPQPGGTTPALLSLILEETRGPPASANPDKDHSTQPGTMGRKKIQISRILDQRNRQVTFTKRKFGLMKKAYELSVLCDCEIALIIFNSATRLFQYASTDMDRVLLKYTEYSEPHESRTNTDILETLKRRGIGLDGPELEPDEGPEEPGEKFRRLAGEGGDPALPRPRLYPAAPAMPSPDVVYGALPPPGCDPSGLGEALPAQSRPSPFRPAAPKAGPPGLGHPLFSPSHLTSKTPPPLYLPTEGRRSDLPGGLAGPRGGLNTSRSLYSGLQNPCSTATPGPPLGSFPFLPGGPPVGAEAWARRVPQPAAPPRRPPQSSIKSERLFLRPPGAPATFLRPSPIPCSSPGPWQSLCGLGPPCAGCPWPTAGPGRRSPGGTSPERSPGTARARGDPTSLQAFSEKTHTVTAPLRGGGLEVGGWTQSSAGGLLSFFLFVCISTNKNARGVRGPEKK

SEQ ID NO: 2991 - protein, 385 aa, Homo sapiens
IPQPLHCASPKEEMSLRCGDAARTLGPRVFGRYFCSPVRPLSSLPDKKKELLQNGPDLQDFVSGDLADRSTWDEYKGNLKRQKGERLRLPPWLKTEIPMGKNYNKLKNTLRNLNLHTVCEEARCPNIGECWGGGEYATATATIMLMGDTCTRGCRFCSVKTARNPPPLDASEPYNTAKAIAEWGLDYVVLTSVDRDDMPDGGAEHIAKTVSYLKERNPKILVECLTPDFRGDLKAIEKVALSGLDVYAHNVETVPELQSKVRDPRANFDQSLRVLKHAKKVQPDVISKTSIMLGLGENDEQVYATMKALREADVDCLTLGQYMQPTRRHLKVEEYITPEKFKYWEKVGNELGFHYTASGPLVRSSYKAGEFFLKNLVAKRKTKDL

SEQ ID NO: 2992 - protein, 544 aa, Homo sapiens
PVPGVPTSPPSCCPQDMQGPWVLLLLGLRLQLSLGVIPAEEENPAFWNRQAAEALDAAKKLQPIQKVAKNLILFLGDGLGVPTVTATRILKGQKNGKLGPETPLAMDRFPYLALSKTYNVDRQVPDSAATATAYLCGVKANFQTIGLSAAARFNQCNTTRGNEVISVMNRAKQAGKSVGVVTTTRVQHASPAGTYAHTVNRNWYSDADMPASARQEGCQDIATQLISNMDIDVILGGGRKYMFPMGTPDPEYPADASQNGIRLDGKNLVQEWLAKHQGAWYVWNRTELMQASLDQSVTHLMGLFEPGDTKYEIHRDPTLDPSLMEMTEAALRLLSRNPRGFYLFVEGGRIDHGHHEGVAYQALTEAVMFDDAIERAGQLTSEEDTLTLVTADHSHVFSFGGYTLRGSSIFGLAPSKAQDSKAYTSILYGNGPGYVFNSGVRPDVNESESGSPDYHQQAGVPLSSETHGGEDVAVFARGPQAHLVHGVQEQSFVAHVMAFAACLEPYTACDLAPPACTTDAAHPVAASLPLLAGTLLLLGASAAP

SEQ ID NO: 2993 - protein, 226 aa, Homo sapiens
DAWARLLKMNRLFGKAKPKAPPPSLTDCIGTVDSRAESIDKKISRLDAELVKYKDQIKKMREGPAKNMVKQKALRVLKQKRMYEQQRDNLANSHSTWTSHYTIQSLKDTKTTVDAMKLGVKEMKKAYKQVKIDQIEDLQDQLEDMMEDANEIQEALSRSYGTPELDEDDLEAELDALGDELLADEDSSYLDEAASAPAIPEGVPTDTKNKDGVLVDEFGLPQIPAS

SEQ ID NO: 2994 - protein, 515 aa, Homo sapiens
RRCELTPFIIKTLILPKSWGAFPEDVVMQHVSSSQSSQRHVQWPGACPGAGEEQPACSQPSLPLTLPSPSHQLQQLMVRGGPAGGQNMNVDLQGVGPGLQGSPQVTLAPLPLPSPTSPGFQFSAQPRRFEHGSPSYIQVTSPLSQQVQTQSPTQPSPGPGQALQNVRAGAPGPGLGLCSSSPTGDFVDASVLVRQISLSPSSGGHFVFQDGSGLTQIAQGAQVQLQHPGTPITVRERRPSQPHTQSGGTIHHLGPQSPAAAGGAGLQPLASPSHITTANLPPQISSIIQGQLVQQQQVLQGPPLPRPLGFERTPGVLLPGAGGAAGFGMTSPPPPTSPSRTAVPPGLSSLPLTSVGNTGMKKVPKKLEEIPPASPEMAQMRKQCLDYHHQEMQALKEVFKEYLIELFFLQHFQGNMMDFLAFKERLYGPLQAYLRQNDLDIEEEEEEHFEVINDEVKVVARKHGQPGTPVAIATQLPPRTSAAFPAQQQPLQVLSDGSTVQLPRLSSLGFEDSMC

SEQ ID NO: 2995 - protein, 306 aa, Homo sapiens
SAPSGIDASTHAFARCKHPINVRRDPSIPIYGLRQSILLNTRLQDCYVDSPALTNIWMARTCAKQNINAPAPATTSSWEVVRNPLIASSFSLVKLVLRRQLKNKCCPPPCKFGEGKLSKRLKHKDDSVMKATQQARKRNFISSKSKQPAGHRRPAGGIRESKESSKEKKLTVRQDLEDRYAEHVAATQALPQDSGTAAWKGRVLLPETQKRQQLSEDTLTIHGLPTEGYQALYHAVVEPMLWNPSGTPKRYSLELGKAIKQKLWEALCSQGAISEGAQRDRFPGRKQPGVHEEPVLKKWPKLKSKK

SEQ ID NO: 2996 - protein, 570 aa, Homo sapiens
GKFGIKPSQRRISGKSTFHSEMEGEDTRDDSLYSILEELWQDAEQIKRCQEKHNKLLSRTTFLNKKILNTEWDYEYKDFGKFVHPSPNLILSQKRPHKRDSFGKSFKHNLDLHIHNKSNAAKNLDKTIGHGQVFTQNSSYSHHENTHTGVKFCERNQCGKVLSLKHSLSQNVKFPIGEKANTCTEFGKIFTQRSHFFAPQKIHTVEKPHELSKCVNVFTQKPLLSIYLRVHRDEKLYICTKMCGKGLHPRNSELIMHEKTHTREKPYKCNECGKSFFQVSSLLRHQTTHTGEKLFECSECGKGFSLNSALNIHQKIHTGERHHKCSECGKAFTQKSTLRMHQRIHTGERSYICTQCGQAFIQKAHLIAHQRIHTGEKPYECSDCGKSFPSKSQLQMHKRIHTGEKPYICTECGKAFTNRSNLNTHQKSHTGEKSYICAECGKAFTDRSNFNKHQTIHTGEKPYVCADCGRAFIQKSELITHQRIHTTEKPYKCPDCEKSFSKKPHLKVHQRIHTGEKPYICAECGKAFTDRSNFNKHQTIHTGDKPYKCSDCGKGFTQKSVLSMHRNIHT

SEQ ID NO: 2997 - protein, 585 aa, Homo sapiens
AASTRTMGSRHFEGIYDHVGHFGRFQRVLYFICAFQNISCGIHYLASVFMGVTPHHVCRPPGNVSQVVFHNHSNWSLEDTGALLSSGQKDYVTVQLQNGEIWELSRCSRNKRENTSSLGYEYTGSKKEFPCVDGYIYDQNTWKSTAVTQWNLVCDRKWLAMLIQPLFMFGGPTGIGVTFGYFSDRLGRRVVLWATSSSMFLFGIAAAFAVDYYTFMAARFFLAMVASGYLVVGFVYVMEFIGMKSRTWASVHLHSFFAVGTLLVALTGYLVRTWWLYQMILSTVTVPFILCCWVLPETPFWLLSEGRYEEAQKIVDIMAKWNRASSCKLSELLSLDLQGPVSNSPTEVQKHNLSYLFYNWSITKRTLTVWLIWFTGSLGFYSFSLNSVNLGGNEYLNLFLLGVVEIPAYTFVCIAMDKVGRRTVLAYSLFCSALACGVVMVIPQKHYILGVVTAMVGKILPIGAAFGLIYLYTAELYPTIVRSLAVGSGSMVCRLASILAPFSVDLSSIWIFIPQLFVGTMALLSGVLTLKLPETLGKRLATTWEEAAKLESENESKSSKLLLTTNNSGLEKTEAITPRDSGLGE

SEQ ID NO: 2998 - protein, 478 aa, Homo sapiens
QRPASQLLAPFAAEALPGAPRAAMAQHFSLAACDVVGFDLDHTLCRYNLPESAPLIYNSFAQFLVKEKGYDKELLNVTPEDWDFCCKGLALDLEDGNFLKLANNGTVLRASHGTKMMTPEVLAEAYGKKEWKHFLSDTGMACRSGKYYFYDNYFDLPGALLCARVVDYLTKLNNGQKTFDFWKDIVAAIQHNYKMSAFKENCGIYFPEIKRDPGRYLHSRPESVKKWLRQLKNAGKILLLITSSHSDYCRLLCAYILGNDFTDLFDIVITNALKPGFFSHLPSQRPFRTLENDEEQEALPSLDKPGWYSQGNAVHLYELLKKMTGKPEPKVVYFGDSMHSDIFPARHYSNWETVLILEELRGDEGTRSQRPEESEPLEKKGKYEGPKAKPLNTSSKKWGSFFIDSVLGLENTEDSLVYTWSCKRISTYSTIAIPSIEAIAELPLDYKFTRFSSSNSKTAGYYPNPPLVLSSDETLISK

SEQ ID NO: 2999 - protein, 698 aa, Homo sapiens
LRRRKMTPQSLLQTTLFLLSLLFLVQGAHGRGHREDFRFCSQRNQTHRSSLHYKPTPDLRISIENSEEALTVHAPFPAAHPASRSFPDPRGLYHFCLYWNRHAGRLHLLYGKRDFLLSDKASSLLCFQHQEESLAQGPPLLATSVTSWWSPQNISLPSAASFTFSFHSPPHTGAHNASVDMCELKRDLQLLSQFLKHPQKASRRPSAAPASQQLQSLESKLTSVRFMGDMGSFEEDRINATVWKLQPTAGLQDLHIHSRQEEEQSEIMEYSVLLPRTLFQRTKGRSGEAEKRLLLVDFSSQALFQDKNSSQVLGEKVLGIVVQNTKVANLTEPVVLTFQHQLQPKNVTLQCVFWVEDPTLSSPGHWSSAGCETVRRETQTSCFCNHLTYFAVLMVSSVEVDAVHKHYLSLLSYVGCVVSALACLVTIAAYLCSRVPLPCRRKPRDYTIKVHMNLLLAVFLLDTSFLLSEPVALTGSEAGCRASAIFLHFSLLTCLSWMGLEGYNLYRLVVEVFGTYVPGYLLKLSAMGWGFPIFLVTLVALVDVDNYGPIILAVHRTPEGVIYPSMCWIRDSLVSYITNLGLFSLVFLFNMAMLATMVVQILRLRPHTQKWSHVLTLLCLSLVLGLPWALIFFSFASGTFQLVVLYLFSIITSFQGFLIFIWYWSMRLQARGGPSPLKSNSDSARLPISSGSTSSSRI

SEQ ID NO: 3000 - protein, 312 aa, Homo sapiens
SRGQLDAGQSSEQHGGNRQPEQSRSRSSSSSSSPRRSRSAAEPAMALSMPLNGLKEEDKEPLIELFVKAGSDGESIGNCPFSQRLFMILWLKGVVFSVTTVDLKRKPADLQNLAPGTHPPFITFNSEVKTDVNKIEEFLEEVLCPPKYLKLSPKHPESNTAGMDIFAKFSAYIKNSRPEANEALERGLLKTLQKLDEYLNSPLPDEIDENSMEDIKFSTRKFLDGNEMTLADCNLLPKLHIVKVVAKKYRNFDIPKEMTGIWRYLTNAYSRDEFTNTCPSDKEVEIAYSDVAKRLHQVKSRLLKEVSFMSSP

SEQ ID NO: 3001 - protein, 181 aa, Homo sapiens
  misc_feature (1)...(181): Xaa = any amino acid or nothing
LALTFRSALSTLPGSPMTSSGSPDLQLAWGPSLLPHPPSVWSPALPSCFAGPCPLLPLSDTQGWWGPNWLAPPSAALCRPDAAVWPDLPSSNILLVTPPPAKXSAVAVXPCPRGAHSLERAARQYTISGSSTSQSGKCSKRDTKCCAVTTSWGCFWQKHWKGDEDSGWAFQEGSHLGEGHL

SEQ ID NO: 3002 - protein, 629 aa, Homo sapiens
  misc_feature (1)...(629): Xaa = any amino acid or nothing
VEEAWTVWLHWGVRECLLEEETNQKEEAASSNWTKARGPFWQEDWVWDMRLKMTTRNFPEREVPCDVEVERFTREVPCLSSLGDGWDCENQEGHLRQSALTLEKPGTQEAICEYPGFGEHLIASSDLPPSQRVLATNGFHAPDSNVSGLDCDPALPSYPKSYADKRTGDSDACGKGFNHSMEVIHGRNPVREKPYKYPESVKSFNHFTSLGHQKIMKRGKKSYEGKNFENIFTLSSSLNENQRNLPGEKQYRCTECGKCFKRNSSLVLHHRTHTGEKPYTCNECGKSFSKNYNLIVHQRIHTGEKPYECSKCGKAFSDGSALTQHQRIHTGEKPYECLECGKTFNRNSSLILHQRTHTGEKPYRCNECGKPFTDISHLTVHLRIHTGEKPYECSKCGKAFRDGSYLTQHERTHTGEKPFECAECGKSFNRNSHLIVHQKIHSGEKPYECKECGKTFIESAYLIRHQRIHTGEKPYGCNQCQKLFRNIAGLIRHQRTHTGEKPYECNQCGKAFRDSSCLTKHQRIHTKETPYQCPECGKSFKQNSHLAVHQRLHSREGPSRCPQCGKMFQKSSSLVRHQRAHLGEQPMETXWLGATXVFQFTLTPVFRRRVLDLTPLWSVEKNPLSYPVN

SEQ ID NO: 3003 - protein, 495 aa, Homo sapiens
  misc_feature (1)...(495): Xaa = any amino acid or nothing
SLTEHLSFFQPTAHSLTSLLGTMTTCSRQFTSSSSMKGSCGIGGGIGGGSSRISSVLAGGSCRAPSTYGGGLSVSSRFSSGGACGLGGGYGGGFSSSSSFGSGFGGGYGGGLGAGFGGGLGAGFGGGFAGGDGLLVGSEKVTMQNLNDRLASYLDKVRALEEANADLEVKIRDWYQRQRPSEIKDYSPYFKTIEDLRNKIIAATIENAQPILQIDNARLAADDFRTKYEHELALRQTVEADVNGLRRVLDELTLARTDLEMQIEGLKEELAYLRKNHXEEMLALRGQTGGEVNVETDAAPGVDLSCILNEMRNQYEQMAEKNRRDAETWFLSKTEELNKEVASNSELVQSSRSEVTELRRVLQGLEIELQSQLSMKASLENSLEETKGRYCMQLSQIQGLIGSVEEQLAQLRCEMEQQSQEYQILLDVKTRLEQEIATYRRLLEGEDAHLSSQQASGQSYSSREVFTSSSSSSSRQTRPILKEQSSSSFSQGQSS

SEQ ID NO: 3004 - protein, 312 aa, Homo sapiens
GCAPDTRFFVPEPGGRGAAPWVALVARGGCTFKDKVLVAARRNASAVVLYNEERYGNITLPMSHAGTGNIVVIMISYPKGREILELVQKGIPVTMTIGVGTRHVQEFISGQSVVFVAIAFITMMIISLAWLIFYYIQRFLYTGSQIGSQSHRKETKKVIGQLLLHTVKHGEKGIDVDAENCAVCIENFKVKDIIRILPCKHIFHRICIDPWLLDHRTCPMCKLDVIKALGYWGEPGDVQEMPAPESPPGRDPAANLSLALPDDDGSDESSPPSASPAESEPQCDPSFKGDAGENTALLEAGRSDSRHGGPIS

SEQ ID NO: 3005 - protein, 789 aa, Homo sapiens
TMTIHQFLLLFLFWVCLPHFCSPEIMFRRTPVPQQRILSSRVPRSDGKILHRQKRGWMWNQFFLLEEYTGSDYQYVGKLHSDQDKGDGSLKYILSGDGAGTLFIIDEKTGDIHATRRIDREEKAFYTLRAQAINRRTLRPVEPESEFVIKIHDINDNEPTFPEEIYTASVPEMSVVGTSVVQVTATDADDPSYGNSARVIYSILQGQPYFSVEPETGIIRTALPNMNRENREQYQVVIQAKDMGGQMGGLSGTTTVNITLTDVNDNPPRFPQNTIHLRVLESSPVGTAIGSVKATDADTGKNAEVEYRIIDGDGTDMFDIVTEKDTQEGIITVKKPLDYESRRLYTLKVEAENTHVDPRFYYLGPFKDTTIVKISIEDVDEPPVFSRSSYLFEVHEDIEVGTIIGTVMARDPDSISSPIRFSLDRHTDLDRIFNIHSGNGSLYTSKPLDRELSQWHNLTVIAAEINNPKETTRVAVFVRILDANDNAPQFAVFYDTFVCENARPGQLIQTISAVDKDDPLGGQKFFFSLAAVNPNFTVQDNEDNTARILTRKNGFNRHEISTYLLPVVISDNDYPIQSSTGTLTIRVCACDSQGNMQSCSAEALLLPAGLSTGALIAILLCIIILLVIVVLFAALKRQRKKEPLILSKEDIRDNIVSYNDEGGGEEDTQAFDIGTLRNPAAIEEKKLRRDIIPETLFIPRRTPTAPDNTDVRDFINERLKEHDLDPTAPPYDSLATYAYEGNDSIAESLSSLESGTTEGDQNYDYLREWGPRFNKLPQKYGGGESDKDS

SEQ ID NO: 3006 - protein, 179 aa, Homo sapiens
GRVDKTWWGKSVGIMLTELEKALNSIIDVYHKYSLIKGNFHAVYRDDLKKLLETECPQYIRKKGADVWFKELDINTDGAVNFQEFLILVIKMGVAALNSIIDVYHKYSLIKGNFHAVYRDDLQKLLETECPQYIRKKGADVWFKELDINTDGAVNFQEFLILVIKMGVGSPQKKVASYF

SEQ ID NO: 3007 - protein, 417 aa, Homo sapiens
MYEGIRCLLKALLGFVSLAIGTLYCPRQYRPFPGSLGIEAINVPEPIPDSYYRDMATWPTHAPSVEEGGQGRFGNQADHFLGSLAFAKLLNRSLAVPSWIEYQHHKPPFTNLHVSYQKYFKLEPLQAYHRVISLEDFMEKLAPTHWPPEKRVAYCFEVAAQRSPDKKTCPMKEGNPFGPFWDQFHVSFNKSELFTGISFSASYREQWSQRFSPKEHPVLALPGAPAQFPVLEEHRPLQKYMVWSDEMVKTGEAQIHAHLVRPYVGIHLRIGSDWKNACAMLKDGTAGSHFMASPQCVGYSRSTAAPLTMTMCLPDLKEIQRAVKLWVRSLDAQSVYVATDSESYVPELQQLFKGKVKVVSLKPEVAQVDLYILGQADHFIGNCVSSFTAFVKRERDLQGRPSSFFGMDRPPKLRDEF

SEQ ID NO: 3008 - protein, 412 aa, Homo sapiens
TARGGGSEPGPTMAANYSSTSTRREHVKVKTSSQPGFLERLSETSGGMFVGLMAFLLSFYLIFTNEGRALKTATSLAEGLSLVVSPDSIHSVAPENEGRLVHIIGALRTSKLLSDPNYGVHLPAVKLRRHVEMYQWVETEESREYTEDGQVKKETRYSYNTEWRSEIINSKNFDREIGHKNPRAMAGESFMATAPFVQIGRFFLSSGLIDKVDNFKSLSLSKLEDPHVDIIRRGDFFYHSENPKYPEVGDLRVSFSYAGLSGDDPDLGPAHVVTVIARQRGDQLVPFSTKSGDTLLLLHHGDFSAEEVFHRELRSNSMKTWGLRAAGWMAMFMGLNLMTRILYTLVDWFPVFRDLVNIGLKAFAFCVATSLTLLTVAAGWLFYRPLWALLIAGLALVPILVARTRVPAKKLE

SEQ ID NO: 3009 - protein, 188 aa, Homo sapiens
DAAVAMTAQGGLVANRGRRFKWAIELSGPGGGSRGRSDRGSGQGDSLYPVGYLDKQVPDTSVQETDRILVEKRCWDIALGPLKQIPMNLFIMYMAGNTISIFPTMMVCMMAWRPIQALMAISATFKMLESSSQKFLQGLVYLIGNLMGLALAVYKCQSMGLLPTHASDWLAFIEPPERMEFSGGGLLL

SEQ ID NO: 3010 - protein, 346 aa, Homo sapiens
LIDSAKARYWTQRGTWVYDNALLLLLKCLWSNVVPECTMASSNTVLMRLVASAYSIAQKAGMIVRRVIAEGDLGIVEKTCATDLQTKADRLAQMSICSSLARKFPKLTIIGEEDLPSEEVDQELIEDSQWEEILKQPCPSQYSAIKEEDLVVWVDPLDGTKEYTEGLLDNVTVLIGIAYEGKAIAGVINQPYYNYEAGPDAVLGRTIWGVLGLGAFGFQLKEVPAGKHIITTTRSHSNKLVTDCVAAMNPDAVLRVGGAGNKIIQLIEGKASAYVFASPGCKKWDTCAPEVILHAVGGKLTDIHGNVLQYHKDVKHMNSAGVLATLRNYDYYASRVPESIKNALVP

SEQ ID NO: 3011 - protein, 386 aa, Homo sapiens
SPQKTMRSHTITMTTTSVSSWPYSSHRMRFITNHSDQPPQNFSATPNVTTCPMDEKLLSTVLTTSYSVIFIVGLVGNIIALYVFLGIHRKRNSIQIYLLNVAIADLLLIFCLPFRIMYHINQNKWTLGVILCKVVGTLFYMNMYISIILLGFISLDRYIKINRSIQQRKAITTKQSIYVCCIVWMLALGGFLTMIILTLKKGGHNSTMCFHYRDKHNAKGEAIFNFILVVMFWLIFLLIILSYIKIGKNLLRISKRRSKFPNSGKYATTARNSFIVLIIFTICFVPYHAFRFIYISSQLNVSSCYWKEIVHKTNEIMLVLSSFNSCLDPVMYFLMSSNIRKIMCQLLFRRFQGEPSRSESTSEFKPGYSLHDTSVAVKIQSSSKST

SEQ ID NO: 3012 - protein, 366 aa, Homo sapiens
TEPVGYTKAEEPIAMRSLGALLLLLSACLAVSAGPVPTPPDNIQVQENFNISRIYGKWYNLAIGSTCPWLKKIMDRMTVSTLVLGEGATEAEISMTSTRWRKGVCEETSGAYEKTDTDGKFLYHKSKWNITMESYVVHTNYDEYAIFLTKKFSRHHGPTITAKLYGRAPQLRETLLQDFRVVAQGVGIPEDSIFTMADRGECVPGEQEPEPILIPRVRRAVLPQEEEGSGGGQLVTEVTKKEDSCQLGYSAGPCMGMTSRYFYNGTSMACETFQYGGCMGNGNNFVTEKECLQTCRTVAACNLPIVRGPCRAFIQLWAFDAVKGKCVLFPYGGCQGNGNKFYSEKECREYCGVPGDGDEELLRFSN

SEQ ID NO: 3013 - protein, 104 aa, Homo sapiens
RQMALLKANKDLISAGLKEFSVLLNQQVFNDPLVSEEDMVTVVEDWMNFYINYYRQQVTGEPQERDKALQELRQELNTLANPFLAKYRDFLKSHELPSHPPPSS

SEQ ID NO: 3014 - protein, 124 aa, Homo sapiens
GTSWSTLRAVMSASVVSVVSRVLEEYLSSTPQRLKLLDAYLLYILLTGALQFGYCLFVLTFHFNSLLLFFFFCVGSFHSNVYFLLFTLSFLCFLFIAYFFLIRFFSLFIWFFHVFFIELSLFYF

SEQ ID NO: 3015 - protein, 439 aa, Homo sapiens
AAAEGTAPSPGRVSPPTPARGEPEVTVEIGETYLCRRPDSTWHSAEVIQSRVNDQEGREEFYVHYVGFNRRLDEWVDKNRLALTKTVKDAVQKNSEKYLSELAEQPERKITRNQKRKHDEINHVQKTYAEMDPTTAALEKEHEAITKVKYVDKIHIGNYEIDAWYFSPFPEDYGKQPKLWLCEYCLKYMKYEKSYRFHLGQCQWRQPPGKEIYRKSNISVYEVDGKDHKIYCQNLCLLAKLFLDHKTLYFDVEPFVFYILTEVDRQGAHIVGYFSKEKESPDGNNVACILTLPPYQRRGYGKFLIAFSYELSKLESTVGSPEKPLSDLGKLSYRSYWSWVLLEILRDFRGTLSIKDLSQMTSITQNDIISTLQSLNMVKYWKGQHVICVTPKLVEEHLKSAQYKKPPITGGWGAAVCRGRWGSVSIWTGRSQGLLIAVT

SEQ ID NO: 3016 - protein, 439 aa, Homo sapiens; identical to SEQ ID NO: 3015

SEQ ID NO: 3017 - protein, 222 aa, Homo sapiens
EAHPGGQLGSERNGVRMDEDVLTTLKILIIGESGVGKSSLLLRFTDDTFDPELAATIGVDFKVKTISVDGNKAKLAIWDTAGQERFRTLTPSYYRGAQGVILVYDVTRRDTFVKLDNWLNELETYCTRNDIVNMLVGNKIDKENREVDRNEGLKFARKHSMLFIEASAKTCDGVQCAFEELVEKIIQTPGLWESENQNKGVKLSHREEGQGGGACGGYCSVL

SEQ ID NO: 3018 - protein, 73 aa, Homo sapiens
APVLILQMVKLSIVLTPQFLSHDQGQLTKELQQHVKSVTCPCEYLRKVSECRQMGPGALEQFPGLSCHTSHSG

SEQ ID NO: 3019 - protein, 198 aa, Homo sapiens
PGITMAASLVGKKIVFVTGNAKKLEEVVQILGDKFPCTLVAQKIDLPEYQGEPDEISIQKCQEAVRQVQGPVLVEDTCLCFNALGGLPGPYIKWFLEKLKPEGLHQLLAGFEDKSAYALCTFALSTGDPSQPVRLFRGRTSGRIVAPRGCQDFGWDPCFQPDGYEQTYAEMPKAEKNAVSHRFRALLELQEYFGSLAA

SEQ ID NO: 3020 - protein, 340 aa, Homo sapiens
VSCLPTSCKMITLNNQDQPVPFNSSHPDEYKIAALVFYSCIFIIGLFVNITALWVFSCTTKKRTTVTIYMMNVALVDLIFIMTLPFRMFYYAKDEWPFGEYFCQILGALTVFYPSIALWLLAFISADRYMAIVQPKYAKELKNTCKAVLACVGVWIMTLTTTTPLLLLYKDPDKDSTPATCLKISDIIYLKAVNVLNLTRLTFFFLIPLFIMIGCYLVIIHNLLHGRTSKLKPKVKEKSIRIIITLLVQVLVCFMPFHICFAFLMLGTGENSYNPWGAFTTFLMNLSTCLDVILYYIVSKQFQARVISVMLYRNYLRSMRRKSFRSGSLRSLSNINSEML

SEQ ID NO: 3021 - protein, 623 aa, Homo sapiens
EEFCTWIAVRVGEMETAPKPGKDVPPKKDKLQTKRKKPRRYWEEETVPTTAGASPGPPRNKKNRELRPQRPKNAYILKKSRISKKPQVPKKPREWKNPESQRGLSGAQDPFPGPAPVPVEVVQKFCRIDKSRKLPHSKAKTRSRLEVAEAEEEETSIKAARSELLLAEEPGFLEGEDGEDTAKICQADIVEAVDIASAAKHFDLNLRQFGPYRLNYSRTGRHLAFGGRRGHVAALDWVTKKLMCEINVMEAVRDIRFLHSEALLAVAQNRWLHIYDNQGIELHCIRRCDRVTRLEFLPFHFLLATASETGFLTYLDVSVGKIVAALNARAGRLDVMSQNPYNAVIHLGHSNGTVSLWSPAMKEPLAKILCHRGGVRAVAVDSTGTYMATSGLDHQLKIFDLRGTYQPLSTRTLPHGAGHLAFSQRGLLVAGMGDVVNIWAGQGKASPPSLEQPYLTHRLSGPVHGLQFCPFEDVLGVGHTGGITSMLVPGAGEPNFDGLESNPYRSRKQRQEWEVKALLEKVPAELICLDPRALAEVDVISLEQGKKEQIERLGYDPQAKAPFQPKPKQKGRSSTASLVKRKRKVMDEEHRDKVRQSLQQQHHKEAKAKPTGARPSALDRFVR

SEQ ID NO: 3022 - protein, 749 aa, Homo sapiens
MTAQDSNTSAHAQRDGPELPASSSWRSFWPLSCLSSPPVSAVEVATEGRDREVAKVGQRFCDTTSGELRQARDRDCCVRMPAPVGRRSPPSPRSSMAAVALRDSAQGMTFEDVAIYFSQEEWELLDESQRFLYCDVMLENFAHVTSLGYCHGMENEAIASEQSVSIQVRTSKGNTPTQKTHLSEIKMCVPVLKDILPAAEHQTTSPVQKSYLGSTSMRGFCFSADLHQHQKHYNEEEPWKRKVDEATFVTGCRFHVLNYFTCGEAFPAPTDLLQHEATPSGEEPHSSSSKHIQAFFNAKSYYKWGEYRKASSHKHTLVQHQSVCSEGGLYECSKCEKAFTCKNTLVQHQQIHTGQKMFECSECEESFSKKCHLILHKIIHTGERPYECSDREKAFIHKSEFIHHQRRHTGGVRHECGECRKTFSYKSNLIEHQRVHTGERPYECGECGKSFRQSSSLFRHQRVHSGERPYQCCECGKSFRQIFNLIRHRRVHTGEMPYQCSDCGKSFSCKSELIQHQRIHSGERPYECRECGKSFRQFSNLIRHRSIHTGDRPYECSECEKSFSRKFILIQHQRVHTGERPYECSECGKSFTRKSDLIQHRRIHTGTRPYECSECGKSFRQRSGLIQHRRLHTGERPYECSECGKSFSQSASLIQHQRVHTGERPYQCCECGKSFRQIFNLIRHRRVHTGEMPYQCSDCGKSFSCKSELIQHRRIHSGERPYECSECGKSFSRKSNLIRHRRVHTEERP

SEQ ID NO: 3023 - protein, 838 aa, Homo sapiens
AAGALRCLAAFPRAEPASRGRQSSPARACAASRAERATAAAMAHRCLRLWGRGGCWPRGLQQLLVPGGVGPGEQPCLRTLYRFVTTQARASRNSLLTDIIAAYQRFCSRPPKGFGKYFPNGKNGKKASEPKEVMGEKKESKPAATTRSSGGGGGGGGKRGGKKDDSHWWSRFQKGDIPWDDKDFRMFFLWTALFWGGVMFYLLLKRSGREITWKDFVNNYLSKGVVDRLEVVNKRFVRVTFTPGKTPVDGQYVWFNIGSVDTFERNLETLQQELGIEGENRVPVVYIAESDGSFLLSMLPTVLIIAFLLYTIRRGPAAIGRTGRGMGGLFSVGETTAKVLKDEIDVKFKDVAGCEEAKLEIMEFVNFLKNPKQYQDLGAKIPKGAILTGPPGTGKTLLAKATAGEANVPFITVSGSEFLEMFVGVGPARVRDLFALARKNAPCILFIDEIDAVGRKRGRGNFGGQSEQENTLNQLLVEMDGFNTTTNVVILAGTNRPDILDPALLRPGRFDRQIFIGPPDIKGRASIFKVHLRPLKLDSTLEKDKLARKLASLTPGFSGADVANVCNEAALIAARHLSDSINQKHFEQAIERVIGGLEKKTQVLQPEEKKTVAYHEAGHAVAGWYLEHADPLLKVSIIPRGKGLGYAQYLPKEQYLYTKEQLLDRMCMTLGGRVSEEIFFGRITTGAQDDLRKVTQSAYAQIVQFGMNEKVGQISFDLPRQGDMVLEKPYSEATARLIDDEVRILINDAYKRTVALLTEKKADVEKVALLLLEKEVLDKNDMVELLGPRPFAEKSTYEEFVEGTGSLDEDTSLPEGLKDWNKEREKEKEEPPGEKVAN

SEQ ID NO: 3024 - protein, 394 aa, Homo sapiens
LRACSLPSMSALEKSMHLGRLPSRPPLPGSGGSQSGAKMRMGPGRKRDFSPVPWSQYFESMEDVEVENETGKDTFRVYKSGSEGPVLLLLHGGGHSALSWAVFTAAIISRVQCRIVALDLRSHGETKVKNPEDLSAETMAKDVGNVVEAMYGDLPPPIMLIGHSMGGAIAVHTASSNLVPSLLGLCMIDVVEGTAMDALNSMQNFLRGRPKTFKSLENAIEWSVKSGQIRNLESARVSMVGQVKQCEGITSPEGSKSIVEGIIEEEEEDEEGSESISKRKKEDDMETKKDHPYTWRIELAKTEKYWDGWFRGLSNLFLSCPIPKLLLLAGVDRLDKDLTIGQMQGKFQMQVLPQCGHAVHEDAPDKVAEAVATFLIRHRFAEPIGGFQCVFPGC

SEQ ID NO: 3025 - protein, 104 aa, Homo sapiens
YHGGQRGRAGGSFRSVQGWGGQLRNPFRTSKSLSWKGLSSLLFPLYNLQMGRPRDRKELGRGHSPPHLEGPHMLPSGAARWRWLEAPVLVLEPLVLRPAAAPTP

SEQ ID NO: 3026 - protein, 360 aa, Homo sapiens
AKVPQSTREEKRENGLEARSPAINLMGFNVEEMYEAHAWIQRILSLQNHHIIENNHILYLGRKEHDILSQLQKTSSVSITEIISPGRTELEIEGARADLIEVVMNIEDMLCKVQEEMARKKERGLWRSLGQWTIQQQKTQDEMKENIIFLKCPVPPTQELLDQKKQFEKCGLQVLKVEKIDNEVLMAAFQRKKKMMEEKLHRQPVSHRLFQQVPYQFCNVVCRVGFQRMYSTPCDPKYGAGIYFTKNLKNLAEKAKKISAADKLIYVFEAEVLTGFFCQGHPLNIVPPPLSPGAIDGHDSVVDNVSSPETFVIFSGMQAIPQYLWTCTQEYVQSQDYSSGPMRPFAQHPWRGFASGSPVD

SEQ ID NO: 3027 - protein, 174 aa, Homo sapiens
PFHLGASSNTFRLQVQTQESKAQKEVKMGFIFSKSMNESMKNQKEFMLMNARLQLERQLIMQSEMRERQMAMQIAWSREFLKYFGTFFGLAAISLTAGAIKKKKPAFLVPIVPLSFILTYQYDLGYGTLLERMKGEAEDILETEKSKLQLPRGMITFESIEKARKEQSRFFIDK

SEQ ID NO: 3028 - protein, 116 aa, Homo sapiens
AVGKEPESSSTWVRDREGHIRSRRSMKMLWKLTDNIKYEDCEVSATPARSSVRSQAPSLTLPLLLLSLQPAAKRGWDKLSPAQRPSLGFARRTRGRSCRERTWMLPSLVSEFLHRD

SEQ ID NO: 3029 - protein, 575 aa, Homo sapiens
FREGRFGSSCAVAAPLAGFQGLIECGYLAVDSPPSCWTPGGSNPAAPLPQALLPPRLPPTVLPFLGPGLSGELEMFTLPQKDFRAPTTCLGPTCMQDLGSSHGEDLEGECSRKLDQKLPELRGVGDPAMISSNTSYLSSRGRMIKWFWDSAEEGYRTYHMDEYDEDKNPSGIINLGTSENKLCFDLLSWRLSQRDMQRVEPSLLQYADWRGHLFLREEVAKFLSFYCKSPVPLRPENVVVLNGGASLFSALATVLCEAGEAFLIPTPYYGAITQHVCLYGNIRLAYVYLDSEVTGLDTRPFQLTVEKLEMALREAHSEGVKVKGLILISPQNPLGDVYSPEELQEYLVFAKRHRLHVIVDEVYMLSVFEKSVGYRSVLSLERLPDPQRTHVMWATSKDFGMSGLRFGTLYTENQDVATAVASLCRYHGLSGLVQYQMAQLLRDRDWINQVYLPENHARLKAAHTYVSEELRALGIPFLSRGAGFFIWVDLRKYLLKGTFEEEMLLWRRFLDNKVLLSFGKAFECKEPGWFRFVFSDQVHRLCLGMQRVQQVLAGKSQVAEDPRPSQSQEPSDQRR

SEQ ID NO: 3030 - protein, 194 aa, Homo sapiens
PWLPWSDGRAARSSRKCPRSRFPVQVGKMAVSTVFSTSSLMLALSRHSLLSPLLSVTSFRRFYRGDSPTDSQKDMIEIPLPPWQERTDESIETKRARLLYESRKRGMLENCILLSLFAKEHLQHMTEKQLNLYDRLINEPSNDWDIYYWATEAKPAPEIFENEVMALLRDFAKNKNKEQRLRAPDLEYLFEKPR

SEQ ID NO: 3031 - protein, 272 aa, Homo sapiens
SLWPWILMDDSLMQISLQLLCVYTANFPNGCSSLCWSSCGQHPVQATHRGAVSNSLMLCILKLASQMPLENTTVQQMVFMLLSNLALSHDCKGVIQKSNFLQNFLSLALPKGGNKHLSNLTILWLKLLLNISSGEDGQQMILRLDGCLDLLTEMSKYKHKSSPLLPLLIFHNVCFSPANKPKILANEKVITVLAACLESENQNAQRIGAAALWALIYNYQKAKTALKSPSVKRRVDEAYSLAKKTFPNSEANPLNAYYLKCLENLVQLLNSS

SEQ ID NO: 3032 - protein, 413 aa, Homo sapiens
GISGRPPRPAKRRMGKNPVRPPRALPPVPSQDDIPLSRPKKKKPRTKNTPASASLEGLAQTAGRRPSEGNEPSTKELKEHPEAPVQRRQKKTRLPLELETSSTQKKSSSSSLLRNENGIDAEPAEEAVIQKPRRKTKKTQPAELQYANELGVEDEDIITDEQTTVEQQSVFTAPTGISQPVGKVFVEKSRRFQAADRSELIKTTENIDVSMDVKPSWTTRDVALTVHRAFRMIGLFSHGFLAGCAVWNIVVIYVLAGDQLSNLSNLLQQYKTLAYPFQSLLYLLLALSTISAFDRIDFAKISVAIRNFLALDPTALASFLYFTALILSLSQQMTSDRIHLYTPSSVNGSLWEAGIEEQILQPWIVVNLVVALLVGLSWLFLSYRPGMDLSEELMFSSEVEEYPDKEKEIKASS

SEQ ID NO: 3033 - protein, 477 aa, Homo sapiens
TATSGGIWLRRKWRCHWPRPLPQSCVGTEGGLQVRDTSSRIAKGGVDHTKMSLHGASGGHERSRDRRRSSDRSRDSSHERTESQLTPCIRNVTSPTRQHHVEREKDHSSSRPSSPRPQKASPNGSISSAGNSSRNSSQSSSDGSCKTAGEMVFVYENAKEGARNIRTSERVTLIVDNTRFVVDPSIFTAQPNTMLGRMFGSGREHNFTRPNEKGEYEVAEGIGSTVFRAILDYYKTGIIRCPDGISIPELREACDYLCISFEYSTIKCRDLSALMHELSNDGARRQFEFYLEEMILPLMVASAQSGERECHIVVLTDDDVVDWDEEYPPQMGEEYSQIIYSTKLYRFFKYIENRDVAKSVLKERGLKKIRLGIEGYPTYKEKVKKRPGGRPEVIYNYVQRPFIRMSWEKEEGKSRHVDFQCVKSKSITNLAAAAADIPQDQLVVMHPTPQVDELDILPIHPPSGNSDLDPDAQNPML

SEQ ID NO: 3034 - protein, 656 aa, Homo sapiens
SSLAQHRSVAVLGWPAGWAAARARPAMQGGNSGVRKREEEGDGAGAVAAPPAIDFPAEGPDPEYDESDVPAEIQVLKEPLQQPTFPFAVANQLLLVSLLEHLSHVHEPNPLRSRQVFKLLCQTFIKMGLLSSFTCSDEFSSLRLHHNRAITHLMRSAKERVRQDPCEDISRIQKIRSREVALEAQTSRYLNEFEELAILGKGGYGRVYKVRNKLDGQYYAIKKILIKGATKTVCMKVLREVKVLAGLQHPNIVGYHTAWIEHVHVIQPRADRAAIELPSLEVLSDQEEDREQCGVKNDESSSSSIIFAEPTPEKEKRFGESDTENQNNKSVKYTTNLVIRESGELESTLELQENGLAGLSASSIVEQQLPLRRNSHLEESFTSTEESSEENVNFLGQTEAQYHLMLHIQMQLCELSLWDWIVERNKRGREYVDESACPYVMANVATKIFQELVEGVFYIHNMGIVHRDLKPRNIFLHGPDQQVKIGDFGLACTDILQKNTDWTNRNGKRTPTHTSRVGTCLYASPEQLEGSEYDAKSDMYSLGVVLLELFQPFGTEMERAEVLTGLRTGQLPESLRKRCPVQAKYIQHLTRRNSSQRPSAIQLLQSELFQNSGNVNLTLQMKIIEQEKEIAELKKQLNLLSQDKGVRDDGKDGGVG

SEQ ID NO: 3035 - protein, 354 aa, Homo sapiens
KLSCPCSHGTRVTAVRGPRLKAGVQWHDLGSLQPPPSGLKQSSHLSLSSSWDFRHAPTHPETYTCPKMIEMEQAEAQLAELDLLASMFPGENELIVNDQLAVAELKDCIEKKTMEGRSSKVYFTINMNLDVSDEKMAMFSLACILPFKYPAVLPEITVRSVLLSRSQQTQLNTDLTAFLQKHCHGDVCILNATEWVREHASGYVSRDTSSSPTTGSTVQSVDLIFTRLWIYSHHIYNKCKRKNILEWAKELSLSGFSMPGKPGVVCVEGPQSACEEFWARLRKLNWKRILIRHREDIPFDGTNDETERQRKFSIFEEKVFSVNGARGNHMDFGQLYQFLNTKGCGDVFQMFLWV

SEQ ID NO: 3036 - protein, 762 aa, Homo sapiens
FRFAERRAAAAESDVSAKMAGRSMQAARCPTDELSLTNCAVVNEKDFQSGQHVIVRTSPNHRYTFTLKTHPSVVPGSIAFSLPQRKWAGLSIGQEIEVSLYTFDKAKQCIGTMTIEIDFLQKKSIDSNPYDTDKMAAEFIQQFNNQAFSVGQQLVFSFNEKLFGLLVKDIEAMDPSILNGEPATGKRQKIEVGLVVGNSQVAFEKAENSSLNLIGKAKTKENRQSIINPDWNFEKMGIGGLDKEFSDIFRRAFASRVFPPEIVEQMGCKHVKGILLYGPPGCGKTLLARQIGKMLNAREPKVVNGPEILNKYVGESEANIRKLFADAEEEQRRLGANSGLHIIIFDEIDAICKQRGSMAGSTGVHDTVVNQLLSKIDGVEQLNNILVIGMTNRPDLIDEALLRPGRLEVKMEIGLPDEKGRLQILHIHTARMRGHQLLSADVDIKELAVETKNFSGAELEGLVRAAQSTAMNRHIKASTKVEVDMEKAESLQVTRGDFLASLENDIKPAFGTNQEDYASYIMNGIIKWGDPVTRVLDDGELLVQQTKNSDRTPLVSVLLEGPPHSGKTALAAKIAEESNFPFIKICSPDKMIGFSETAKCQAMKKIFDDAYKSQLSCVVVDDIERLLDYVPIGPRFSNLVLQALLVLLKKAPPQGRKLLIIGTTSRKDVLQEMEMLNAFSTTIHVPNIATGEQLLEALELLGNFKDKERTTIAQQVKGKKVWIGIKKLLMLIEMSLQMDPEYRVRKFLALLREEGASPLDFD

SEQ ID NO: 3037 - protein, 449 aa, Homo sapiens
MLDTGSEHLNRILKALPALQSAGSEGQNGSAESLGEGGTRDSDRARRKLRGGNKEIPTFYPCLVVRSPVTASDLRGTQDFAAYHGLSLILEPLGACNRLSVCVPVHSPPGMRVSPRSPSLRTLVIDPAEPAGAQRLRFSGKERSGEAGSAVEGLAVAVSMGDGGAERDRGPARRAESGGGGGRCGDRSGAGDLRADGGGHSPTEVAGTSASSPAGSRESGADSDGQPGPGEADHCRRILVRDAKGTIREIVLPKGLDLDRPKRTRTFFTAEQLYRLEMEFQRCQYVVGRERTELARQLNLSETQVKVWFQNRRTKQKKDQSRDLEKRASSSASEAFATSNILRLLEQGRLLSVPRAPSLLALTPSLPGLPASHRGTSLGDPRNSSPRLNPLSSASASPPLPPPLPAVCFSSAPLLDLPAGYELGSSAFEPYSWLERKVGSASSCKKANT

SEQ ID NO: 3038 - protein, 140 aa, Homo sapiens
TELLPLCSRSGPKPQSGDPLLQLAQQARPRLSGERLETAPSLLLSRMACVISGWALSRGARTWTWATPTGPVHRAQPAIRSLSAEGALTRLKEEKWPGRYILPNHLTPPFLYKHLGSVPPSHWRSPLISHSVNILALNWR

SEQ ID NO: 3039 - protein, 383 aa, Homo sapiens
ACGIRHEGALPGLTATPEAMLRFLPDLAFSFLLILALGQAVQFQEYVFLQFLGLDKAPSPQKFQPVPYILKKIFQDREAAATTGVSRDLCYVKELGVRGNVLRFLPDQGFFLYPKKISQASSCLQKLLYFNLSAIKEREQLTLAQLGLDLGPNSYYNLGPELELALFLVQEPHVWGQTTPKPGKMFVLRSVPWPQGAVHFNLLDVAKDWNDNPRKNFGLFLEILVKEDRDSGVNFQPEDTCARLRCSLHASLLVVTLNPDQCHPSRKRRAAIPVPKLSCKNLCHRHQLFINFRDLGWHKWIIAPKGFMANYCHGECPFSLTISLNSSNYAFMQALMHAVDPEIPQAVCIPTKLSPISMLYQDNNDNVILRHYEDMVVDECGCG

SEQ ID NO: 3040 - protein, 277 aa, Homo sapiens
ASRLPRGPGCGADMRPLLGLLLVFAGCTFALYLLSTRLPRGRRLGSTEEAGGRSLWFPSDLAELRELSEVLREYRKEHQAYVFLLFCGAYLYKQGFAIPGSSFLNVLAGALFGPWLGLLLCCVLTSVGATCCYLLSSIFGKQLVVSYFPDKVALLQRKVEENRNSLFFFLLFLRLFPMTPNWFLNLSAPILNIPIVQFFFSVLIGLIPYNFICVQTGSILSTLTSLDALFSWDTVFKLLAIAMVALIPGTLIKKFSQKHLQLNETSTANHIHSRKDT

SEQ ID NO: 3041 - protein, 280 aa, Homo sapiens
GLKRRRLCFAKVGDVLGCLSLPPSRSARVLEDISILSCISVDSRIVRTKVPCSVTMSRPRKRLAGTSGSDKGLSGKRTKTENSGEALAKVEDSNPQKTSATKNCLKNLSSHWLMKSEPESRLEKGVDVKFSIEDLKAQPKQTTCWDGVRNYQARNFLRAMKLGEEAFFYHSNCKEPGIAGLMKIVKEAYPDHTQFEKNNPHYDPSSKEDNPKWSMVDVQFVRMMKRFIPLAELKSYHQAHKATGGPLKNMVLFTRQRLSIQPLTQEEFDFVLSLEEKEPS

SEQ ID NO: 3042 - protein, 280 aa, Homo sapiens; identical to SEQ ID NO: 3041

SEQ ID NO: 3043 - protein, 326 aa, Homo sapiens
VGTAPAPGGRDRAPAMGSFQLEDFAAGWIGGAASVIVGHPLDTVKTRLQAGVGYGNTLSCIRVVYRRESMFGFFKGMSFPLASIAVYNSVVFGVFSNTQRFLSQHRCGEPEASPPRTLSDLLLASMVAGVVSVGLGGPVDLIKIRLQMQTQPFRDANLGLKSRAVAPAEQPAYQGPVHCITTIVRNEGLAGLYRGASAMLLRDVPGYCLYFIPYVFLSEWITPEACTGPSPCAVWLAGGMAGAISWGTATPMDVVKSRLQADGVYLNKYKGVLDCISQSYQKEGLKVFFRGITVNAVRGFPMSAAMFLGYELSLQAIRGDHAVTSP

SEQ ID NO: 3044 - protein, 425 aa, Homo sapiens
PPLGAGAGIHARSPHPARRLRLTAAGVGGRASGLLPTPWRRHHGPSGAAPYPAARLWQGPWRCRRPQPMAQRYDELPHYPGIADGPAALAGFPEAVPAAPGPYGPHRPPQPLPPGLDSDGLKRDKDEIYGHPLFPLLALGFEKCELATCSPRDGAGAGLGTPRGGDVCSSDSFNEDNTAFAKQVCSERPFSSNPELDNLMIQAIQVLRFHLLELEKGKMPIDLVIEDRDGGCREDFEDYPAPCPSLPDQNNIWIRDHEDSGSVHLGTPGPSSGGLASQSGDNSSDQGVGLDTSVASPSSGGEDEDLDQEPRRNKKRGIFPKVATNIMRAWLFQHLSHPYPSEEQKKQLAQDTGLTILQVNNWFINARRRIVQPMIDQSNRTGQGAAFSPEGQPIGGYTETEPHVAFRAPASVGMSLNSEGEWHYL

SEQ ID NO: 3045 - protein, 321 aa, Homo sapiens
VAHTQWHTCQRLSQLTHRSILKYLLIDTHACQVLILKHTHASLSLPSCQECFPSSIPSASHMVSHPHPPPSPRWGQTPEGLPAASPCGPGPRSCFSSILPTGDSWGMLACLCTVLWHLPAVPALNRTGDPGPGPSIQKTYDLTRYLEHQLRSLAGTYLNYLGPPFNEPDFNPPRLGAETLPRATVDLEVWRSLNDKLRLTQNYEAYSHLLCYLRGLNRQAATAELRRSLAHFCTSLQGLLGSIAGVMAALGYPLPQPLPGTEPTWTPGPAHSDFLQKMDDFWLLKELQTWLWRSAKDFNRLKKKMQPPAAAVTLHLGAHGF

SEQ ID NO: 3046 - protein, 132 aa, Homo sapiens; identical to SEQ ID NO: 1078

SEQ ID NO: 3047 - protein, 226 aa, Homo sapiens
SLDLLGPIGILQEGRDPGTQGPQEKEKQMPASPMNTDAHLDINFKEGLKKERSYTGQFEANVRDEERQCGCGVVPDSLLMKVLSQRLDQQDCIQKGWVLHGVPRDLDQAHLLNRLGYNPNREFFLNVPFDSIMERLTLRRIDPVTGERYHLMYKPPPTMEIQARLLQNPKDAEEQVKLKMDLFYRNSADLEQLYGSAITLNGDQDPYTVFEYIESGIINPLPKKIP

SEQ ID NO: 3048 - protein, 388 aa, Homo sapiens
RPRRGQGLVQEVQTENVTVAEGGVAEITCRLHQYDGSIVVIQNPARQTLFFNGTRALKDERFQLEEFSPRRVRIRLSDARLEDEGGYFCQLYTEDTHHQIATLTVLVAPENPVVEVREQAVEGGEVELSCLVPRSRPAATLRWYRDRKELKGVSSSQENGKVWSVASTVRFRVDRKDDGGIIICEAQNQALPSGHSKQTQYVLDVQYSPTARIHASQAVVREGDTLVLTCAVTGNPRPNQIRWNRGNESLPERAEAVGETLTLPGLVSADNGTYTCEASNKHGHARALYVLVVYGESRLRPTEGGGGAPDPGAVVEAQTSVPYAIVGGILALLVFLIICVLVGMVWCSVRQKGSYLTHEASGLDEQGEAREAFLNGSDGHKRKEEFFI

SEQ ID NO: 3049 - protein, 758 aa, Homo sapiens
VGCTLRVGVMAAAGSRKRRLAELTVDEFLASGFDSESESESENSPQAETREAREAARSPDKPGGSPSASRRKGRASEHKDQLSRLKDRDPEFYKFLQENDQSLLNFSDSDSSEEEEGPFHSLPDVLEEASEEEDGAEEGEDGDRVPRGLKGKKNSVPVTVAMVERWKQAAKQRLTPKLFHEVVQAFRAAVATTRGDQESAEANKFQVTDSAAFNALVTFCIRDLIGCLQKLLFGKVAKDSSRMLQPSSSPLWGKLRVDIKAYLGSAIQLVSCLSETTVLAAVLRHISVLVPCFLTFPKQCRMLLKRMVVVWSTGEESLRVLAFLVLSRVCRHKKDTFLGPVLKQMYITYVRNCKFTSPGALPFISFMQWTLTELLALEPGVAYQHAFLYIRQLAIHLRNAMTTRKKETYQSVYNWQYVHCLFLWCRVLSTAGPSEALQPLVYPLAQVIIGCIKLIPTARFYPLRMHCIRALTLLSGSSGAFIPVLPFILEMFQQVDFNRKPGRMSSKPINFSVILKLSNVNLQEKAYRDGLVEQLYDLTLEYLHSQAHCIGFPELVLPVVLQLKSFLRECKVANYCRQVQQLLGKVQENSAYICSRRQRVSFGVSEQQAVEAWEKLTREEGTPLTLYYSHWRKLRDREIQLEISGKERLEDLNFPEIKRRKMADRKDEDRKQFKDLFDLNSSEEDDTEGFSERGILRPLSTRHGVEDDEEDEEEGEEDSSNSEDGDPDAEAGLAPGELQQLAQGPEDELEDLQLSEDD

SEQ ID NO: 3050 - protein, 229 aa, Homo sapiens
HLDRYIKSPGSGSSTPAPPSHLLLYLLHPQSTRTMGCCGCSRGCGSGCGGCGSSCGGCGSGCGGCGSGRGGCGSGCGGCSSSCGGCGSRCYVPVCCCKPVCSWVPACSCTSCGSCGGSKGGCGSCGGSKGGCGSCGCSQSSCCKPCCCSSGCGSSCSQSSCCKPCCCSSGCGSSCCQSSCCKPYCCQSSCCKPCSCFSGCGSSCCQSSCYKPCCCQSSCCVPVCCQCKI

SEQ ID NO: 3051 - protein, 1385 aa, Homo sapiens
NIPRWNFQGKSFGVVLVHFSSEEVDMASDSPARSLDEIDLSALRDPAGIFELVELVGNGTYGQVYKGRHVKTGQLAAIKVMDVTGDEEEEIKQEINMLKKYSHHRNIATYYGAFIKKNPPGMDDQLWLVMEFCGAGSVTDLIKNTKGYTLKEEWIAYICREILRGLSHLHQHKVIHRDIKGQNVLLTENAEVKLVDFGVSAQLDRTVGRRNTFIGTPYWMAPEVIACDENPDATYDFKSDLWSLGITAIEMAEGAPPLCDMHPMRALFLIPRNPAPRLKSKKWSKKFQSFIESCLVKNHSQRPATEQLMKHPFIRDQPNERQVRIQLKDHIDRTKKKRGEKDETEYEYSGSEEEEEENDSGEPSSILNLPGESTLRRDFLRLQLANKERSEALRRQQLEQQQRENEEHKRQLLAERQKRIEEQKEQRRRLEEQQRREKELRKQQEREQRRHYEEQMRREEERRRAEHEQEYIRRQLEEEQRQLEILQQQLLHEQALLLEYKRKQLEEQRQAERLQRQLKQERDYLVSLQHQRQEQRPVEKKPLYHYKEGMSPSEKPAWAKEVEERSRLNRQSSPAMPHKVANRISDPNLPPRSESFSISGVQPARTPPMLRPVDPQIPHLVAVKSQGPALTASQSVHEQPTKGLSGFQEALNVTSHRVEMPRQNSDPTSENPPLPTRIEKFDRSSWLRQEEDIPPKVPQRTTSISPALARKNSPGNGSALGPRLGSQPIRASNPDLRRTEPILESPLQRTSSGSSSSSSTPSSQPSSQGGSQPGSQAGSSERTRVRANSKSEGSPVLPHEPAKVKPEESRDITRPSRPASYKKAIDEDLTALAKELRELRIEETNRPMKKVTDYSSSSEESESSEEEEEDGESETHDGTVAVSDIPRLIPTGAPGSNEQYNVGMVGTHGLETSHADSFSGSISREGTLMIRETSGEKKRSGHSDSNGFAGHINLPDLVQQSHSPAGTPTEGLGRVSTHSQEMDSGTEYGMGSSTKASFTPFVDPRVYQTSPTDEDEEDEESSAAALFTSELLRQEQAKLNEARKISVVNVNPTNIRPHSDTPEIRKYKKRFNSEILCAALWGVNLLVGTENGLMLLDRSGQGKVYNLINRRRFQQMDVLEGLNVLVTISGKKNKLRVYYLSWLRNRILHNDPEVEKKQGWITVGDLEGCIHYKVVKYERIKFLVIALKNAVEIYAWAPKPYHKFMAFKSFADLQHKPLLVDLTVEEGQRLKVIFGSHTGFHVIDVDSGNSYDIYIPSHIQGNITPHAIVILPKTDGMEMLVCYEDEGVYVNTYGRITKDVVLQWGEMPTSVAYIHSNQIMGWGEKAIEIRSVETGHLDGVFMHKRAQRLKFLCERNDKVFFASVRSGGSSQVFFMTLNRNSMMNW

SEQ ID NO: 3052 - protein, 205 aa, Homo sapiens; identical to SEQ ID NO: 1084

SEQ ID NO: 3053 - protein, 654 aa, Homo sapiens
FGVRVPSNTQCLVPSFHCMQTSEWDSECLTSLQPLPLPTPPAANEAHLQTAAISLWTVVAAVQAIERKVEIHSRRLLHLEGRTGTAEKKLASCEKTVTELGNQLEGKGAVLGTLLQEYGLLQRRLENLENLLRNRNFWILRLPPGIKGDIPKVPVAFDDVSIYFSTPEWEKLEEWQKELYKNIMKGNYESLISMDYAINQPDVLSQIQPEGEHNTEDQAGPEESEIPTDPSEEPGISTSDILSWIKQEEEPQVGAPPESKESDVYKSTYADEELVIKAEGLARSSLCPEVPVPFSSPPAAAKDAFSDVAFKSQQSTSMTPFGRPATDLPEASEGQVTFTQLGSYPLPPPVGEQVFSCHHCGKNLSQDMLLTHQCSHATEHPLPCAQCPKHFTPQADLSSTSQDHASETPPTCPHCARTFTHPSRLTYHLRVHNSTERPFPCPDCPKRFADQARLTSHRRAHASERPFRCAQCGRSFSLKISLLLHQRGHAQERPFSCPQCGIDFNGHSALIRHQMIHTGERPYPCTDCSKSFMRKEHLLNHRRLHTGERPFSCPHCGKSFIRKHHLMKHQRIHTGERPYPCSYCGRSFRYKQTLKDHLRSGHNGGCGGDSDPSGQPPNPPGPLITGLETSGLGVNTEGLETNQWYGEGSGGGVL

SEQ ID NO: 3054 - protein, 736 aa, Homo sapiens
SCGHKSAYGSYTGLQLFWEDGQELLQHQQLQDLRLCVHLRPQSEKVELSLWTLFVVGKGEPSAVREKLGKAGFAAASGPGGRPGAERASTVLNILHLTAESRWEPNACNRVSSSPAGVGPLDLPVGPLLYFFAPWARASFLCHAFQRPLTGIGLNTVRFTSEFPLHSKDPTAHKLLFTGNYLCKLHPRPRHAPQGSLSDFCHGTEGKDLPSEHNVSVEGVAQDRSPEATLCPQKTCPCDICGLRLKDILHLAEHQTTHPRQKPFVCEAYVKGSEFSANLPRKQVQQNVHNPIRTEEGQASPVKTCRDHTSDQLSTCREGGKDFVATAGFLQCEVTPSDGEPHEATEGVVDFHIALRHNKCCESGDAFNNKSTLVQHQRIHSRERPYECSKCGIFFTYAADLTQHQKVHNRGKPYECCECGKFFSQHSSLVKHRRVHTGESPHVCGDCGKFFSRSSNLIQHKRVHTGEKPYECSDCGKFFSQRSNLIHHKRVHTGRSAHECSECGKSFNCNSSLIKHWRVHTGERPYKCNECGKFFSHIASLIQHQIVHTGERPHGCGECGKAFIRSSDLMKHQRVHTGERPYECNECGKLFSQSSSLNSHRRLHTGERPYQCSECGKFFNQSSSLNNHRRLHTGERPYECSECGKTFRQRSNLRQHLKVHKPDRPYECSECGKAFNQRPTLIRHQKIHIRERSMENVLLPCSQHTPEISSENRPYQGAVNYKLKLVHPSTHPGEVP

SEQ ID NO: 3055 - protein, 895 aa, Homo sapiens
ARRSSSSQGSAAPTPCQVVEASRDQLVAGPSGKMGNREMEELIPLVNRLQDAFSALGQSCLLELPQIAVVGGQSAGKSSVLENFVGRDFLPRGSGIVTRRPLVLQLVTSKAEYAEFLHCKGKKFTDFDEVRLEIEAETDRVTGMNKGISSIPINLRVYSPHVLNLTLIDLPGITKVPVGDQPPDIEYQIRMIMQFITRENCLILAVTPANTDLANSDALKLAKEVDPQGLRTIGVITKLDLMDEGTDARDVLENKLLPLRRGYVGVVNRSQKDIDGKKDIKAAMLAERKFFLSHPAYRHIADRMGTPHLQKVLNQQLTNHIRDTLPNFRNKLQGQLLSIEHEVEAYKNFKPEDPTRKTKALLQMVQQFAVDFEKRIEGSGDQVDTLELSGGAKINRIFHERFPFEIVKMEFNEKELRREISYAIKNIHGIRTGLFTPDMAFEAIVKKQIVKLKGPSLKSVDLVIQELINTVKKCTKKLANFPRLCEETERIVANHIREREGKTKDQVLLLIDIQVSYINTNHEDFIGFANAQQRSSQVHKKTTVGNQVIRKGWLTISNIGIMKGGSKGYWFVLTAESLSWYKDDEEKEKKYMLPLDNLKVRDVEKSFMSSKHIFALFNTEQRNVYKDYRFLELACDSQEDVDSWKASLLRAGVYPDKSVGNNKAENDENGQAENFSMDPQLERQVETIRNLVDSYMSIINKCIRDLIPKTIMHLMINNVKDFINSELLAQLYSSEDQNTLMEESAEQAQRRDEMLRMYQALKEALGIIGDIGTATVSTPAPPPVDDSWIQHSRRSPPPSPTTQRRPTLSAPLARPTSGRGPAPAIPSPGPHSGAPPVPFRPGPLPPFPSSSDSFGAPPQVPSRPTRAPPSVPSRRPPPSPTRPTIIRPLESSLLD

SEQ ID NO: 3056 - protein, 54 aa, Homo sapiens
VVRVTCCPPARSTTERTNAYDEEDCVEMVASGGWNDVACHTTMYFMCEFDKKNM

SEQ ID NO: 3057 - protein, 54 aa, Homo sapiens; identical to SEQ ID NO: 3056

SEQ ID NO: 3058 - protein, 279 aa, Homo sapiens
FLVKLILIILCRCLHSLSRSVQQLRTSFQDHAVWKPLMKVLQNAPDEILVVASSMLCNLLLEFSPSKEPILESGAVELLCGLTQSENPALRVNGIWALMNMAFQAEQKIKADILRSLSTEQLFRLLSDSDLNVLMKTLGLLRNLLSTRPHIDKIMSTHGKQIMQAVTLILEGEHNIEVKEQTLCILANIADGTTAKDLIMTNDDILQKIKYYMGHSHVKLQLAAMFCISNLIWNEEEGSQERQDKLRDMGIVDILHKLSQSPDSNLCDKAKMALQQYLA

SEQ ID NO: 3059 - protein, 170 aa, Homo sapiens
SSWPSLSSQMHFPSFHLHVAAHYGRDSFVRLLLEFKAEVDPLSDKGTTPLQLAIIRERSSCVKILLDHNANIDIQNGFLLRYAVIKSNHSYCRMFLQRGADTNLGRLEDGQTPLHLSALRDDVLCARMLYNYGADTNTRNYEGQTPLAVSISISGSSRPCLDFLQEVTSM

SEQ ID NO: 3060 - protein, 67 aa, Homo sapiens
PPLQLDMDPNCYCADGDSCTCAGSCKCKECKCTSCKKSCCSCCPAGCAKCAQGCICKGATDKCSCCA

SEQ ID NO: 3061 - protein, 97 aa, Homo sapiens
VRRDVRQQATWAMASDLDFSPPEVPEPTFLENLLRYGLFLGAIFQLICVLAIIVPIPKSHEAEAEPSEPRSAEVTRKPKAAVPSVNKRPKKETKKKR

SEQ ID NO: 3062 - protein, 437 aa, Homo sapiens
WKQKYEPLGLDAAGIEEAITAVGSFILKANELLQVIDSSMKNFKAFFRWLYVAMLRMTEDHVLPELNKMTQKDITFVAEFLTEHFNEAPDLYNRKGKYFNVERVGQYLKDEDDDLVSPPNTEGNQWYDFLQNSSHLKESPLLFPYYPRKSLHFVKRRMENIIDQCLQKPADVIGKSMNQAICIPLYRDTRSEDSTRRLFKFPFLWNNKTSNLHYLLFTILEDSLYKMCILRRHTDISQSVSNGLIAIKFGSFTYATTEKVRRSIYSCLDAQFYDDETVTVVLKDTVGREGRDRLLVQLPLSLVYNSEDSAEYQFTGTYSTRLDEQCSAIPTRTMHFEKHWRLLESMKAQYVAGNGFRKVSCVLSSNLRHVRVFEMDIDDEWELDESSDEEEEASNKPVKIKEEVLSESEAENQQAGAAALAPEIVIKVEKLDPELDS

SEQ ID NO: 3063 - protein, 266 aa, Homo sapiens
DKMPSIFAYQSSEVDWCESNFQYSELVAEFYNTFSNIPFFIFGPLMMLLMHPYAQKRSRYIYVVWVLFMIIGLFSMYFHMTLSFLGQLLDEIAILWLLGSGYSIWMPRCYFPSFLGGNRSQFIRLVFITTVVSTLLSFLRPTVNAYALNSIALHILYIVCQEYRKTSNKELRHLIEVSVVLWAVALTSWISDRLLCSFWQRIHFFYLHSIWHVLISITFPYGMVTMALVDANYEMPGETLKVRYWPRDSWPVGLPYVEIRGDDKDC

SEQ ID NO: 3064 - protein, 199 aa, Homo sapiens
AATMADGQMPFSCHYPSRLRRDPFRDSPLSSRLLDDGFGMDPFPDDLTASWPDWALPRLSSAWPGTLRSGMVPRGPTATARFGVPAEGRTPPPFPGEPWKVCVNVHSFKPEELMVKTKDGYVEVSGKHEEKQQEGGIVSKNFTKKIQLPAEVDPVTVFASLSPEGLLIIEAPQVPPYSTFGESSFNNELPQDSQEVTCT

SEQ ID NO: 3065 - protein, 899 aa, Homo sapiens
LSTSLTGSHLFSLGNHSTRENLNAGNFNFPSEGHLVRSTGPGGSFAKHMVAQCVSPKGPLACSRTYFFGATHVPYLGGDSKLPKKTEQIRLLSQIYAAVIEAVLAGIACYAKTSSLTKAKEVAEQTLGSGLDSFELIPFKAALRSKMTFHIHAVNNQGRIVPLDSEDSLSFVKTACMAVYDIPDLLGGNGCLGSVVFSESFLTSQILVKEKDGTVTTETSSVVLTAAVPRFCSWLVEDNEVKLSEKTHQAVRGDESFLGTYLTGGEGAYLYSSNLQSWPEEGNVHFFSSGLLFSHCRHGSIIISKDHMNSISFYDGDSTSTVAALLIDFKSSLLPHLPVHFHGSSNFLMIALFPKSKIYQAFYSEVFSLWKQQDNSGISLKVIQEDGLSVEQKRLHSSAQKLFSALSQPAGEKRSSLKLLSAKLPELDWFLQHFAISSISQEPVMRTHLPVLLQQAEINTTHRIESDKVIISIVTGLPGCHASELCAFLVTLHKECGRWMVYRQIMDSSECFHAAHFQRYLSSALEAQQNRSARQSAYIRKKTRLLVVLQGYTDVIDVVQALQTHPDSNVKASFTIGAITACVEPMSCYMEHRFLFPKCLDQCSQGLVSNVVFTSHTTEQRHPLLVQLQSLIRAANPAAAFILAENGIVTRNEDIELILSENSFSSPEMLRSRYLMYPGWYEGKLNAGSVYPLMVQICVWFGRPLEKTRFVAKCKAIQSSIKPSPFSGNIYHILGKVKFSDSERTMEVCYNTLANSLSIMPVLEGPTPPPDSKSVSQDSSGQQECYLVFIGCSLKEDSIKDWLRQSAKQKPQRKALKTRGMLTQQEIRSIHVKRHLEPLPAGYFYNGTQFVNFFGDKTDFHPLMDQFMNDYVEEANREIEKYNQELEQQEYHDLFELKP

SEQ ID NO: 3066 - protein, 153 aa, Homo sapiens
LAPLRCQPGTRTQPRSHPAANDPSAAMSAAGARGLRATYHRLLDKVELMLPEKLRPLYNHPAGPRTVFFWAPIMKWGLVCAGLADMARPAEKLSTAQSAVLMATGFIWSRYSLVIIPKNWSLFAVNFFVGAAGASQLFRIWRYNQELKAKAHK

SEQ ID NO: 3067 - protein, 338 aa, Homo sapiens
EFARRRVFIAAREMSLLRSLRVFLVARTGSYPAGSLLRQSPQPRHTFYAGPRLSASASSKELLMKLRRKTGYSFVNCKKALETCGGDLKQAEIWLHKEAQKEGWSKAAKLQGRKTKEGLIGLLQEGNTTVLVEVNCETDFVSRNLKFQLLVQQVALGTMMHCQTLKDQPSAYSKGFLNSSELSGLPAGPDREGSLKDQLALAIGKLGENMILKRAAWVKVPSGFYVGSYVHGAMQSPSLHKLVLGKYGALVICETSEQKTNLEDVGRRLGQHVVGMAPLSVGSLDDEPGGEAETKMLSQPYLLDPSITLGQYVQPQGVSVVDFVRFECGEGEEAAETE

SEQ ID NO: 3068 - protein, 558 aa, Homo sapiens
NSRVWGPWTEPSAGSLRPMARKQNRNSKELGLVPLTDDTSHAGPPGPGRALLECDHLRSGVPGGRRRKDWSCSLLVASLAGAFGSSFLYGYNLSVVNAPTPYIKAFYNESWERRHGRPIDPDTLTLLWSVTVSIFAIGGLVGTLIVKMIGKVLGRKHTLLANNGFAISAALLMACSLQAGAFEMLIVGRFIMGIDGGVALSVLPMYLSEISPKEIRGSLGQVTAIFICIGVFTGQLLGLPELLGKESTWPYLFGVIVVPAVVQLLSLPFLPDSPRYLLLEKHNEARAVKAFQTFLGKADVSQEVEEVLAESRVQRSIRLVSVLELLRAPYVRWQVVTVIVTMACYQLCGLNAIWFYTNSIFGKAGIPPAKIPYVTLSTGGIETLAAVFSGLVIEHLGRRPLLIGGFGLMGLFFGTLTITLTLQDHAPWVPYLSIVGILAIIASFCSGPGGIPFILTGEFFQQSQRPAAFIIAGTVNWLSNFAVGLLFPFIQKSLDTYCFLVFATICITGAIYLYFVLPETKNRTYAEISQAFSKRNKAYPPEEKIDSAVTDGKINGRP

SEQ ID NO: 3069 - protein, 186 aa, Homo sapiens
AAGAVVSAMPKAKGKTRRQKFGYSVNRKRLNRNARRKAAPRIECSHIRHAWDHAKSVRQNLAEMGLAVDPNRAVPLRKRKVKAMEVDIEERPKELVRKPYVLNDLEAEASLPEKKGNTLSRDLIDYVRYMVENHGEDYKAMARDEKNYYQDTPKQIRSKINVYKRFYPAEWQDFLDSLQKRKMEVE

SEQ ID NO: 3070 - protein, 565 aa, Homo sapiens
LAEPEVATDSGQQADLPAEGGDPRAEASCSVLHSKPHAMADSRDPASDQMQHWKEQRAAQKADVLTTGAGNPVGDKLNVITVGPRGPLLVQDVVFTDEMAHFDRERIPERVVHAKGAGAFGYFEVTHDITKYSKAKVFEHIGKKTPIAVRFSTVAGESGSADTVRDPRGFAVKFYTEDGNWDLVGNNTPIFFIRDPILFPSFIHSQKRNPQTHLKDPDMVWDFWSLRPESLHQVSFLFSDRGIPDGHRHMNGYGSHTFKLVNANGEAVYCKFHYKTDQGIKNLSVEDAARLSQEDPDYGIRDLFNAIATGKYPSWTFYIQVMTFNQAETFPFNPFDLTKVWPHKDYPLIPVGKLVLNRNPVNYFAEVEQIAFDPSNMPPGIEASPDKMLQGRLFAYPDTHRHRLGPNYLHIPVNCPYRARVANYQRDGPMCMQDNQGGAPNYYPNSFGAPEQQPSALEHSIQYSGEVRRFNTANDDNVTQVRAFYVNVLNEEQRKRLCENIAGHLKDAQIFIQKKAVKNFTEVHPDYGSHIQALLDKYNAEKPKNAIHTFVQSGSHLAAREKANL

SEQ ID NO: 3071 - protein, 395 aa, Homo sapiens
SLGWLERPPALSRAAGDGARRLSGSRRGDVWLTSSAAGLLRSVAGGSWCGGQLRARGGSGRCVARAMTGNAGEWCLMESDPGVFTELIKGFGCRGAQVEEIWSLEPENFEKLKPVHGLIFLFKWQPGEEPAGSVVQDSRLDTIFFAKQVINNACATQAIVSVLLNCTHQDVHLGETLSEFKEFSQSFDAAMKGLALSNSDVIRQVHNSFARQQMFEFDTKTSAKEEDAFHFVSYVPVNGRLYELDGLREGPIDLGACNQDDWISAVRPVIEKRIQKYSEGEIRFNLMAIVSDRKMIYEQKIAELQRQLAEEEPMDTDQGNSMLSAIQSEVAKNQMLIEEEVQKLKRYKIENIRRKHNYLPFIMELLKTLAEHQQLIPLVEKAKEKQNAKKAQETK

SEQ ID NO: 3072 - protein, 891 aa, Homo sapiens
RLRTLAPPGLLLGPPLVPDSRRRHQASLTPLHISGSPQLVGRGDRKLRTEVLVPPAALPAETRQRRSERLPRRTCPRGGAPGPGRSRLPRSLPPPSAIPGLRSPVWAAGLGGGGRREPSRGKGGAALRARHRSTMAELGAGGDGHRGGDGAVRSETAPDSYKVQDKKNASSRPASAISGQNNNHSGNKPDPPPVLRVDDRQRLARERREEREKQLAAREIVWLEREERARQHYEKHLEERKKRLEEQRQKEERRRAAVEEKRRQRLEEDKERHEAVVRRTMERSQKPKQKHNRWSWGGSLHGSPSIHSADPDRRSVSTMNLSKYVDPVISKRLSSSSATLLNSPDRARRLQLSPWESSVVNRLLTPTHSFLARSKSTAALSGEAVIPICPRSASCSPIIMPYKAAHSRNSMDRPKLFVTPPEGSSRRRIIHGTASYKKERERENVLFLTSGTRRAVSPSNPKARQPARSRLWLPSKSLPHLPGTPRPTSSLPPGSVKAAPAQVRPPSPGNIRPVKREVKVEPEKKDPEKEPQKVANEPSLKGRAPLVKVEEATVEERTPAEPEVGPAAPAMAPAPASAPAPASAPAPAPVPTPAMVSAPSSTVNASASVKTSAGTTDPEEATRLLAEKRRLAREQREKEERERREQEELERQKREELAQRVAEERTTRREEESRRLEAEQAREKEEQLQRQAEERALREWEEAERAQRQKEEEARVREEAERVRQEREKHFQREEQERLERKKRLEEIMKRTRRTEATDKKTSDQRNGDIAKGALTGGTEVSALPCTTNAPGNGKPVGSPHVVTSHQSKVTVESTPDLEKQPNENGVSVQNENFEEIINLPIGSKPSRLDVTNSESPEIPLNPILAFDDEGTLGPLPQVDGVQTQQTAEVI

SEQ ID NO: 3073 - protein, 783 aa, Homo sapiens
PPRVCRDHVCLICWDPIAGTGGSRSTMPALPLDQLQITHKDPKTGKLRTSPALHPEQKADRYFVLYKPPPKDNIPALVEEYLERATFVANDLDWLLALPHDKFWCQVIFDETLQKCLDSYLRYVPRKFDEGVASAPEVVDMQKRLHRSVFLTFLRMSTHKESKDHFISPSAFGEILYNNFLFDIPKILDLCVLFGKGNSPLLQKMIGNIFTQQPSYYSDLDETLPTILQVFSNILQHCGLQGDGANTTPQKLEERGRLTPSDMPLLELKDIVLYLCDTCTTLWAFLDIFPLACQTFQKHDFCYRLASFYEAAIPEMESAIKKRRLEDSKLLGDLWQRLSHSRKKLMEIFHIILNQICLLPILESSCDNIQGFIEEFLQIFSSLLQEKRFLRDYDALFPVAEDISLLQQASSVLDETRTAYILQAVESAWEGVDRRKATDAKDPSVIEEPNGEPNGVTVTAEAVSQASSHPENSEEEECMGAAAAVGPAMCGVELDSLISQVKDLLPDLGEGFILACLEYYHYDPEQVINNILEERLAPTLSQLDRNLDREMKPDPTPLLTSRHNVFQNDEFDVFSRDSVDLSRVHKGKSTRKEENTRSLLNDKRAVAAQRQRYEQYSVVVEEVPLQPGESLPYHSVYYEDEYDDTYDGNQVGANDADSDDELISRRPFTIPQVLRTKVPREGQEEDDDDEEDDADEEAPKPDHFVQDPAVLREKAEARRMAFLAKKGYRHDSSTAVAGSPRGHGQSRETTQERRKKEANKATRANHNRRTMADRKRSKGMIPS

SEQ ID NO: 3074 - protein, 82 aa, Homo sapiens
GEARSPPPAAALLDMDPETCPCPSGGSCTCADSCKCEGCKCTSCKKSCCSCCPAECEKCAKDCVCKGGEAAEAEAEKCSCCQ

SEQ ID NO: 3075 - protein, 242 aa, Homo sapiens
SQFSLSQVLVDSAEEGSLAAAAELAAQKREQRLRKFRELHLMRNEARKLNHQEVVEEDKRLKLPANWEAKKARLEWELKEEEKKKECAARGEDYEKVKLLEISAEDAERWERKKKRKNPDLGFSDYAAAQLRQYHRLTKQIKPDMETYERLREKHGEEFFPTSNSLLHGTHVPSTEEIDRMVIDLEKQIEKRDKYSRRRPYNDDADIDYINERNAKFNKKAERFYGKYTAEIKQNLERGTAV

SEQ ID NO: 3076 - protein, 242 aa, Homo sapiens; identical to SEQ ID NO: 3075

SEQ ID NO: 3077 - protein, 322 aa, Homo sapiens
FRLRPRRACAQLLWHPAAGMASWAKGRSYLAPGLLQGQVAIVTGGATGIGKAIVKELLELGSNVVIASRKLERLKSAADELQANLPPTKQARVIPIQCNIRNEEEVNNLVKSTLDTFGKINFLVNNGGGQFLSPAEHISSKGWHAVLETNLTGTFYMCKAVYSSWMKKHGGSIVNIIVPTKAGFPLAVHSGAARAGVYNLTKSLAFEWACSGIRINCVAPGVIYSQTAVENYGSWGQSFFEGSFQKIPAKRIGVPEEVSSVVCFLLSPAASFITGQSVDVDGGRSLYTHSYEVPDHDNWPKGAGDLSVVKKMKETFKEKAKL

SEQ ID NO: 3078 - protein, 1168 aa, Homo sapiens
FVRESGKAPVTFDDITVYLLQEEWVLLSQQQKELCGSNKLVAPLGPTVANPELFRKFGRGPEPWLGSVQGQRSLLEHHPGKKQMGYMGEMEVQGPTRESGQSLPPQKKAYLSHLSTGSGHIEGDWAGRNRKLLKPRSIQKSWFVQFPWLIMNEEQTALFCSACREYPSIRDKRSRLIEGYTGPFKVETLKYHAKSKAHMFCVNALAARDPIWAARFRSIRDPPGDVLASPEPLFTADCPIFYPPGPLGGFDSMAELLPSSRAELEDPGGDGAIPAMYLDCISDLRQKEITDGIHSSSDINILYNDAVESCIQDPSAEGLSEEVPVVFEELPVVFEDVAVYFTREEWGMLDKRQKELYRDVMRMNYELLASLGPAAAKPDLISKLERRAAPWIKDPNGPKWGKGRPPGNKKMVAVREADTQASAADSALLPGSPVEARASCCSSSICEEGDGPRRIKRTYRPRSIQRSWFGQFPWLVIDPKETKLFCSACIERPNLHDKSSRLVRGYTGPFKVETLKYHEVSKAHRLCVNTVEIKEDTPHTALVPEISSDLMANMEHFFNAAYSIAYHSRPLNDFEKILQLLQSTGTVILGKYRNRTACTQFIKYISETLKREILEDVRNSPCVSVLLDSSTDASEQACVGIYIRYFKQMEVKESYITLAPLYSETADGYFETIVSALDELDIPFRKPGWVVGLGTDGSAMLSCRGGLVEKFQEVIPQLLPVHCVAHRLHLAVVDACGSIDLVKKCDRHIRTVFKFYQSSNKRLNELQEGAAPLEQEIIRLKDLNAVRWVASRRRTLHALLVSWPALARHLQRVAEAGGQIGHRAKGMLKLMRGFHFVKFCHFLLDFLSIYRPLSEVCQKEIVLITEVNATLGRAYVALESLRHQAGPKEEEFNASFKDGRLHGICLDKLEVAEQRFQADRERTVLTGIEYLQQRFDADRPPQLKNMEVFDTMAWPSGIELASFGNDDILNLARYFECSLPTGYSEEALLEEWLGLKTIAQHLPFSMLCKNALAQHCRFPLLSKLMAVVVCVPISTSCCERGFKAMNRIRTDERTKLSNEVLNMLMMTAVNGVAVTEYDPQPAIQHWYLTSSGRRFSHVYTCAQVPARSPASARLRKEEMGALYVEEPRTQKPPILPSREAAEVLKDCIMEPPERLLYPHTSQEAPGMS

SEQ ID NO: 3079 - protein, 390 aa, Homo sapiens
FSPLEPRLCSLGGWGALQAGEPCQPSRAGCGREGATMGCTLSAEERAALERSKAIEKNLKEDGISAAKDVKLLLLGAGESGKSTIVKQMKIIHEDGFSGEDVKQYKPVVYSNTIQSLAAIVRAMDTLGIEYGDKERKADAKMVCDVVSRMEDTEPFSAELLSAMMRLWGDSGIQECFNRSREYQLNDSAKYYLDSLDRIGAADYQPTEQDILRTRVKTTGIVETHFTFKNLHFRLFDVGGQRSERKKWIHCFEDVTAIIFCVALSGYDQVLHEDETTNRMHESLKLFDSICNNKWFTDTSIILFLNKKDIFEEKIKKSPLTICFPEYTGPSAFTEAVAYIQAQYESKNKSAHKEIYSHVTCATDTNNIQFVFDAVTDVIIAKNLRGCGLY

SEQ ID NO: 3080 - protein, 318 aa, Homo sapiens; identical to SEQ ID NO: 1112

SEQ ID NO: 3081 - protein, 664 aa, Homo sapiens
IMADMEDLFGSDADSEAERKDSDSGSDSDSDQENAASGSNASGSESDQDERGDSGQPSNKELFGDDSEDEGASHHSGSDNHSERSDNRSEASERSDHEDNDPSDVDQHSGSEAPNDDEDEGHRSDGGSHHSEAEGSEKAHSDDEKWGREDKSDQSDDEKIQNSDDEERAQGSDEDKLQNSDDDEKMQNTDDEERPQLSDDERQQLSEEEKANSDDERPVASDNDDEKQNSDDEEQPQLSDEEKMQNSDDERPQASDEEHRHSDDEEEQDHKSESARGSDSEDEVLRMKRKNAIASDSEADSDTEVPKDNSGTMDLFGGADDISSGSDGEDKPPTPGQPVDENGLPQDQQEEEPIPETRIEVEIPKVNTDLGNDLYFVKLPNFLSVEPRPFDPQYYEDEFEDEEMLDEEGRTRLKLKVENTIRWRIRRDEEGNEIKESNARIVKWSDGSMSLHLGNEVFDVYKAPLQGDHNHLFIRQGTGLQGQAVFKTKLTFRPHSTDSATHRKMTLSLADRCSKTQKIRILPMAGRDPECQRTEMIKKEEERLRASIRRESQQRRMREKQHQRGLSASYLEPDRYDEEEEGEESISLAAIKNRYKGGIREERARIYSSDSDEGSEEDKAQRLLKAKKLTSDEVRPNLFNSRGLSCTQEPTALNEELTDQAGTN

SEQ ID NO: 3082 - protein, 305 aa, Homo sapiens
VEFCLPASADSSSLVAASLAGVRKMATNFLAHEKIWFDKFKYDDAERRFYEQMNGPVAGASRQENGASVILRDIARARENIQKSLAGSSGPGASSGTSGDHGELVVRIASLEVENQSLRGVVQELQQAISKLEARLNVLEKSSPGHRATAPQTQHVSPMRQVEPPAKKPATPAEDDEDDDIDLFGSDNEEEDKEAAQLREERLRQYAEKKAKKPALVAKSSILLDVKPWDDETDMAQLEACVRSIQLDGLVWGASKLVPVGYGIRKLQIQCVVEDDKVGTDLLEEEITKFEEHVQSVDIAAFNKI

SEQ ID NO: 3083 - protein, 305 aa, Homo sapiens; identical to SEQ ID NO: 3082

SEQ ID NO: 3084 - protein, 1307 aa, Homo sapiens
KSIVKIRKRMAAETQTLNFGPEWLRALSSGGSITSPPLSPALPKYKLADYRYGREEMLALFLKDNKIPSDLLDKEFLPILQEEPLPPLALVPFTEEEQRNFSMSVNSAAVLRLTGRGGGGTVVGAPRGRSSSRGRGRGRGECGFYQRSFDEVEGVFGRGGGREMHRSQSWEERGDRRFEKPGRKDVGRPNFEEGGPTSVGRKHEFIRSESENWRIFREEQNGEDEDGGWRLAGSRRDGERWRPHSPDGPRSAGWREHMERRRRFEFDFRDRDDERGYRRVRSGSGSIDDDRDSLPEWCLEDAEEEMGTFDSSGAFLSLKKVQKEPIPEEQEMDFRPVDEGEECSDSEGSHNEEAKEPDKTNKKEGEKTDRVGVEASEETPQTSSSSARPGTPSDHQSQEASQFERKDEPKTEQTEKAEEETRMENSLPAKVPSRGDEMVADVQQPLSQIPSDTASPLLILPPPVPNPSPTLRPVETPVVGAPGMGSVSTEPDDEEGLKHLEQQAEKMVAYLQDSALDDERLASKLQEHRAKGVSIPLMHEAMQKWYYKDPQGEIQGPFNNQEMAEWFQAGYFTMSLLVKRACDESFQPLGDIMKMWGRVPFSPGPAPPPHMGELDQERLTRQQELTALYQMQHLQYQQFLIQQQYAQVLAQQQKAALSSQQQQQLALLLQQFQTLKMRISDQNIIPSVTRSVSVPDTGSIWELQPTASQPTVWEGGSVWDLPLDTTTPGPALEQLQQLEKAKAAKLEQERREAEMRAKREEEERKRQEELRRRQKGILRRQQEEERKRREEEELARRKQEEALRRQREQEIALRRQREEEERQQQEEALRRLEERRREEEERRKQEELLRKQEEEAAKWAREEEEAQRRLEENRLRMEEEAARLRHEEEERKRKELEVQRQKELMRQRQQQQEALRRLQQQQQQQQLAQMKLPSSSTWGQQSNTTACQSQATLSLAEIQKLEEERERQLREEQRRQQRELMKALQQQQQQQQQKLSGWGNVSKPSGTTKSLLEIQQEEARQMQKQQQQQQQHQQPNRARNNTHSNLHTSIGNSVWGSINTGPPNQWASDLVSSIWSNADTKNSNMGFWDDAVKEVGPRNSTNKNKNNASLSKSVGVSNRQNKKVEEEEKLLKLFQGVNKAQDGFTQWCEQMLHALNTANNLDVPTFVSFLKEVESPYEVHDYIRAYLGDTSEAKEFAKQFLERRAKQKANQQRQQQQLPQQQQQPPQQPPQQPQQQDSVWGMNHSTLHSVFQTNQSNNQQSNFEAVQSGKKKKKQKMVRADPSLLGFSVNASSERLNMGEIETLDDY

SEQ ID NO: 3085 - protein, 1307 aa, Homo sapiens; identical to SEQ ID NO: 3084

SEQ ID NO: 3086 - protein, 219 aa, Homo sapiens
LHPAATSTAWLHVPPGLSMALSWVLTVLSLLPLLEAQIPLCANLVPVPITNATLDRITGKWFYIASAFRNEEYNKSVQEIQATFFYFTPNKTEDTIFLREYQTRQDQCIYNTTYLNVQRENGTISRYVGGQEHFAHLLILRDTKTYMLAFDVNDEKNWGLSVYADKPETTKEQLGEFYEALDCLRIPKSDVVYTDWKKDKCEPLEKQHEKERKQEEGES

SEQ ID NO: 3087 - protein, 525 aa, Homo sapiens
CTPVARSMATTATCTRFTDDYQLFEELGKGAFSVVRRCVKKTSTQEYAAKIINTKKLSARDHQKLEREARICRLLKHPNIVRLHDSISEEGFHYLVFDLVTGGELFEDIVAREYYSEADASHCIHQILESVNHIHQHDIVHRDLKPENLLLASKCKGAAVKLADFGLAIEVQGEQQAWFGFAGTPGYLSPEVLRKDPYGKPVDIWACGVILYILLVGYPPFWDEDQHKLYQQIKAGAYDFPSPEWDTVTPEAKNLINQMLTINPAKRITADQALKHPWVCQRSTVASMMHRQETVECLRKFNARRKLKGAILTTMLVSRNFSAAKSLLNKKSDGGVKPQSNNKNSLVSPAQEPAPLQTAMEPQTTVVHNATDGIKGSTESCNTTTEDEDLKVRKQEIIKITEQLIEAINNGDFEAYTKICDPGLTSFEPEALGNLVEGMDFHKFYFENLLSKNSKPIHTTILNPHVHVIGEDAACIAYIRLTQYIDGQGRPRTSQSEETRVWHRRDGKWLNVHYHCSGAPAAPLQ

SEQ ID NO: 3088 - protein, 342 aa, Homo sapiens
SSVAEFPERVQLSQPQNWNFSGAGGAWSLDFAEQLKWSAELARLGESIMDGKQGGMDGSKPAGPRDFPGIRLLSNPLMGDAVSDWSPMHEAAIHGHQLSLRNLISQGWAVNIITADHVSPLHEACLGGHLSCVKILLKHGAQVNGVTADWHTPLFNACVSGSWDCVNLLLQHGASVQPESDLASPIHEAARRGHVECVNSLIAYGGNIDHKISHLGTPLYLACENQQRACVKKLLESGADVNQGKGQDSPLHAVARTASEELACLLMDFGADTQAKNAEGKRPVELVPPESPLAQLFLEREGPPSLMQLCRLRIRKCFGIQQHHKITKLVLPEDLKQFLLHL

SEQ ID NO: 3089 - protein, 120 aa, Homo sapiens; identical to SEQ ID NO: 1121

SEQ ID NO: 3090 - protein, 1338 aa, Homo sapiens
LMEAGGGGGALPAGVETMVLTLGESWPVLVGRRFLSLSAADGSDGSHDSWDVERVAEWPWLSGTIRAVSHTDVTKKDLKVCVEFDGESWRKRRWIEVYSLLRRAFLVEHNLVLAERKSPEISERIVQWPAITYKPLLDKAGLGSITSVRFLGDQQRVFLSKDLLKPIQDVNSLRLSLTDNQIVSKEFQALIVKHLDESHLLKGDKNLVGSEVKIYSLDPSTQWFSATVVNGNPASKTLQVNCEEIPALKIVDPSLIHVEVVHDNLVTCGNSARIGAVKRKSSENNGTLVSKQAKSCSEASPSMCPVQSVPTTVFKEILLGCTAATPPSKDPRQQSTPQAANSPPNLGAKIPQGCHKQSLPEEISSCLNTKSEALRTKPDVCKAGLLSKSSQIGTGDLKILTEPKGSCTQPKTNTDQENRLESVPQALTGLPKECLPTKASSKAELEIANPPELQKHLEHAPSPSDVSNAPEVKAGVNSDSPNNCSGKKVEPSALACRSQNLKESSVKVDNESCCSRSNNKIQNAPSRKSVLTDPAKLKKLQQSGEAFVQDDSCVNIVAQLPKCRECRLDSLRKDKEQQKDSPVFCRFFHFRRLQFNKHGVLRVEGFLTPNKYDNEAIGLWLPLTKNVVGIDLDTAKYILANIGDHFCQMVISEKEAMSTIEPHRQVAWKRAVKGVREMCDVCDTTIFNLHWVCPRCGFGVCVDCYRMKRKNCQQGAAYKTFSWLKCVKSQIHEPENLMPTQIIPGKALYDVGDIVHSVRAKWGIKANCPCSNRQFKLFSKPASKEDLKQTSLAGEKPTLGAVLQQNPSVLEPAAVGGEAASKPAGSMKPACPASTSPLNWLADLTSGNVNKENKEKQPTMPILKNEIKCLPPLPPLSKSSTVLHTFNSTILTPVSNNNSGFLRNLLNSSTGKTENGLKNTPKILDDIFASLVQNKTTSDLSKRPQGLTIKPSILGFDTPHYWLCDNRLLCLQDPNNKSNWNVFRECWKQGQPVMVSGVHHKLNSELWKPESFRKEFGEQEVDLVNCRTNEIITGATVGDFWDGFEDVPNRLKNEKEPMVLKLKDWPPGEDFRDMMPSRFDDLMANIPLPEYTRRDGKLNLASRLPNYFVRPDLGPKMYNAYGLITPEDRKYGTTNLHLDVSDAANVMVYVGIPKGQCEQEEEVLKTIQDGDSDELTIKRFIEGKEKPGALWHIYAAKDTEKIREFLKKVSEEQGQENPADHDPIHDQSWYLDRSLRKRLHQEYGVQGWAIVQFLGDVVFIPAGAPHQVHNLYSCIKVAEDFVSPEHVKHCFWLTQEFRYLSQTHTNHEDKLQVKNVIYHAVKDAVAMLKASESSFGKP

SEQ ID NO: 3091 - protein, 580 aa, Homo sapiens
KRGARRGGWKRKMPSTDLLMLKAFEPYLEILEVYSTKAKNYVNGHCTKYEPWQLIAWSVVWTLLIVWGYEFVFQPESLWSRFKKKCFKLTRKMPIIGRKIQDKLNKTKDDISKNMSFLKVDKEYVKALPSQGLSSSAVLEKLKEYSSMDAFWQEGRASGTVYSGEEKLTELLVKAYGDFAWSNPLHPDIFPGLRKIEAEIVRIACSLFNGGPDSCGCVTSGGTESILMACKAYRDLAFEKGIKTPEIVAPQSAHAAFNKAASYFGMKIVRVPLTKMMEVDVRAMRRAISRNTAMLVCSTPQFPHGVIDPVPEVAKLAVKYKIPLHVDACLGGFLIVFMEKAGYPLEHPFDFRVKGVTSISADTHKYGYAPKGSSLVLYSDKKYRNYQFFVDTDWQGGIYASPTIAGSRPGGISAACWAALMHFGENGYVEATKQIIKTARFLKSELENIKGIFVFGNPQLSVIALGSRDFDIYRLSNLMTAKGWNLNQLQFPPSIHFCITLLHARKRVAIQFLKDIRESVTQIMKNPKAKTTGMGAIYGMAQTTVDRNMGAELSSVFLDSLYSTDTVTQGSQMNGSPKPH

SEQ ID NO: 3092 - protein, 858 aa, Homo sapiens
LCSQNSPEDWVNFSSEKQKRYPWYWTGRKLRSERAMKIQKKLTGCSRLMLLCLSLELLLEAGAGNIHYSVPEETDKGSFVGNIAKDLGLQPQELADGGVRIVSRGRMPLFALNPRSGSLITARRIDREELCAQSMPCLVSFNILVEDKMKLFPVEVEIIDINDNTPQFQLEELEFKMNEITTPGTRVSLPFGQDLDVGMNSLQSYQLSSNPHFSLDVQQGADGPQHPEMVLQSPLDREEEAVHHLILTASDGGEPVRSGTLRIYIQVVDANDNPPAFTQAQYHINVPENVPLGTQLLMVNATDPDEGANGEVTYSFHNVDHRVAQIFRLDSYTGEISNKEPLDFEEYKMYSMEVQAQDGAGLMAKVKVLIKVLDVNDNAPEVTITSVTTAVPENFPPGTIIALISVHDQDSGDNGYTTCFIPGNLPFKLEKLVDNYYRLVTERTLDRELISGYNITITAIDQGTPALSTETHISLLVTDINDNSPVFHQDSYSAYIPENNPRGASIFSVRAHDLDSNENAQITYSLIEDTIQGAPLSAYLSINSDTGVLYALRSFDYEQFRDMQLKVMARDSGDPPLSSNVSLSLFLLDQNDNAPEILYPALPTDGSTGVELAPRSAEPGYLVTKVVAVDRDSGQNAWLSYRLLKASEPGLFSVGLHTGEVRTARALLDRDALKQSLVVAVQDHGQPPLSATVTLTVAVADRIPDILADLGSLEPSAKPNDSDLTLYLVVAEAAVSCVFLAFVIVLLAHRLRRWHKSRLLQASGGGLASTPGSHFVGVDGVRAFLQTYSHEVSLTADSRKSHLIFPQPNYADTLISQESCEKKGFLSAPQSLLEDKKEPFSQVNFCDECISYLEKNNS

SEQ ID NO: 3093 - protein, 1289 aa, Homo sapiens
PPDNQKLGLLEALLKIGDWQHAQNIMDQMPPYYAASHKLIALAICKLIHITIEPLYRSVTSWAVDHAGFLESDPCDSTVGHLLSRVGVPKGAKGSPVNALQNKRAPKQAESFEDLRRDVFNMFCYLGPHLSHDPILFAKVVRIGKSFMKEFQSDGSKQEDKEKTEVILSCLLSITDQVLLPSLSLMDCNACMSEELWGMFKTFPYQHRYRLYGQWKNETYNSHPLLVKVKAQTIDRAKYIMKRLTKENVKPSGRQIGKLSHSNPTILFDYVCFEILSQIQKYDNLITPVVDSLKYLTSLNYDVLACILSNCIIEALANPEKERMKHDDTTISSWLQSLASFCGAVFRKYPIDLAGLLQYVANQLKAGKSFDLLILKEVVQKMAGIEITEEMTMEQLEAMTGGEQLKAEGGYFGQIRNTKKSSQRLKDALLDHDLALPLCLLMAQQRNGVIFQEGGEKHLKLVGKLYDQCHDTLVQFGGFLASNLSTEDYIKRVPSIDVLCNEFHTPHDAAFFLSRPMYAHHISSKYDELKKSEKGSKQQHKVHKYITSCEMVMAPVHEAVVSLHVSKVWDDISPQFYATFWSLTMYDLAVPHTSYEREVNKLKVQMKAIDDNQEMPPNKKKKEKERCTALQDKLLEEEKKQMEHVQRVLQRLKLEKDNWLLAKSTKNETITKFLQLCIFPRCIFSAIDAVYCARFVELVHQQKTPNFSTLLCYDRVFSDIIYTVASCTENEASRYGRFLCCMLETVTRWHSDRATYEKECGNYPGFLTILRATGFDGGNKADQLDYENFRHVVHKWHYKLTKASVHCLETGEYTHIRNILIVLTKILPWYPKVLNLGQALERRVHKICQEEKEKRPDLYALAMGYSGQLKSRKSYMIPENEFHHKDPPPRNAVASVQNGPGGGPSSSSIGSASKSDESSTEETDKSRERSQCGVKAVNKASSTTPKGNSSNGNSGSNSNKAVKENDKEKGKEKEKEKKEKTPATTPEARVLGKDGKEKPKEERPNKDEKARETKERTPKSDKEKEKFKKEEKAKDEKFKTTVPNAESKSTQEREREKEPSRERDIAKEMKSKENVKGGEKTPVSGSLKSPVPRSDIPEPEREQKRRKIDTHPSPSHSSTVKDSLIELKESSAKLYINHTPPPLSKSKEREMDKKDLDKSRERSREREKKDEKDRKERKRDHSNNDREVPPDLTKRRKEENGTMGVSKHKSESPCESPYPNEKDKEKNKSKSSGKEKGSDSFKSEKMDKISSGGKKESRHDKEKIEKKEKRDSSGGKEEKKHHKSSDKHR

SEQ ID NO: 3094 - protein, 296 aa, Homo sapiens
AMLGTREPSRRGAGAVQAEVSERLAMAGPQQQPPYLHLAELTASQFLEIWKHFDADGNGYIEGKELENFFQELEKARKGSGMMSKSDNFGEKMKEFMQKYDKNSDGKIEMAELAQILPTEENFLLCFRQHVGSSAEFMEAWRKYDTDRSGYIEANELKGFLSDLLKKANRPYDEPKLQEYTQTILRMFDLNGDGKLGLSEMSRLLPVQENFLLKFQGMKLTSEEFNAIFTFYDKDRSGYIDEHELDALLKDLYEKNKKEMNIQQLTNYRKSVMSLAEAGKLYRKDLEIVLCSEPPM

SEQ ID NO: 3095 - protein, 328 aa, Homo sapiens
RRPTGRPGALGAPAAGRVGMPLHVKWPFPAVPPLTWTLASSVVMGLVGTYSCFWTKYMNHLTVHNREVLYELIEKRGPATPLITVSNHQSCMDDPHLWGILKLRHIWNLKLMRWTPAAADICFTKELHSHFFSLGKCVPVCRGAEFFQAENEGKGVLDTGRHMPGAGKRREKGDGVYQKGMDFILEKLNHGDWVHIFPEGKVNMSSEFLRFKWGIGRLIAECHLNPIILPLWHVGMNDVLPNSPPYFPRFGQKITVLIGKPFSALPVLERLRAENKSAVEMRKALTDFIQEEFQHLKTQAEQLHNHLQAWEIGLACCLLDSWPAQSWG

SEQ ID NO: 3096 - protein, 873 aa, Homo sapiens
FVPGLREPQWEPAQPSATMSAPSEEEEYARLVMEAQPEWLRAEVKRLSHELAETTREKIQAAEYGLAVLEEKHQLKLQFEELEVDYEAIRSEMEQLKEAFGQAHTNHKKVAADGESREESLIQESASKEQYYVRKVLELQTELKQLRNVLTNTQSENERLASVAQELKEINQNVEIQRGRLRDDIKEYKFREARLLQDYSELEEENISLQKQVSVLRQNQVEFEGLKHEIKRLEEETEYLNSQLEDAIRLKEISERQLEEALETLKTEREQKNSLRKELSHYMSINDSFYTSHLHVSLDGLKFSDDAAEPNNDAEALVNGFEHGGLAKLPLDNKTSTPKKEGLAPPSPSLVSDLLSELNISEIQKLKQQLMQMEREKAGLLATLQDTQKQLEHTRGSLSEQQEKVTRLTENLSALRRLQASKERQTALDNEKDRDSHEDGDYYEVDINGPEILACKYHVAVAEAGELREQLKALRSTHEAREAQHAEEKGRYEAEGQALTEKVSLLEKASRQDRELLARLEKELKKVSDVAGETQGSLSVAQDELVTFSEELANLYHHVCMCNNETPNRVMLDYYREGQGGAGRTSPGGRTSPEARGRRSPILLPKGLLAPEAGRADGGTGDSSPSPGSSLPSPLSDPRREPMNIYNLIAIIRDQIKHLQAAVDRTTELSRQRIASQELGPAVDKDKEALMEEILKLKSLLSTKREQITTLRTVLKANKQTAEVALANLKSKYENEKAMVTETMMKLRNELKALKEDAATFSSLRAMFATRCDEYITQLDEMQRQLAAAEDEKKTLNSLLRMAIQQKLALTQRLELLELDHEQTRRGRAKAAPKTKPATPSVSHTCACASDRAEGTGLANQVFCSEKHSIYCD

SEQ ID NO: 3097 - protein, 293 aa, Homo sapiens
MVKVVPATRGNLPRSQLTGTHQHCQPREPKITASERLRRRPRATARLRAHAAPPEPPLAVFAPPSDRKELLALPVACDPVIASVMSWVQAASLIQGPGDKGDVFDEEADESLLAQREWQSNMQRRVKEGYRDGIDAGKAVTLQQGFNQGYKKGAEVILNYGRLRGTLSALLSWCHLHNNNSTLINKINNLLDAVGQCEEYVLKHLKSITPPSHVVDLLDSIEDMDLCHVVPAEKKIDEAKDERLCENNAEFNKNCSKSHSGIDCSYVECCRTQEHAHSGKPKPHMDFGTDSQF

SEQ ID NO: 3098 - protein, 167 aa, Homo sapiens
GAATLLRSASSAARKAAEAEQVWLHLHRYLSADRRVLGLREWGRPASERECSLCQRLKRELNMGDVEKGKKIFIMKCSQCHTVEKGGKHKTGPNLHGLFGRKTGQAPGYSYTAANKNKGIIWGEDTLMEYLENPKKYIPGTKMIFVGIKKKEERADLIAYLKKATNE

SEQ ID NO: 3099 - protein, 414 aa, Homo sapiens
WAVGQARSFPSHPRMSSWIWSRRWSPSVALRVTCTSTSSQRWTVLALSKPGSQQQVSMHTPAPGPPTAGHTEPPSEPPRRARVAKYRAKFDPRVTAKYDIKALIGRGSFSRVVRVEHRATRQPYAIKMIETKYREGREVCESELRVLRRVRHANIIQLVEVFETQERVYMVMELATGGELFDRIIAKGSFTERDATRVLQMVLDGVRYLHALGITHRDLKPENLLYYHPGTDSKIIITDFGLASARKKGDDCLMKTTCGTPEYIAPEVLVRKPYTNSVDMWALGVIAYILLSGTMPFEDDNRTRLYRQILRGKYSYSGEPWPSVSNLAKDFIDRLLTVDPGARMTALQALRHPWVVSMAASSSMKNLHRSISQNLLKRASSRCQSTKSAQSTRSSRSTRSNKSRRVRERELREL

SEQ ID NO: 3100 - protein, 498 aa, Homo sapiens
ARWNGRWVQVPAWPGPGCGTNASGERQRQLPRAWRPVGRTLGSEPIALAWSPPLYLFPIPLPSWAVSQPTPTLGTMFADLDYDIEEDKLGIPTVPGKVTLQKDAQNLIGISIGGGAQYCPCLYIVQVFDNTPAALDGTVAAGDEITGVNGRSIKGKTKVEVAKMIQEVKGEVTIHYNKLQADPKQGMSLDIVLKKVKHRLVENMSSGTADALGLSRAILCNDGLVKRLEELERTAELYKGMTEHTKNLLRAFYELSQTHRGNGIPQSCAFGDVFSVIGVREPQPAASEAFVKFADAHRSIEKFGIRLLKTIKPMLTDLNTYLNKAIPDTRLTIKKYLDVKFEYLSYCLKVKEMDDEEYSCIALGEPLYRVSTGNYEYRLILRCRQEARARFSQMRKDVLEKMELLDQKHVQDIVFQLQRLVSTMSKYYNDCYAVLRDADVFPIEVDLAHTTLAYGLNQEEFTDGEEEEEEEDTAAGEPSRDTRGAAGPLDKGGSWCDS

SEQ ID NO: 3101 - protein, 325 aa, Homo sapiens
QGMDSKQQCVKLNDGHFMPVLGFGTYAPPEVPRSKALEVTKLAIEAGFRHIDSAHLYNNEEQVGLAIRSKIADGSVKREDIFYTSKLWSTFHRPELVRPALENSLKKAQLDYVDLYLIHSPMSLKPGEELSPTDENGKVIFDIVDLCTTWEAMEKCKDAGLAKSIGVSNFNRRQLEMILNKPGLKYKPVCNQVECHPYFNRSKLLDFCKSKDIVLVAYSALGSQRDKRWVDPNSPVLLEDPVLCALAKKHKRTPALIALRYQLQRGVVVLAKSYNEQRIRQNVQVFEFQLTAEDMKAIDGLDRNLHYFNSDSFASHPNYPYSDEY

SEQ ID NO: 3102 - protein, 317 aa, Homo sapiens
EQPRPPPCGRRPLPLGSAPCRVRLGRAPRQAPAMSMLPSFGFTQEQVACVCEVLQQGGNLERLGRFLWSLPACDHLHKNESVLKAKAVVAFHRGNFRELYKILESHQFSPHNHPKLQQLWLKAHYVEAEKLRGRPLGAVGKYRVRQKFPLPRTIWDGEETSYCFKEKSRGVLREWYAHNPYPSPREKRELAEATGLTTTQVSNWFKNRRQRDRAAEAKERENTENNNSSSNKQNQLSPLEGGKPLMSSSEEEFSPPQSPDQNSVLLLQGNMGHARSSNYSLPGLTASQPSHGLQTHQHQLQDSLLGPLTSSLVDLGS

SEQ ID NO: 3103 - protein, 490 aa, Homo sapiens
LVYSWGCHIMADNDTDRNQTEKLLKRVRELEQEVQRLKKEQAKNKEDSNIRENSSGAGKTKRAFDFSAHGRRHVALRIAYMGWGYQGFASQENTNNTIEEKLFEALTKTRLVESRQTSNYHRCGRTDKGVSAFGQVISLDLRSQFPRGRDSEDFNVKEEANAAAEEIRYTHILNRVLPPDIRILAWAPVEPSFSARFSCLERTYRYFFPRADLDIVTMDYAAQKYVGTHDFRNLCKMDVANGVINFQRTILSAQVQLVGQSPGEGRWQEPFQLCQFEVTGQAFLYHQVRCMMAILFLIGQGMEKPEIIDELLNIEKNPQKPQYSMAVEFPLVLYDCKFENVKWIYDQEAQEFNITHLQQLWANHAVKTHMLYSMLQGLDTVPVPCGIGPKMDGMTEWGNVKPSVIKQTSAFVEGVKMRTYKPLMDRPKCQGLESRIQHFVRRGRIEHPHLFHEEETKAKRDCNDTLEEDNTNLETPTKRVCVDTEIKSII

SEQ ID NO: 3104 - protein, 430 aa, Homo sapiens
VTLIKMNAMLETPELPAVFDGVKLAAVAAVLYVIVRCLNLKSPTAPPDLYFQDSGLSRFLLKSCPLLTKEYIPPLIWGKSGHIQTALYGKMGRVRSPHPYGHRKFITMSDGATSTFDLFEPLAEHCVGDDITMVICPGIANHSEKQYIRTFVDYAQKNGYRCAVLNHLGALPNIELTSPRMFTYGCTWEFGAMVNYIKKTYPLTQLVVVGFSLGGNIVCKYLGETQANQEKVLCCVSVCQGYSALRAQETFMQWDQCRRFYNFLMADNMKKIILSHRQALFGDHVKKPQSLEDTDLSRLYTATSLMQIDDNVMRKFHGYNSLKEYYEEESCMRYLHRIYVPLMLVNAADDPLVHESLLTIPKSLSEKRENVMFVLPLHGGHLGFFEGSVLFPEPLTWMDKLVVEYANAICQWERNKLQCSDTEQVEADLE

SEQ ID NO: 3105 - protein, 417 aa, Homo sapiens
MGLLLMILASAVLGSFLTLLAQFFLLYRRQPEPPADEAARAGEGFRYIKPVPGLLLREYLYGGGRDEEPSGAAPEGGATPTAAPETPAPPTRETCYFLNATILFLFRELRDTALTRRWVTKKIKVEFEELLQTKTAGRLLEGLSLRDVFLGETVPFIKTIRLVRPVVPSATGEPDGPEGEALPAACPEELAFEAEVEYNGGFHLAIDVDLVFGKSAYLFVKLSRVVGRLRLVFTRVPFTHWFFSFVEDPLIDFEVRSQFEGRPMPQLTSIIVNQLKKIIKRKHTLPNYKIRFKPFFPYQTLQGFEEDEEHIHIQQWALTEGRLKVTLLECSRLLIFGSYDREANVHCTLELSSSVWEEKQRSSIKTGTISLTAVFMGWHRVSEAFPGLWYKLLVDLPFWGLEDGGPLLTVPLRQCPG

SEQ ID NO: 3106 - protein, 167 aa, Homo sapiens [sequence omitted]

SEQ ID NO: 3107 - protein, 372 aa, Homo sapiens
TCQDVRSVFSLVRANIFGEESTAGAGWHREEDMRKELQLSLSVTLLLVCGFLYQFTLKSSCLFCLPSFKSHQGLEALLSHRRGIVFLETSERMEPPHLVSCSVESAAKIYPEWPVVFFMKGLTDSTPMPSNSTYPAFSFLSAIDNVFLFPLDMKRLLEDTPLFSWYNQINASAERNWLHISSDASRLAIIWKYGGIYMDTDVISIRPIPEENFLAAQASRYSSNGIFGFLPHHPFLWECMENFVEHYNSAIWGNQGPELMTRMLRVWCKLEDFQEVSDLRCLNISFLHPQRFYPISYREWRRYYEVWDTEPSFNVSYALHLWNHMNQEGRAVIRGSNTLVENLYRKHCPRTYRDLIKGPEGSVTGELGPGNK

SEQ ID NO: 3108 - protein, 257 aa, Homo sapiens
EVALFCFEMAAGMYLEHYLDSIENLPFELQRNFQLMRDLDQRTEDLKAEIDKLATEYMSSARSLSSEEKLALLKQIQEAYGKCKEFGDDKVQLAMQTYEMVDKHIRRLDTDLARFEADLKEKQIESSDYDSSSSKGKKKGRTQKEKKAARARSKGKNSDEEAPKTAQKKLKLVRTSPEYGMPSVTFGSVHPSDVLDMPVDPNEPTYCLCHQVSYGEMIGCDNPDCSIEWFHFACVGLTTKPRGKWFCPRCSQERKKK

SEQ ID NO: 3109 - protein, 871 aa, Homo sapiens
MVAVRAAGPREGASQDEAGTVWAPMTGCPCQCRPGPSWLLVDTLEPETAYPVQRPGPEQAGNQRLQMKRAQFGPHDWLSLPVPPGPSWLLVDTLEPETAYQFSVLAQNKLGTSAFSEVVTVNTLAFPITTPEPLVLVTPPRCLIANRTQQGVLLSWLPPANHSFPIDRYIMEFRVAERWELLDDGIPGTEGEFFAKDLSQDTWYEFRVLAVMQDLISEPSNIAGVSSTDIFPQPDLTEDGLARPVLAGIVATICFLAAAILFSTLAACFVNKQRKRKLKRKKDPPLSITHCRKSLESPLSSGKVSPESIRTLRAPSESSDDQGQPAAKRMLSPTREKELSLYKKTKRAISSKKYSVAKAEAEAEATTPIELISRGPDGRFVMDPAEMEPSLKSRRIEGFPFAEETDMYPEFRQSDEENEDPLVPTSVAALKSQLTPLSSSQESYLPPPAYSPRFQPRGLEGPGGLEGRLQATGQARPPAPRPFHHGQYYGYLSSSSPGEVEPPPFYVPEVGSPLSSVMSSPPLPTEGPFGHPTIPEENGENASNSTLPLTQTPTGGRSPEPWGRPEFPFGGLETPAMMFPHQLPPCDVPESLQPKAGLPRGLPPTSLQVPAAYPGILSLEAPKGWAGKSPGRGPVPAPPAAKWQDRPMQPLVSQGQLRHTSQGMGIPVLPYPEPAEPGAHGGPSTFGLDTRWYEPQPRPRPSPRQARRAEPSLHQVVLQPSRLSPLTQSPLSSRTGSPELAARARPRPGLLQQAEMSEITLQPPAAVSFSRKSTPSTGSPSQSSRSGSPSYRPAMGFTTLATGYPSPPPGPAPAGPGDSLDVFGQTPSPRRTGEELLRPETPPPTLPTLGKLRRDRPAPATSPPERALSKL

SEQ ID NO: 3110 - protein, 279 aa, Homo sapiens
ILGSRTMSLTNTKTGFSVKDILDLPDTNDEEGSVAEGPEEENEGPEPAKRAGPLGQGALDAVQSLPLKNPFYDSSDNPYTRWLASTEGLQYSLHGLAAGAPPQDSSSKSPEPSADESPDNDKETPGGGGDAGKKRKRRVLFSKAQTYELERRFRQQRYLSAPEREHLASLIRLTPTQVKIWFQNHRYKMKRARAEKGMEVTPLPSPRRVAVPVLVRDGKPCHALKAQDLAAATFQAGIPFSAYSAQSLQHMQYNAQYSSASTPQYPTAHPLVQAQQWTW

SEQ ID NO: 3111 - protein, 101 aa, Homo sapiens
PSVASLARRFSGRALWPPSHSVPGNRALCPRLLHGTTLPGGNQRELARQKNMKKQSDSVKGKRRDDGLSAAARKQRDSTPRDSEIMQQKQKKANEKKEEPK

SEQ ID NO: 3112 - protein, 695 aa, Homo sapiens
APMLQIHHFSFKLIFQNIHKSKFISQRLSQNADSTRHTNLSNTHYSDLIVWNCCLFFRNWCNEFFLKSCHFAQEREGSGDLCNSRAEKTKSAACVIFRRFPVAPLIPYPLITKEDINAIEMEEDKRDLISREISKFRDTHKKLEEEKGKKEKERQEIEKERRERERERERERERREREREREREREREKEKERERERERDRDRDRTKERDRDRDRERDRDRDRERSSDRNKDRSRSREKSRDREREREREREREREREREREREREREREREREREREKDKKRDREEDEEDAYERRKLERKLREKEAAYQERLKNWEIRERKKTREYEKEAEREEERRREMAKEAKRLKEFLEDYDDDRDDPKYYRGSALQKRLRDREKEMEADERDRKREKEELEEIRQRLLAEGHPDPDAELQRMEQEAERRRQPQIKQEPESEEEEEEKQEKEEKREEPMEEEEEPEQKPCLKPTLRPISSAPSVSSASGNATPNTPGDESPCGIIIPHENSPDQQQPEEHRPKIGLSLKLGASNSPGQPNSVKRKKLPVDSVFNKFEDEDSDDVPRKRKLVPLDYGEDDKNATKGTVNTEEKRKHIKSLIEKIPTAKPELFAYPLDWSIVDSILMERRIRPWINKKIIEYIGEEEATLVDLVCSKVMAHSPPQSILDDVAMVLDEEAEVFIVKMWRLLIYETEAKKIGLVK

SEQ ID NO: 3113 - protein, 223 aa, Homo sapiens
VCAGIRDPCSTPLAKPAAGGAENLSFGKQPGLETNILKMTTPNKTPPGADPKQLERTGTVREIGSQAVWSLSSCKPGFGVDQLRDDNLETYWQSDGSQPHLVNIQFRRKTTVKTLCIYADYKSDESYTPSKISVRVGNNFHNLQEIRQLELVEPSGWIHVPLTDNHKKPTRTFMIQIAVLANHQNGRDTHMRQIKIYTPVEESSIGKFPRCTTIDFMMYRSIR

SEQ ID NO: 3114 - protein, 537 aa, Homo sapiens
MTSKEESRRQQPTAGPAGQGKLPSPSEPQLPTPPTRSLHHFRRPLSPSREAQAHIAPSSELHLPQSQSAGPPPLGAGTEVELVVPGRDEGSRGALPGSSGVKFVWRKIVRFPVSDQVRTLSISRLMRRLLEMMQTLVQFIIGWRSLLGRTLGTIMNTMYVMMAQILRSHLIKATVIPNRVKMLPYFGIIRNRMMSTHKSKKKIREYYRLLNVEEGCSADEVRESFHKLAKQYHPDSGSNTADSATFIRIEKAYRKVLSHVIEQTNASQSKGEEEEDVEKFKYKTPQHRHYLSFEGIGFGTPTQREKHYRQFRADRAAEQVMEYQKQKLQSQYFPDSVIVKNIRQSKQQKITQAIERLVEDLIQESMAKGDFDNLSGKGKPLKKFSDCSYIDPMTHNLNRILIDNGYQPEWILKQKEISDTIEQLREAILVSRKKLGNPMTPTEKKQWNHVCEQFQENIRKLNKRINDFNLIVPILTRQKVHFDAQKEIVRAQKIYETLIKTKEVTDRNPNNLDQGEGEKTPEIKKGFLNLMDLVEIY

SEQ ID NO: 3115 - protein, 678 aa, Homo sapiens
FRHRCGCLSYCRSRRGIRRVEPLRRARARVGPRFRPLCRMEIIRSNFKSNLHKVYQAIEEADFFAIDGEFSGISDGPSVSALTNGFDTPEERYQKLKKHSMDFLLFQFGLCTFKYDYTDSKYITKSFNFYVFPKPFNRSSPDVKFVCQSSSIDFLASQGFDFNKGFRKGIPYLNQEEERQLREQYDEKRSQANGAGALSYVSPNTSKCPVTIPEDQKKFIDQVVEKIEDLLQSEENKNLDLEPCTGFQRKLIYQTLSWKYPKGIHVETLETEKKERYIVISKVDEEERKRREQQKHAKEQEELNDAVGFSRVIHAIANSGKLVIGHNMLLDVMHTVHQFYCPLPADLSEFKEMTTCVFPRLLDTKLMASTQPFKDIINNTSLAELEKRLKETPFNPPKVESAEGFPSYDTASEQLHEAGYDAYITGLCFISMANYLGSFLSPPKIHVSARSKLIEPFFNKLFLMRVMDIPYLNLEGPDLQPKRDHVLHVTFPKEWKTSDLYQLFSAFGNIQISWIDDTSAFVSLSQPEQVKIAVNTSKYAESYRIQTYAEYMGRKQEEKQIKRKWTEDSWKEADSKRLNPQCIPYTLQNHYYRNNSFTAPSTVGKRNLSPSQEEAGLEDGVSGEISDTELEQTDSCAEPLSEGRKKAKKLKRMKKELSPAGSISKNSPATLFEVPDTW

SEQ ID NO: 3116 - protein, 479 aa, Homo sapiens
TREAPMALAVAPWGRQWEEARALGRAVRMLQRLEEQCVDPRLSVSPPSLRDLLPRTAQLLREVAHSRRAAGGGGPGGPGGSGDFLLIYLANLEAKSRQVAALLPPRGRRSANDELFRAGSRLRRQLAKLAIIFSHMHAELHALFPGGKYCGHMYQLTKAPAHTFWRESCGARCVLPWAEFESLLGTCHPVEPGCTALALRTTIDLTCSGHVSIFEFDVFTRLFQPWPTLLKNWQLLAVNHPGYMAFLTYDEVQERLQACRDKPGSYIFRPSCTRLGQWAIGYVSSDGSILQTIPANKPLSQVLLEGQKDGFYLYPDGKTHNPDLTELGQAEPQQRIHVSEEQLQLYWAMDSTFELCKICAESNKDVKIEPCGHLLCSCCLAAWQHSDSQTCPFCRCEIKGWEAVSIYQFHGQATAEDSGNSSDQEGRELELGQVPLSAPPLPPRPDLPPRKPRNAQPKVRLLKGNSPPAALGPQDPAPA

SEQ ID NO: 3117 - protein, 1084 aa, Homo sapiens
ERHSSPLLQHILTHALMRNKKHSNNWLAQHWFQSSIILCFSPVGRTLRVRARKFPAIVNCTAIDWFHAWPQEALVSVSRRFIEETKGIEPVHKDSISLFMAHVHTTVNEMSTRYYQNERRHNYTTPKSFLEQISLFKNLLKKKQNEVSEKKERLVNGIQKLKTTASQVGDLKARLASQEAELQLRNHDAEALITKIGLQTEKVSREKTIADAEERKVTAIQTEVFQKQRECEADLLKAEPALVAATAALNTLNRVNLSELKAFPNPPIAVTNVTAAVMVLLAPRGRVPKDRSWKAAKVFMGKVDDFLQALINYDKEHIPENCLKVVNEHYLKDPEFNPNLIRTKSFAAAGLCAWVINIIKFYEVYCDVEPKRQALAQANLELAAATEKLEAIRKKLVVSANYDIEKSEKIRWGQSIKSFEAQEKTLCGDVLLTAAFVSYVGPFTRQYRQELVHCKWVPFLQQKVSIPLTEGLDLISMLTDDATIAAWNNEGLPSDRMSTENAAILTHCERWPLVIDPQQQGIKWIKNKYGMDLKVTHLGQKGFLNAIETALAFGDVILIENLEETIDPVLDPLLGRNTIKKGKYIRIGDKECEFNKNFRLILHTKLANPHYKPELQAQTTLLNFTVTEDGLEAQLLAEVVSIERPDLEKLKLVLTKHQNDFKIELKYLEDDLLLRLSAAEGSFLDDTKLVERLEATKTTVAEIEHKVIEAKENERKINEARECYRPVAARASLLYFVINDLQKINPLYQFSLKAFNVLFHRAIEQADKVEDMQGRISILMESITHAVFLYTSQALFEKDKLTFLSQMAFQILLRKKEIDPLELDFLLRFTVEHTHLSPVDFLTSQSWSAIKAIAVMEEFRGIDRDVEGSAKQWRKWVESECPEKEKLPQEWKKKSLIQKLILLRAMRPDRMTYALRNFVEEKLGAKYVERTRLDLVKAFEESSPATPIFFILSPGVDALKDLEILGKRLGFTIDSGKFHNVSLGQGQETVAEVALEKASKGGHWVILQNVHLVAKWLGTLEKLLERFSQGSHRDYRVFMSAESAPTPDEHIIPQGLLENSIKITNEPPTGMLANLHAALYNFDQ

SEQ ID NO: 3118 - protein, 75 aa, Homo sapiens
PYSLSTSCLGSPTSPRLEMDPNCSCATGGSCTCTGSCKCKECKCNSCKKSECGAISRNLGLSQVRGRKPELGMEE

SEQ ID NO: 3119 - protein, 959 aa, Homo sapiens
PLATLTMEEQGHSEMEIIPSESHPHIQLLKSNRELLVTHIRNTQCLVDNLLKNDYFSAEDAEIVCACPTQPDKVRKILDLVQSKGEEVSEFFLYLLQQLADAYVDLRPWLLEIGFSPSLLTQSKVVVNTDPVSRYTQQLRHHLGRDSKFVLCYAQKEELLLEEIYMDTIMELVGFSNESLGSLNSLACLLDHTTGILNEQGETIFILGDAGVGKSMLLQRLQSLWATGRLDAGVKFFFHFRCRMFSCFKESDRLCLQDLLFKHYCYPERDPEEVFAFLLRFPHVALFTFDGLDELHSDLDLSRVPDSSCPWEPAHPLVLLANLLSGKLLKGASKLLTARTGIEVPRQFLRKKVLLRGFSPSHLRAYARRMFPERALQDRLLSQLEANPNLCSLCSVPLFCWIIFRCFQHFRAAFEGSPQLPDCTMTLTDVFLLVTEVHLNRMQPSSLVQRNTRSPVETLHAGRDTLCSLGQVAHRGMEKSLFVFTQEEVQASGLQERDMQLGFLRALPELGPGGDQQSYEFFHLTLQAFFTAFFLVLDDRVGTQELLRFFQEWMPPAGAATTSCYPPFLPFQCLQGSGPAREDLFKNKDHFQFTNLFLCGLLSKAKQKLLRHLVPAAALRRKRKALWAHLFSSLRGYLNSLPRVQVESFNQVQAMPTFIWMLRCIYETQSQKVGQLAARGICANYLKLTYCNACSADCSALSFVLHHFPKRLALDLDNNNLNDYGVRELQPCFSRLTVLRLSVNQITDGGVKVLSEELTKYKIVTYLGLYNNQITDVGARYVTKILDECKGLTHLKLGKNKITSEGGKYLALAVKNSKSISEVGMWGNQVGDEGAKAFAEALRNHPSLTTLSLASNGISTEGGKSLARALQQNTSLEILWLTQNELNDEVAESLAEMLKVNQTLKHLWLIQNQITAKGTAQLADALQSNTGITEICLNGNLIKPEEAKVYEDEKRIICF

SEQ ID NO: 3120 - protein, 320 aa, Homo sapiens
QLWGFAAGSDSRPAMGCDGGTIPKRHELVKGPKKVEKVDKDAELVAQWNYCTLSQEILRRPIVACELGRLYNKDAVIEFLLDKSAEKALGKAASHIKSIKNVTELKLSDNPAWEGDKGNTKGDKHDDLQRARFICPVVGLEMNGRHRFCFLRCCGCVFSERALKEIKAEVCHTCGAAFQEDDVIVLNGTKEDVDVLKTRMEERRLRAKLEKKTKKPKAAESVSKPDVSEEAPGPSKVKTGKPEEASLDSREKKTNLAPKSTAMNESSSGKAGKPPCGATKRSIADSEESEAYKSLFTTHSSAKRSKEESAHWVTHTSYCF

SEQ ID NO: 3121 - protein, 495 aa, Homo sapiens
HASGPTRPVSWSFHKLKTMKHLLLLLLCVFLVKSQGVNDNEEGFFSARGHRPLDKKREEAPSLRPAPPPISGGGYRARPAKAAATQKKVERKAPDAGGCLHADPDLGVLCPTGCQLQEALLQQERPIRNSVDELNNNVEAVSQTSSSSFQYMYLLKDLWQKRQKQVKDNENVVNEYSSELEKHQLYIDETVNSNIPTNLRVLRSILENLRSKIQKLESDVSAQMEYCRTPCTVSCNIPVVSGKECEEIIRKGGETSEMYLIQPDSSVKPYRVYCDMNTENGGWTVIQNRQDGSVDFGRKWDPYKQGFGNVATNTDGKNYCGLPGEYWLGNDKISQLTRMGPTELLIEMEDWKGDKVKAHYGGFTVQNEANKYQISVNKYRGTAGNALMDGASQLMGENRTMTIHNGMFFSTYDRDNDGWLTSDPRKQCSKEDGGGWWYNRCHAANPNGRYYWGGQYTWDMAKHGTDDGVVWMNWKGSWYSMKKMSMKIRPFFPQQ

SEQ ID NO: 3122 - protein, 495 aa, Homo sapiens; identical to SEQ ID NO: 3121

SEQ ID NO: 3123 - protein, 495 aa, Homo sapiens; identical to SEQ ID NO: 3121

SEQ ID NO: 3124 - protein, 180 aa, Homo sapiens
RVDDFVLLRSRLALRWLSHVRRPSRRVPRMPRGSRSRTSRMAPPASRAPQMRAAPRPAPVAQPPAAAPPSAVGSSAAAPRQPGLMAQMATTAAGVAVGSAVGHTLGHAITGGFSGGSNAEPARPDITYQEPQGTQPAQQQQPCLYEIKQFLECAQNQGDIKLCEGFNEVLKQCRLANGLA

SEQ ID NO: 3125 - protein, 189 aa, Homo sapiens
GNSYNHRSLAAYPYMSHSQHSPYLQSYHNSSAAAQTRGDDTDQQKTTVIENGEIRFNGKGKKIRKPRTIYSSLQLQALNHRFQQTQYLALPERAELAASLGLTQTQVKIWFQNKRSKFKKLLKQGSNPHESDPLQGSAALSPRSPALPPVWDVSASAKGVSMPPNSYMPGYSHWYSSPHQDTMQRPQMM

SEQ ID NO: 3126 - protein, 1778 aa, Homo sapiens
LSVFFPIPVDGRDRGSNPSLESTSSELSTSTSEGSLSAMSGRNELHSRLHPHPQSSLIPMMFSPPESLLASCILRGNFAEAHQVLFTFNLKSSPSSGELMFMERYQEVIQELAQVEHKIENQNSDAGSSTIRRTGSGRSTLQAIGSAAAAGMVFYSISDVTDKLLNTSGDPIPMLQEDFWISTALVEPTAPLREVLEDLSPPAMAAFDLACSQCQLWKTCKQLLETAERRLNSSLERRGRRIDHVLLNADGIRGFPVVLQQISKSLNYLLMSASQTKSESVEEKGGGPPRCSITELLQMCWPSLSEDCVASHTTLSQQLDQVLQSLREALELPEPRTPPLSSLVEQAAQKAPEAEAHPVQIQTQLLQKNLGKQTPSGSRQMDYLGTFFSYCSTLAAVLLQSLSSEPDHVEVKVGNPFVLLQQSSSQLVSHLLFERQVPPERLAALLAQENLSLSVPQVIVSCCCEPLALCSSRQSQQTSSLLTRLGTLAQLHASHCLDDLPLSTPSSPRTTENPTLERKPYSSPRDSSLPALTSSALAFLKSRSKLLATVACLGASPRLKVSKPSLSWKELRGRREVPLAAEQVARECERLLEQFPLFEAFLLAAWEPLRGSLQQGQSLAVNLCGWASLSTVLLGLHSPIALDVLSEAFEESLVARDWSRALQLTEVYGRDVDDLSSIKDAVLSCAVACDKEGWQYLFPVKDASLRSRLALQFVDRWPLESCLEILAYCISDTAVQEGLKCELQRKLAELQVYQKILGLQSPPVWCDWQTLRSCCVEDPSTVMNMILEAQEYELCEEWGCLYPIPREHLISLHQKHLLHLLERRDHDKALQLLRRIPDPTMCLEVTEQSLDQHTSLATSHFLANYLTTHFYGQLTAVRHREIQALYVGSKILLTLPEQHRASYSHLSSNPLFMLEQLLMNMKVDWATVAVQTLQQLLVGQEIGFTMDEVDSLLSRYAEKALDFPYPQREKRSDSVIHLQEIVHQAADPETLPRSPSAEFSPAAPPGISSIHSPSLRERSFPPTQPSQEFVPPATPPARHQWVPDETESICMVCCREHFTMFNRRHHCRRCGRLVCSSCSTKKMVVEGCRENPARVCDQCYSYCNKDVPEEPSEKPEALDSSKSESPPYSFVVRVPKADEVEWILDLKEEENELVRSEFYYEQAPSASLCIAILNLHRDSIACGHQLIEHCCRLSKGLTNPEVDAGLLTDIMKQLLFSAKMMFVKAGQSQDLALCDSYISKVDVLNILVAAAYRHVPSLDQILQPAAVTRLRNQLLEAEYYQLGVEVSTKTGLDTTGAWHAWGMACLKAGNLTAAREKFSRCLKPPFDLNQLNHGSRLVQDVVEYLESTVRPFVSLQDDDYFATLRELEATLRTQSLSLAVIPEGKIMNNTYYQECLFYLHNYSTNLAIISFYVRHSCLREALLHLLNKESPPEVFIEGIFQPSYKSGKLHTLENLLESIDPTLESWGKYLIAACQHLQKKNYYHILYELQQFMKDQVRAAMTCIRFFSHKAKSYTELGEKLSWLLKAKDHLKIYLQETSRSSGRKKTTFFRKKMTAADVSRHMNTLQLQMEVTRFLHRCESAGTSQITTLPLPTLFGNNHMKMDVACKVMLGGKNVEDGFGIAFRVLQDFQLDAAMTYCRAARQLVEKEKYSEIQQLLKCVSESGMAAKSDGDTILLNCLEAFKRIPPQCCFCSAQELEGLIQAIHNDDNKVRAYLICCKLRSAYLIAVKQEHSRATALVQQVQQAAKSSGDAVVQDICAQWLLTSHPRGAHGPGSRK

SEQ ID NO: 3127 - protein, 264 aa, Homo sapiens
HLGPPLAWIPAASLTSTKGEFGVEDDRPARGPPPPKSEEASWSESGVSSSSGDGPFAGGEVDKRLHQLKTQLATLTSSLATVTQEKSRMEASYLADKKKMKQDLEDASNKAEEERARLEGELKGLQEQIAETKARLITQQHDRAQEQSDHALMLRELQKLLQEERTQRQDLELRLEETREALAGRAYAAEQMEGFELQTKQLTREVEELKSELQAIRDEKNQPDPRLQELQEEAARLKSHFQAQLQQEMRKVIIHISFKHQPLT

SEQ ID NO: 3128 - protein, 351 aa, Homo sapiens
ASGSPAPSSSSAMAAACGPGAAGYCLLLGLHLFLLTAGPALGWNDPDRMLLRDVKALTLHYDRYTTSRRLDPIPQLKCVGGTAGCDSYTPKVIQCQNKGWDGYDVQWECKTDLDIAYKFGKTVVSCEGYESSEDQYVLRGSCGLEYNLDYTELGLQKLKESGKQHGFASFSDYYYKWSSADSCNMSGLITIVVLLGIAFVVYKLFLSDGQYSPPPYSEYPPFSHRYQRFTNSAGPPPPGFKSEFTGPQNTGHGATSGFGSAFTGQQGYENSGPGFWTGLGTGGILGYLFGSNRAATPFSDSWYYPSYPPSYPGTWNRAYSPLHGGSGSYSVCSNSDTKTRTASGYGGTRRR

SEQ ID NO: 3129 - protein, 383 aa, Homo sapiens
ELARRPKQQSSEKSRNMIRNWLTIFILFPLKLVEKCESSVSLTVPPVVKLENGSSTNVSLTLRPPLNATLVITFEITFRSKNITILELPDEVVVPPGVTNSSFQVTSQNVGQLTVYLHGNHSNQTGPRIRFLVIRSSAISIINQVIGWIYFVAWSISFYPQVIMNWRRKSVIGLSFDFVALNLTGFVAYSVFNIGLLWVPYIKEQFLLKYPNGVNPVNSNDVFFSLHAVVLTLIIIVQCCLYERGGQRVSWPAIGFLVLAWLFAFVTMIVAAVGVITWLQFLFCFSYIKLAVTLVKYFPQAYMNFYYKSTEGWSIGNVLLDFTGGSFSLLQMFLQSYNNDQWTLIFGDPTKFGLGVFSIVFDVVFFIQHFCLYRKRPGYDQLN

SEQ ID NO: 3130 - protein, 665 aa, Homo sapiens
CWWPPLLPQLEPEPPPLRPRVAASQGGGMLGKGVVGGGGGTKAPKPSFVSYVRPEEIHTNEKEVTEKEVTLHLLPGEQLLCEASTVLKYVQEDSCQHGVYGRLVCTDFKIAFLGDDESALDNDETQFKNKVIGENDITLHCVDQIYGVFDEKKKTLFGQLKKYPEKLIIHCKDLRVFQFCLRYTKEEEVKRIVSGIIHHTQAPKLLKRLFLFSYATAAQNNTVTDPKNHTVMFDTLKDWCWELERTKGNMKYKAVSVNEGYKVCERLPAYFVVPTPLPEENVQRFQGHGIPIWCWSCHNGSALLKMSALPKEQDDGILQIQKSFLDGIYKTIHRPPYEIVKTEDLSSNFLSLQEIQTAYSKFKQLFLIDNSTEFWDTDIKWFSLLESSSWLDIIRRCLKKAIEITECMEAQNMNVLLLEENASDLCCLISSLVQLMMDPHCRTRIGFQSLIQKEWVMGGHCFLDRCNHLRQNDKEEHQRQLSLPLTQSKSSPKRGFFREETDHLIKNLLGKRISKLINSSDELQDNFREFYDSWHSKSTDYHGLLLPHIEGPEIKVWAQRYLRWIPEAQILGGGQVATLSKLLEMMEEVQSLQEKIDERHHSQQAPQAEAPCLLRNSARLSSLFPFALLQRHSSKPVLPTSGWKALGDEDDLAKREDEFVDLGDV

SEQ ID NO: 3131 - protein, 279 aa, Homo sapiens
QSRSRPRREGVGTGSRAVLCILATCGSKMSDIGDWFRSIPAITRYWFAATVAVPLVGKLGLISPAYLFLWPEAFLYRFQIWRPITATFYFPVGPGTGFLYLVNLYFLYQYSTRLETGAFDGRPADYLFMLLFNWICIVITGLAMDMQLLMIPLIMSVLYVWAQLNRDMIVSFWFGTRFKACYLPWVILGFNYIIGGSVINELIGNLVGHLYFFLMFRYPMDLGGRNFLSTPQFLYRWLPSRRGGVSGFGVPPASMRRAADQNGGGGRHNWGQGFRLGDQ

SEQ ID NO: 3132 - protein, 116 aa, Homo sapiens
FVAGWRALTAPSTSARLRAFGWQAAARLLVFGARGVGLGSGAPGSLPCYLRMDALALLGGLVNVARLPERWGPGRFDYWGNSHQIMHLLSVGSILQLHAGVVPDLLWAAHHACPRD

SEQ ID NO: 3133 - protein, 973 aa, Homo sapiens
MTCFKGQKGEQRSHAFEANKDHKAKVPSPNLYSQLNALQFTVDERSILWLNQFLLDLKQSLNQFMAVYKLNDNSKSDEHVDVRVDGLMLKFVIPSEVKSECHQDQPRAISIQSSEMIATNTRHCPNCRHSDLEALFQDFKDCDFFSKTYTSFPKSCDNFNLLHPIFQRHAHEQDTKMHEIYKGNITPQLNKNTLKTSAATDVWAVYFSQFWIDYEGMKSGKGRPISFVDSFPLSIWICQPTRYAESQKEPQTCNQVSLNTSQSESSDLAGRLKRKKLLKEYYSTESEPLTNGGQKPSSSDTFFRFSPSSSEADIHLLVHVHKHVSMQINHYQYLLLLFLHESLILLSENLRKDVEAVTGSPASQTSICIGILLRSAELALLLHPVDQANTLKSPVSESVSPVVPDYLPTENGDFLSSKRKQISRDINRIRSVTVNHMSDNRSMSVDLSHIPLKDPLLFKSASDTNLQKGISFMDYLSDKHLGKISEDESSGLVYKSGSGEIGSETSDKKDSFYTDSSSVLNYREDSNILSFDSDGNQNILSSTLTSKGNETIESIFKAEDLLPEAASLSENLDISKEETPPVRTLKSQSSLSGKPKERCPPNLAPLCVSYKNMKRSSSQMSLDTISLDSMILEEQLLESDGSDSHMFLEKGNKKNSTTNYRGTAESVNAGANLQNYGETSPDAISTNSEGAQENHDDLMSVVVFKITGVNGEIDIRGEDTEICLQVNQVTPDQLGNISLRHYLCNRPVGSDQKAVIHSKSSPEISLRFESGPGAVIHSLLAEKNGFLQCHIENFSTEFLTSSLMNIQHFLEDETVATVMPMKIQVSNTKINLKDDSPRSSTVSLEPAPVTVHIDHLVVERSDDGSFHIRDSHMLNTGNDLKENVKSDSVLLTSGKYDLKKQRSVTQATQTSPGVPWPSQSANFPEFSFDFTREQLMEENESLKQELAKAKMALAEAHLEKDALLHHIKKMTVE

SEQ ID NO: 3134 - protein, 523 aa, Homo sapiens
EEEGLSGGGPRVPCSLWGKQTMDYDFKAKLAAERERVEDLFEYEGCKVGRGTYGHVYKARRKDGKDEKEYALKQIEGTGISMSACREIALLRELKHPNVIALQKVFLSHSDRKVWLLFDYAEHDLWHIIKFHRASKANKKPMQLPRSMVKSLLYQILDGIHYLHANWVLHRDLKPANILVMGEGPERGRVKIADMGFARLFNSPLKPLADLDPVVVTFWYRAPELLLGARHYTKAIDIWAIGCIFAELLTSEPIFHCRQEDIKTSNPFHHDQLDRIFSVMGFPADKDWEDIRKMPEYPTLQKDFRRTTYANSSLIKYMEKHKVKPDSKVFLLLQKLLTMDPTKRITSEQALQDPYFQEDPLPTLDVFAGCQIPYPKREFLNEDDPEEKGDKNQQQQQNQHQQPTAPPQQAAAPPQAPPPQQNSTQTNGTAGGAGAGVGGTGAGLQHSQDSSLNQVPPNKKPRLGPSGANSGGPVMPSDYQHSSSRLNYQSSVQGSSQSQSTLGYSSSSQQSSQYHPSHQAHRY

SEQ ID NO: 3135 - protein, 369 aa, Homo sapiens
ERKMAEPPSPVHCVAAAAPTATVSEKEPFGKLQLSSRDPPGSLSAKKVRTEEKKAPRRVNGEGGSGGNSRQLQPPAAPSPQSYGSPASWSFAPLSAAPSPSSSRSSFSFSAGTAVPSSASASLSQPGPRKLLVPPTLLHAQPHHLLLPAAAAAASANAKSRRPKEKREKERRRHGLGGAREAGGASREENGEVKPLPRDKIKDKIKERDKEKEREKKKHKVMNEIKKENGEVKILLKSGKEKPKTNIEDLQIKKVKKKKKKKHKENEKRKRPKMYSKSIQTICSGLLTDVEDQAAKGILNDNIKDYVGKNLDTKNYDSKIPENSEFPFVSLKEPRVQNNLKRLDTLEFKQLIHIEHQPNGGASVIHCLQ

SEQ ID NO: 3136 - protein, 253 aa, Homo sapiens
TAAMSIFTPTNQIRLTNVAVVRMKRAGKRFEIACYKNKVVGWRSGVEKDLDEVLQTHSVFVNVSKGQVAKKEDLISAFGTDDQTEICKQILTKGEVQVSDKERHTQLEQMFRDIATIVADKCVNPETKRPYTVILIERAMKDIHYSVKTNKSTKQQALEVIKQLKEKMKIERAHMRLRFILPVNEGKKLKEKLKPLIKVIESEDYGQQLEIVCLIDPGCFREIDELIKKETKGKGSLEVLNLKDVEEGDEKFE

SEQ ID NO: 3137 - protein, 1047 aa, Homo sapiens; identical to SEQ ID NO: 1169

SEQ ID NO: 3138 - protein, 796 aa, Homo sapiens
QDRRLLRLELQKTCQPTSTMSGSHTPACGPFSALTPSIWPQEILAKYTQKEESAEQPEFYYDEFGFRVYKEEGDEPGSSLLANSPLMEDAPQRLRWQAHLEFTHNHDVGDLTWDKIAVSLPRSEKLRSLVLAGIPHGMRPQLWMRLSGALQKKRNSELSYREIVKNSSNDETIAAKQIEKDLLRTMPSNACFASMGSIGVPRLRRVLRALAWLYPEIGYCQGTGMVAACLLLFLEEEDAFWMMSAIIEDLLPASYFSTTLLGVQTDQRVLRHLIVQYLPRLDKLLQEHDIELSLITLHWFLTAFASVVDIKLLLRIWDLFFYEGSRVLFQLTLGMLHLKEEELIQSENSASIFNTLSDIPSQMEDAELLLGVAMRLAGSLTDVAVETQRRKHLAYLIADQGQLLGAGTLTNLSQVVRRRTQRRKSTITALLFGEDDLEALKAKNIKQTELVADLREAILRVARHFQCTDPKNCSVVSRQLPGLLPNTALTPPTPLVGLCSLWQELTPDYSMESHQRDHENYVACSRSHRRRAKALLDFERHDDDELGFRKNDIITIVSQKDEHCWVGELNGLRGWFPAKFVEVLDERSKEYSIAGDDSVTEGVTDLVRGTLCPALKALFEHGLKKPSLLGGACHPWLFIEEAAGREVERDFASVYSRLVLCKTFRLDEDGKVLTPEELLYRAVQSVNVTHDAVHAQMDVKLRSLICVGLNEQVLHLWLEVLCSSLPTVEKWYQPWSFLRSPGWVQIKCELRVLCCFAFSLSQDWELPAKREAQQPLKEGVRDMLVKHHLFSWDVDG

SEQ ID NO: 3139 - protein, 796 aa, Homo sapiens; identical to SEQ ID NO: 3138

SEQ ID NO: 3140 - protein, 1646 aa, Homo sapiens
SAALGASLAIPRPGLPGVHGRGPGTLSGRAMEGAEPRARPERLAEAETRAADGGRLVEVQLSGGAPWGFTLKGGREHGEPLVITKIEEGSKAAAVDKLLAGDEIVGINDIGLSGFRQEAICLVKGSHKTLKLVVKRRSELGWRPHSWHATKFSDSHPELAASPFTSTSGCPSWSGRHHASSSSHDLSSSWEQTNLQRTLDHFSSLGSVDSLDHPSSRLSVAKSNSSIDHLGSHSKRDSAYGSFSTSSSTPDHTLSKADTSSAENILYTVGLWEAPRQGGRQAQAAGDPQGSEEKLSCFPPRVPGDSGKGPRPEYNAEPKLAAPGRSNFGPVWYVPDKKKAPSSPPPPPPPLRSDSFAATKSHEKAQGPVFSEAAAAQHFTALAQAQPRGDRRPELTDRPWRSAHPGSLGKGSGGPGCPQEAHADGSWPPSKDGASSRLQASLSSSDVRFPQSPHSGRHPPLYSDHSPLCADSLGQEPGAASFQNDSPPQVRGLSSCDQKLGSGWQGPRPCVQGDLQAAQLWAGCWPSDTALGALESLPPPTVGQSPRHHLPQPEGPPDARETGRCYPLDKGAEGCSAGAQEPPRASRAEKASQRLAASITWADGESSRICPQETPLLHSLTQEGKRRPESSPEDSATRPPPFDAHVGKPTRRSDRFATTLRNEIQMHRAKLQKSRSTVALTAAGEAEDGTGRWRAGLGGGTQEGPLAGTYKDHLKEAQARVLRATSFKRRDLDPNPGDLYPESLEHRMGDPDTVPHFWEAGLAQPPSSTSGGPHPPRIGGRRRFTAEQKLKSYSEPEKMNEVGLTRGYSPHQHPRTSEDTVGTFADRWKFFEETSKPVPQRPAQKQALHGIPRDKPERPRTAGRTCEGTEPWSRTTSLGDSLNAHSAAEKAGTSDLPRRLGTFAEYQASWKEQRKPLEARSSGRCHSADDILDVSLDPQERPQHVHGRSRSSPSTDHYKQEASVELRRQAGDPGEPREELPSAVRAEEGQSTPRQADAQCREGSPGSQQHPPSQKAPNPPTFSELSHCRGAPELPREGRGRAGTLPRDYRYSEESTPADLGPRAQSPGSPLHARGQDSWPVSSALLSKRPAPQRPPPPKREPRRYRATDGAPADAPVGVLGRPFPTPSPASLDVYVARLSLSHSPSVFSSAQPQDTPKATVCERGSQHVSGDASRPLPEALLPPKQQHLRLQTATMETSRSPSPQFAPQKLTDKPPLLIQDEDSTRIERVMDNNTTVKMVPIKIVHSESQPEKESRQSLACPAEPPALPHGLEKDQIKTLSTSEQFYSRFCLYTRQGAEPEAPHRAQPAEPQPLGTQVPPEKDRCTSPPGLSYMKAKEKTVEDLKSEELAREIVGKDKSLADILDPSVKIKTTMDLMEGIFPKDEHLLEEAQQRRKLLPKIPSPRSTEERKEEPSVPAAVSLATNSTYYSTSAPKAELLIKMKDLQEQQEHEEDSGSDLDHDLSVKKQELIESISRKLQVLREARESLLEDVQANTVLGAEVEAIVKGVCKPSEFDKFRMFIGDLDKVVNLLLSLSGRLARVENALNNLDDGASPGDRQSLLEKQRVLIQQHEDAKELKENLDRRERIVFDILANYLSEESLADYEHFVKMKSALIIEQRELEDKIHLGEEQLKCLLDSLQPERGK

SEQ ID NO: 3141 - protein, 599 aa, Homo sapiens
SPRGATMETPPLPPACTKQGHQKPLDSKDDNTEKHCPVTVNPWHMKKAFKVMNELRSQNLLCDVTIVAEDMEISAHRVVLAACSPYFHAMFTGEMSESRAKRVRIKEVDGWTLRMLIDYVYTAEIQVTEENVQVLLPAAGLLQLQDVKKTCCEFLESQLHPVNCLGIRAFADMHACTDLLNKANTYAEQHFADVVLSEEFLNLGIEQVCSLISSDKLTISSEEKVFEAVIAWVNHDKDVRQEFMARLMEHVRLPLLPREYLVQRVEEEALVKNSSACKNYLIEAMKYHLLPTEQRILMKSVRTRLRTPMNLPKLMVVVGGQAPKAIRSAECYDFKEQRWHQVAELPSRRCRAGMVYLAGLVFAVGGFNGSLRVRTVDSYDPVKDQWTSVANMRDRRSTLGAAVLNGLLYAVGGFDGSTGLSSVEAYNIKSNEWFHVAPMNTRRSSVGVGVVGGLLYAVGGYDGASRQYLSTVECYNATTNEWTYIAEMSTRRSGAGVGVLNNLLYAVGGHDGPLVRKSVEVYDPTTNAWRQVADMNMCRRNAGVCAVNGLLYVVGGDDGSCNLASVEYYNPTTDKWTVVSSCMSTGRSYAGVTVIDKPL

SEQ ID NO: 3142 - protein, 33 aa, Homo sapiens
FSNLTTEKVAHAKEENLSMHQMLDQTLLELNNM

SEQ ID NO: 3143 - protein, 255 aa, Homo sapiens
SEELDREKKLKEDSPRKTPNKESGVPSLPVSLTSIKEEPKEAKHPDSQSMEESKLKNDDRKTPVNWKDSRGTRVAVSSPMSQHQSYIQYLHAYPYPQMYDPSHPAYRAVSPVLMHSYPGAYLSPGFHYPVYGKMSGREETEKVNTSPSVNTKTTTESKALDLLQQHANQYRSKSPAPVEKATAEREREAERERDRHSPFGQRHLHTHHHTHVGMGYPLIPGQYDPFQGLTSAALVASQQVAAQASASGMFPGQRR

SEQ ID NO: 3144 - protein, 175 aa, Homo sapiens
SVSGIVLDLLPYLHFLSNMNLDGSAQDPEKREYSSVCVGREDDIKKSERMTAVVHDREVVIFYHKGEYHAMDIRCYHSGGPLHLGDIEDFDGRPCIVCPWHKYKITLATGEGLYQSINPKDPSAKPKWCSKGIKQRIHTVTVDNGNIYVTLSNEPFKCDSDFYATGDFKVIKSSS

SEQ ID NO: 3145 - protein, 110 aa, Homo sapiens
RNSLLLPPLHLDNSTPAKMSCQQNQQQCQPPPKCPSPKCPPKSPVQCLPPASSGCAPSSGGCGPSSEGGCFLNHHRRHHRCRRQRPNSCDRGSGQQGGGSGCGHGSGGCC

SEQ ID NO: 3146 - protein, 382 aa, Homo sapiens
VCTALQEFGTRSTLLRCLDSGFRPGASRGLVGSWAAMESTLGAGIVIAEALQNQLAWLENVWLWITFLGDPKILFLFYFPAAYYASRRVGIAVLWISLITEWLNLIFKWFLFGDRPFWWVHESGYYSQAPAQVHQFPSSCETGPGSPSGHCMITGAALWPIMTALSSQVATRARSRWVRVMPSLAYCTFLLAVGLSRIFILAHFPHQVLAGLITGAVLGWLMTPRVPMERELSFYGLTALALMLGTSLIYWTLFTLGLDLSWSISLAFKWCERPEWIHVDSRPFASLSRDSGAALGLGIALHSPCYAQVRRAQLGNGQKIACLVLAMGLLGPLDWLGHPPQISLFYIFNFLKYTLWPCLVLALVPWAVHMFSAQEAPPIHSS

SEQ ID NO: 3147 - protein, 280 aa, Homo sapiens
RSFSLSFSLLSPSEMMALGAAGATRVFVAMVAAALGGHPLLGVSATLNSVLNSNAIKNLPPPLGGAAGHPGSAVSAAPGILYPGGNKYQTIDNYQPYPCAEDEECGTDEYCASPTRGGDAGVQICLACRKRRKRCMRHAMCCPGNYCKNGICVSSDQNHFRGEIEETITESFGNDHSTLDGYSRRTTLSSKMYHTKGQEGSVCLRSSDCASGLCCARHFWSKICKPVLKEGQVCTKHRRKGSHGLEIFQRCYCGEGLSCRIQKDHHQASNSSRLHTCQRH

SEQ ID NO: 3148 - protein, 520 aa, Homo sapiens [sequence omitted]

SEQ ID NO: 3149 - protein, 1331 aa, Homo sapiens
VAVMISTAPLYSGVHNWTSSDRIRMCGINEERRAPLSDEESTTGDCQHFGSQEFCVSSSFSKVELTAVGSGSNARGADPDGSATEKLGHKSEDKPDDPQPKMDYAGNVAEAEGLLVPLSSPGDGLKLPASDSAEASNSRADCSWTPLNTQMSKQVDCSPAGVKALDSRQGVGEKNTFILATLGTGVPVEGTLPLVTTNFSPLPAPICPPAPSSASVPHSVPDAFQAPVPPSAPTLVLAPVPTPVLAPMPASTPPAAPAPPSVPMPTPTPSSGPPSTPTLIPAFAPTPVPAPTPAPIFTPAPTPMPAATPAAIPTSAPIPASFSLSRVCFPAAQAPAMQKVPLSFQPGTVLTPSQPLVYIPPPSCGQPLSVATLPTTLGVSSTLTLPVLPSYLQDRCLPGVLASPELRSYPYAFSVARPLTSDSKLVSLEVNRLPCTSPSGSTTTQPAPDGVPGPLADTSLVTASAKVLPTPQPLLPAPSGSSAPPHPAKMPSGTEQQTEGTSVTFSPLKSPPQLEREMASPPECSEMPLDLSSKSNRQKLPLPNQRKTPPMPVLTPVHTSSKALLSTVLSRSQRTTQAAGGNVTSCLGSTSSPFVIFPEIVRNGDPSTWVKNSTALISTIPGTYVGVANPVPASLLLNKDPNLGLNRDPRHLPKQEPISIIDQGEPKGTGATCGKKGSQAGAEGQPSTVKRYTPARIAPGLPGCQTKELSLWKPTGPANIYPRCSVNGKPTSTQVLPVGWSPYHQASLLSIGISSAGQLTPSQGAPIRPTSVVSEFSGVPSLSSSEAVHGLPEGQPRPGGSFVPEQDPVTKNKTCRIAAKPYEEQVNPVLLTLSPQTGTLALSVQPSGGDIRMNQGPEESESHLCSDSTPKMEGPQGACGLKLAGDTKPKNQVLATYMSHELVLATPQNLPKMPELPLLPHDSHPKELILDVVPSSRRGSSTERPQLGSQVDLGRVKMEKVDGDVVFNLATCFRADGLPVAPQRGQAEVRAKAGQARVKQESVGVFACKNKWQPDDVTESLPPKKMKCGKEKDSEEQQLQPQAKAVVRSSHRPKCRKLPSDPQESTKKSPRGASDSGKEHNGVRGKHKHRKPTKPESQSPGKRADSHEEGSLEKKAKSSFRDFIPVVLSTRTRSQSDLKARKQKTSSSQSLEHRLRNRNLLLPNKVQGISDSPNGFLPNNLEEPACLENSEKPSGKRKCKTKHMATVSEEAKGKGRWSQQKTRSPKSPTPVKPTEPCTPSKSRSASSEEASESPTARQIPPEARRLIVNKNAGETLLQRAARLGYKDVVLYCLQKDSEDVNHRDNAGYTALHEACSRGWTDILNILLEHGA

SEQ ID NO: 3150 - protein, 931 aa, Homo sapiens
SLRMHNLSILVRQIKFYYQETLQQLIMMSLPNVLIIGKNPFSEQGTEEVKKLLLLLLGCAVQCQKKEEFIERIQGLDFDTKAAVAAHIQEVTHNQENVFDLQWMEVTDMSQEDIEPLLKNMALHLKRLIDERDEHSETIIELSEERDGLHFLPHASSSAQSPCGSPGMKRTESRQHLSVELADAKAKIRRLRQELEEKTEQLLDCKQELEQMEIELKRLQQENMNLLSDARSARMYRDELDALREKAVRVDKLESEVSRYKERLHDIEFYKARVEELKEDNQVLLETKTMLEDQLEGTRARSDKLHELEKENLQLKAKLHDMEMERDMDRKKIEELMEENMTLEMAQKQSMDESLHLGWELEQISRTSELSEAPQKSLGHEVNELTSSRLLKLEMENQSLTKTVEELRTTVDSVEGNASKILKMEKENQRLSKKVEILENEIVQEKQSLQNCQNLSKDLMKEKAQLEKTIETLRENSERQIKILEQENEHLNQTVSSLRQRSQISAEARVKDIEKENKILHESIKETSSKLSKIEFEKRQIKKELEHYKEKGERAEELENELHHLEKENELLQKKITNLKITCEKIEALEQENSELERENRKLKKTLDSFKNLTFQLESLEKENSQLDEENLELRRNVESLKCASMKMAQLQLENKELESEKEQLKKGLELLKASFKKTERLEVSYQGLDIENQRLQKTLENSNKKIQQLESELQDLEMENQTLQKNLEELKISSKRLEQLEKENKSLEQETSQLEKDKKQLEKENKRLRQQAEIKDTTLEENNVKIGNLEKENKTLSKEIGIYKESCVRLEELEKENKELVKRATIDIKTLVTLREDLVSEKLKTQQMNNDLEKLTHELEKIGLNKERLLHDEQSTDDSRYKLLESKLESTLKKSLEIKEEKIAALEARLEESTNYNQQLRQELKTVKKK

SEQ ID NO: 3151 - protein, 838 aa, Homo sapiens
GFWLHLTLLGASLPAALGWMDPGTSRGPDVGVGESQAEEPRSFEVTRREGLSSHNELLASCGKKFCSRGSRCVLSRKTGEPECQCLEACRPSYVPVCGSDGRFYENHCKLHRAACLLGKRITVIHSKDCFLKGDTCTMAGYARLKNVLLALQTRLQPLQEGDSRQDPASQKRLLVESLFRDLDADGNGHLSSSELAQHVLKKQDLDEDLLGCSPGDLLRFDDYNSDSSLTLREFYMAFQVVQLSLAPEDRVSVTTVTVGLSTVLTCAVHGDLRPPIIWKRNGLTLNFLDLEDINDFGEDDSLYITKVTTIHMGNYTCHASGHEQLFQTHVLQVNVPPVIRVYPESQAQEPGVAASLRCHAEGIPMPRITWLKNGVDVSTQMSKQLSLLANGSELHISSVRYEDTGAYTCIAKNEVGVDEDISSLFIEDSARKTLANILWREEGLSVGNMFYVFSDDGIIVIHPVDCEIQRHLKPTEKIFMSYEEICPQREKNATQPCQWVSAVNVRNRYIYVAQPALSRVLVVDIQAHKVLQSIGVDPLPAKLSYDKSHDQVWVLSWGDVHKSRPSLQVITEASTGQSQHLIRTPFAGVDDFFIPPTNLIINHIRFGFIFNKSDPAVHKVDLETMMPLKTIGLHHHGCVPQAMAHTHLGGYFFIQCRQDSPASAARQLLVDSVTDSVLGPNGDVTGTPHTSPDGRFIVSAAADSPWLHVQEITVRGEIQTLYDLQINSGISDLAFQRSFTESNQYNIYAALHTEPDLLFLELSTGKVGMLKNLKEPPAGPAQPWGGTHRIMRDSGLFGQYLLTPARESLFLINGRQNTLRCEVSGIKGGTTVVWVGEV

SEQ ID NO: 3152 - protein, 881 aa, Homo sapiens
GAGWQVSLTGRWSPGREAGAGEVRQDPGSTAASPSSCDADLSARMARGERRRRAVPAEGVRTAERAARGGPGRRDGRGGGPRSTAGGVALAVVVLSLALGMSGRWVLAWYRARRAVTLHSAPAVLPADSSSPAVAPDLFWGTYRPHVYFGMKTRSPKPLLTGLMWAQQGTTPGTPKLRHTCEQGDGVGPYGWEFHDGLSFGRQHIQDGALRLTTEFVKRPGGQHGGDWSWRVTVEPQDSGTSALPLVSLFFYVVTDGKEVLLPEVGAKGQLKFISGHTSELGDFRFTLLPPTSPGDTAPKYGSYNVFWTSNPGLPLLTEMVKSRLNSWFQHRPPGASPERYLGLPGSLKWEDRGPSGQGQGQFLIQQVTLKIPISIEFVFESGSAQAGGNQALPRLAGSLLTQALESHAEGFRERFEKTFQLKEKGLSSGEQVLGQAALSGLLGGIGYFYGQGLVLPDIGVEGSEQKVDPALFPPVPLFTAVPSRSFFPRGFLWDEGFHQLVVQRWDPSLTREALGHWLGLLNADGWIGREQILGDEARARVPPEFLVQRAVHANPPTLLLPVAHMLEVGDPDDLAFLRKALPRLHAWFSWLHQSQAGPLPLSYRWRGRDPALPTLLNPKTLPSGLDDYPRASHPSVTERHLDLRCWVALGARVLTRLAEHLGEAEVAAELGPLAASLEAAESLDELHWAPELGVFADFGNHTKAVQLKPRPPQGLVRVVGRPQPQLQYVDALGYVSLFPLLLRLLDPTSSRLGPLLDILADSRHLWSPFGLRSLAASSSFYGQRNSEHDPPYWRGAVWLNVNYLALGALHHYGHLEGPHQARAAKLHGELRANVVGNVWRQYQATGFLWEQYSDRDGRGMGCRPFHGWTSLVLLAMAEDY

SEQ ID NO: 3153 - protein, 1437 aa, Homo sapiens
MVIKTDELPAAAPADSAREHGSQAGGKGRPGAAAVLLADLERDARQGECALPGAAMAGLAPLKPEASRSSSPGPTGCIRARVAAEAGTRNPGNAGAELESWLPCCHGHPETPEPRGGQLPTAPELPSVMLLNGDCPESLKKEAAAAEPPRENGLDEAGPGDETTGQEVIVIQDTGFSVKILAPGIEPFSLQVSPQEMVQEIHQVLMDREDTCHRTCFSLHLDGNVLDHFSELRSVEGLQEGSVLRVVEEPYTVREARIHVRHVRDLLKSLDPSDAFNGVDCNSLSFLSVFTDGDLGDSGKRKKGLEMDPIDCTPPEYILPGSRERPLCPLQPQNRDWKPLQCLKVLTMSGWNPPPGNRKMHGDLMYLFVITAEDRQVSITASTRGFYLNQSTAYHFNPKPASPRFLSHSLVELLNQISPTFKKNFAVLQKKRVQRHPFERIATPFQVYSWTAPQAEHAMDCVRAEDAYTSRLGYEEHIPGQTRDWNEELQTTRELPRKNLPERLLRERAIFKVHSDFTAAATRGAMAVIDGNVMAINPSEETKMQMFIWNNIFFSLGFDVRDHYKDFGGDVAAYVAPTNDLNGVRTYNAVDVEGLYTLGTVVVDYRGYRVTAQSIIPGILERDQEQSVIYGSIDFGKTVVSHPRYLELLERTSRPLKILRHQVLNDRDEEVELCSSVECKGIIGNDGRHYILDLLRTFPPDLNFLPVPGEELPEECARAGFPRAHRHKLCCLRQELVDAFVEHRYLLFMKLAALQLMQQNASQLETPSSLENGGPSSLESKSEDPPGQEAGSEEEGSSASGLAKVKELAETIAADDGTDPRSREVIRNACKAVGSISSTAFDIRFNPDIFSPGVRFPESCQDEVRDQKQLLKDAAAFLLSCQIPGLVKDCMEHAVLPVDGATLAEVMRQRGINMRYLGKVLELVLRSPARHQLDHVFKIGIGELITRSAKHIFKTYLQGVELSGLSAAISHFLNCFLSSYPNPVAHLPADELVSKKRNKRRKNRPPGAADNTAWAVMTPQELWKNICQEAKNYFDFDLECETVDQAVETYGLQKITLLREISLKTGIQVLLKEYSFDSRHKPAFTEEDVLNIFPVVKHVNPKASDAFHFFQSGQAKVQQGFLKEGCELINEALNLFNNVYGAMHVETCACLRLLARLHYIMGDYAEALSNQQKAVLMSERVMGTEHPNTIQEYMHLALYCFASSQLSTALSLLYRARYLMLLVFGEDHPEMALLDNNIGLVLHGVMEYDLSLRFLENALAVSTKYHGPKALKVALSHHLVARVYESKAEFRSALQHEKEGYTIYKTQLGEDHEKTKESSEYLKCLTQQAVALQRTMNEIYRNGSSANIPPLKFTAPSMASVLEQLNVINGILFIPLSQKDLENLKAEVARRHQLQEASRNRDRAEEPMATEPAPAGAPGDLGSQPPAAKDPSPSVQG

SEQ ID NO: 3154 - protein, 1222 aa, Homo sapiens
KFKLIKIMLLTLIILLPVVSKFSFVSLSAPQHWSCPEGTLAGNGNSTCVGPAPFLIFSHGNSIFRIDTEGTNYEQLVVDAGVSVIMDFHYNEKRIYWVDLERQLLQRVFLNGSRQERVCNIEKNVSGMAINWINEEVIWSNQQEGIITVTDMKGNNSHILLSALKYPANVAVDPVERFIFWSSEVAGSLYRADLDGVGVKALLETSEKITAVSLDVLDKRLFWIQYNREGSNSLICSCDYDGGSVHISKHPTQHNLFAMSLFGDRIFYSTWKMKTIWIANKHTGKDMVRINLHSSFVPLGELKVVHPLAQPKAEDDTWEPEQKLCKLRKGNCSSTVCGQDLQSHLCMCAEGYALSRDRKYCEGNDWKYCEDVNECAFWNHGCTLGCKNTPGSYYCTCPVGFVLLPDGKRCHQLVSCPRNVSECSHDCVLTSEGPLCFCPEGSVLERDGKTCSGCSSPDNGGCSQLCVPLSPVSWECDCFPGYDLQLDEKSCAASGPQPFLLFANSQDIRHMHFDGTDYGTLLSQQMGMVYALDHDPVENKIYFAHTALKWIERANMDGSQRERLIEEGVDVPEGLAVDWIGRRFYWTDRGKSLIGRSDLNGKRSKIITIENISQPRGIAVHPMAKRLFWTDTGINPRIESSSLQGLGRLVIASSDLIWPSGITIDFLTDKLYWCDAKQSVIEMANLDGSKRRRLTQNDVGHPFAVAVFEDYVWFSDWAMPSVIRVNKRTGKDRVRLQGSMLKPSSLVVVHPLAKPGADPCLYQNGGCEHICKKRLGTAWCSCREGFMKASDGKTCLALDGHQLLAGGEVDLKNQVTPLDILSKTRVSEDNITESQHMLVAEIMVSDQDDCAPVGCSMYARCISEGEDATCQCLKGFAGDGKLCSDIDECEMGVPVCPPASSKCINTEGGYVCRCSEGYQGDGIHCLDIDECQLGVHSCGENASCTNTEGGYTCMCAGRLSEPGLICPDSTPPPHLREDDHHYSVRNSDSECPLSHDGYCLHDGVCMYIEALDKYACNCVVGYIGERCQYRDLKWWELRHAGHGQQQKVIVVAVCVVVLVMLLLLSLWGAHYYRTQKLLSKNPKNPYEESSRDVRSRRPADTEDGMSSCPQPWFVVIKEHQDLKNGGQPVAGEDGQAADGSMQPTSWRQEPQLCGMGTEQGCWIPVSSDKGSCPQVMERSFHMPSYGTQTLEGGVEKPHSLLSANPLWQQRALDPPHQMELTQ

SEQ ID NO: 3155 - protein, 107 aa, Homo sapiens
GTSGWYWERLAERRGRLWSREEAMATMENKVICALVLVSMLALGTLAEAQTETCTVAPRERQNCGFPGVTPSQCANKGCCFDDTVRGVPWCFYPNTIDVPPEEECEF

SEQ ID NO: 3156 - protein, 527 aa, Homo sapiens
PRVRAADVAAGAQAVVSAGMAKSNGENGPRAPAAGESLSGTRESLAQGPDAATTDELSSLGSDSEANGFAERRIDKFGFIVGSQGAEGALEEVPLEVLRQRESKWLDMLNNWDKWMAKKHKKIRLRCQKGIPPSLRGRAWQYLSGGKVKLQQNPGKFDELDMSPGDPKWLDVIERDLHRQFPFHEMFVSRGGHGQQDLFRVLKAYTLYRPEEGYCQAQAPIAAVLLMHMPAEQAFWCLVQICEKYLPGYYSEKLEAIQLDGEILFSLLQKVSPVAHKHLSRQKIDPLLYMTEWFMCAFSRTLPWSSVLRVWDMFFCEGVKIIFRVGLVLLKHALGSPEKVKACQGQYETIERLRSLSPKIMQEAFLVQEVVELPVTERQIEREHLLQLRRWQETRGELQCRSPPRLHGAKAILDAEPGPRPALQPSPSIRLPLDAPLPGSKAKPKPPKQAQKEQRKQMKGRGQLEKPPAPNQAMVVAAAGDACPPQHVPPKDSAPKDSAPQDLAPQVSAHHRSQESLTSQESEDTYL

SEQ ID NO: 3157 - protein, 199 aa, Homo sapiens
SSAMGSRSSHAAVIPDGDSIRRETGFSQASLLRLHHRFRALDRNKKGYLSRMDLQQIGALAVNPLGDRIIESFFPDGSQRVDFPGFVRVLAHFRPVEDEDTETQDPKKPEPLNSRRNKLHYAFQLYDLDRDGKISRHEMLQVLRLMVGVQVTEEQLENIADRTVQEADEDGDGAVSFVEFTKSLEKMDVEHKMSIRILK

SEQ ID NO: 3158 - protein, 135 aa, Homo sapiens
ISSCPHTAYEGSMSTLSNFTQTLEDVFRRIFITYMDNWRQNTTAEQEALQAKVDAENFYYVILYLMVMIGMFSFIIVAILVSTVKSKRREHSNDPYHQYIVEDWQEKYKSQILNLEESKATIHENIGAAGFKMSP

SEQ ID NO: 3159 - protein, 137 aa, Homo sapiens
PWGAAELDMGRRDAQLLAALLVLGLCALAGSEKPSPCQCSRLSPHNRTNCGFPGITSDQCFDNGCCFDSSVTGVPWCFHPLPKQESDQCVMEVSDRRNCGYPGISPEECASRKCCFSNFIFEVPWCFFPKSVEDCHY

SEQ ID NO: 3160 - protein, 76 aa, Homo sapiens
KPKTKILKMVYYPELFVWVSQEPFPNKDMEGRLPKGRLPVPKEVNRKKNDETNAASLTPLGSSELRSPRISYLHFF

SEQ ID NO: 3161 - protein, 167 aa, Homo sapiens
LSSTGGLHAAACAAAMSLVIPEKFQHILRVLNTNIDGRRKIAFAITAIKGVGRRYAHVVLRKADIDLTKRAGELTEDEVERVITIMQNPRQYKIPDWFLNRQKDVKDGKYSQVLANGLDNKLREDLERLKKIRAHRGLRHFWGLRVRGQHTKTTGRRGRTVGVSKKK

SEQ ID NO: 3162 - protein, 646 aa, Homo sapiens
GMPRSRGGRAAPGPPPPPPPPGQAPRWSRWRVPGRLLLLLLPALCCLPGAARAAAAAAGAGNRAAVAVAVARADEAEAPFAGQNWLKSYGYLLPYDSRASALHSAKALQSAVSTMQQFYGIPVTGVLDQTTIEWMKKPRCGVPDHPHLSRRRRNKRYALTGQKWRQKHITYSIHNYTPKVGELDTRKAIRQAFDVWQKVTPLTFEEVPYHEIKSDRKEADIMIFFASGFHGDSSPFDGEGGFLAHAYFPGPGIGGDTHFDSDEPWTLGNANHDGNDLFLVAVHELGHALGLEHSSDPSAIMAPFYQYMETHNFKLPQDDLQGIQKIYGPPAEPLEPTRPLPTLPVRRIHSPSERKHERQPRPPRPPLGDRPSTPGTKPNICDGNFNTVALFRGEMFVFKDRWFWRLRNNRVQEGYPMQIEQFWKGLPARIDAAYERADGRFVFFKGDKYWVFKEVTVEPGYPHSLGELGSCLPREGIDTALRWEPVGKTYFFKGERYWRYSEERRATDPGYPKPITVWKGIPQAPQGAFISKEGYYTYFYKGRDYWKFDNQKLSVEPGYPRNILRDWMGCNQKEVERRKERRLPQDDVDIMVTINDVPGSVNAVAVVIPCILSLCILVLVYTIFQFKNKTGPQPVTYYKRPVQEWV

SEQ ID NO: 3163 - protein, 329 aa, Homo sapiens
SRLSLQFYVSFRRTGLFTCKLIVEIFFRNYMNDSLRTNVFVRFQPETIACACIYLAARALQIPLPTRPHWFLLFGTTEEEIQEICIETLRLYTRKKPNYELLEKEVEKRKVALQEAKLKAKGLNPDGTPALSTLGGFSPASKPSSPREVKAEEKSPISINVKTVKKEPEDRQQASKSPYNGVRKDSKRSRNSRSASRSRSRTRSRSRSHTPRRHYNNRRSRSGTYSSRSRSRSRSHSESPRRHHNHGSPHLKAKHTRDDLKSSNRHGHKRKKSRSRSQSKSRDHSDAAKKHRHERGHHRDRRERSRSFERSHKSKHHGGSRSGHGRHRR

SEQ ID NO: 3164 - protein, 1090 aa, Homo sapiens
DCRLQAAMPTNFTVVPVEAHADGGGDETAERTEAPGTPEGPEPERPSPGDGNPRENSPFLNNVEVEQESFFEGKNMALFEEEMDSNPMVSSLLNKLANYTNLSQGVVEHEEDEESRRREAKAPRMGTFIGVYLPCLQNILGVILFLRLTWIVGVAGVLESFLIVAMCCTCTMLTAISMSAIATNGVVPAGGSYYMISRSLGPEFGGAVGLCFYLGTTFAGAMYILGTIEIFLTYISPGAAIFQAEAAGGEAAAMLHNMRVYGTCTLVLMALVVFVGVKYVNKLALVFLACVVLSILAIYAGVIKSAFDPPDIPVCLLGNRTLSRRSFDACVKAYGIHNNSATSALWGLFCNGSQPSAACDEYFIQNNVTEIQGIPGAASGVFLENLWSTYAHAGAFVEKKGVPSVPVAEESRASTLPYVLTDIAASFTLLVGIYFPSVTGIMAGSNRSGDLKDAQKSIPTGTILAIVTTSFIYLSCIVLFGACIEGVVLRDKFGEALQGNLVIGMLAWPSPWVIVIGSFFSTCGAGLQTLTGAPRLLQAIARDGIVPFLQVFGHGKANGEPTWALLLTVLICETGILIASLDSVAPILSMFFLMCYLFVNLACAVQTLLRTPNWRPRFKFYHWTLSFLGMSLCLALMFICSWYYALSAMLIAGCIYKYIEYRGAEKEWGDGIRGLSLNAARYALLRVEHGPPHTKNWRPQVLVMLNLDAEQAMKHPRLLSFTSQLKAGKGLTIVGSVLEGTYLDKHMEAQRAEENIRSLMSTEKTKGFCQLVVSSSLRDGMSHLIQSAGLGGLKHNTVLMAWPASWKQEDNPFSWKNFVDTVRDTTAAHQALLVAKNVDSFPQNQERFGGGHIDVWWIVHDGGMLMLLPFLLRQHKVWRKCRMRIFTVAQVDDNSIQMKKDLQMFLYHLRISAEVEVVEMVENDISAFTYERTLMMEQRSQMLKQMQLSKNEQEREAQLIHDRNTASHTAAAARTQAPPTPDKVQMTWTREKLIAEKYRSRDTSLSGFKDLFSMKPDQSNVRRMHTAVKLNGVVLNKSQDAQLVLLNMPGPPKNRQGDENYMEFLEVLTEGLNRVLLVRGGGREVITIYS

SEQ ID NO: 3165 - protein, 893 aa, Homo sapiens
GRGARGGSGAGALRGCRGYLQKLSGKGPSRGYRSRWFVFDARRCYLYYFKSPQDALPLGHLDIADACFSYQGPDEAAEPGTEPPAHFQVHSAGAVTVLKAPNRQLMTYWLQELQQKRWEYCNSLDMVKWDSRTSPTPGDFPKGLVARDNTDLIYPHPNASAEKARNVLAVETVPGELVGEQAANQPAPGHPNSINFYSLKQWGNELKNSMSSFRPGRGHNDSRRTVFYTNEEWELLDPTPKDLEESIVQEEKKKLTPEGNKGVTGSGFPFDFGRNPYKGKRPLKDIIGSYKNRHSSGDPSSEGTSGSGSVSIRKPASEMQLQVQSQQEELEQLKKDLSSQKELVRLLQQTVRSSQYDKYFTSSRLCEGVPKDTLELLHQKDDQILGLTSQLERFSLEKESLQQEVRTLKSKVGELNEQLGMLMETIQAKDEVIIKLSEGEGNGPPPTVAPSSPSVVPVARDQLELDRLKDNLQGYKTQNKFLNKEILELSALRRNPERRERDLMARNSSLEAKLCQIESKYLILLQEMKTPVCSEDQGPTREVIAQLLEDALQVESQEQPEQAFVKPHLVSEYDIYGFRTVPEDDEEEKLVAKVRALDLKTLYLTENQEVSTGVKWENYFASTVNREMMCSPELKNLIRAGIPHEHRSKVWKWCVDRHTRKFKDNTEPGHFQTLLQKALEKQNPASKQIELDLLRTLPNNKHYSCPTSEGIQKLRNVLLAFSWRNPDIGYCQGLNRLVAVALLYLEQEDAFWCLVTIVEVFMPRDYYTKTLLGSQVDQRVFRDLMSEKLPRLHGHFEQYKVDYTLITFNWFLVVFVDSVVSDILFKIWDSFLYEGPKVIFRFALALFKYKEEEILKLQDSMSIFKYLRYFTRTILDARSGTDAPTTWRKSGWS

SEQ ID NO: 3166 - protein, 1353 aa, Homo sapiens
FPGPTISSNSQLYRASALFETIRHEAQLSTDYKLSLFDLQTSSYQALQRVLVSLGHHDEALAVAERGRTRAFADLLVERQTGQQDSDPYSPVTIDQILEMVNGQRGLVLYYSLAAGYLYSWLLAPGAGIVKFHEHYLGENTVENSSDFQASSSVTLPTATGSALEQHIASVREALGVESHYSRACASSETESEAGDIMDQQFEEMNNKLNSVTDPTGFLRMVRRNNLFNRSCQSMTSLFSNTVSPTQDGTSSLPRRQSSFAKPPLRALYDLLIAPMEGGLMHSSGPVGRHRQLILVLEGELYLIPFALLKGSSSNEYLYERFGLLAVPSIRSLSVQSKSHLRKNPPTYSSSTSMAAVIGNPKLPSAVMDRWLWGPMPSAEEEAYMVSELLGCQPLVGSVATKERVMSALTQAECVHFATHISWKLSALVLTPSMDGNPASSKSSFGHPYTIPESLRVQDDASDGESISDCPPLQELLLTAADVLDLQLPVKLVVLGSSQESNSKVAADGVIALTRAFLAAGAQCVLVSLWPVPVAAFKMFIHAFYSSLLNGLKASAALGEAMKVVQSSKAFSHPSNWAGFMLIGSDVKLNSPSSLIGQALTEILQHPERARDALRVLLHLVEKSLQRIQNGQRNAMYTSQQSVENKVGGIPGWQALLTAVGFRLDPPTSGLPAAVFFPTSDPGDRLQQCSSTLQSLLGLPNPALQALCKLITASETGEQLISRAVKNMVGMLHQVLVQLQAGEKEQDLASAPIQVSISVQLWRLPGCHEFLAALGFVLCEVGQEEVILKTGKQANRRTVHFALQSLLSLFDSTELPKRLSLDSSSSLESLASAQSVSNALPLGYQQPPFSPTGADSIASDAISVYSLSSIASSMSFVSKPEGGSEGGGPGGRQDHDRSKNAYLQRSTLPRSQLPPQTRPAGNKDEEEYEGFSIISNEPLATYQENRNTCFSPDHKQPQPGTAGGMRVSVSSKGSISTPNSPVKMTLIPSPNSPFQKVGKLASSDTGESDQSSTETDSTVKSQEESNPKLDPQELAQKILEETQSHLIAVERLQRSGGQVSKSNNPEDGVQAPSSTAVFRASETSAFSRPVLSHQKSQPSPVTVKPKPPARSSSLPKVSSGYSSPTTSEMSIKDSPSQHSGRPSPGCDSQTSQLDQPLFKLKYPSSPYSAHISKSPRNMSPSSGHQSPAGSAPSPALSYSSAGSARSSPADAPDIDKLKMAAIDEKVQAVHNLKMFWQSTPQHSTGPMKIFRGAPGTMTSKRDVLSLLNLSPRPNKKEEGVDKLELKELSLQQHDGAPPKAPPNGHWRTETTSLGSLPLPAGPPATAPARPLRLPSGNGYKFLSPGRFFPSSKC

SEQ ID NO: 3167 - protein, 254 aa, Homo sapiens
AARRRQKGKEENMMMDLFETGSYFFYLDGENVTLQPLEVAEGSPLYPGSDGTLSPCQDQMPPEAGSDSSGEEHVLAPPGLQPPHCPGQCLIWACKTCKRKSAPTDRRKAATLRERRRLKKINEAFEALKRRTVANPNQRLPKVEILRSAISYIERLQDLLHRLDQQEKMQELGVDPFSYRPKQENLEGADFLRTCSSQWPSVSDHSRGLVITAKEGGASIDSSASSSLRCLSSIVDSISSEERKLPCVEEVVEK

SEQ ID NO: 3168 - protein, 151 aa, Homo sapiens
TSRRVTMKFNPFVTSDRSKNRKRHFNAPSHVRRKIMSSPLSKELRQKYNVRSMPIRKDDEVQVVRGHYKGQQIGKVVQVYRKKYVIYIERVQREKANGTTVHVGIHPSKVVITRLKLDKDRKKILERKAKSRQVGKEKGKYKEELIEKMQE

SEQ ID NO: 3169 - protein, 1003 aa, Homo sapiens
GPGGAISLSVEAKAGADLLVKGKQARMDIYDTQTLGVVVFGGFMVVSAIGIFLVSTFSMKETSYEEALANQRKEMAKTHHQKVEKKKKEKTVEKKGKTKKKEEKPNGKIPDHDPAPNVTVLLREPVRAPAVAVAPTPVQPPIIVAPVATVPAMPQEKLASSPKDKKKKEKKVAKVEPAVSSVVNSIQVLTSKAAILETAPKEGRNTDVAQSPEAPKQEAPAKKKSGSKKKGPPDADGPLYLPYKTLVSTVGSMVFNEGEAQRLIEILSEKAGIIQDTWHKATQKGDPVAILKRQLEEKEKLLATEQEDAAVAKSKLRELNKEMAAEKAKAAAGEAKVKKQLVAREQEITAVQARMQASYREHVKEVQQLQGKIRTLQEQLENGPNTQLARLQQENSILRDALNQATSQVESKQNAELAKLRQELSKVSKELVEKSEAVRQDEQQRKALEAKAAAFEKQVLQLQASHRESEEALQKRLDEVSRELCHTQSSHASLRADAEKAQEQQQQMAELHSKLQSSEAEVRSKCEELSGLHGQLQEARAENSQLTERIRSIEALLEAGQARDAQDVQASQAEADQQQTRLKELESQVSGLEKEAIELREAVEQQKVKNNDLREKNWKAMEALATAEQACKEKLHSLTQAKEESEKQLCLIEAQTMEALLALLPELSVLAQQNYTEWLQDLKEKGPTLLKHPPAPAEPSSDLASKLREAEETQSTLQAECDQYRSILAETEGMLRDLQKSVEEEEQVWRAKVGAAEEELQKSRVTVKHLEEIVEKLKGELESSDQVREHTSHLEAELEKHMAAASAECQNYAKEVAGLRQLLLESQSQLDAAKSEAQKQSDELALVRQQLSEMKSHVEDGDIAGAPASSPEAPPAEQDPVQLKTQLEWTEAILEDEQTQRQKLTAEFEEAQTSACRLQEELEKLRTAGPLESSETEEASQLKERLEKEKKLTSDLGRAATRLQELLKTTQEQLAREKDTVKKLQEQLEKAEDGSSSKEGTSV

SEQ ID NO: 3170 - protein, 901 aa, Homo sapiens
THASEKYSYGHLPTHSITAHPMVTIRISDRQRLIQPYIHNYSWLLFAALALYSAHLASAEDVDGEKLDPQTRSSATTLRSQCMQLVGDCLMKAHQGKGLKALALLGVLPDGDSSLEDHALPVTVPTGASEEQLEKKAVQGAELSEAGNGKRAVHEEIRPVDFKQRNKADKGVSLSKDPSCQTQISDSPADASPPTGLPDAEDSEVSSQKPIEEKAVTPSPEQVFAECSQKRILGLLAAMLPPLKSGPTVPLIDLEHVLPLMFQVVISNAGHLNETYHLTLGLLGQLIIRLLPAEVDAAVIKVLSAKHNLFAAGDSSIVPDGWKTTHLLFSLGAVCLDSRVGLDWACSMAEILRSLNSAPLWRDVIATFTDHCIKQLPFQLKHTNIFTLLVLVGFPQVLCVGTRCVYMDNANEPHNVIILKHFTEKNRAVIVDVKTRKRKTVKDYQLVQKGGGQECGDSRAQLSQYSQHFAFIASHLLQSSMDSHCPEAVEATWVLSLALKGLYKTLKAHGFEEIRATFLQTDLLKLLVKKCSKGTGFSKTWLLRDLEILSIMLYSSKKEINALAEHGDLELDERGDREEEVERPVSSPGDPEQKKLDPLEGLDEPTRICFLMAHDALNAPLHILRAIYELQMKKTDYFFLEVQKRFDGDELTTDERIRSLAQRWQPSKSLRLEEQSAKAVDTDMIILPCLSRPARCDQATAESNPVTQKLISSTESELQQSYAKQRRSKSAALLHKELNCKSKRAVRDYLFRVNEATAVLYARHVLASLLAEWPSHVPVSEDILELSGPAHMTYILDMFMQLEEKHEWEKVVMQTELVLTHQVLPLPHRLPPVSASWSEATCVAVQLPDRCECSKGRVTVSSPKDWASEELRGPERDFQLNQKALSPSSQFPSAEILRHIR

SEQ ID NO: 3171 - protein, 156 aa, Homo sapiens
GTRAGPVKDREAFQRLNFLYQAAHCVLAQDPENQALARFYCYTERTIAKRLVLRRDPSVKRTLCRGCSSLLVPGLTCTQRQRRCRGQRWTVQTCLTCQRSQRFLNDPGHLLWGDRPEAQLGSQADSKPLQPLPNTAHSISDRLPEEKMQTQGSSNQ

SEQ ID NO: 3172 - protein, 164 aa, Homo sapiens
FRRAGAGRGRRRGEVTSPLSPEPLAFQSLATSRRPEPQTTQTVRSSALPAPPASPMSQYAPSPDFKRALDSSPEANTEDDKTEEDVPMPKNYLWLTIVSCFCPAYPINIVALVFSIMSLNSYNDGDYEGARRLGRNAKWVAIASIIIGLLIIGISCAVHFTRNA

SEQ ID NO: 3173 - protein, 1348 aa, Homo sapiens
FRSGGCRRRAWTSRWPQRRRSPESCEAPLSAPLWGPQRGLPGREPLRSRSASAIALRTIGHILALLLRLLHLGLGSGGCREDVPPSGRGKKEEKMKKHRRALALVSCLFLCSLVWLPSWRVCCKESSSASASSYYSQDDNCALENEDVQFQKKDEREGPINAESLGKSGSNLPISPKEHKLKDDSIVDVQNTESKKLSPPVVETLPTVDLHEESSNAVVDSETVENISSSSTSEITPISKLDEIEKSGTIPIAKPSETEQSETDCDVGEALDASAPIEQPSFVSPPDSLVGQHIENVSSSHGKGKITKSEFESKVSASEQGGGDPKSALNASDNLKNESSDYTKPGDIDPTSVASPKDPEDIPTFDEWKKKVMEVEKEKSQSMHASSNGGSHATKKVQKNRNNYASVECGAKILAANPEAKSTSAILIENMDLYMLNPCSTKIWFVIELCEPIQVKQLDIANYELFSSTPKDFLVSISDRYPTNKWIKLGTFHGRDERNVQSFPLDEQMYAKYVKMFIKYIKVELLSHFGSEHFCPLSLIRVFGTSMVEEYEEIADSQYHSERQELFDEDYDYPLDYNTGEDKSSKNLLGSATNAILNMVNIAANILGAKTEDLTEGNKSISENATATAAPKMPESTPVSTPVPSPEYVTTEVHTHDMEPSTPDTPKESPIVQLVQEEEEEASPSTVTLLGSGEQEDESSPWFESETQIFCSELTTICCISSFSEYIYKWCSVRVALYRQRSRTALSKGKDYLVLAQPPLLLPAESVDVSVLQPLSGELENTNIEREAETVVLGDLSSSMHQDDLVNHTVDAVELEPSHSQTLSQSLLLDITPEINPLPKIEVSESVEYEAGHIPSPVIPQESSVEIDNETEQKSESFSSIEKPSITYETNKVNELMDNIIKEDVNSMQIFTKLSETIVPPINTATVPDNEDGEAKMNIADTAKQTLISVVDSSSLPEVKEEEQSPEDALLRGLQRTATDFYAELQNSTDLGYANGNLVHGSNQKESVFMRLNNRIKALEVNMSLSGRYLEELSQRYRKQMEEMQKAFNKTIVKLQNTSRIAEEQDQRQTEAIQLLQAQLTNMTQLVSNLSATVAELKREVSDRQSYLVISLVLCVVLGLMLCMQRCRNTSQFDGDYISKLPKSNQYPSPKRCFSSYDDMNLKRRTSFPLMRSKSLQLTGKEVDPNDLYIVEPLKFSPEKKKKRCKYKIEKIETIKPEEPLHPIANGDIKGRKPFTNQRDFSNMGEVYHSSYKGPPSEGSSETSSQSEESYFCGISACTSLCNGQSQKTKTEKRALKRRRSKVQDQGKLIKTLIQTKSGSLPSLHDIIKGNKEITVGTFGVTAVSGHI

SEQ ID NO: 3174 - protein, 1394 aa, Homo sapiens
RKCSKEKASKTPSQKIPTTPCCVLQAGPEPRSLAERMGADGETVVLKNMLIGVNLILLGSMIKPSECQLEVTTERVQRQSVEEEGGIANYNTSSKEQPVVFNHVYNINVPLDNLCSSGLEASAEQEVSAEDETLAEYMGQTSDHESQVTFTHRINFPKKACPCASSAQVLQELLSRIEMLEREVSVLRDQCNANCCQESAATGQLDYIPHCSGHGNFSFESCGCICNEGWFGKNCSEPYCPLGCSSRGVCVDGQCICDSEYSGDDCSELRCPTDCSSRGLCVDGECVCEEPYTGEDCRELRCPGDCSGKGRCANGTCLCEEGYVGEDCGQRQCLNACSGRGQCEEGLCVCEEGYQGPDCSAVAPPEDLRVAGISDRSIELEWDGPMAVTEYVISYQPTALGGLQLQQRVPGDWSGVTITELEPGLTYNISVYAVISNILSLPITAKVATHLSTPQGLQFKTITETTVEVQWEPFSFSFDGWEISFIPKNNEGGVIAQVPSDVTSFNQTGLKPGEEYIVNVVALKEQARSPPTSASVSTVIDGPTQILVRDVSDTVAFVEWIPPRAKVDFILLKYGLVGGEGGRTTFRLQPPLSQYSVQALRPGSRYEVSVSAVRGTNESDSATTQFTTEIDAPKNLRVGSRTATSLDLEWDNSEAEVQEYKVVYITLAGEQYHEVLVPRGIGPTTRATLTDLVPGTEYGVGISAVMNSQQSVPATMNARTELDSPRDLMVTASSETSISLIWTKASGPIDHYRITFTPSSGIASEVTVPKDRTSYTLTDLEPGAEYIISVTAERGRQQSLESTVDAFTGFRPISHLHFSHVTSSSVNITWSDPSPPADRLILNYSPRDEEEEMMEVSLDATKRHAVLMGLQPATEYIVNLVAVHGTVTSEPIVGSITTGIDPPKDITISNVTKDSVMVSWSPPVASFDYYRVSYRPTQVGRLDSSVVPNTVTEFTITRLNPATEYEISLNSVRGREESERICTLVHTAMDNPVDLIATNITPTEALLQWKAPVGEVENYVIVLTHFAVAGETILVDGVSEEFRLVDLLPSTHYTATMYATNGPLTSGTISTNFSTLLDPPANLTASEVTRQSALISWQPPRAEIENYVLTYKSTDGSRKELIVDAEDTWIRLEGLLENTDYTVLLQAAQDTTWSSITSTAFTTGGRVFPHPQDCAQHLMNGDTLSGVYPIFLNGELSQKLQVYCDMTTDGGGWIVFQRRQNGQTDFFRKWADYRVGFGNVEDEFWLGLDNIHRITSQGRYELRVDMRDGQEAAFASYDRFSVEDSRNLYKLRIGSYNGTAGDSLSYHQGRPFSTEDRDNDVAVTNCAMSYKGAWWYKNCHRTNLNGKYGESRHSQGINWYHWKGHEFSIPFVEMKMRPYNHRLMAGRKRQSLQF

SEQ ID NO: 3175 - protein, 207 aa, Homo sapiens
RLQLPACPALSAAHPLALPSFSSQCHRAEARAAAAATAEGTMASGVTVNDEVIKVFNDMKVRKSSTQEEIKKRKKAVLFCLSDDKRQIIVEEAKQILVGDIGDTVEDPYTSFVKLLPLNDCRYALYDATYETKESKKEDLVFIFWAPESAPLKSKMIYASSKDAIKKKFTGIKHEWQVNGLDDIKDRSTLGEKLGGNVVVSLEGKPL

SEQ ID NO: 3176 - protein, 489 aa, Homo sapiens
PRGCWSSCLDAMFRLNSLSALAELAVGSRWYHGGSQPIQIRRRLMMVAFLGASAVTASTGLLWKRAHAESPPCVDNLKSDIGDKGKNKDEGDVCNHEKKTADLAPHPEEKKKKRSGFRDRKVMEYENRIRAYSTPDKIFRYFATLKVISEPGEAEVFMTPEDFVRSITPNEKQPEHLGLDQYIIKRFDGKTEKISQEREKFADEGSIFYTLGECGLISFSDYIFLTTVLSTPQRNFEIAFKMFDLNGDGEVDMEEFEQVQSIIRSQTSMGMRHRDRPTTGNTLKSGLCSALTTYFFGADLKGKLTIKNFLEFQRKLQHDVLKLEFERHDPVDGRITERQFGGMLLAYSGVQSKKLTAMQRQLKKHFKEGKGLTFQEVENFFTFLKNINDVDTALSFYHMAGASLDKVTMQQVARTVAKVELSDHVCDVVFALFDCDGNGELSNKEFVSIMKQRLMRGLEKPKDMGFTRLMQAMWKCAQETAWDFALPKQ

SEQ ID NO: 3177 - protein, 155 aa, Homo sapiens
LGVVGSGAAVGGRQAARGAALGRRPMAAVLGALGATRRLLAALRGQSLGLAAMSSGTHRLTAEERNQAILDLKAAGWSELSERDAIYKEFSFHNFNQAFGFMSRVALQAEKMNHHPEWFNVYNKVQITLTSHDCGELTKKDVKLAKFIEKAAASV

SEQ ID NO: 3178 - protein, 201 aa, Homo sapiens
ACGCRSFCGSTVMSLLLYYALPALGSYAMLSIFFLRRPHLLHTPRAPTFRIRLGAHRGGSGELLENTMEAMENSMAQRSDLLELDCQLTRDRVVVVSHDENLCRQSGLNRDVGSLDFEDLPLYKEKLEVYFSPGHFAHGSDRRMVRLEDLFQRFPRTPMSVEIKGKNEELIREIAGLVRRYDRNEITIWASEKSSVMKKCK

SEQ ID NO: 3179 - protein, 469 aa, Homo sapiens
QETSKMETLSFPRYNVAEIVIHIRNKILTGADGKNLTKNDLYPNPKPEVLHMIYMRALQIVYGIRLEHFYMMPVNSEVMYPHLMEGFLPFSNLVTHLDSFLPICRVNDFETADILCPKAKRTSRFLSGIINFIHFREACRETYMEFLWQYKSSADKMQQLNAAHQEALMKLERLDSVPVEEQEEFKQLSDGIQELQQSLNQDFHQKTIVLQEGNSQKKSNISEKTKRLNELKLSVVSLKEIQESLKTKIVDSPEKLKNYKEKMKDTVQKLKNARQEVVEKYEIYGDSVDCLPSCQLEVQLYQKKIQDLSDNREKLASILKESLNLEDQIESDESELKKLKTEENSFKRLMIVKKEKLATAQFKINKKHEDVKQYKRTVIEDCNKVQEKRGAVYERVTTINHEIQKIRLGIQQLKDAADREKLKSQEIFLNLKTALEKYHDGIEKAAEDSYAKIDEKTAELKRKMFKMST

SEQ ID NO: 3180 - protein, 2263 aa, Homo sapiens
GNMACWPQLRLLLWKNLTFRRRQTCQLLLEVAWPLFIFLILISVRLSYPPYEQHECHFPNKAMPSAGTLPWVQGIICNANNPCFRYPTPGEAPGVVGNFNKSIVARLFSDARRLLLYSQKDTSMKDMRKVLRTLQQIKKSSSNLKLQDFLVDNETFSGFLYHNLSLPKSTVDKMLRADVILHKVFLQGYQLHLTSLCNGSKSEEMIQLGDQEVSELCGLPREKLAAAERVLRSNMDILKPILRTLNSTSPFPSKELAEATKTLLHSLGTLAQELFSMRSWSDMRQEVMFLTNVNSSSSSTQIYQAVSRIVCGHPEGGGLKIKSLNWYEDNNYKALFGGNGTEEDAETFYDNSTTPYCNDLMKNLESSPLSRIIWKALKPLLVGKILYTPDTPATRQVMAEVNKTFQELAVFHDLEGMWEELSPKIWTFMENSQEMDLVRMLLDSRDNDHFWEQQLDGLDWTAQDIVAFLAKHPEDVQSSNGSVYTWREAFNETNQAIRTISRFMECVNLNKLEPIATEVWLINKSMELLDERKFWAGIVFTGITPGSIELPHHVKYKIRMGIDNVERTNKIKDGYWDPGPRADPFEDMRYVWGGFAYLQDVVEQAIIRVLTGTEKKTGVYMQQMPYPCYVDDIFLRVMSRSMPLFMTLAWIYSVAVIIKGIVYEKEARLKETMRIMGLDNSILWFSWFISSLIPLLVSAGLLVVILKLGNLLPYSDPSVVFVFLSVFAVVTILQCFLISTLFSRANLAAACGGIIYFTLYLPYVLCVAWQDYVGFTLKIFASLLSPVAFGFGCEYFALFEEQGIGVQWDNLFESPVEEDGFNLTTSVSMMLFDTFLYGVMTWYIEAVFPGQYGIPRPWYFPCTKSYWFGEESDEKSHPGSNQKRISEICMEEEPTHLKLGVSIQNLVKVYRDGMKVAVDGLALNFYEGQITSFLGHNGAGKTTTMSILTGLFPPTSGTAYILGKDIRSEMSTIRQNLGVCPQHNVLFDMLTVEEHIWFYARLKGLSEKHVKAEMEQMALDVGLPSSKLKSKTSQLSGGMQRKLSVALAFVGGSKVVILDEPTAGVDPYSRRGIWELLLKYRQGRTIILSTHHMDEADVLGDRIAIISHGKLCCVGSSLFLKNQLGTGYYLTLVKKDVESSLSSCRNSSSTVSYLKKEDSVSQSSSDAGLGSDHESDTLTIDVSAISNLIRKHVSEARLVEDIGHELTYVLPYEAAKEGAFVELFHEIDDRLSDLGISSYGISETTLEEIFLKVAEESGVDAETSDGTLPARRNRRAFGDKQSCLRPFTEDDAADPNDSDIDPESRETDLLSGMDGKGSYQVKGWKLTQQQFVALLWKRLLIARRSRKGFFAQIVLPAVFVCIALVFSLIVPPFGKYPSLELQPWMYNEQYTFVSNDAPEDTGTLELLNALTKDPGFGTRCMEGNPIPDTPCQAGEEEWTTAPVPQTIMDLFQNGNWTMQNPSPACQCSSDKIKKMLPVCPPGAGGLPPPQRKQNTADILQDLTGRNISDYLVKTYVQIIAKSLKNKIWVNEFRYGGFSLGVSNTQALPPSQEVNDATKQMKKHLKLAKDSSADRFLNSLGRFMTGLDTRNNVKVWFNNKGWHAISSFLNVINNAILRANLQKGENPSHYGITAFNHPLNLTKQQLSEVAPMTTSVDVLVSICVIFAMSFVPASFVVFLIQERVSKAKHLQFISGVKPVIYWLSNFVWDMCNYVVPATLVIIIFICFQQKSYVSSTNLPVLALLLLLYGWSITPLMYPASFVFKIPSTAYVVLTSVNLFIGINGSVATFVLELFTDNKLNNINDILKSVFLIFPHFCLGRGLIDMVKNQAMADALERFGENRFVSPLSWDLVGRNLFAMAVEGVVFFLITVLIQYRFFIRPRPVNAKLSPLNDEDEDVRRERQRILDGGGQNDILEIKELTKIYRRKRKPAVDRICVGIPPGECFGLLGVNGAGKSSTFKMLTGDTTVTRGDAFLNRNSILSNIHEVHQNMGYCPQFDAITELLTGREHVEFFALLRGVPEKEVGKVGEWAIRKLGLVKYGEKYAGNYSGGNKRKLSTAMALIGGPPVVFLDEPTTGMDPKARRFLWNCALSVVKEGRSVVLTSHSMEECEALCTRMAIMVNGRFRCLGSVQHLKNRFGDGYTIVVRIAGSNPDLKPVQDFFGLAFPGSVPKEKHRNMLQYQLPSSLSSLARIFSILSQSKKRLHIEDYSVSQTTLDQVFVNFAKDQSDDDHLKDLSLHKNQTVVDVAVLTSFLQDEKVKESYV

SEQ ID NO: 3181 - protein, 384 aa, Homo sapiens
PPATSQAALPEALSKGRETPRPATHPARSQDVRPLSCPFDFLRDNVEWSEEQAAAAERKVQENSIQRVCQEKQVDYEINAHKYWNDFYKIHENGFFKDRHWLFTEFPELAPSQNQNHLKDWFLENKSEVPECRNNEDGPGLIMEEQHKCSSKSLEHKTQTPPVEENVTQKISDLEICADEFPGSSATYRILEVGCGVGNTVFPILQTNNDPGLFVYCCDFSSTAIELVQTNSEYDPSRCFAFVHDLCDEEKSYPVPKGSLDIIILIFVLSAIVPDKMQKAINRLSRLLKPGGMVLLRDYGRYDMAQLRFKKGQCLSGNFYVRGDGTRVYFFTQEELDTLFTTAGLEKVQNLVDRRLQVNRGKQLTMYRVWIQCKYCKPLLSSTS

SEQ ID NO: 3182 - protein, 428 aa, Homo sapiens
GSETQHLPRDPQHLPWDPQQHQDRRRPELFHAFARDSAPPPSMVLAAETTSQQERLQAIAEKRKRQAEIENKRRQLEDERRQLQHLKSKALRERWLLEGTPSSASEGDEDLRRQMQDDEQKTRLLEDSVSRLEKGIEVLERGDSAPAAAKENAAAPSPVRAPAPSPAKEERKTEVVMNSQQTPVGTPKDKRVSNTPLRTVDGSPMMKAAMYSVEITVEKDKVTGETRVLSSTTLLPRQPLPLGIKVYEDETKVVHAVDGTAENGIHPLSSSEVDELIHKADEVTLSEAGSTAGAAETRGAVEGAARTTPSRREITGVQAQPGEATSGPPGIQPGQEPPVTMIFMGYQNVEDEAETKKVLGLQDTITAELVVIEDAAEPKEPAPPNGSAAEPPTEAASREENQAGPEATTSDPQDLDMKKHRCKCCSIM

SEQ ID NO: 3183 - protein, 533 aa, Homo sapiens
IAPTGGSHSEIQKQLGSGGDSSSQRRAERRTEPRSAPRPRWGRSARSPGAHKLPGPPRRRDPGAWARLEAAAAHRHSRGSMGRRMRGAAATAGLWLLALGSLLALWGGLLPPRTELPASRPPEDRLPRRPARSGGPAPAPRFPLPPPLAWDARGGSLKTFRALLTLAAGADGPPRQSRSEPRWHVSARQPRPEESAAVHGGVFWSRGLEEQVPPGFSEAQAAAWLEAARGARMVALERGGCGRSSNRLARFADGTRACVRYGINPEQIQGEALSYYLARLLGLQRHVPPLALARVEARGAQWAQVQEELRAAHWTEGSVVSLTRWLPNLTDVVVPAPWRSEDGRLRPLRDAGGELANLSQAELVDLVQWTDLILFDYLTANFDRLVSNLFSLQWDPRVMQRATSNLHRGPGGALVFLDNEAGLVHGYRVAGMWDKYNEPLLQSVCVFRERTARRVLELHRGQDAAARLLRLYRRHEPRFPELAALADPHAQLLQRRLDFLAKHILHCKAKYGRRSGDLVSPGGKERDLGLGYG

SEQ ID NO: 3184 - protein, 334 aa, Homo sapiens
GSTHASADAWAQWFCTEALVMGAPVWYLVAAALLVGFILFLTRSRGRAASAGQEPLHNEELAGAGRVAQPGPLEPEEPRAGGRPRRRRDLGSRLQAQRRAQRVAWAEADENEEEAVILAQEEEGVEKPAETHLSGKIGAKKLRKLEEKQARKAQREAEEAEREERKRLESQREAEWKKEEERLRLEEEQKEEEERKAREEQAQREHEEYLKLKEAFVVEEEGVGETMTEEQSQSFLTEFINYIKQSKVVLLEDLASQVGLRTQDTINRIQDLLAEGTITGVIDDRGKFIYITPEELAAVANFIRQRGRVSIAELAQASNSLIAWGRESPAQAPA

SEQ ID NO: 3185 - protein, 1397 aa, Homo sapiens
CLLAGKFSSTLYETGGCDMSLVNFEPAARRASNICDTDSHVSSSTSVRFYPHDVLSLPQIRLNRLLTIDTDLLEQQDIDLSPDLAATYGPTEEAAQKVKHYYRFWILPQLWIGINFDRLTLLALFDRNREILENVLAVILAILVAFLGSILLIQGFFRDIWVFQFCLVIASCQYSLLKSVQPDSSSPRHGHNRIIAYSRPVYFCICCGLIWLLDYGSRNLTATKFKLYGITFTNPLVFISARDLVIVFTLCFPIVFFIGLLPQVNTFVMYLCEQLDIHIFGGNATTSLLAALYSFICSIVAVALLYGLCYGALKDSWDGQHIPVLFSIFCGLLVAVSYHLSRQSSDPSVLFSLVQSKIFPKTEEKNPEDPLSEVKDPLPEKLRNSVSERLQSDLVVCIVIGVLYFAIHVSTVFTVLQPALKYVLYTLVGFVGFVTHYVLPQVRKQLPWHCFSHPLLKTLEYNQYEVRNAATMMWFEKLHVWLLFVEKNIIYPLIVLNELSSSAETIASPKKLNTELGALMITVAGLKLLRSSFSSPTYQYVTVIFTVLFFKFDYEAFSETMLLDLFFMSILFNKLWELLYKLQFVYTYIAPWQITWGSAFHAFAQPFAVPHSAMLFIQAAVSAFFSTPLNPFLGSAIFITSYVRPVKFWERDYNTKRVDHSNTRLASQLDRNPGTYCQQREVEAITEGVEEDEGFCCCEPGHIPHMLSFNAAFSQRWLAWEVIVTKYILEGYSITDNSAASMLQVFDLRKVLTTYYVKGIIYYVTTSSKLEEWLANETMQEGLRLCADRNYVDVDPTFNPNIDEDYDHRLAGISRESFCVIYLNWIEYCSSRRAKPVDVDKDSSLVTLCYGLCVLGRRALGTASHHMSSNLESFLYGLHALFKGDFRISSIRDEWIFADMELLRKVVVPGIRMSIKLHQDHFTSPDEYDDPTVLYEAIVSHEKNLVIAHEGDPAWRSAVLANSPSLLALRHVMDDGTNEYKIIMLNRRYLSFRVIKVNKECVRGLWAGQQQELVFLRNRNPERGSIQNAKQALRNMINSSCDQPIGYPIFVSPLTTSYSDSHEQLKDILGGPISLGNIRNFIVSTWHRLRKGCGAGCNSGGNIEDSDTGGGTSCTGNNATTANNPHSNVTQGSIGNPGQGSGTGLHPPVTSYPPTLGTSHSSHSVQSGLVRQSPARASVASQSSYCYSSRHSSLRMSTTGFVPCRRSSTSQISLRNLPSSIQSRLSMVNQMEPSGQSGLACVQHGLPSSSSSSQSIPACKHHTLVGFLATEGGQSSATDAQPGNTLSPANNSHSRKAEVIYRVQIVDPSQILEGINLSKRKELQWPDEGIRLKAGRNSWKDWSPQEGMEGHVIHRWVPCSRDPGTRSHIDKAVLLVQIDDKYVTVIETGVLELGAEV

SEQ ID NO: 3186 - protein, 155 aa, Homo sapiens
SLSAMRFLAATFLLLALSTAAQAEPVQFKDCGSVDGVIKEVNVSPCPTQPCQLSKGQSYSVNVTFTSNIQSKSSKAVVHGILMGVPVPFPIPEPDGCKSGINCPIQKDKTYSYLNKLPVKSEYPSIKLVVEWQLQDDKNQSLFCWEIPVQIVSHL

SEQ ID NO: 3187 - protein, 155 aa, Homo sapiens; identical to SEQ ID NO: 3186

SEQ ID NO: 3188 - protein, 1160 aa, Homo sapiens
PRVRTKLILLVNDKKRYERVGGGPKRLGRDVEMEEMIEQLQEKVHELEKQNDTLKNRLISAKQQLQTQGYRQTPYNNVQSRINTGRRKANENAGLQECPRKGIKFQDADVAETPHPMFTKYGNSLLEEARGEIRNLENVIQSQRGQIEELEHLAEILKTQLRRKENEIELSLLQLREQQATDQRSNIRDNVEMIKLHKQLVEKSNALSAMEGKFIQLQEKQRTLKISHDALMANGDELNMQLKEQRLKCCSLEKQLHSMKFSERRIEELQDRINDLEKERELLKENYDKLYDSAFSAAHEEQWKLKEQQLKVQIAQLETALKSDLTDKTEILDRLKTERDQNEKLVQENRELQLQYLEQKQQLDELKKRIKLYNQENDINADELSEALLLIKAQKEQKNGDLSFLVKVDSEINKDLERSMRELQATHAETVQELEKTRNMLIMQHKINKDYQMEVEAVTRKMENLQQDYELKVEQYVHLLDIRAARIHKLEAQLKDIAYGTKQYKFKPEIMPDDSVDEFDETIHLERGENLFEIHINKVTFSSEVLQASGDKEPVTFCTYAFYDFELQTTPVVRGLHPEYNFTSQYLVHVNDLFLQYIQKNTITLEVHQAYSTEYETIAACQLKFHEILEKSGRIFCTASLIGTKGDIPNFGTVEYWFRLRVPMDQAIRLYRERAKALGYITSNFKGPEHMQSLSQQAPKTAQLSSTDSTDGNLNELHITIRCCNHLQSRASHLQPHPYVVYKFFDFADHDTAIIPSSNDPQFDDHMYFPVPMNMDLDRYLKSESLSFYVFDDSDTQENIYIGKVNVPLISLAHDRCISGIFELTDHQKHPAGTIHVILKWKFAYLPPSGSITTEDLGNFIRSEEPEVVQRLPPASSVSTLVLAPRPKPRQRLTPVDKKVSFVDIMPHQSDVSQEGSVDEVKENTEKMQQGKDDVSLLSEGQLAEQSLASSEDETEITEDLEPEVEEDMSASDSDDCIIPGPISKNIKQPSEKIRIEIIALSLNDSQVTMDDTIQRLFVECRFYSLPAEETPVSLPKPKSGQWVYYNYSNVIYVDKENNKAKRDILKAILQKQEMPNRSLRFTVVSDPPEDEQDLECEDIGVAHVDLADMFQEGRDLIEQNIDVFDARADGEGIGKLRVTVEALHALQSVYKQYRDDLEA

SEQ ID NO: 3189 - protein, 233 aa, Homo sapiens
MKGSGWHLRSGMVGTLITTILPHWRRTAHVGTNILTAVSYLKGLWMECVWHSTGIYQCQIYRSLLALPQDLQAARALMGISCLLSGIACACAVIGMKCTRCAKGTPAKTTFAILGGTLFILAGLLCMGAVSWTTNDVVQNFYNPLLPSGMKFEIGQALYLGFISSSLSLIGGTLLCLSCQDEAPYRPYQAPPRATTTTANTAPAYQPPAAYKDNRAPSVTSATHSGYRLNDYV

SEQ ID NO: 3190 - protein, 256 aa, Homo sapiens
DRMAWQGLVLAACLLMFPSTTADCLSRCSLCAVKTQDGPKPINPLICSLQCQAALLPSEEWERCQSFLSFFTPSTLGLNDKEDLGSKSVGEGPYSELAKLSGSFLKELEKSKFLPSISTKENTLSKSLEEKLRGLSDGFREGAESELMRDAQLNDGAMETGTLYLAEEDPKEQVKRYGGFLRKYPKRSSEVAGEGDGDSMGHEDLYKRYGGFLRRIRPKLKWDNQKRYGGFLRRQFKVVTRSQEDPNAYSGELFDA

SEQ ID NO: 3191 - protein, 181 aa, Homo sapiens
GTSAGAQTKGALCQLKVPTEKLPSPLPTMADEIDFTTGDAGASSTYPMQCSALRKNGFVVLKGRPCKIVEMSTSKTGKHGHAKVHLVGIDIFTGKKYEDICPSTHNMDVPNIKRNDYQLICIQDGYLSLLTETGEVREDLKLPEGELGKEIEGKYNAGEDVQVSVMCAMSEEYAVAIKPCK

SEQ ID NO: 3192 - protein, 518 aa, Homo sapiens
KVSADGMQSCESSGDSADDPLSRGLRRRGQPRVVVIGAGLAGLAAAKALLEQGFTDVTVLEASSHIGGRVQSVKLGHATFELGATWIHGSHGNPIYHLTEANGLLEETTDGERSVGRISLYSKNGVACYLTNHGRRIPKDVVEEFSDLYNEVYNLTQEFFRHDKPVNAESQNSVGVFTREEVRNRIRNDPDDPEATKRLKLAMIQQYLKVESCESSSHSMDEVSLSAFGEWTEIPGAHHIIPSGFMRVVELLAEGIPAHVIQLGKPVRCIHWDQASARPRGPEIEPRGEGDHNHDTGEGGQGGEEPRGGRWDEDEQWSVVVECEDCELIPADHVIVTVSLGVLKRQYTSFFRPGLPTEKVAAIHRLGIGTTDKIFLEFEEPFWGPECNSLQFVWEDEAESHTLTYPPELWYRKICGFDVLYPPERYGHVLSGWICGEEALVMEKCDDEAVAEICTEMLRQFTGNPNIPKPRRILRSAWGSNPYFRGSYSYTQVGSSGADVEKLAKPLPYTESSKTATK

SEQ ID NO: 3193 - protein, 642 aa, Homo sapiens
QLGTRRCLRGDKVTNAMQDFLVTNLEPRFIEPQTANLSVVFKDSNSTTPLIFVLSPGTDPAADLYKFAEEMKFSKKLSAISLGQGQGPRAEAMMRSSIERGKWVFFQNCHLAPSWMPALERLIEHINPDKVHRDFRLWLTSLPSNKFPVSILQNGSKMTIEPPRGVRANLLKSYSSLGEDFLNSCHKVMEFKSLLLSLCLFHGNALERRKFGPLGFNIPYEFTDGDLRICISQLKMFLDEYDDIPYKVLKYTAGEINYGGRVTDDWDRRCIMNILEDFYNPDVLSPEHSYSASGIYHQIPPTYDLHGYLSYIKSLPLNDMPEIFGLHDNANITFAQNETFALLGTIIQLQPKSSSAGSQGREEIVEDVTQNILLKVPEPINLQWVMAKYPVLYEESMNTVLVQEVIRYNRLLQVITQTLQDLLKALKGLVVMSSQLELMAASLYNNTVPELWSAKAYPSLKPLSSWVMDLLQRLDFLQAWIQDGIPAVFWISGFFFPQAFLTGTLQNFARKFVISIDTISFDFKVMFEAPSELTQRPQVGCYIHGLFLEGARWDPEAFQLAESQPKELYTEMAVIWLLPTPNRKAQDQDFYLCPIYKTLTRAGTLSTTGHSTNYVIAVEIPTHQPQRHWIKRGVALICALDY

SEQ ID NO: 3194 - protein, 341 aa, Homo sapiens
DGWTPVHAAVDTGNVDSLKLLMYHRIPAHGNSFNEEESESSVFDLDGGEESPEGISKPVVPADLINHANREGWTAAHIAASKGFKNCLEILCRHGGLEPERRDKCNRTVHDVATDDCKHLLENLNALKIPLRISVGEIEPSNYGSDDLECENTICALNIRKQTSWDDFSKAVSQALTNHFQAISSDGWWSLEDVTCNNTTDSNIGLSARSIRSITLGNVPWSVGQSFAQSPWDFMRKNKAEHITVLLSGPQEGCLSSVTYASMIPLQMMQNYLRLVEQYHNVIFHGPEGSLQDYIVHQLALCLKHRQMGWQDSPVEIVEELEVGCWFFPREQLLRTCSLVA

SEQ ID NO: 3195 - protein, 603 aa, Homo sapiens; identical to SEQ ID NO: 1227

SEQ ID NO: 3196 - protein, 378 aa, Homo sapiens
VGFWERPLRSSRWFRRSLRRWEMLARAARGTGALLLRGSLLASGRAPRRASSGLPRNTVVLFVPQQEAWVVERMGRFHRILEPGLNILIPVLDRIRYVQSLKEIVINVPEQSAVTLDNVTLQIDGVLYLRIMDPYKASYGVEDPEYAVTQLAQTTMRSELGKLSLDKVFRERESLNASIVDAINQAADCWGIRCLRYEIKDIHVPPRVKESMQMQVEAERRKRATVLESEGTRESAINVAEGKKQAQILASEAEKAEQINQAAGEASAVLAKAKAKAEAIRILAAALTQHNGDAAASLTVAEQYVSAFSKLAKDSNTILLPSNPGDVTSMVAQAMGVYGALTKAPVPGTPDSLSSGSSRDVQGTDASLDEELDRVKMS

SEQ ID NO: 3197 - protein, 1189 aa, Homo sapiens
LWECAAAAAGQRDGGVTLFLKGRVLGRRCAASLFAREVCVSTSSSRPACFLHCARARGEQMHQMASGVGSMKRSPRKMWRPGEKKEPQGVVYEDVRDDTEDFKEPLKVVFEGSAYGLQNFNKQKKLKTCDDMDTFFLHYAAAEGQIELMEKITRDSSLEVLHEMDDYGNTPLHCAVEKNQIESVKFLLSRGANPNLRNFNMMAPLHIAVQGMNNEVMKVLLEHRTIDVNLEGENGNTAVIIACTTNNSEALQILLNKGAKPCKSNKWGCFPIHQAAFSGSKECMEIILRFGEEHGYSRQLHINFMNNGKATPLHLAVQNGDLEMIKMCLDNGAQIDPVEKGRCTAIHFAATQGATEIVKLMISSYSGSVDIVNTTDGCHETMLHRASLFDHHELADYLISVGADINKIDSEGRSPLILATASASWNIVNLLLSKGAQVDIKDNFGRNFLHLTVQQPYGLKNLRPEFMQMQQIKELVMDEDNDGCTPLHYACRQGGPGSVNNLLGFNVSIHSKSKDKKSPLHFAASYGRINTCQRLLQDISDTRLLNEGDLHGMTPLHLAAKNGHDKVVQLLLKKGALFLSDHNGWTALHHASMGGYTQTMKVILDTNLKCTDRLDEDGNTALHFAAREGHAKAVALLLSHNADIVLNKQQASFLHLALHNKRKEVVLTIIRSKRWDECLKIFSHNSPGNKCPITEMIEYLPECMKVLLDFCMLHSTEDKSCRDYYIEYNFKYLQCPLEFTKKTPTQDVIYEPLTALNAMVQNNRIELLNHPVCKEYLLMKWLAYGFRAHMMNLGSYCLGLIPMTILVVNIKPGMAFNSTGIINETSDHSEILDTTNSYLIKTCMILVFLSSIFGYCKEAGQIFQQKRNYFMDISNVLEWIIYTTGIIFVLPLFVEIPAHLQWQCGAIAVYFYWMNFLLYLQRFENCGIFIVMLEVILKTLLRSTVVFIFLLLAFGLSFYILLNLQDPFSSPLLSIIQTFSMMLGDINYRESFLEPYLRNELAHPVLSFAQLVSFTIFVPIVLMNLLIGLAVGDIAEVQKHASLKRIAMQVELHTSLEKKLPLWFLRKVDQKSTIVYPNKPRSGGMLFHIFCFLFCTGEIRQEIPNADKSLEMEILKQKYRLKDLTFLLEKQHELIKLIIQKMEIISETEDDDSHCSFQDRFKKEQMEQRNSRWNTVLRAVKAKTHHLEP

SEQ ID NO: 3198 - protein, 708 aa, Homo sapiens
KEKSLHHVDQRPPLWHPGRPGTSQSAAMNASSEGESFAGSVQIPGGTTVLVELTPDIHICGICKQQFNNLDAFVAHKQSGCQLTGTSAAAPSTVQFVSEETVPATQTQTTTRTITSETQTITVSAPEFVFEHGYQTYLPTESNENQTATVISLPAKSRTKKPTTPPAQKRLNCCYPGCQFKTAYGMKDMERHLKIHTGDKPHKCEVCGKCFSRKDKLKTHMRCHTGVKPYKCKTCDYAAADSSSLNKHLRIHSDERPFKCQICPYASRNSSQLTVHLRSHTGDAPFQCWLCSAKFKISSDLKRHMRVHSGEKPFKCEFCNVRCTMKGNLKSHIRIKHSGNNFKCPHCAFLGDSKATLRKHSRVHQSEHREKCSECSYSCSSKAALRIHERIHCTVRPFKCNYCSFDSKQPSNLSKHMKKFHGDMVKTEALERKDTGRQSSRQVAKLDAKKSFHCDICDASFMREDSLRSHKRQHSEYNESKNSDVTVLQFQIDPSKQPATPLTVGHLQVPLQPSQVPQFSEGRVKIIVGHQVPQANTIVQAAAAAVNIVPPALVAQNPEELPGNSRLQILRQVSLIAPPQSSRCPSEAGAMTQPAVLLTTHEQTDGATLHQTLIPTASGGPQEGSGNQTFITSSGITCTDFEGLNALIQEGTAEVTVVSDGGQNIAVATTAPPVFSSSSQQELPKQTYSIIQGAAHPALLCPADSIPD

SEQ ID NO: 3199 - protein, 745 aa, Homo sapiens
QSFHSMEGDPSGLPLLARGASCYSLICPCPRPADWSILQGTDWSILQSADWCIYNPLARHRALTGVFLQSADWCTYNPLARQKSSPSPHSTQEVQLASPLTRRPNKKDSAERNHRPAREGSVAQRQPNPAALEKAEPAARKRNEREGGGSQEPGREHSLEKGYWAPGLGPDPSMCSKQVDPSEGASSHLKHRGGSRAAHLEVRRLLRRLVGALVAEAGFCYVQVAEGQRVVGVLEVAEAAAAPVQHEPTAAVATQSRWFPRGTRPGLCSLPIAVAALLCPGSGPGAQSGLEFVERPPPSPLAVVLARWPLPPPAGRCPRDAPEARVPEKARAEGSERENNYGCGVVGGEMTTLVLDNGAYNAKIGYSHENVSVIPNCQFRSKTARLKTFTANQIDEIKDPSGLFYILPFQKGYLVNWDVQRQVWDYLFGKEMYQVDFLDTNIIITEPYFNFTSIQESMNEILFEEYQFQAVLRVNAGALSAHRYFRDNPSELCCIIVDSGYSFTHIVPYCRSKKKKEAIIRINVGGKLLTNHLKEIISYRQLHVMDETHVINQVKEDVCYVSQDFYRDMDIAKLKGEENTVMIDYVLPDFSTIKKGFCKPREEMVLSGKYKSGEQILRLANERFAVPEILFNPSDIGIQEMGIPEAIVYSIQNLPEEMQPHFFKNIVLTGGNSLFPGFRDRVYSEVRCLTPTDYDVSVVLPENPITYAWEGGKLISENDDFEDMVVTREDYEENGHSVCEEKFDI

SEQ ID NO: 3200 - protein, 101 aa, Homo sapiens
AVQRIRHEMNIFRLTGDLSHLAAIVILLLKIWKTRSCAGISGKSQLLFALVFTTRYLDLFTSFISLYNTSMKVWYAIHRNVFHLQCTGLWTLNLCQLCIFN

SEQ ID NO: 3201 - protein, 156 aa, Homo sapiens
IRHEGRGQRGKMELVQVLKRGLQQITGHGGLRGYLRVFFRTNDAKVGTLVGEDKYGNKYYEDNKQFFGRHRWVVYTTEMNGKNTFWDVDGSMVPPEWHRWLHSMTDDPPTTKPLTARKFIWTNHKFNVTGTPEQYVPYSTTRKKIQEWIPPSTPYK

SEQ ID NO: 3202 - protein, 231 aa, Homo sapiens
NSSQRIMATHALEIAGLFLGGVGMVGTVAVTVMPQWRVSAFIENNIVVFENFWEGLWMNCVRQANIRMQCKIYDSLLALSPDLQAARGLMCAASVMSFLAFMMAILGMKCTRCTGDNEKVKAHILLTAGIIFIITGMVVLIPVSWVANAIIRDFYNSIVNVAQKRELGEALYLGWTTALVLIVGGALFCCVFCCNEKSSSYRYSIPSHRTTQKSYHTGKKSPSVYSRSQYV

SEQ ID NO: 3203 - protein, 157 aa, Homo sapiens
KYRYRRPYPVMRKICQVGPAGLAFILNISPVAHRVALCHLAGCQEQAAWYHTLQILFFLVSAYFFSCPVPEKYFPGSCDIVGHGHQIFHAFLSICTLSQLEAILLDYQGRQEIFLQRHGPLSVHMACLSFFFLAACSAATAALLRHKVKARLTKKDS

SEQ ID NO: 3204 - protein, 380 aa, Homo sapiens
PESAPLPAFISSRILPAAWRNWCSYVVTRTISCHVQNGTYLQRVLQNCPWPMSCPGSSYRTVVRPTYKVMYKIVTAREWRCCPGHSRVSCEEVAGSSASLEPMWSGSTMRRMALRPTAFSGCLNCSKVSELTERLKVLEAKMTMLTVIEQPVPPTPATPEDPAPLWGPPPAQGSPGDGGLQDQVGAWGLPGPTGPKGDAGSRGPMGMRGPPGDPLLSNTFTETNNHWPQGPTGPPGPPGPMGPPGPPGPTGVPGSPGHIGPPGPTGPKGISGHPGEKGERGLRGEPGPQGSAGQRGEPGPKGDPGEKSHWGEGLHQLREALKILAERVLILETMIGLYEPELGSGAGPAGTGTPSLLRGKRGGHATNYRIVAPRSRDERG

SEQ ID NO: 3205 - protein, 386 aa, Homo sapiens
RTSTQKWQSVFNDSQEHLERFYCNPENDRMRMKYGGQEFWADLNAMNVYETTEFDQLRRLSTPPSSNVNSIYHTVWKFFCRDHFGWREYPESVIRLIEEANSRGLKEVRFMMWNNHYILHNSFFRREIKRRPLFRSCFILLPYLQTLGGVPTQAPPPLEATSSSQIICPDGVTSANFYPETWVYMHPSQDFIQVPVSAEDKSYRIIYNLFHKTVPEFKYRILQILRVQNQFLWEKYKRKKEYMNRKMFGRDRIINERHLFHGTSQDVVDGICKHNFDPRVCGKHATMFGQGSYFAKKASYSHNFSKKSSKGVHFMFLAKVLTGRYTMGSHGMRRPPPVNPGSVTSDLYDSCVDNFFEPQIFVIFNDDQSYPYFVIQYEEVSNTVSI

SEQ ID NO: 3206 - protein, 1400 aa, Homo sapiens
CLVDSKLWKGARSVYHQLFMSSLLMDLKYKKLFAVRFAKNYERLQSDYVTDDHDREFSVADLSVQIFTVPSLARMLITEENLMSIIIKTFMDHLRHRDAQGRFQFERYTALQAFKFRRVQSLILDLKYVLISKPTEWSDELRQKFLEGFDAFLELLKCMQGMDPITRQVGQHIEMEPEWEAAFTLQMKLTHVISMMQDWCASDEKVLIEAYKKCLAVLMQCHGGYTDGEQPITLSICGHSVETIRYCVSQEKVSIHLPVSRLLAGLHVLLSKSEVAYKFPELLPLSELSPPMLIEHPLRCLVLCAQVHAGMWRRNGFSLVNQIYYYHNVKCRREMFDKDVVMLQTGVSMMDPNHFLMIMLSRFELYQIFSTPDYGKRFSSEITHKDVVQQNNTLIEEMLYLIIMLVGERFSPGVGQVNATDEIKREIIHQLSIKPMAHSELVKSLPEDENKETGMESVIEAVAHFKKPGLTGRGMYELKPECAKEFNLYFYHFSRAEQSKAEEAQRKLKRQNREDTALPPPVLPPFCPLFASLVNILQSDVMLCIMGTILQWAVEHNGYAWSESMLQRVLHLIGMALQEEKQHLENVTEEHVVTFTFTQKISKPGEAPKNSPSILAMLETLQNAPYLEVHKDMIRWILKTFNAVKKMRESSPTSPVAETEGTIMEESSRDKDKAERKRKAEIARLRREKIMAQMSEMQRHFIDENKELFQQTLELDASTSAVLDHSPVASDMTLTALGPAQTQVPEQRQFVTCILCQEEQEVKVESRAMVLAAFVQRSTVLSKNRSKFIQDPEKYDPLFMHPDLSCGTHTSSCGHIMHAHCWQRYFDSVQAKEQRRQQRLRLHTSYDVENGEFLCPLCECLSNTVIPLLLPPRNIFNNRLNFSDQPNLTQWIRTISQQIKALQFLRKEESTPNNASTKNSENVDELQLPEGFRPDFRPKIPYSESIKEMLTTFGTATYKVGLKVHPNEEDPRVPIMCWGSCAYTIQSIERILSDEDKPLFGPLPCRLDDCLRSLTRFAAAHWTVASVSVVQGHFCKPFASLVPNDSHEELPCILDIDMFHLLVGLVLAFPALQCQDFSGISLGTGDLHIFHLVTMAHIIQILLTSCTEENGMDQENPPCEEESAVLALYKTLHQYTGSALKEIPSGWHLWRSVRAGIMPFLKCSALFFHYLNGVPSPPDIQVPGTSHFEHLCSYLSLPNNLICLFQENSEIMNSLIESWCRNSEVKRYLEGERDAIRYPRESNKLINLPEDYSSLINQASNFSCPKSGGDKSRAPTLCLVCGSLLCSQSYCCQTELEGEDVGACTAHTYSCGSGVGIFLRVRECQVLFLAGKTKGCFYSPPYLDDYGETDQGLRRGNPLHLCKERFKKIQKLWHQHSVTEEIGHAQEANQTLVGIDWQHL

SEQ ID NO: 3207 - protein, 305 aa, Homo sapiens
QLSPSQAPAGAQEVARRVTVGSASHGGRRSTMATTVSTQRGPVYIGELPQDFLRITPTQQQRQVQLDAQAAQQLQYGGAVGTVGRLNITVVQAKLAKNYGMTRMDPYCRLRLGYAVYETPTAHNGAKNPRWNKVIHCTVPPGVDSFYLEIFDERAFSMDDRIAWTHITIPESLRQGKVEDKWYSLSGRQGDDKEGMINLVMSYALLPAAMVMPPQPVVLMPTVYQQGVGYVPITGMPAVCSPGMVPVALPPAAVNAQPRCSEEDLKAIQDMFPNMDQEVIRSVLEAQRGNKDAAINSLLQMGEEP

SEQ ID NO: 3208 - protein, 380 aa, Homo sapiens; identical to SEQ ID NO: 1240

SEQ ID NO: 3209 - protein, 632 aa, Homo sapiens
AKVVSLKEFSCFWRREKPVSSLSSLQVKAEASWDSAVHGCPQLSRGTPVDERLFLIVRVTVQLSHPADMQLVLRKRICVNVHGRQGFAQSLLKKMSHRSSIPGCGVTFEIVSNIPEDAQGVEEREALARMAANVENPASADSEAYIEKYLRSVLAVENLLTLDRLRQEVAVKEQLTGKGKLSRRSISSPNVNRLSGSRQDLIPSYSLGSNKGRWESQQDVSQTTVSRGIAPAPALSVSPQNNHSPDPGLSNLAASYLNPVKSFVPQMPKLLKSLFPVRDEKRGKRPSPLAHQPVPRIMVQSASPDIRVTRMEEAQPEMGPDVLVQTMGAPALKICDKPAKVPSPPPVIAVTAVTPAPEAQDGPPSPLSEASSGYFSHSVSTATLSDALGPGLDAAAPPGSMPTAPEAEPEAPISHPPPPTAVPAEEPPGPQQLVSPGRERPDLEAPAPGSPFRVRRVRASELRSFSRMLAGDPGCSPGAEGNAPAPGAGGQALASDSEEADEVPEWLREGEFVTVGAHKTGVVRYVGPADFQEGTWVGVELDLPSGKNDGSIGGKQYFRCNPGYGLLVRPSRVRRATGPVRRRSTGLRLGAPEARRSATLSGSATNLASLTAALAKADRSHKNPENRKSWAS

SEQ ID NO: 3210 - protein, 123 aa, Homo sapiens
SPFWTEKRRMEKPLFPLVPLHWFGFGYTALVVSGGIVGYVKTGSVPSLAAGLLFGSLAGLGAYQLYQDPRNVWGFLAATSVTFVGVMGMRSYYYGKFMPVGLIAGASLLMAAKVGVRMLMTSD

SEQ ID NO: 3211 - protein, 161 aa, Homo sapiens
VGMELPAVNLKVILLGHWLLTTWGCIVFSGSYAWANFTILALGVWAVAQRDSIDAISMFLGGLLATIFLDIVHISIFYPRVSLTDTGRFGVGMAILSLLLKPLSCCFVYHMYRERGGELLVHTGFLGSSQDRSAYQTIDSAEAPADPFAVPEGRSQDARGY

SEQ ID NO: 3212 - protein, 654 aa, Homo sapiens
FRCGLAPKGRPRRRADPVASAIMDPAEAVLQEKALKFMMEFRSWCPGWNTMARSRLTATSTSRVQCSMPRSLWLGCSSLADSMPSLRCLYNPGTGALTAFQNSSEREDCNNGEPPRKIIPEKNSLRQTYNSCARLCLNQETVCLASTAMKTENCVAKTKLANGTSSMIVPKQRKLSASYEKEKELCVKYFEQWSESDQVEFVEHLISQMCHYQHGHINSYLKPMLQRDFITALPARGLDHIAENILSYLDAKSLCAAELVCKEWYRVTSDGMLWKKLIERMVRTDSLWRGLAERRGWGQYLFKNKPPDGNAPPNSFYRALYPKIIQDIETIESNWRCGRHSLQRIHCRSETSKGVYCLQYDDQKIVSGLRDNTIKIWDKNTLECKRILTGHTGSVLCLQYDERVIITGSSDSTVRVWDVNTGEMLNTLIHHCEAVLHLRFNNGMMVTCSKDRSIAVWDMASPTDITLRRVLVGHRAAVNVVDFDDKYIVSASGDRTIKVWNTSTCEFVRTLNGHKRGIACLQYRDRLVVSGSSDNTIRLWDIECGACLRVLEGHEELVRCIRFDNKRIVSGAYDGKIKVWDLVAALDPRAPAGTLCLRTLVEHSGRVFRLQFDEFQIVSSSHDDTILIWDFLNDPAAQSEPPRSPSRTYTYISR

SEQ ID NO: 3213 - protein, 654 aa, Homo sapiens; identical to SEQ ID NO: 3212

SEQ ID NO: 3214 - protein, 654 aa, Homo sapiens; identical to SEQ ID NO: 3212

SEQ ID NO: 3215 - protein, 458 aa, Homo sapiens
EARLVGCQRGGPARPGSYSSGAETAGRAMAANLSRNGPALQEAYVRVVTEKSPTDWALFTYEGNSNDIRVAGTGEGGLEEMVEELNSGKVMYAFCRVKDPNSGLPKFVLINWTGEGVNDVRKGACASHVSTMASFLKGAHVTINARAEEDVEPECIMEKVAKASGANYSFHKESGRFQDVGPQAPVGSVYQKTNAVSEIKRVGKDSFWAKAEKEEENRRLEEKRRAEEAQRQLEQERRERELREAARREQRYQEQGGEASPQRTWEQQQEVVSRNRNEQESAVHPREIFKQKERAMSTTSISSPQPGKLRSPFLQKQLTQPETHFGREPAAAISRPRADLPAEEPAPSTPPCLVQAEEEAVYEEPPEQETFYEQPPLVQQQGAGSEHIDHHIQGQGLSGQGLCARALYDYQAADDTEISFDPENLITGIEVIDEGWWRGYGPDGHFGMFPANYVELIE

SEQ ID NO: 3216 - protein, 180 aa, Homo sapiens
AMASTLEYSPSPLRRLVGPAAGFSRAARADLSWDPMAFFTGLWGPFTCVSRVLSHHCFSTTGSLSAIQKMTRVRVVDNSALGNSPYHRAPRCIHVYKKNGVGKVGDQILLAIKGQKKKALIVGHCMPGPRMTPRFDSNNVVLIEDNGNPVGTRIKTPIPTSLRKREGEYSKVLAIAQNFV

SEQ ID NO: 3217 - protein, 521 aa, Homo sapiens; identical to SEQ ID NO: 1249

SEQ ID NO: 3218 - protein, 521 aa, Homo sapiens; identical to SEQ ID NO: 1249

SEQ ID NO: 3219 - protein, 350 aa, Homo sapiens
TSAEGWKGCTCTFKDRSKLREHLRSHTQEKVVACPTCGGMFANNTKFLDHIRRQTSLDQQHFQCSHCSKRFATERLLRDHMRNHVNHYKCPLCDMTCPLPSSLRNHMRFRHSEDRPFKCDCCDYSCKNLIDLQKHLDTHSEEPAYRCDFENCTFSARSLCSIKSHYRKVHEGDSEPRYKCHVCDKCFTRGNNLTVHLRKKHQFKWPSGHPRFRYKEHEDGYMRLQLVRYESVELTQQLLRQPQEGSGLGTSLNESSLQGIILETVPGEPGRKEEEEEGKGSEGTALSASQDNPSSVIHVVNQTNAQGQQEIVYYVLSEAPGEPPPVPEPPSGGIMEKLQGIAEEPEIQMV

SEQ ID NO: 3220 - protein, 672 aa, Homo sapiens
SLGIPSGNTRGTGLVLDGDTSYTYHLVCMGPEASGWGQDEPQTWPTDHRAQQGVQRQGVSYSVHAYTGQPSPRGLHSENREDEGWQVYRLGARDAHQGRPTWALRPEDGEDKEMKTYRLDAGDADPRRLCDLERERWAVIQGQAVRKSSTVATLQGTPDHGDPRTPGPPRSTPLEENVVDREQIDFLAARQQFLSLEQANKGAPHSSPARGTPAGTTPGASQAPKAFNKPHLANGHVVPIKPQVKGVVREENKVRAVPTWASVQVVDDPGSLASVESPGTPKETPIEREIRLAQEREADLREQRGLRQATDHQELVEIPTRPLLTKLSLITAPRRERGRPSLYVQRDIVQETQREEDHRREGLHVGRASTPDWVSEGPQPGLRRALSSDSILSPAPDARAADPAPEVRKVNRIPPDAYQPYLSPGTPQLEFSAFGAFGKPSSLSTAEAKAATSPKATMSPRHLSESSGKPLSTKQEASKPPRGCPQANRGVVRWEYFRLRPLRFRAPDEPQQAQVPHVWGWEVAGAPALRLQKSQSSDLLERERESVLRREQEVAEERRNALFPEVFSPTPDENSDQNSRSSSQASGITGSYSVSESPFFSPIHLHSNVAWTVEDPVDSAPPGQRKKEQWYAGINPSDGINSEVLEAIRVTRHKNAMAERWESRIYASEEDD

SEQ ID NO: 3221 - protein, 154 aa, Homo sapiens
SRVFFFFFFFPAFKMSKRGRGGSSGAKFRISLGLPVGAVINCADNTGAKNLYIISVKGIKGRLNRLPAAGVGDMVMATVKKGKPELRKKVHPAVVIRQRKSYRRKDGVFLYFEDNAGVIVNNKGEMKGSAITGPVAKECADLWPRIASNAGSIA

SEQ ID NO: 3222 - protein, 371 aa, Homo sapiens
PLIPLHPANRSPATMAELQEVQITEEKPLLPGQTPEAAKTHSVETPYGSVTFTVYGTPKPKRPAILTYHDVGLNYKSCFQPLFQFEDMQEIIQNFVRVHVDAPGMEEGAPVFPLGYQYPSLDQLADMIPCVLQYLNFSTIIGVGVGAGAYILARYALNHPDTVEGLVLINIDPNAKGWMDWAAHKLTGLTSSIPEMILGHLFSQEELSGNSELIQKYRNIITHAPNLDNIELYWNSYNNRRDLNFERGGDITLRCPVMLVVGDQAPHEDAVVECNSKLDPTQTSFLKMADSGGQPQLTQPGKLTEAFKYFLQGMGYMASSCMTRLSRSRTASLTSAASVDGNRSRSRTLSQSSESGTLSSGPPGHTMEVSC

SEQ ID NO: 3223 - protein, 510 aa, Homo sapiens
SARRWGAAGAGPHGLHLRAHGPRPSVRTGLPSVGRQAAGAAMGRGWGFLFGLLGAVWLLSSGHGEEQPPETAAQRCFCQVSGYLDDCTCDVETIDRFNNYRLFPRLQKLLESDYFRYYKVNLKRPCPFWNDISQCGRRDCAVKPCQSDEVPDGIKSASYKYSEEANNLIEECEQAERLGAVDESLSEETQKAVLQWTKHDDSSDNFCEADDIQSPEAEYVDLLLNPERYTGYKGPDAWKIWNVIYEENCFKPQTIKRPLNPLASGQGTSEENTFYSWLEGLCVEKRAFYRLISGLHASINVHLSARYLLQETWLEKKWGHNITEFQQRFDGILTEGEGPRRLKNLYFLYLIELRALSKVLPFFERPDFQLFTGNKIQDEENKMLLLEILHEIKSFPLHFDENSFFAGDKKEAHKLKEDFRLHFRNISRIMDCVGCFKCRLWGKLQTQGLGTALKILFSEKLIANMPESGPSYEFHLTRQEIVSLFNAFGRISYKCERIRKTSRNLLQNIH

SEQ ID NO: 3224 - protein, 267 aa, Homo sapiens
PGSTISWDRDAAGESGTRAASPSPSGSRTAGRLPSPSYSPLPAPSLFPPPPLPAPAASTMSAGGDFGNPLRKFKLVFLGEQSVGKTSLITRFMYDSFDNTYQATIGIDFLSKTMYLEDRTVRLQLWDTAGQERFRSLIPSYIRDSTVAVVVYDITNLNSFQQTSKWIDDVRTERGSDVIIMLVGNKTDLADKRQITIEEGEQRAKELSVMFIETSAKTGYNVKQLFRRVASALPGMENVQEKSKEGMIDIKLDKPQEPPASEGGCSC

SEQ ID NO: 3225 - protein, 1684 aa, Homo sapiens
PEVTKPSLSQPTAASPIGSSPSPPVNGGNNAKRVAVPNGQPPSAARYMPREVPPRFRCQQDHKVLLKRGQPPPPSCMLLGGGAGPPPCTAPGANPNNAQVTGALLQSESGTAPDSTLGGAAASNYANSTWGSGASSNNGTSPNPIHIWDKVIVDGSDMEEWPCIASKDTESSSENTTDNNSASNPGSEKSTLPGSTTSNKGKGSQCQSASSGNECNLGVWKSDPKAKSVQSSNSTTENNNGLGNWRNVSGQDRIGPGSGFSNFNPNSNPSAWPALVQEGTSRKGALETDNSNSSAQVSTVGQTSREQQSKMENAGVNFVVSGREQAQIHNTDGPKNGNTNSLNLSSPNPMENKGMPFGMGLGNTSRSTDAPSQSTGDRKTGSVGSWGAARGPSGTDTVSGQSNSGNNGNNGKEREDSWKGASVQKSTGSKNDSWDNNNRSTGGSWNFGPQDSNDNKWGEGNKMTSGVSQGEWKQPTGSDELKIGEWSGPNQPNSSTGAWDNQKGHPLLENQGNAQAPCWGRSSSSTGSEVEGQSTGSNHKAGSSDSHNSGRRSYRPTHPDCQAVLQTLLSRTDLDPRVLSNTGWGQTQIKQDTVWDIEEVPRPEGKSDKGTEGWESAATQTKNSGGWGDAPSQSNQMKSGWGELSASTEWKDPKNTGGWNDYKNNNSSNWGGGRPDEKTPSSWNENPSKDQGWGGGRQPNQGWSSGKNGWGEEVDQTKNSNWESSASKPVSGWGEGGQNEIGTWGNGGNASLASKGGWEDCKRSPAWNETGRQPNSWNKQHQQQQPPQQPPPPQPEASGSWGGPPPPPPGNVRPSNSSWSSGPQPATPKDEEPSGWEEPSPQSISRKMDIDDGTSAWGDPNSYNYKNVNLWDKNSQGGPAPREPNLPTPMTSKSASDSKSMQDGWGESDGPVTGARHPSWEEEEDGGVWNTTGSQGSASSHNSASWGQGGKKQMKCSLKGGNNDSWMNPLAKQFSNMGLLSQTEDNPSSKMDLSVGSLSDKKFDVDKRAMNLGDFNDIMRKDRSGFRPPNSKDMGTTDSGPYFEKGGSHGLFGNSTAQSRGLHTPVQPLNSSPSLRAQVPPQFISPQVSASMLKQFPNSGLSPGLFNVGPQLSPQQIAMLSQLPQIPQFQLACQLLLQQQQQQQLLQNQRKISQAVRQQQEQQLARMVSALQQQQQQQQRQPGMKHSPSHPVGPKPHLDNMVPNALNVGLPDLQTKGPIPGYGSGFSSGGMDYGMVGGKEAGTESRFKQWTSMMEGLPSVATQEANMHKNGAIVAPGKTRGGSPYNQFDIIPGDTLGGHTGPAGDSWLPAKSPPTNKIGSKSSNASWPPEFQPGVPWKGIQNIDPESDPYVTPGSVLGGTATSPIVDTDHQLLRDNTTGSNSSLNTSLPSPGAWPYSASDNSFTNVHSTSAKFPDYKSTWSPDPIGHNPTHLSNKMWKNHISSRNTTPLPRPPPGLTNPKPSSPWSSTAPRSVRGWGTQDSRLASASTWSDGGSVRPSYWLVLHNLTPQIDGSTLRTICMQHGPLLTFHLNLTQGTALIRYSTKQEAAKAQTALHMCVLGNTTILAEFATDDEVSRFLAQAQPPTPAATPSAPAAGWQSLETGQNQSDPVGPALNLFGGSTGLGQWSSSAGGSSGADLAGASLWGPPNYSSSLWGVPTVEDPHRMGSPAPLLPGDLLGGGSDSI

SEQ ID NO: 3226 - protein, 395 aa, Homo sapiens
VPWKRQDEQLSLQVETLYLDSPAVIHLLSPTFLPPSSLPPFLQIVDSSSSACTLDSFFPFLAPWDSPQDCGFKDHQPLTLQALTVELARWTLMLLLSTAMYGAHAPLLALCHVDGRVPFRPSSAVLLTELTKLLLCAFSLLVGWQAWPQGPPPWRQAAPFALSALLYGANNNLVIYLQRYMDPSTYQVLSNLKIGSTAVLYCLCLRHRLSVRQGLALLLLMAAGACYAAGGLQVPGNTLPSPPPAAAASPMPLHITPLGLLLLILYCLISGLSSVYTELLMKRQRLPLALQNLFLYTFGVLLNLGLHAGGGSGPGLLEGFSGWAALVVLSQALNGLLMSAVMKHGSSITRLFVVSCSLVVNAVLSAVLLRLQLTAAFFLATLLIGLAMRLYYGSR

SEQ ID NO: 3227 - protein, 226 aa, Homo sapiens
RSTRARTRRPGLRAVPLPVGGFLGKMKWVWALLLLAALGSGRAERDCRVSSFRVKENFDKARFSGTWYAMAKKDPEGLFLQDNIVAEFSVDETGQMSATAKGRVRLLNNWDVCADMVGTFTDTEDPAKFKMKYWGVASFLQKGNDDHWIVDTDYDTYAVQYSCRLLNLDGTCADSYSFVFSRDPNGLPPEAQKIVRQRQEELCLARQYRLIVHNGYCDGRSERNLL

SEQ ID NO: 3228 - protein, 225 aa, Homo sapiens
QQESPAAGAARMNCKEGTDSSCGCRGNDEKKMLKCVVVGDGAVGKTCLLMSYANDAFPEEYVPTVFDHYAVTVTVGGKQHLLGLYDTAGQEDYNQLRPLSYPNTDVFLICFSVVNPASYHNVQEEWVPELKDCMPHVPYVLIGTQIDLRDDPKTLARLLYMKEKPLTYEHGVKLAKAIGAQCYLECSALTQKGLKAVFDEAILTIFHPKKKKKRCSEGHSCCSII

SEQ ID NO: 3229 - protein, 232 aa, Homo sapiens
AISAGRSAKMQLKPMEINPEMLNKVLSRLGVAGQWRFVDVLGLEEESLGSVPAPACALLLLFPLTAQHENFRKKQIEELKGQEVSPKVYFMKQTIGNSCGTIGLIHAVANNQDKLGFEDGSVLKQFLSETEKMSPEDRAKCFEKNEAIQAAHDAVAQEGQCRVDDKVNFHFILFNNVDGHLYELDGRMPFPVNHGASSEDTLLKDAAKVCREFTEREQGEVRFSAVALCKAA

SEQ ID NO: 3230 - protein, 398 aa, Homo sapiens
GDAATTACAPPDWFLGPRKLAAGPAGGGMLPRRLLAAWLAGTRGGGLLALLANQCRFVTGLRVRRAQQIAQLYGRLYSESSRRVLLGRLWRRLHGRPGHASALMAALAGVFVWDEERIQEEELQRSINEMKRLEEMSNMFQSSGVQHHPPEPKAQTEGNEDSEGKEQRWEMVMDKKHFKLWRRPITGTHLYQYRVFGTYTDVTPRQFFNVQLDTEYRKKWDALVIKLEVIERDVVSGSEVLHWVTHFPYPMYSRDYVYVRRYSVDQENNMMVLVSRAVEHPSVPESPEFVRVRSYESQMVIRPHKSFDENGFDYLLTYSDNPQTVFPRYCVSWMVSSGMPDFLEKLHMATLKAKNMEIKVKDYISAKPLEMSSEAKATSQSSERKNEGSCGPARIEYA

SEQ ID NO: 3231 - protein, 509 aa, Homo sapiens
FVPEPPEAGASSPCAPGDPDMSFRKVVRQSKFRHVFGQPVKNDQCYEDIRVSRVTWDSTFCAVNPKFLAVIVEASGGGAFLVLPLSKTGRIDKAYPTVCGHTGPVLDIDWCPHNDEVIASGSEDCTVMVWQIPENGLTSPLTEPVVVLEGHTKRVGIIAWHPTARNVLLSAGCDNVVLIWNVGTAEELYRLDSLHPDLIYNVSWNHNGSLFCSACKDKSVRIIDPRRGTLVAEREKAHEGARPMRAIFLADGKVFTTGFSRMSERQLALWDPENLEEPMALQELDSSNGALLPFYDPDTSVVYVCGKGDSSIRYFEITEEPPYIHFLNTFTSKEPQRGMGSMPKRGLEVSKCEIARFYKLHERKCEPIVMTVPRKSDLFQDDLYPDTAGPEAALEAEEWVSGRDADPILISLREAYVPSKQRDLKISRRNVLSDSRPAMAPGSSHLGAPASTTTAADATPSGSLARAGEAGKLEEVMQELRALRALVKEQGDRICRLEEQLGRMENGDA

SEQ ID NO: 3232 - protein, 238 aa, Homo sapiens
RLREDDRRGLPLSSPLWTEPPLSCCLPATYPADMGTAGAMQLCWVILGFLLFRGHNSQPTMTQTSSSQGGLGGLSLTTEPVSSNPGYIPSSEANRPSHLSSTGTPGAGVPSSGRDGGTSRDTFQTVPPNSTTMSLSMREDATILPSPTSETVLTVAAFGVISFIVILVVVVIILVGVVSLRFKCRKSKESEDPQKPGSSGLSESCSTANGEKDSITLISMKNINMNNGKQSLSAEKVL

SEQ ID NO: 3233 - protein, 238 aa, Homo sapiens; identical to SEQ ID NO: 3232

SEQ ID NO: 3234 - protein, 1041 aa, Homo sapiens
AGDCGRLGVGGSEFPWEGSALGASPLPPICLQSRTWLLRAPAPAELGELEEVAAGRGDVWEPFLDSPGREESLQEASPRLADHGSSSGGGWEVKRSQRLRRGPSSPRRPYQDMEYERRGGRGDRTGRYGATDRSQDDGGENRSRDHDYRDMDYRSYPREYGSQEGKHDYDDSSEEQSAEDSYEASPGSETQRRRRRRHRHSPTGPPGFPRDGDYRDQDYRTEQGEEEEEEEDEEEEEKASNIVMLRMLPQAATEDDIRGQLQSHGVQAREVRLMRNKSSGQSRGFAFVEFSHLQDATRWMEANQHSLNILGQKVSMHYSDPKPKINEDWLCNKCGVQNFKRREKCFKCGVPKSEAEQKLPLGTRLDQQTLPLGGRELSQGLLPLPQPYQAQGVLASQALSQGSEPSSENANDTIILRNLNPHSTMDSILGALAPYAVLSSSNVRVIKDKQTQLNRGFAFIQLSTIEAAQLLQILQALHPPLTIDGKTINVEFAKGSKRDMASNEGSRISAASVASTAIAAAQWAISQASQGGEGTWATSEEPPVDYSYYQQDEGYGNSQGTESSLYAHGYLKGTKGPGITGTKGDPTGAGPEASLEPGADSVSMQAFSRPQPGAAPGIYQQSAEASSSQGTAANSQSYTIMSPAVLKSELQSPTHPSSALPPATSPTAQESYSQYPVPDVSTYQYDETSGYYYDPQTGLYYDPNSQYYYNAQSQQYLYWDGERRTYVPALEQSADGHKETGAPSKEGKEKKEKHKTKTAQQIAKDMERWARSLNKQKENFKNSFQPISSLRDDERRESATADAGYAILEKKGALAERQHTSMDLPKLASDDRPSPPRGLVAAYSGESDSEEEQERGGPEREEKLTDWQKLACLLCRRQFPSKEALIRHQQLSGLHKQNLEIHRRAHLSENELEALEKNDMEQMKYRDRAAERREKYGIPEPPEPKRRKYGGISTASVDFEQPTRDGLGSDNIGSRMLQAMGWKEGSGLGRKKQGIVTPIEAQTRVRGSGLGARGSSYGVTSTESYKETLHKTMVTRFNEAQ

SEQ ID NO: 3235 - protein, 404 aa, Homo sapiens
PSFLNTGLGPTALGVLGGAGAGLMSNPSPQVPEEEASTSVCRPKSSMASTSRRQRRERRFRRYLSAGRLVRAQALLQRHPGLDVDAGQPPPLHRACARHDAPALCLLLRLGADPAHQDRHGDTALHAAARQGPDAYTDFFLPLLSRCPSAMGIKNKDGETPGQILGWGPPWDSAEEEEEDDASKEREWRQKLQGELEDEWQEVMGRFEGDASHETQEPESFSAWSDRLAREHAQKCQQQQREAEGSCRPPRAEGSSQSWRQQEEEQRLFRERARAKEEELRESRARRAQEALGDREPKPTRAGPREEHPRGAGRGSLWRFGDVPWPCPGGGDPEAMAAALVARGPPLEEQGALRRYLRVQQVRWHPDRFLQRFRSQIETWELGRVMGAVTALSQALNRHAEALK

SEQ ID NO: 3236 - protein, 470 aa, Homo sapiens
GPASGMAEPTSDFETPIGWHASPELTPTLGPLSDTAPPRDRWMFWAMLPPPPPPLTSSLPAAGSKPSSESQPPMEAQSLPGAPPPFDAQILPGAQPPFDAQSPLDSQPQPSGQPWNFHASTSWYWRQSSDRFPRHQKSLNPAVKNSYYPRKYDAKFTDFSLPPSRKQKKKKRKEPVFHFFCDTCDRGFKNQEKYDKHMSEHTKCPELDCSFTAHEKIVQFHWRNMHAPGMKKIKLDTPEEIARWREERRKNYPTLANIERKKKLKLEKEKRGAVLTTTQYGKMKGMSRHSQMAKIRSPGKNHKWKNDNSRQRAVTGSGSHLCDLKLEGPPEANADPLGVLINSDSESDKEEKPQHSVIPKEVTPALCSLMSSYGSLSGSESEPEETPIKTEADVLAENQVLDSSAPKSPSQDVKATVRNFSEAKSENRKKSFEKTNPKREKRLSQLSNVIRTKNTPSISLGNASSSGHST

SEQ ID NO: 3237 - protein, 534 aa, Homo sapiens
FVGEQEGGCEAGAGRGAQTYPGEAGERWFGRRRRRGRVVSRKKMSLKSERRGIHVDQSDLLCKKGCGYYGNPAWQGFCSKCWREEYHKARQKQIQEDWELAERLQREEEEAFASSQSSQGAQSLTFSKFEEKKTNEKTRKVTTVKKFFSASSRVGSKKEIQEAKAPSPSINRQTSIETDRVSKEFIEFLKTFHKTGQEIYKQTKLFLEGMHYKRDLSIEEQSECAQDFYHNVAERMQTRGKVPPERVEKIMDQIEKYIMTRLYKYVFCPETTDDEKKDLAIQKRIRALRWVTPQMLCVPVNEDIPEVSDMVVKAITDIIEMDSKRVPRDKLACITKCSKHIFNAIKITKNEPASADDFLPTLIYIVLKGNPPRLQSNIQYITRFCNPSRLMTGEDGYYFTNLCCAVAFIEKLDAQSLNLSQEDFDRYMSGQTSPRKQEAESWSPDACLGVKQMYKNLDLLSQLNERQERIMNEAKKLEKDLIDWTDGIAREVQDIVEKYPLEIKPPNQPLAAIDSENVENDKLPPPLQPQVYAG

SEQ ID NO: 3238 - protein, 308 aa, Homo sapiens
VLSVCPTGVFRPAPCRMAFMKKYLLPILGLFMAYYYYSANEEFRPEMLQGKKVIVTGASKGIGREMAYHLAKMGAHVVVTARSKETLQKVVSHCLELGAASAHYIAGTMEDMTFAEQFVAQAGKLMGGLDMLILNHITNTSLNLFHDDIHHVRKSMEVNFLSYVVLTVAALPMLKQSNGSIVVVSSLAGKVAYPMVAAYSASKFALDGFFSSIRKEYSVSRVNVSITLCVLGLIDTETAMKAVSGIVHMQAAPKEECALEIIKGGALRQEEVYYDSSLWTTLLIRNPCRKILEFLYSTSYNMDRFINK

SEQ ID NO: 3239 - protein, 70 aa, Homo sapiens
  misc_feature (1)...(70): Xaa = any amino acid or nothing
ERTMQLEIKVALNFIIFYLYNKLLWQPLKKKXEAHWYPDKPLKGSGFHTGEMVDPVGELAAKRSGLTVED

SEQ ID NO: 3240 - protein, 57 aa, Homo sapiens
  misc_feature (1)...(57): Xaa = any amino acid or nothing
HESYHVNPNLCNPVAPTSGAHSIGXKWPSWLGAVAHSCNPSTLVGRGGRITRGQELR

SEQ ID NO: 3241 - protein, 128 aa, Homo sapiens
PAGIGRSTAKTPGTPGSLEMENLKSGVYPLKEASGCPGADRNLLVYSFYEKGPLTFRDVAIEFSLEEWQCLDTAQQDLYRKVMLENYRNLVFLAGIAVSKPDLITCLEQGKEPWNMKRHAMVDQPPGR

SEQ ID NO: 3242 - protein, 63 aa, Homo sapiens
PLPARGKSTLPATFCSPSAPELASMSVVPPNRSQTGWPRGVTQFGNKYIQQTKPLTLERTINL

SEQ ID NO: 3243 - protein, 107 aa, Homo sapiens
FVAYLKLPFFSQVCLFASSEMFFTISRKNMSQKLSLLLLVFGLIWGLMLLHYTFQQPRHQSSVKLREQILDLSKRYVKALAEENKNTVDVENGASMAGYGKITVEYF

SEQ ID NO: 3244 - protein, 451 aa, Homo sapiens
VLMDGRMMRSMRLREEESPGPSHTASCLCGSAPCILCSCCPASRNSTVSRLIFTFFLFLGVLVSIIMLSPGVESQLYKLPWVCEEGAGIPTVLQGHIDCGSLLGYRAVYRMCFATAAFFFFFTLLMLCVSSSRDPRAAIQNGFWFFKFLILVGLTVGAFYIPDGSFTNIWFYFGVVGSFLFILIQLVLLIDFAHSWNQRWLGKAEECDSRAWYAGLFFFTLLFYLLSIAAVALMFMYYTEPSGCHEGKVFISLNLTFCVCVSIAAVLPKVQDAQPNSGLLQASVITLYTMFVTWSALSSIPEQKCNPHLPTQLGNETVVAGPEGYETQWWDAPSIVGLIIFLLCTLFISLRSSDHRQVNSLMQTEECPPMLDATQQQQQVAACEGRAFDNEQDGVTYSYSFFHFCLVLASLHVMMTLTNWYKPGETRKMISTWTAVWVKICASWAGLLLYL

SEQ ID NO: 3245 - protein, 125 aa, Homo sapiens
SSLGNEDDEILSLAKDITGMFVASHRKMRAHQVLTFLLLFVITSVASENASTSRGCGLDLLPQYVSLCDLDAIWGIVVEAAAGAGALITLLLMLILLVRLPFFKEKEKKSPVGLHFLFLLGTLGP

SEQ ID NO: 3246 - protein, 170 aa, Homo sapiens
HEVCGSGCCCHCCAGGPVARQKALPRLRGVMSRFLNVLRSWLVMVSIIAMGNTLQSFRDHTFLYEKLYTGKPNLVNGLQARTFGIWTLLSSVIRCLCAIDIHNKTLYHITLWTFLLALGHFLSELFVYGTAAPTIGVLAPLMVASFSILGMLVGLRYLEVEPVSRQKKRN

SEQ ID NO: 3247 - protein, 310 aa, Homo sapiens
ERLCFPCMQSKIYSYMSPNKCSGMRFPLQEENSVTHHEVKCQGKPLAGIYRKREEKRNAGNAVRSAMKSEEQKIKDARKGPLVPFPNQKSEAAEPPKTPPSSCDSTNAAIAKQALKKPIKGKQAPRKKAQGKTQQNRKLTDFYPVRRSSRKSKAELQSEERKRIDELIESGKEEGMKIDLIDGKGRGVIATKQFSRGDFVVEYHGDLIEITDAKKREALYAQDPSTGCYMYYFQYLSKTYCVDATRETNRLGRLINHSKCGNCQTKLHDIDGVPHLILIASRDIAAGEELLYDYGDRSKASIEAHPWLKH

SEQ ID NO: 3248 - protein, 288 aa, Homo sapiens
PGSTISCSELKGTQCRATAGSRGRRPPMTCWLRGVTATFGRPAEWPGYLSHLCGRSAAMDLGPMRKSYRGDREAFEETHLTSLDPVKQFAAWFEEAVQCPDIGEANAMCLATCTRDGKPSARMLLLKGFGKDGFRFFTNFESRKGKELDSNPFASLVFYWEPLNRQVRVEGPVKKLPEEEAECYFHSRPKSSQIGAVVSHQSSVIPDREYLRKKNEELEQLYQDQEVPKPKSWGGYVLYPQVMEFWQGQTNRLHDRIVFRRGLPTGDSPLGPMTHRGEEDWLYERLAP

SEQ ID NO: 3249 - protein, 389 aa, Homo sapiens
TRVGRGESGLKMEVKPPPGRPQPDSGRRRRRRGEEGHDPKEPEQLRKLFIGGLSFETTDDSLREHFEKWGTLTDCVVMRDPQTKRSRGFGFVTYSCVEEVDAAMCARPHKVDGRVVEPKRAVSREDSVKPGAHLTVKKIFVGGIKEDTEEYNLRDYFEKYGKIETIEVMEDRQSGKKRGFAFVTFDDHDTVDKIVVQKYHTINGHNCEVKKALSKQEMQSAGSQRGRGGGSGNFMGRGGNFGGGGGNFGRGGNFGGRGGYGGGGGGSRGSYGGGDGGYNGFGGDGGNYGGGPGYSSRGGYGGGGPGYGNQGGGYGGGGGYDGYNEGGNFGGGNYGGGGNYNDFGNYSGQQQSNYGPMKGGSFGGRSSGSPYGGGYGSGGGSGGYGSRRF

SEQ ID NO: 3250 - protein, 381 aa, Homo sapiens
VAGRGDMAALRDAEIQKDVQTYYGQVLKRSADLQTNGCVTTARPVPKHIREALQNVHEEVALRYYGCGLVIPEHLENCWILDLGSGSGRDCYVLSQLVGEKGHVTGIDMTKGQVEVAEKYLDYHMEKYGFQASNVTFIHGYIEKLGEAGIKNESHDIVVSNCVINLVPDKQQVLQEAYRVLKHGGELYFSDVYTSLELPEEIRTHKVLWGECLGGALYWKELAVLAQKIGFCPPRLVTANLITIQNKELERVIGDCRFVSATFRLFKHSKTGPTKRCQVIYNGGITGHEKELMFDANFTFKEGEIVEVDEETAAILKNSRFAQDFLIRPIGEKLPTSGGCSALELKDIITDPFKLAEESDSMKSRCVPDAAGGCCGTKKSC

SEQ ID NO: 3251 - protein, 381 aa, Homo sapiens; identical to SEQ ID NO: 3250

SEQ ID NO: 3252 - protein, 191 aa, Homo sapiens
PLGSNTAPALRVMVQAWYMDDAPGDPRQPHRPDPGRPVGLEQLRRLGVLYWKLDADKYENDPELEKIRRERNYSWMDIITICKDKLPNYEEKIKMFYEEHLHLDDEIRYILDGSGYFDVRDKEDQWIRIFMEKGDMVTLPAGIYHRFTVDEKNYTKAMRLFVGEPVWTAYNRPADHFEARGQYVKFLAQTA

SEQ ID NO: 3253 - protein, 327 aa, Homo sapiens
ARAAAHCGICRLVRWWRKRRSVMGIQTSPVLLASLGVGLVTLLGLAVGSYLVRRSRRPQVTLLDPNEKYLLRLLDKTTVSHNTKRFRFALPTAHHTLGLPVGKHIYLSTRIDGSLVIRPYTPVTSDEDQGYVDLVIKVYLKGVHPKFPEGGKMSQYLDSLKVGDVVEFRGPSGLLTYTGKGHFNIQPNKKSPPEPRVAKKLGMIAGGTGITPMLQLIRAILKVPEDPTQCFLLFANQTEKDIILREDLEELQARYPNRFKLWFTLDHPPKDWAYSKGFVTADMIREHLPAPGDDVLVLLCGPPPMVQLACHPNLDKLGYSQKMRFTY

SEQ ID NO: 3254 - protein, 322 aa, Homo sapiens
LQSAGEGVTHVLILLESPARPVAAVTQVQRRRYHRLSDMSMLAERRRKQKWAVDPQNTAWSNDDSKFGQRMLEKMGWSKGKGLGAQEQGATDHIKVQVKNNHLGLGATINNEDNWIAHQDDFNQLLAELNTCHGQETTDSSDKKEKKSFSLEEKSKISKNRVHYMKFTKGKDLSSRSKTDLDCIFGKRQSKKTPEGDASPSTPEENETTTTSAFTIQEYFAKRMAALKNKPQVPVPGSDISETQVERKRGKKRNKEATGKDVESYLQPKAKRHTEGKPERAEAQERVAKKKSAPAEEQLRGPCWDQSSKASAQDAGDHVQPA

SEQ ID NO: 3255 - protein, 88 aa, Homo sapiens
GSAAMKVKIKCWNGVATWLWVANDENCGICRMAFNGCCPDCKVPGDDCPLVWGQCSHCFHMHCILKWLHAQQVQQHCPMCRQEWKFKE

SEQ ID NO: 3256 - protein, 125 aa, Homo sapiens
TAARRRQKGTAARRRQKGTLEEVVLPPRSCRVFWIHSGTTMSKVSFKITLTSDPRLPYKVLSVPESTPFTAVLKFAAEEFKVPAATSAIITNDGIGINPAQTAGNVFLKHGSELRIIPRDRVGSC

SEQ ID NO: 3257 - protein, 483 aa, Homo sapiens
GCSAAAAGAGSGPWAAQEKQFPPALLSFFIYNPRFGPREGQEENKILFYHPNEVEKNEKIRNVGLCEAIVQFTRTFSPSKPAKSLHTQKNRQFFNEPEENFWMVMVVRNPIIEKQSKDGKPVIEYQEEELLDKVYSSVLRQCYSMYKLFNGTFLKAMEDGGVKLLKERLEKFFHRYLQTLHLQSCDLLDIFGGISFFPLDKMTYLKIQSFINRMEESLNIVKYTAFLYNDQLIWSGLEQDDMRILYKYLTTSLFPRHIEPELAGRDSPIRAEMPGNLQHYGRFLTGPLNLNDPDAKCRFPKIFVNTDDTYEELHLIVYKAMSAAVCFMIDASVHPTLDFCRRLDSIVGPQLTVLASDICEQFNINKRMSGSEKEPQFKFIYFNHMNLAEKSTVHMRKTPSVSLTSVHPDLMKILGDINSDFTRVDEDEEIIVKAMSDYWVVGKKSDRRELYVILNQKNANLIEVNEEVKKLCATQFNNIFFLD

SEQ ID NO: 3258 - protein, 481 aa, Homo sapiens
APRGCSMPHRKKKPFIEKKKAVSFHLVHRSQRDPLAADESAPQRVLLPTQKIDNEERRAEQRKYGVFFDDDYDYLQHLKEPSGPSELIPSSTFSAHNRREEKEETLVIPSTGIKLPSSVFASEFEEDVGLLNKAAPVSGPRLDFDPDIVAALDDDFDFDDPDNLLEDDFILQANKATGEEEGMDIQKSENEDDSEWEDVDDEKGDSNDDYDSAGLLSDEDCMSVPGKTHRAIADHLFWSEETKSRFTEYSMTSSVMRRNEQLTLHDERFEKFYEQYDDDEIGALDNAELEGSIQVDSNRLQEVLNDYYKEKAENCVKLNTLEPLEDQDLPMNELDESEEEEMITVVLEEAKEKWDCESICSTYSNLYNHPQLIKYQPKPKQIRISSKTGIPLNVLPKKGLTAKQTERIQMINGSDLPKVSTQPRSKNESKEDKRARKQAIKEERKERRVEKKANKLAFKLEKRRQEKELLNLKKNVEGLKL

SEQ ID NO: 3259 - protein, 320 aa, Homo sapiens
QMEPGNDTQISEFLLLGFSQEPGLQPFLFGLFLSMYLVTVLGNLLIILATISDSHLHTPMYFFLSNLSFADICVTSTTIPKMLMNIQTQNKVITYIACLMQMYFFILFAGFENFLLSVMAYDRFVAICHPLHYMVIMNPHLCGLLVLASWTMSALYSLLQILMVVRLSFCTALEIPHFFCELNQVIQLACSDSFLNHMVIYFTVALLGGGPLTGILYSYSKIISSIHAISSAQGKYKAFSTCASHLSVVSLFYGAILGVYLSSAATRNSHSSATASVMYTVVTPMLNPFIYSLRNKDIKRALGIHLLWGTMKGQFFKKCP

SEQ ID NO: 3260 - protein, 846 aa, Homo sapiens
IPFLKSCCCCCLFDFPPPPLDQVQEEECEVERVTEHGTPKPFRKFDSVAFGESQSEDEQFENDLETDPPNWQQLVSREVLLGLKPCEIKRQEVINELFYTERAHVRTLKVLDQVFYQRVSREGILSPSELRKIFSNLEDILQLHIGLNEQMKAVRKRNETSVIDQIGEDLLTWFSGPGEEKLKHAAATFCSNQPFALEMIKSRQKKDSRFQTFVQDAESNPLCRRLQLKDIIPTQMQRLTKYPLLLDNIATYTEWPTEREKVKKAADHCRQILNYVNQAVKEAENKQRLEDYQRRLDTSSLKLSEYPNVEELRNLDLTKRKMIHEGPLVWKVNRDKTIDLYTLLLEDILVLLQKQDDRLVLRCHSKILASTADSKHTFSPVIKLSTVLVRQVATDNKALFVISMSDNGAQIYELVAQTVSEKTVWQDLICRMAASVKEQSTKPIPLPQSTPGEGDNDEEDPSKLKEEQHGISVTGLQSPDRDLGLESTLISSKPQSHSLSTSGKSEVRDLFVAERQFAKEQHTDGTLKEVGEDYQIAIPDSHLPVSEERWALDALRNLGLLKQLLVQQLGLTEKSVQEDWQHFPRYRTASQGPQTDSVIQNSENIKAYHSGEGHMPFRTGTGDIATCYSPRTSTESFAPRDSVGLAPQDSQASNILVMDHMIMTPEMPTMEPEGGLDDSGEHFFDAREAHSDENPSEGDGAVNKEEKDVNLRISGNYLILDGYDPVQESSTDEEVASSLTLQPMTGIPAVESTHQQQHSPQNTHSDGAISPFTPEFLVQQRWGAMEYSCFEIQSPSSCADSQSQIMEYIHKIEADLEHLKKVEESYTILCQRLAGSALTDKHSDKS

SEQ ID NO: 3261 - protein, 700 aa, Homo sapiens
AVEFAEGALTMAPWPELGDAQPNPDKYLEGAAGQQPTAPDKSKETNKTDNTEAPVTKIELLPSYSTATLIDEPTEVDDPWNLPTLQDSGIKWSERDTKGKILCFFQGIGRLILLLGFLYFFVCSLDILSSAFQLVGGKMAGQFFSNSSIMSNPLLGLVIGVLVTVLVQSSSTSTSIVVSMVSSSLLTVRAAIPIIMGANIGTSITNTIVALMQVGDRSEFRRAFAGATVHDFFNWLSVLVLLPVEVATHYLEIITQLIVESFHFKNGEDAPDLLKVITKPFTKLIVQLDKKVISQIAMNDEKAKNKSLVKIWCKTFTNKTQINVTVPSTANCTSPSLCWTDGIQNWTMKNVTYKENIAKCQHIFVNFHLPDLAVGTILLILSLLVLCGCLIMIVKILGSVLKGQVATVIKKTINTDFPFPFAWLTGYLAILVGAGMTFIVQSSSVFTSALTPLIGIGVITIERAYPLTLGSNIGTTTTAILAALASPGNALRSSLQIALCHFFFNISGILLWYPIPFTRLPIRMAKGLGNISAKYRWFAVFYLIIFFFLIPLTVFGLSLAGWRVLVGVGVPVVFIIILVLCLRLLQSRCPRVLPKKLQNWNFLPLWMRSLKPWDAVVSKFTGCFQMRCCCCCRVCCRACCLLCGCPKCCRCSKCCEDLEEAQEGQDVPVKAPETFDNITISREAQGEVPASDSKTECTAL

SEQ ID NO: 3262 - protein, 448 aa, Homo sapiens
SQQGSQPHRQGPPSLLTAPHSLDLPALPPGPRGSQGKLRRVLVPMSVKPSWGPGPSEGVTAVPTSDLGEIHNWTELLDLFNHTLSECHVELSQSTKRVVLFALYLAMFVVGLVENLLVICVNWRGSGRAGLMNLYILNMAIADLGIVLSLPVWMLEVTLDYTWLWGSFSCRFTHYFYFVNMYSSIFFLVCLSVDRYVTLTSASPSWQRYQHRVRRAMCAGIWVLSAIIPLPEVVHIQLVEGPEPMCLFMAPFETYSTWALAVALSTTILGFLLPFPLITVFNVLTACRLRQPGQPKSRRHCLLLCAYVAVFVMCWLPYHVTLLLLTLHGTHISLHCHLVHLLYFFYDVIDCFSMLHCVINPILYNFLSPHFRGRLLNAVVHYLPKDQTKAGTCASSSSCSTQHSIIITKGDSQPAAAAPHPEPSLSFQAHHLLPNTSPISPTQPLTPS

SEQ ID NO: 3263 - protein, 306 aa, Homo sapiens
QARSPSVAAMASPQLCRALVSAQWVAEALRAPRAGQPLQLLDASWYLPKLGRDARREFEERHIPGAAFFDIDQCSDRTSPYDHMLPGAEHFAEYAGRLGVGAATHVVIYDASDQGLYSAPRVWWMFRAFGHHAVSLLDGGLRHWLRQNLPLSSGKSQPAPAEFRAQLDPAFIKTYEDIKENLESRRFQVVDSRATGRFRGTEPEPRDGIEPGHIPGTVNIPFTDFLSQEGLEKSPEEIRHLFQEKKVDLSKPLVATCGSGVTACHVALGAYLCGKPDVPIYDGSWVEWYMRARPEDVISEGRGKTH

SEQ ID NO: 3264 - protein, 466 aa, Homo sapiens
ARRSTPRTAPRASATRSAAGTMREIVHIQAGQCGNQIGAKFWEVISDEHGIDPTGSYHGDSDLQLERINVYYNEAAGNKYVPRAILVDLEPGTMDSVRSGPFGQIFRPDNFVFGQSGAGNNWAKGHYTEGAELVDSVLDVVRKESESCDCLQGFQLTHSLGGGTGSGMGTLLISKIREEYPDRIMNTFSVMPSPKVSDTVVEPYNATLSVHQLVENTDETYSIDNEALYDICFRTLKLTTPTYGDLNHLVSATMSGVTTCLRFPGQLNADLRKLAVNMVPFPRLHFFMPGFAPLTSRGSQQYRALTVPELTQQMFDSKNMMAACDPRHGRYLTVAAIFRGRMSMKEVDEQMLNVQNKNSSYFVEWIPNNVKTAVCDIPPRGLKMSATFIGNSTAIQELFKRISEQFTAMFRRKAFLHWYTGEGMDEMEFTEAESNMNDLVSEYQQYQDATADEQGEFEEEEGEDEA

SEQ ID NO: 3265 - protein, 199 aa, Homo sapiens
WWEDARVLGPFHPEEEGHWVMTPSEGARAGTGRELEMLDSLLALGGLVLLRDSVEWEGRSLLKALVKKSALCGEQVHILGCEVSEEEFREGFDSDINNRLVYHDFFRDPLNWSKTEEAFPGGPLGALRAMCKRTDPVPVTIALDSLSWLLLRLPCTTLCQVLHAVSHQDSCPGETPPSLFPLIHLPLPRSVPLFLSTLE

SEQ ID NO: 3266 - protein, 294 aa, Homo sapiens
AAGAGADGREPASERASRAEPPAVAMGQNDLMGTAEDFADQFLRVTKQYLPHVARLCLISTFLEDGIRMWFQWSEQRDYIDTTWNCGYLLASSFVFLNLLGQLTGCVLVLSRNFVQYACFGLFGIIALQTIAYSILWDLKFLMRNLALGGGLLLLLAESRSEGKSMFAGVPTMRESSPKQYMQLGGRVLLVLMFMTLLHFDASFFSIVQNIVGTALMILVAIGFKTKLAALTLVVWLFAINVYFNAFWTIPVYKPMHDFLKYDFFQTMSVIGGLLLVVALGPGGVSMDEKKKEW

SEQ ID NO: 3267 - protein, 70 aa, Homo sapiens
ASTFCSAWKRRSTAALWWSGSRASRSHPRELGPLCFVFGTAALSIRSMDVLSLFLEHGKLVFASGLSPRA

SEQ ID NO: 3268 - protein, 63 aa, Homo sapiens
EDAWITNPSLSNARSTPSKPLCYTVLKEGQVVGVKTTKASNTREKLRPESERRMVKSFGDEVT

SEQ ID NO: 3269 - protein, 264 aa, Homo sapiens
GSTHASGARPSLKRARSQRGRPLPSRALPSAHKDMTTNAGPLHPYWPQHLRLDNFVPNDRPTWHILAGLFSVTGVLVVTTWLLSGRAAVVPLGTWRRLSLCWFAVCGFIHLVIEGWFVLYYEDLLGDQAFLSQLWKEYAKGDSRYILGDNFTVCMETITACLWGPLSLWVVIAFLRQHPLRFILQLVVSVGQIYGDVLYFLTEHRDGFQHGELGHPLYFWFYFVFMNALWLVLPGVLVLDAVKHLTHAQSTLDAKATKAKSKKN

SEQ ID NO: 3270 - protein, 70 aa, Homo sapiens
GDTGPQILMSYLDSVASKLLQMVKKLSQSFCSNFKYLTKYSRKQVSDEIKKSRRTVESNPIFFKKNKKIQ

SEQ ID NO: 3271 - protein, 44 aa, Homo sapiens
IQSGLSLCFADLSETPEGRAGVPGCPHSCDGVASGRPCSPSSAG

SEQ ID NO: 3272 - protein, 79 aa, Homo sapiens
FQFIQIELLNILQSLIRNQTQSPYNTTAYPAIDSVITILPFSFSCFFIITKCFGLSIFPSVIFFLHVYFILTLVVFYCC

SEQ ID NO: 3273 - protein, 501 aa, Homo sapiens
QAWSLQVALSPFFFPASPSNSFAAAVPQLLFPELPLPHVPGQESAKRRSARRFLIMSELTKELMELVWGTKSSPGLSDTIFCRWTQGFVFSESEGSALEQFEGGPCAVIAPVQAFLLKKLLFSSEKSSWRDCSQEEQKELLCHTLCDILESACCDHSGSYCLVSWLRGKTTEETASISGSPAESSCQVEHSSALAVEELGFERFHALIQKRSFRSLPELKDAVLDQYSMWGNKFGVLLFLYSVLLTKGIENIKNEIEDASEPLIDPVYGHGSQSLINLLLTGHAVSNVWDGDRECSGMKLLGIHEQAAVGFLTLMEALRYCKVGSYLKISKIPYLDCLASETHLTVFFAKDMALVAPEAPSEQARRVFQTYDPEDNGFIPDSLLEDVMKALDLVSDPEYINLMKNKLDPEGLGIILLGPFLQEFFPDQGSSGPESFTVYHYNGLKQSNYNEKVMYVEGTAVVMGFEDPMLQTDDTPIKRCLQTKWPYIELLWTTDRSPSLN

SEQ ID NO: 3274 - protein, 390 aa, Homo sapiens [sequence omitted]

SEQ ID NO: 3275 - protein, 61 aa, Homo sapiens
SVYSASSCKCCNYRKTEQIPDCEQPPASSMPERPSHESQPTPQMMPLSAPSRAEELGQRPG

SEQ ID NO: 3276 - protein, 84 aa, Homo sapiens
KAAGHRLLLAAGHPSMPSSDCLLWEGSLELRPLQHISSLLVLVSTTCLFAFPRVPIAFESKSCLIYHCHCAFTVRHYMCSSHTG

SEQ ID NO: 3277 - protein, 737 aa, Homo sapiens
KLGVEPEEEGGGDDEEDAEAWAMELADVGAAASSQGVHDQVLPTPNASSRVIVHVDLDCFYAQVEMISNPELKDKPLGVQQKYLVVTCNYEARKLGVKKLMNVRDAKEKCPQLVLVNGEDLTRYREMSYKVTELLEEFSPVVERLGFDENFVDLTEMVEKRLQQLQSDELSAVTVSGHVYNNQSINLLDVLHIRLLVGSQIAAEMREAMYNQLGLTGCAGVASNKLLAKLVSGVFKPNQQTVLLPESCQHLIHSLNHIKEIPGIGYKTAKCLEALGINSVRDLQTFSPKILEKELGISVAQRIQKLSFGEDNSPVILSGPPQSFSEEDSFKKCSSEVEAKNKIEELLASLLNRLCQDERKPHTVRLIIRRYSSEKHYGRESRQCPIPSHVIQKLGTGNYDVMTPMVDILMKLFRNMVNVKMPFHLTLLSVCFCNLKALNTAKKGLIDYYLMPSLSTTSRSGKHSFKMKDTHMEDFPKDKETNRDFLPSGRIESTRTRESPLDTTNFSKEKDINEFPLCSLPEGVDQEVFKQLPVDIQEEILSGKSREKFQGKGSVSCPLHASRGVLSFFSKKQMQDIPINPRDHLSSSKQVSSVSPCEPGTSGFNSSSSSYMSSQKDYSYYLDNRLKDERISQGPKEPQGFHFTNSNPAVSAFHSFPNLQSEQLFSRNHTTDSHKQTVATDSHEGLTENREPDSVDEKITFPSDIDPQVFYELPEAVQKELLAEWKRTGSDFHIGHK

SEQ ID NO: 3278 - protein, 292 aa, Homo sapiens
GLRLHVDLVEKPRTGIMAAETRNVAGAEAPPPQKRYYRQRAHSNPMADHTLRYPVKPEEMDWSELYPEFFAPLTQNQSHDDPKDKKEKRAQAQVEFADIGCGYGGLLVELSPLFPDTLILGLEIRVKVSDYVQDRIRALRAAPAGGFQNIACLRSNAMKHLPNFFYKGQLTKMFFLFPDPHFKRTKHKWRIISPTLLAEYAYVLRVGGLVYTITDVLELHDWMCTHFEEHPLFERVPLEDLSEDPVVGHLGTSTEEGKKVLRNGGKNFPAIFRRIQDPVLQAVTSQTSLPGH

SEQ ID NO: 3279 - protein, 949 aa, Homo sapiens
TRTKRRLGREKAMASPPRGWGCGELLLPFMLLGTLCEPGSGQIRYSMPEELDKGSFVGNIAKDLGLEPQELAERGVRIVSRGRTQLFALNPRSGSLVTAGRIDREELCAQSPLCVVNFNILVENKMKIYGVEVEIIDINDNFPRFRDEELKVKVNENAAAGTRLVLPFARDADVGVNSLRSYQLSSNLHFSLDVVSGTDGQKYPELVLEQPLDREKETVHDLLLTALDGGDPVLSGTTHIRVTVLDANDNAPLFTPSEYSVSVPENIPVGTRLLMLTATDPDEGINGKLTYSFRNEEEKISETFQLDSNLGEISTLQSLDYEESRFYLMEVVAQDGGALVASAKVVVTVQDVNDNAPEVILTSLTSSISEDCLPGTVIALFSVHDGDSGENGEIACSIPRNLPFKLEKSVDNYYHLLTTRDLDREETSDYNITLTVMDHGTPPLSTESHIPLKVADVNDNPPNFPQASYSTSVTENNPRGVSIFSVTAHDPDSGDNARVTYSLAEDTFQGAPLSSYVSINSDTGVLYALRSFDYEQLRDLQLWVTASDSGNPPLSSNVSLSLFVLDQNDNTPEILYPALPTDGSTGVELAPRSAEPGYLVTKVVAVDKDSGQNAWLSYRLLKASEPGLFAVGLHTGEVRTARALLDRDALKQSLVVAVEDHGQPPLSATFTVTVAVADRIPDILADLGSIKTPIDPEDLDLTLYLVVAVAAVSCVFLAFVIVLLVLRLRRWHKSRLLQAEGSRLAGVPASHFVGVDGVRAFLQTYSHEVSLTADSRKSHLIFPQPNYADTLLSEESCEKSEPLLMSDKVDANKEERRVQQAPPNTDWRFSQAQRPGTSGSQNGDDTGTWPNNQFDTEMLQAMILASASEAADGSSTLGGGAGTMGLSARYGPQFTLQHVLQGELGSDYRQNVYIPGSNATLTNAAGKRDGKAPAGGNGNKKKSGKKEKK

SEQ ID NO: 3280 - protein, 379 aa, Homo sapiens
GTSQMSSHKGSVVAQGNGAPASNREADTAELAELGPLLEEKGKRVIANPPKAEEEQTCPVPQEEEEEVRVLTLPLQAHHAMEKMEEFVYKVWEGRWRVIPYDVLPDWLKDNDYLLHGHRPPMPSFRACFKSIFRIHTETGNIWTHLLGFVLFLFLGILTMLRPNMYFMAPLQEKVVFGMFFLGAVLCLSFSWLFHTVYCHSEKVSRTFSKLDYSGIALLIMGSFVPWLYYSFYCSPQPRLIYLSIVCVLGISAIIVAQWDRFATPKHRQTRAGVFLGLGLSGVVPTMHFTIAEGFVKATTVGQMGWFFLMAVMYITGAGLYAARIPERFFPGKFDIWFQSHQIFHVLVVAAAFVHFYGVSNLQEFRYGLEGGCTDDTLL

SEQ ID NO: 3281 - protein, 185 aa, Homo sapiens
RPRRRQPSFSCRVLVLEDPPCFRFTNSMNQEKLAKLQAQVRIGGKGTARRKKKVVHRTATADDKKLQSSLKKLAVNNIAGIEEVNMIKDDGTVIHFNNPKVQASLSANTFAITGHAEAKPITEMLPGILSQLGADSLTSLRKLAEQFPRQVLDSKAPKPEDIDEEDDDVPDLVENFDEASKNEAN

SEQ ID NO: 3282 - protein, 328 aa, Homo sapiens
HALGRRGGSQELSAAACGCFALRLRAPGSGRPALAPGAAAFAGLGGAPRFPPRGSAAGRTMLLKEYRICMPLTVDEYKIGQLYMISKHSHEQSDRGEGVEVVQNEPFEDPHHGNGQFTEKRVYLNSKLPSWARAVVPKIFYVTEKAWNYYPYTITEYTCSFLPKFSIHIETKYEDNKGSNDTIFDNEAKDVEREVCFIDIACDEIPERYYKESEDPKHFKSEKTGRGQLREGWRDSHQPIMCSYKLVTVKFEVWGLQTRVEQFVHKVVRDILLIGHRQAFAWVDEWYDMTMDDVREYEKNMHEQTNIKVCNQHSSPVDDIESHAQTST

SEQ ID NO: 3283 - protein, 129 aa, Homo sapiens
IKSKLNQQVEVQESEWRLTEAKGPTMGKESGWDSGRAAVAAVVGGVVAVGTVLVALSAMGFTSVGIAASSIAAKMMSTAAIANGGGVAAGSLVAILQSVGAAGLSVTSKVIGGFAGTALGAWLGSPPSS

SEQ ID NO: 3284 - protein, 136 aa, Homo sapiens
TSNSLLRPDRMSVMDLANTCSSFQSDLDFCSDCGSVLPLPGAQDTVTCIRCGFNINVRDFEGKVVKTSVVFHQLGTAMPMSVEEGPECQGPVVDRRCPRCGHEGMAYHTRQMRSADEGQTVFYTCTNCKFQEKEDS

SEQ ID NO: 3285 - protein, 470 aa, Homo sapiens
HRLSYDEAFAMANDPLEGFHEVNLASPTSPDLLGVYESGTQEQTTSPSVIYRPHPSALSSVPIQANALDVSELPTQPVYSSPRRLNCAEISSISFHVTDPAPCSTSGVTAGLTKLTTRKDNYNAEREFLQGATITEACDGSDDIFGLSTDSLSRLRSPSVLEVREKGYERLKEELAKAQRELKLKDEECERLSKVRDQLGQELEELTASLFEEAHKMVREANIKQATAEKQLKEAQGKIDVLQAEVAALKTLVLSSSPTSPTQEPLPGGKTPFKKGHTRNKSTSSAMSGSHQDLSVIQPIVKDCKEADLSLYNEFRLWKDEPTMDRTCPFLDKIYQEDIFPCLTFSKSELASAVLEAVENNTLSIEPVGLQPIRFVKASAVECGGPKKCALTGQSKSCKHRIKLGDSSNYYYISPFCRYRITSVCNFFTYIRYIQQGLVKQQDVDQMFWEVMQLRKEMSLAKLGYFKEEL

SEQ ID NO: 3286 - protein, 195 aa, Homo sapiens
GPSQSMAAGELEGGKPLSGLLNALAQDTFHGYPGITEELLRSQLYPEVPPEEFRPFLAKMRGILKSIASADMDFNQLEAFLTAQTKKQGGITSDQAAVISKFWKSHKTKIRESLMNQSRWNSGLRGLSWRVDGKSQSRHSAQIHTPVAIIELELGKYGQESEFLCLEFDEVKVNQILKTLSEVEESISTLISQPN

SEQ ID NO: 3287 - protein, 113 aa, Homo sapiens
LGAMAKHHPDLIFCRKQAGVAIGRLCEKCDGKCVICDSYVRPCTLVRICDECNYGSYQGRCVICGGPGVSDAYYCKECTIQEKDRDGCPKIVNLGSSKTDLFYERKKYGFKKR

SEQ ID NO: 3288 - protein, 141 aa, Homo sapiens
RTTFFRFRPCESLCGDMKLLTHNLLSSHVRGVGSRGFPLRLQATEVRICPVEFNPNFVARMIPKVEWSAFLEAADNLRLIQVPKGPVEGYEENEEFLRTMHHLLLEVEVIEGTLQCPESGRMFPISRGIPNMLLSEEETES

SEQ ID NO: 3289 - protein, 581 aa, Homo sapiens
AGCCRDTRFPTPRGPGSLCHNFCRSAACTVTRTIHGSPREDTGTPRSREMMFQDSVAFEDVAVSFTQEEWALLDPSQKNLYRDVMQETFKNLTSVGKTWKVQNIEDEYKNPRRNLSLMREKLCESKESHHCGESFNQIADDMLNRKTLPGITPCESSVCGEVGTGHSSLNTHIRADTGHKSSEYQEYGENPYRNKECKKAFSYLDSFQSHDKACTKEKPYDGKECTETFISHSCIQRHRVMHSGDGPYKCKFCGKAFYFLNLCLIHERIHTGVKPYKCKQCGKAFTRSTTLPVHERTHTGVNADECKECGNAFSFPSEIRRHKRSHTGEKPYECKQCGKVFISFSSIQYHKMTHTGEKPYECKQCGKAFRCGSHLQKHGRTHTGEKPYECRQCGKAFRCTSDLQRHEKTHTEDKPYGCKQCGKGFRCASQLQIHERTHSGEKPHECKECGKVFKYFSSLRIHERTHTGEKPHECKQCGKAFRYFSSLHIHERTHTGDKPYECKVCGKAFTCSSSIRYHERTHTGEKPYECKHCGKAFISNYIRYHERTHTGEKPYQCKQCGKAFIRASSCREHERTHTINR

SEQ ID NO: 3290 - protein, 449 aa, Homo sapiens
GRPRSSSDNRNFLRERAGLSSAAVQTRIGNSAASRRSPAARPPVPAPPALPRGRPGTEGSTSLSAPAVLVVAVAVVVVVVSAVAWAMANYIHVPPGSPEVPKLNVTVQDQEEHRCREGALSLLQHLRPHWDPQEVTLQLFTDGITNKLIGCYVGNTMEDVVLVRIYGNKTELLVDRDEEVKSFRVLQAHGCAPQLYCTFNNGLCYEFIQGEALDPKHVCNPAIFRLIARQLAKIHAIHAHNGWIPKSNLWLKMGKYFSLIPTGFADEDINKRFLSDIPSSQILQEEMTWMKEILSNLGSPVVLCHNDLLCKNIIYNEKQGDVQFIDYEYSGYNYLAYDIGNHFNEFAGVSDVDYSLYPDRELQSQWLRAYLEAYKEFKGFGTEVTEKEVEILFIQVNQFALASHFFWGLWALIQAKYSTIEFDFLGYAIVRFNQYFKMKPEVTALKVPE

SEQ ID NO: 3291 - protein, 245 aa, Homo sapiens
PEAQTSAVLAREKGHLPTMRHEAPMQMASAQDARYGQKDSSDQNFDYMFKLLIIGNSSVGKTSFLFRYADDSFTSAFVSTVGIDFKVKTVFKNEKRIKLQIWDTAGQERYRTITTAYYRGAMGFILMYDITNEESFNAVQDWSTQIKTYSWDNAQVILVGNKCDMEDERVISTERGQHLGEQLGFEFFETSAKDNINVKQTFERLVDIICDKMSESLETDPAITAAKQNTRLKETPPPPQPNCAC

SEQ ID NO: 3292 - protein, 1378 aa, Homo sapiens
DRPPWNSRVDDFVTNLIHLSSKGHISPAKDTSLQQRTPAEMSPVLHFYVRPSGHEGAASGHTRRKLQGKLPELQGVETELCYNVNWTAEALPSAEETKKLMWLFGCPLLLDDVARESWLLPGSNDLLLEVGPRLNFSTPTSTNIVSVCRATGLGPVDRVETTRRYRLSFAHPPSAEVEAIALATLHDRMTEQHFPHPIQSFSPESMPEPLNGPINILGEGRLALEKANQELGLALDSWDLDFYTKRFQELQRNPSTVEAFDLAQSNSEHSRHWFFKGQLHVDGQKLVHSLFESIMSTQESSNPNNVLKFCDNSSAIQGKEVRFLRPEDPTRPSRFQQQQGLRHVVFTAETHNFPTGVCPFSGATTGTGGRIRDVQCTGRGAHVVAGTAGYCFGNLHIPGYNLPWEDLSFQYPGNFARPLEVAIEASNGASDYGNKFGEPVLAGFARSLGLQLPDGQRREWIKPIMFSGGIGSMEADHISKEAPEPGMEVVKVGGPVYRIGVGGGAASSVQVQGDNTSDLDFGAVQRGDPEMEQKMNRVIRACVEAPKGNPICSLHDQGAGGNGNVLKELSDPAGAIIYTSRFQLGDPTLNALEIWGAEYQESNALLLRSPNRDFLTHVSARERCPACFVGTITGDRRIVLVDDRECPVRRNGQGDAPPTPPPTPVDLELEWVLGKMPRKEFFLQRKPPMLQPLALPPGLSVHQALERVLRLPAVASKRYLTNKVDRSVGGLVAQQQCVGPLQTPLADVAVVALSHEELIGAATALGEQPVKSLLDPKVAARLAVAEALTNLVFALVTDLRDVKCSGNWMWAAKLPGEGAALADACEAMVAVMAALGVAVDGGKDSLSMAARVGTETVRAPGSLVISAYAVCPDITATVTPDLKHPEGRGHLLYVALSPGQHRLGGTALAQCFSQLGEHPPDLDLPENLVRAFSITQGLLKDRLLCSGHDVSDGGLVTCLLEMAFAGNCGLQVDVPVPRVDVLSVLFAEEPGLVLEVQEPDLAQVLKRYRDAGLHCLELGHTGEAGPHAMVRVSVNGAVVLEEPVGELRALWEETSFQLDRLQAEPRCVAEEERGLRERMGPSYCLPPTFPKASVPREPGGPSPRVAILREEGSNGDREMADAFHLAGFEVWDVTMQDLCSGAIGLDTFRGVAFVGGFSYADVLGSAKGWAAAVTFHPRAGAELRRFRKRPDTFSLGVCNGCQLLALLGWVGGDPNEDAAEMGPDSQPARPGLLLRHNLSGRYESRWASVRVGPGPALMLRGMEGAVLPVWSAHGEGYVAFSSPELQAQIEARGLAPLHWADDDGNPTEQYPLNPNGSPGGVAGICSCDGRHLAVMPHPERAVRPWQWAWRPPPFDTLTTSPWLQLFINARNWTLEGSC

SEQ ID NO: 3293 - protein, 192 aa, Homo sapiens
GVRGFWAGTMASRAGPRAAGTDGSDFQHRERVAMHYQMSVTLKYEIKKLIYVHLVIWLLLVAKMSVGHLRLLSHDQVAMPYQWEYPYLLSILPSLLGLLSFPRNNISYLVLSMISMGLFSIAPLIYGSMEMFPAAQQLYRHGKAYRFLFGFSAVSIMYLVLVLAVQVHAWQLYYSKKLLDSWFTSTQEKKHK

SEQ ID NO: 3294 - protein, 595 aa, Homo sapiens
SQRSCPRSPSSPAPPWARCSNPDSRTGGVPVPRAWSAGGPALGLMAAPVRLGRKRPLPACPNPLFVRWLTEWRDEATRSRHRTRFVFQKALRSLRRYPLPLRSGKEAKILQHFGDGLCRMLDERLQRHRTSGGDHAPDSPSGENSPAPQGRLAEVQDSSMPVPAQPKAGGSGSYWPARHSGARVILLVLYREHLNPNGHHFLTKEELLQRCAQKSPRVAPGSARPWPALRSLLHRNLVLRTHQPARYSLTPEGLELAQKLAESEGLSLLNVGIGPKEPPGEETAVPGAASAELASEAGVQQQPLELRPGEYRVLLCVDIGETRGGGHRPELLRELQRLHVTHTVRKLHVGDFVWVAQETNPRDPANPGELVLDHIVERKRLDDLCSSIIDGRFREQKFRLKRCGLERRVYLVEEHGSVHNLSLPESTLLQAVTNTQVIDGFFVKRTADIKESAAYLALLTRGLQRLYQGHTLRSRPWGTPGNPESGAMTSPNPLCSLLTFSDFNAGAIKNKAQSVREVFARQLMQVRGVSGEKAAALVDRYSTPASLLAAYDACATPKEQETLLSTIKCGRLQRNLGPALSRTLSQLYCSYGPLT

SEQ ID NO: 3295 - protein, 371 aa, Homo sapiens
EFHPHTQVSGLLTPQLQEPDVWSPSRGQPVSLHLPGKGAPEVKEMAWWKSWIEQEGVTVKSSSHFNPDPDAETLYKAMKGIGTNEQAIIDVLTKRSNTQRQQIAKSFKAQFGKDLTETLKSELSGKFERLIVALMYPPYRYEAKELHDAMKGLGTKEGVIIEILASRTKNQLREIMKAYEEDYGSSLEEDIQADTSGYLERILVCLLQGSRDDVSSFVDPALALQDAQDLYAAGEKIRGTDEMKFITILCTRSATHLLRVFEEYEKIANKSIEDSIKSETHGSLEEAMLTVVKCTQNLHSYFAERLYYAMKGAGTRDGTLIRNIVSRSEIDLNLIKCHFKKMYGKTLSSMIMEDTSGDYKNALLSLVGSDP

SEQ ID NO: 3296 - protein, 279 aa, Homo sapiens
GTRGGVGPGDNGGVEAGAKPGAAAIPLRGDGSGETGPGRVAPGEVRGSPRGHVAGPEGPREVLFFFFLPSSKPASEVINEYSWKVDFLKGMLQAEKLTSSSEKALANQFLAPGRVPTTARERVPATKTVHLQSRARYTSEMRSELLGTDSAEPEMDVRKRTGVAGSQPVSEKQSAAELDLVLQRHQNLQEKLAEEMLGLARSLKTNTLAAQSVIKKDNQTLSHSLKMADQNLEKLKTESERLEQHTQKSVNWLLWAMLIIVCFIFISMILFIRIMPKLK

SEQ ID NO: 3297 - protein, 190 aa, Homo sapiens
HKQPAGFLGLWLGTETYTISFPGPETFGLGLSHATGIPGSPACRQPVVGLHSLHNYRMAMVSAMSWVLYLWISACAMLLCHGSLQHTFQQHHLHRPEGGTCEVIAAHRCCNKNRIEERSQTVKCSCLPGKVAGTTRNRPSCVDASIVIGKWWCEMEPCLEGEECKTLPDNSGWMCATGNKIKTTRIHPRT

SEQ ID NO: 3298 - protein, 197 aa, Homo sapiens
IQPPDPRNMTLAAYKEKMKELPLVSLFCSCFLADPLNKSSYKYEADTVDLNWCVISDMEVIELNKCTSGQSFEVILKPPSFDGVPEFNASLPRRRDPSLEEIQKKLEAAEERRKYQEAELLKHLAEKREHEREVIQKAIEENNNFIKMAKEKLAQKMESNKENREAHLAAMLERLQEKDKHAEEVRKNKELKEEASR

SEQ ID NO: 3299 - protein, 295 aa, Homo sapiens
TQLPAPLSGVLSRLQLGSGAPLLTWVQETAGVAGGAPRRRTPVTMWRLLARASAPLLRVPLSDSWALLPASAGVKTLLPVPSFEDVSIPEKPKLRFIERAPLVPKVRREPKNLSDIRGPSTEATEFTEGNFAILALGGGYLHWGHFEMMRLTINRSMDPKNMFAIWRVPAPFKPITRKSVGHRMGGGKGAIDHYVTPVKAGRLVVEMGGRCEFEEVQGFLDQVAHKLPFAAKAVSRGTLEKMRKDQEERERNNQNPWTFERIATANMLGIRKVLSPYDLTHKGKYWGKFYMPKRV

SEQ ID NO: 3300 - protein, 615 aa, Homo sapiens
FVAGGPRGSGSAAETMPEIRVTPLGAGQDVGRSCILVSIAGKNVMLDCGMHMGFNDDRRFPDFSYITQNGRLTDFLDCVIISHFHLDHCGALPYFSEMVGYDGPIYMTHPTQAICPILLEDYRKIAVDKKGEANFFTSQMIKDCMKKVVAVHLHQTVQVDDELEIKAYYAGHVLGAAMFQIKVGSESVVYTGDYNMTPDRHLGAAWIDKCRPNLLITESTYATTIRDSKRCRERDFLKKVHETVERGGKVLIPVFALGRAQELCILLETFWERMNLKVPIYFSTGLTEKANHYYKLFIPWTNQKIRKTFVQRNMFEFKHIKAFDRAFADNPGPMVVFATPGMLHAGQSLQIFRKWAGNEKNMVIMPGYCVQGTVGHKILSGQRKLEMEGRQVLEVKMQVEYMSFSAHADAKGIMQLVGQAEPESVLLVHGEAKKMEFLKQKIEQELRVNCYMPANGETVTLPTSPSIPVGISLGLLKREMAQGLLPEAKKPRLLHGTLIMKDSNFRLVSSEQALKELGLAEHQLRFTCRVHLHDTRKEQETALRVYSHLKSVLKDHCVQHLPDGSVTVESVLLQAAAPSEDPGTKVLLVSWTYQDEELGSFLTSLLKKGLPQAPS

SEQ ID NO: 3301 - protein, 115 aa, Homo sapiens
CIRTEPAAAFRRLGALSGAAALGFASYGAHGAQFPDAYGKELFDKANKHHFLHSLALLGVPHCRKPLWAGLLLASGTTLFCTSFYYQALSGDPSIQTLAPAGGTLLLLGWLALAL

SEQ ID NO: 3302 - protein, 375 aa, Homo sapiens
LRRNCSALGGLFQTIISDMKGSYPVWEDFINKAGKLQSQLRTTVVAAAAFLDAFQKVADMATNTRGGTREIGSALTRMCMRHRSIEAKLRQFSSALIDCLINPLQEQMEEWKKVANQLDKDHAKEYKKARQEIKKKSSDTLKLQKKAKKGRGDIQPQLDSALQDVNDKYLLLEETEKQAVRKALIEERGRFCTFISMLRPVIEEEISMLGEITHLQTISEDLKSLTMDPHKLPSSSEQVILDLKGSDYSWSYQTPPSSPSTTMSRKSSVCSSLNSVNSSDSRSSGSHSHSPSSHYRYRSSNLAQQAPVRLSSVSSHDSGFISQDAFQSKSPSPMPPEAPNQRRKEKREPDPNGGGPTTASGPPAAAEEAQRPRSM

SEQ ID NO: 3303 - protein, 149 aa, Homo sapiens
AGRGGPGKPVSWSSGPGSPGQTQRRSWVKSTRGHSSLLPPSQDFVAGLSVILRGTVDDRLNWAFNLYDLNKDGCITKEEMLDIMKSIYDMMGKYTYPALREEAPREHVESFFQKMDRNKDGVVTIEEFIESCQKDENIMRSMQLFDNVI

SEQ ID NO: 3304 - protein, 130 aa, Homo sapiens
  misc_feature (1)...(130): Xaa = any amino acid or nothing
ISEAASGAFQARXFYQMLEQKTDALGKQSVNRGFTKDKTLSSIFNIEMVKEKTAEEIKQIWQQYFAAKDTVYAVIPAEKFDLIWNRAQSCPTFLCALPRREGYEFFVGQWTGTELHFHCTYKYSDPEGKA

SEQ ID NO: 3305 - protein, 160 aa, Homo sapiens
  misc_feature (1)...(160): Xaa = any amino acid or nothing
LDACSTGPYSRSTHASADAWADAWVVVVLKVVGMTLFLLYFPQIFNKSNDGFTTTRSYGTVSQIFGSRSPSPNGFITTRSYGTVCPKDWEFYQARCFFLIHLXSSWNESWDFCKGKGCTLAIVDNSETLKLLHDLHDAEKNYIALPYRSSKYMSTCNGTF

SEQ ID NO: 3306 - protein, 290 aa, Homo sapiens
  misc_feature (1)...(290): Xaa = any amino acid or nothing
TLSSACLIGDAWKELTIVAGAVSNQLLVWYPATALADNKPVAPDRRISGHVGIIFSMSYLESKGLLATASEDRSVRIWKGGDLRVPGGRVQNIGHCFGHSARVWQVKLLENYLISAGEDCVCLVWSHEGEILQAFRGHQGRGIRAIAAHERQAWVITGGDDSGIRLWHLVGRGYRGLGDLGSLLQVPXXARYTQGCDSGWLLATAGSDXYRGPVSLXRRGQVLGAAARGXTFPVLLPAGGSSWSRGLRIVCYGQWGRSCQGCPHQHSNCCCGPDPVSWEGAQLELGPAWL

SEQ ID NO: 3307 - protein, 308 aa, Homo sapiens
  misc_feature (1)...(308): Xaa = any amino acid or nothing
RTSRVEKGLRKAGAAVTMESDEWFSQALPANTSAQKAELIALTQAIRWGKDINVNTDSRYAFATVHVRGAICQERRLLTSAEKAIKNKNPPSSKPNRSSSFWGTTCDQVNAKQGPKPSPGHRLRRNLPGEKWEIDFTKVKPHQAGYKYLLVLVDTFSGWTEAFATKNETVNMVVKFLLNEIIPRHGLPVAIGSDNGPAFALSIVXSVSKALNIQWKLHCAYRPQSSGQVERMNCTLKNTLTKLILETGVNWVSLLPLALLRVRCTPYWAGFLPFEIMYGRVLPILPKLRDAQLAKISQTNLLQYLQSP

SEQ ID NO: 3308 - protein, 196 aa, Homo sapiens
NSPSLDFNDNEDIPTELSDSSDTHDEGEVQAFYEDLSGRQYVNEVFNFSVDKLYDLLFTNSPFQRDFMEQRRFSDIIFHPWKKEENGNQSRVIPYTITLTNPLEHKTATVRETQTMYKASQESECYVIDAEVLTHDVPYHDYFYTINRYTLTRVARNKSRLRVSTELRYRKQPWGLVKTFIEKNFWSGLEDYFRHL

SEQ ID NO: 3309 - protein, 196 aa, Homo sapiens; identical to SEQ ID NO: 3308

SEQ ID NO: 3310 - protein, 399 aa, Homo sapiens
  misc_feature (1)...(399): Xaa = any amino acid or nothing
SPLCHPGLSRERSXSEAKLRSGRYCXKRQVEAPLXRPGLXTMAASDTERDGLAPEKTSPDRDKKKEQSEVSVSPRASKHHYSRSRSRSRERKRKSDNEGRKHRSRSRSKEGRRHESKDKSSKKHKSEEHNDKEHSSDKGRERLNSSENGEDRHKRKERKSSRGRSHSRSRSRERRHRSRSRERKKSRSRSRERKKSRSRSRERKKSRSRSRERKRRIRSRSRSRSRHRHRTRSRSRTRSRSRDRKKRIEKPRRFSRSLSRTPSPPPFRGRNTAMDAQEALARRLERAKKLQEQREKEMVEKQKQQEIAAAAAATGGSVLNVAALLASGTQVTPQIAMAAQMAALQAKALAETGIAVPSYYNPAAVNPMKFAEQEKKRKMLWQGKKEGDKSQSAGNMGKN

SEQ ID NO: 3311 - protein, 58 aa, Homo sapiens
PIQIPPRITPPRPSPHLLTPRTGSSPPPPRAPSPPHPTPGPAHDFPPLSAVLSGHTKT

SEQ ID NO: 3312 - protein, 141 aa, Homo sapiens
  misc_feature (1)...(141): Xaa = any amino acid or nothing
LESPRHXPPCWGPLIWALTVSSVPSPTPELSCILKSPRPACPVPGLWPSLLSPAPPQSSGPLLGLSPCPGAGQWPSPLSPAPPPSSDPLSGLSPCPGAGPRSSPSASAPCRAVPLSPRRLTWPPHLQVGILIPTGRPWKNL

SEQ ID NO: 3313 - protein, 53 aa, Homo sapiens
  misc_feature (1)...(53): Xaa = any amino acid or nothing
QLQNLASRGCLXSQLLRRLRRENRLNPGGGGCSEIAPCTPAWVTQRDFFRKKK

SEQ ID NO: 3314 - protein, 53 aa, Homo sapiens; identical to SEQ ID NO: 3313
  misc_feature (1)...(53): Xaa = any amino acid or nothing

SEQ ID NO: 3315 - protein, 155 aa, Homo sapiens
  misc_feature (1)...(155): Xaa = any amino acid or nothing
PRKRESWWGERLPPRGFPPAAEDAPAPGWKGRKHASRTARAHVFHPIRQSIRSPVRGRPGDPRAAHTRSAGTRLQCKASRGGXGKGPAPTRXEGGPGSAPAPLPASSGCSLFPDSSPWTPPPPAPGAAAAQPXXTPRCPAALRAGAHIGRVGRPY

SEQ ID NO: 3316 - protein, 767 aa, Homo sapiens
NHLGTLMQNWDSSSRVPFSSGQHSTQSFPPSLMSKSNSMLQKPTAYVRPMDGQESMEPKLSSEHYSSQSHGNSMTELKPSSKAHLTKLKIPSQPLDASASGDVSCVDEILKEMTHSWPPPLTAIHTPCKTEPSKFPFPTKESQQSNFGTGEQKRYNPSKTSNGHQSKSMLKDDLKLSSSEDSDGEQDCDKTMPRSTPGSNSEPSHHNSEGADNSRDDSSSHSGSESSSGSDSESESSSSDSEANEPSQSASPEPEPPPTNKWQLDNWLNKVNPHKVSPASSVDSNIPSSQGYKKEGREQGTGNSYTDTSGPKETSSATPGRAPKPIQKGSESGRGRQKSPAQSDSTTQRRTVGKKQPKKAEKAAAEEPRGGLKIESETPVDLASSMPSSRHKAATKGSRKPNIKKESKSSPRPTAEKKKYKSTSKSSQKSREIIETDTSSSDSDESESLPPSSQTPKYPESNRTPVKPSSVEEEDSFFRQRMFSPMEEKELLSPLSEPDDRYPLIVKIDLNLLTRIPGKPYKETEPPKGEKKNVPEKHTREAQKQASEKVSNKGKRKHKNEDDNRASESKKPKTEDKNSAGHKPSSNRESSKQSAAKEKDLLPSPAGPVPSKDPKTEHGSRKRTISQSSSLKSSSNSNKETSGSSKNSSSTSKQKKTEGKTSSSSKEVKVKAPSSSSNCPPSAPTLDSSKPRRTKLVFDDRNYSADHYLQEAKKLKHNADALSDRFEKAVYYLDAVVSFIECGNALEKNAQESKSPFPMYSETVDLI

SEQ ID NO: 3317 - protein, 165 aa, Homo sapiens
NLLQDEKLVHSYPYDWRTQETCGYIVPARQWFINTRDIKTAAKELLKKVKFIPGSALNGMVEMMDRRPYWCISRQRVWGVPIPVFHHKTKDEYLINSQTTEHIVKLVEQHGSDIWWTLPPEQLLPKEVLSEVGGPDALEYVPGQDILDIWFDSGTSWSYVLPGPD

SEQ ID NO: 3318 - protein, 170 aa, Homo sapiens
AWHEGDSRSDQCHHPYNYGFDYYYGMPFTLVDSCWPDPSRNTELAFESQLWLCVQLVAIAILTLTFGKLSGWVSVPWLLIFSMILFIFLLGYAWFSSHTSPLYWDCLLMRGHEITEQPMKAERAGSIMVKEAIFLFRKGHSKGKLFLLFFLPFLQVHKTFPTTDGFHWAP

SEQ ID NO: 3319 - protein, 135 aa, Homo sapiens
SSLHRSPRPASPLPVPEAPSFLPVPAPKPSALPPFSLSGAPSSASTFSPHSSPSPASPTPAPSPQSPFPSRPTSPPSLTPTRRPPLPADRRGPHLLYQPLHAPLEAAATGPEPSAAAGRLPRPRPPWRAAYPASR

SEQ ID NO: 3320 - protein, 202 aa, Homo sapiens
QMSEAVAEKMLQYRRDTAGWKICREGNGVSVSWRPSVEFPGNLYRGEGIVYGTLEEVWDCVKPAVGGLRVKWDENVTGFEIIQSITDTLCVSRTSTPSAAMKLISPRDFVDLVLVKRYEDGTISSNATHVEHPLCPPKPGFVRGFNHPCGCFCEPLPGEPTKTNLVTFFHTDLSGYLPQNVVDSFFPRSMTRFYANLQKAVK

SEQ ID NO: 3321 - protein, 108 aa, Homo sapiens
SHSASGAGRPAAPAADLRPAPNGQRPGPRLGARALWLPPRGRPDEAGRLPGEHLPQVPWDPGLTRSPSPRGPCRGAARAGHVGETPAPWGCPPPCAWEHKGPGSEGTP

SEQ ID NO: 3322 - protein, 140 aa, Homo sapiens
  misc_feature (1)...(140): Xaa = any amino acid or nothing
AIVEDKHSGRSYDITSDLGNVLTSTSIAKTVNGXAESSDSGAESDEEDAQEDLMGAYHSDIDKKMMKIVADHKNLEVIVTNGYDKDGFVHDIQNDIHASSSLNGRSTVHVKPIDENLGQTGKSAVCIHQDINDDHVEDVT

SEQ ID NO: 3323 - protein, 150 aa, Homo sapiens
  misc_feature (1)...(150): Xaa = any amino acid or nothing
DTLSLNCTLPETLPMTPSFXLSFLXFPGLARAKSIPTKTYSNEVVTLWYRPPDILLGSTDYSTQIDMWXGQVEVWQGPCGKGGGLVTTATQPAAFLFTVPSLPRGVGCIFYEMATGRPLFPGSTVEEQLHFIFRILSEEAWALCAVETHR

SEQ ID NO: 3324 - protein, 270 aa, Homo sapiens
  misc_feature (1)...(270): Xaa = any amino acid or nothing
PGSTHASARITIYXLXIILSNATEVDNNFSKPPPFFPAGAPPASSSSSSSSSSPPTVSTAPPLIPPPGFPPPPGAPPPSLIPTIESGHSSGYDSRSARAFPYGNVAFPHLPGSAPSWPSLVDTSKQWDYYARSSSSSSSSSSSSSSSPRDRDRERXRTRERERERDHSPTPSVFNSDEERYRYREYAERGYERHRASREKEERHRERRHREKEETRHKSSRSNSRRRHESEEGDSHRRHKHKKSKRSKEGKEAGSEPAPEQESTEATPAE

SEQ ID NO: 3325 - protein, 1015 aa, Homo sapiens
  misc_feature (1)...(1015): Xaa = any amino acid or nothing
TCLFSASCSSLPSPSSSFALLSTENTQRTYRVNPDGSLRVTFASGMEIGLSSEPHILAGAVNPTLGKCNISLPGEHNANLISVLXXGEQGCAXNVFHISFSXAHNRNLLSIDFDHITRTGKIYDDHRKFTLRILYDQTGRPILWSPVSRYNEVNITYSPSGLVTFIQRGTWNEKMEYDQSFLXSPQLXLSIICYSAFVSFQSVMLLLHSQRRYIFEYDQPDCLLSVTMPSMVRHSLQTMLSVGYYRNIYTPPDSSTSFIQDYSRDGRLLQTLHLGTGRRVLYKYTKQARLSEVLYDTTQVTLTYEESSGDLSDSSTLIAXLLTVFVLVPAGPLIGRQIFRFSEEGLVNARFDYSYNNFRVTSMQAVINETPLPIDLYRYVDVSGRTEQFGKFSVINYDLNQVITTTVMKHTKIFSANGQVIEVQYEILKAIAYWMTIQYDNVGRMVICDIRVGVDANITRYFYEYDADGQLQTVSVNDKTQWRYSYDLNGNINLLSHGKSARLTPLRYDLRDRITRLGEIQYKMDEDGFLRQRGNDIFEYNSNGLLQKAYNKASGWTVQYYYDGLGRRVASKSSLGQHLQFFYADLTNPIRVTHLYNHTSSEITSLYYDLQGHLIAMELSSGEEYYVACDNTGTPLAVFSSRGQVIKEILYTPYGDIYHDTYPDFQVIIGFHGGLYDFLTKLVHLGQRDYDVVAGRWTTPNHHIWKQLNLLPKPFNLSTKLIKYGIFHFLFLILCLTDIRSWLELFGFQLHNVLPGFPKPELENSPSIXQMSNSMLHLLCASLSXTILGIQCELQKQLRNFISLDQLPMTPRYNDGRCLEGGKQPRFAAVPSVFGKGIKFAIKDGIVTADIIGVANEDSRRLAAILNNAHYLENLHFTIEGRDTHYFIKLGSLEEDLVLIGNTGGRRILENGVNVTVSQMTSVLNGRTRRFADIQLQHGALCFNIRYGTTVEEEKNHVLEIARQRAVAQAWTKEQRRLQEGEEGIRAWTEGEKQQLLSTGRVQGYDGYFVLSVEQ

SEQ ID NO: 3326 - protein, 250 aa, Homo sapiens
  misc_feature (1)...(250): Xaa = any amino acid or nothing
KACLHLLSSFLTSNFLFNPLLPDSLYSVEARSQRANLGPCRRKRLQTLMRLAAGFQYSSHKDPSLSAKEKHTDYHNEARGPWPGWVGXRTADGSCGRGPDGAHHPGPKSSSWRASRLLPGLGGSHHLDAYVGRDLECGTPAPLQLEIPPQPRGHPAPIPTGQAGPRDSGPGASPXVETRPLTDGRRXPGVRPVGWTPAHPAGTLRPRGAVEPSVSACGKWAPSPTSQGCCEGRCDAVPKHRAWRTPLCSQ

SEQ ID NO: 3327 - protein, 139 aa, Homo sapiens
CSECGKSFCKKSKFIIHQRTHTGEKPYECNQCGKSFCQKGTLTVHQRTHTGEKPYECNECGKNFYQKLHLIQHQRTHSGEKPYECSYCGKSFCQKTHLTQHQRTHSGERPYVCHDCGKTFSQKSALNDHQKIHTGVKLY

SEQ ID NO: 3328 - protein, 90 aa, Homo sapiens
VTRKLPIFIVDAFTARAFRGSPAADCLLENELDEDMHQKIAREMNLSETAFIRKLHPTDNFAQRSCFGLIWFTPTTDLQILTSSILPSIL

SEQ ID NO: 3329 - protein, 125 aa, Homo sapiens
EELSCWQIWQQIANDLTRCQDSMINNSQCHKQGDFPYQVGTELSIQISEDENYIVNKADGPNNTGNPEFPILRTQDSWRKTFLTESQRLNRDQQISIKNKLCQCKKGVDPIGWISHHDGHRVHKR

SEQ ID NO: 3330 - protein, 122 aa, Homo sapiens
FWRNFTGLAPAAAVATTTSSSTMRFTSISNSLTSTAAIGLSFTTSTTTTATFTTNTTTTITSGFTVNQNQLLSRGFENLVPYTSTVSVVTTPVMTYGHLEGLINEGNLELEIKRRLSSQATQ

SEQ ID NO: 3331 - protein, 135 aa, Homo sapiens
TFGCSCTDCFFQKCCPAEAGVLLAYNKNQQIKIPPGTPIYECNSRCQCGPDCPNRIVQKGTQYSLCIFRTSNGRGWGVKTLVKIKRMSFVMEYVGEVITSEEAERRGQFYDNKGITYLFDLDYESDEFTVDAARY

SEQ ID NO: 3332 - protein, 145 aa, Homo sapiens
PAADFVLQARPTRADILGIHSKYDEVRKAGACFYKMTGLGPGPQALYNGEPFKHEEMNIKELKMAVLQRMMDASVYLQREVFLGTLNDRTNAIDFLMDRNNVVPRINTLILRTNQQYLNLLSTSVTADAEDFSTFFFLDSQDKSA

SEQ ID NO: 3333 - protein, 87 aa, Homo sapiens
AWIIFLPPLTSCPLWAPGTKHKTILEARSGLGPIKAYPRLGPPTPGEPEAPAQDRTFHCEICNVKVNSKVQLKQHISSRRHEIVDPV

SEQ ID NO: 3334 - protein, 35 aa, Homo sapiens
AGPSLPSNLRQIFQSLPPFMDILLLLLFFMIIFAI

SEQ ID NO: 3335 - protein, 133 aa, Homo sapiens
VESRNSRVQPRVRLNDRTNAIDFLMDRNNVVPRINTLILRTNQQYLNLISTSVTADVEDFSTFFFLDSQDKSAVIAKNMYYLTQDDESIISAATLWIIADFDKPSGRKLLFNALKHMITSVHSRVGIIYNPFF

SEQ ID NO: 3336 - protein, 334 aa, Homo sapiens
PSSYSSDELSPGEPLTSPPWAPLGAPERPEHLLNRVLERLAGGATRDSAASDILLDDIVLTHSLFLPTEKFLQELHQYFVRAGGMEGPEGLGRKQACLAMLLHFLDTYQGLLQEEEGAGHIIKDLYLLIMKDESLYQGLREDTLRLHQLVETVELKIPEENQPPSKQVKPLFRHFRRIDSCLQTRVAFRGSDEIFCRVYMPDHSYVTIRSRLSASVQDILGSVTEKLQYSEEPAGREDSLILVAVSSSGEKVLLQPTEDCVFTALGINSHLFACTRDSYEALVPLPEEIQVSPGDTEIHRVEPEDVANHLTAFHWELFRCVHELEFVDYVFHGE

SEQ ID NO: 3337 - protein, 134 aa, Homo sapiens
  misc_feature (1)...(134): Xaa = any amino acid or nothing
KILLCLANQFPDISFCPALPAVVALLLHYSIDEAECFEKACRILACNDPGRRLIDQSFLAFESSCMTFGDLVNKYCQAAHKLMVAVSEDVLQVYADWQRWLFGELPLCYFARVFDVFLVEGYKVLYRVALAXXF

SEQ ID NO: 3338 - protein, 132 aa, Homo sapiens
FRGKVRGRSAEMPGSDTALTVDRTYSDPGRHHRCKSRVERHDMNTLSLPLNIRRGGSDTNLNFDVPDGILDFHKVKLTADSLKQKILKVTEQIKIEQTSRDGNVAEYLKLVNNADKQQAGRIKQVFEKKNQK

SEQ ID NO: 3339 - protein, 221 aa, Homo sapiens
AAAASNWGLITNIVNSIVGVSVLTMPFCFKQCGIVLGALLLVFCSWMTHQSCMFLVKSASLSKRRTYAGLAFHAYGKAGKMLVETSMIGLMLGTCIAFYVVIGDLGSNFFARLFGFQVGGTFRMFLLFAVSLCIVLPLSLQRNMMASIQSFSAMALLFYTVFMFVIVLSSLKHGLFSGQWLRRVSYVRWEGVFRCIPIFGMSFACQSQVLPTYDSLDEPSV

SEQ ID NO: 3340 - protein, 56 aa, Homo sapiens
LLPLQVLQEAFSRCVAVLTRSSKPSDMSVQVCGYISKCYSVAAQFEECREKITEMP

SEQ ID NO: 3341 - protein, 95 aa, Homo sapiens
HSVIKRTPRKYLAEIVLIDDFSNKEHLKEKLDEYIKLWNGLVKVFRNERREGLIQARSIGAQKAKLGQVLIYLDAHCEVAVNWYAPLVAPISKDR

SEQ ID NO: 3342 - protein, 127 aa, Homo sapiens
NLTWWPLFRDVSFYIVDLIMLIIFFLDNVIMWWESLLLLTAYFCYVVFMKFNVQVEKWVKQMINRNKVVKVTAPEAQAKPSAARDKDEPTLPAKPRLQRGGSSASLHNSLMRNSIFQNKIHTLDPHV

SEQ ID NO: 3343 - protein, 128 aa, Homo sapiens
FRVDNSEEWKDVFIISSERSFKLDSLKCGTWYKVKLAAKNSVGSGRISEIIEAKTHGREPSFSKDQHLFTHINSTHARLNLQGWNNGGCPITAIVLEYRPKGTWAWQGLRANSSGEVFLTELREATWY

SEQ ID NO: 3344 - protein, 67 aa, Homo sapiens
SPACITSSLSQHIADPRAAPTEVKVRVMNSTAISLQWNRVYSDTVQGQLREYRVRKPAPDSPNYPAH

SEQ ID NO: 3345 - protein, 67 aa, Homo sapiens; identical to SEQ ID NO: 3344

SEQ ID NO: 3346 - protein, 501 aa, Homo sapiens
AGIRHEAPPTTSNRHRRQIDRGVTHLNISGLKMPRGIAIDWVAGNVYWTDSGRDVIEVAQMKGENRKTLISGMIDEPHAIVVDPLRGTMYWSDWGNHPKIETAAMDGTLRETLVQDNIQWPTGLAVDYHNERLYWADAKLSVIGSIRLNGTDPIVAADSKRGLSHPFSIDVFEDYIYGVTYINNRVFKIHKFGHSPLVNLTGGLSHASDVVLYHQHKQPEVTNPCDRKKCEWLCLLSPSGPVCTCPNGKRLDNGTCVPVPSPTPPPDAPRPGTCNLQCFNGGSCFLNARRQPKCRCQPRYTGDKCELDQCWEHCRNGGTCAASPSGMPTCRCPTGFTGPKCTQQVCAGYCANNSTCTVNQGNQPQCRCLPGFLGDRCQYRQCSGYCENFGTCQMAADGSRQCRCTAYFEGSRCEVNKCSRCLEGACVVNKQSGDVTCNCTDGRVAPSCLTCVGHCSNGGSCTMNSKMMPECQCPPHMTGPRCEEHVFSQQQPGHIASILIP

SEQ ID NO: 3347 - protein, 103 aa, Homo sapiens
  misc_feature (1)...(103): Xaa = any amino acid or nothing
SPEMESHPITQAGVQWHHLSSLQPLPPGFKXFSCFSLPEXLGYRHVPPCLANSVFSVEMGFLHVGQAGLELLTSGDLPALASQSAGITGSHRARPENGFENIF

SEQ ID NO: 3348 - protein, 390 aa, Homo sapiens
  misc_feature (1)...(390): Xaa = any amino acid or nothing
LSKITMPVICNEPLSFIQRLTEYMXHTYFIHRPSSLSDPVDRMQCVAAFAVSAVASQWERTGKPFNPLLGETYELVRDDLGFRLISEQVSHHPPISAFHAEGLNNDFIFHGSIYPKLKFWGKSVEAEPKGTITLELLEHNEAYTWTNPTCCVHNIIVGKLWIEQYGNVEIINHKTGDKCVLNFKPCGLFGKELHKVEGYIQDKSKKKLCALYGKWTECLYSVDPATFDAYKKNDKKNTEEKKNSKQMSTSEELDEMPVPDSESVFIIPGSVLLWRIAPRPPNSAQMYNFTSFAMVLNEVDKDMESVIPKTDCRLRPDIRAMENGEIDQASEEKKRLEEKQRAARKNRSKSEEDWKTRWFHQGPNPYNGAQDWIYSGSYWDRNYFNLPDIY

SEQ ID NO: 3349 - protein, 92 aa, Homo sapiens
  misc_feature (1)...(92): Xaa = any amino acid or nothing
NFASSSGKYLRTQKIKCLNNKFTPFPTTEKKXSQSVRPPXSNRIYXILQSXNISFSXLPNXNFASSSGKYLRTQKIKCLNNKFTPFPTTEKK

SEQ ID NO: 3350 - protein, 237 aa, Homo sapiens
  misc_feature (1)...(237): Xaa = any amino acid or nothing
GAPAQDCICLPFPFHSSFLESDIRKPARRKIQTTNPDFLLLLFMSVPVVSAPPFCPPAEGSRDGRPKASVARPAAVHEHHSPRDCGHLPDVIRSSLGGWQPHXPAQPENRLLXLLPVEXGHQHPTVSPVPXAGSPGGASGWPGPGQAWRVRVPGPHPLCPPASPPSPVQQXXESVAAGSGLPGCVLCAAGRRPGPLPLLCVEVGQALPPGAWVSSSGQRPGLTHPLAYSHGCVPSEG

SEQ ID NO: 3351 - protein, 142 aa, Homo sapiens
MAAVVAATALKGRGARNARVLRGILAGATANKASHNRTRALQSHSSPEGKEEPEPLSPELEYIPRKRGKNPMKAVGLAWAIGFPCGILLFILTKREVDKDRVKQMKARQNMRLSNTGEYESQRFRASSQSAPSPDVGSGVQT

SEQ ID NO: 3352 - protein, 279 aa, Homo sapiens
RTLFRGRRRREDDRISRPHPSTAESKAPTPKFDLLASNFPPLPGSSSRMPGELVLENRMSDVVKGVYKEKDNEELTISCPVPADEQTECTSAQQLNMSTSSPCAAELTALSTTQQEKDLIEDSSVQKDGLNQTTIPVSPPSTTKPSRASTASPCNNNINAATAVALQEPRKLSYAEVCQKPPKEPSSVLVQPLRELRSNVVSPTKNEDNGAPENSVEKPHEKPEARASKDYSGFRGNIIPRGAAGKIREQRRQFSHRAIPQGVTRRNGKEQYVPPRSPK

SEQ ID NO: 3353 - protein, 155 aa, Homo sapiens
IATPTWTAPLTATPTPAHQYGPARVPNGAPRLEPPPGKRECRVGQYVVDLTSFEQLALPVLRNADCSSGPGQRVCVIDEIGKMELFSQLFIQAVRQTLSTPGTIILGTIPVPKGKPLALVEEIRNRKDVKVFNVTKENRNHLLPDIVTCVQSSRK

SEQ ID NO: 3354 - protein, 404 aa, Homo sapiens
GMEPVGCCGECRGSSVDPRSTFVLSNLAEVVERVLTFLPAKALLRVACVCRLWRECVRRVLRTHRSVTWISAGLAEAGHLEGHCLVRVVAEELENVRILPHTVLYMADSETFISLEECRGHKRARKRTSMETALALEKLFPKQCQVLGIVTPGIVVTPMGSGSNRPQEIEIGESGFALLFPQIEGIKIQPFHFIKDPKNLTLERHQLTEVGLLDNPELRVVLVFGYNCCKVGASNYLQQVVSTFSDMNIILAGGQVDNLSSLTSEKNPLDIDASGVVGLSFSGHRIQSATVLLNEDVSDEKTAEAAMQRLKAANIPEHNTIGFMFACVGRGFQYYRAKGNVEADAFRKFFPSVPLFGFFGNGEIGCDRIVTGNFILRKCNEVKDDDLFHSYTTIMALIHLGSSK

SEQ ID NO: 3355 - protein, 235 aa, Homo sapiens
GTSSGLGGDRLAAPGPSPPSFYPQGRGERAYDIYSRLLRERIVCVMGPIDDSVASLVIAQLLFLQSESNKKPIHMYINSPGGVVTAGLAIYDTMQYILNPICTWCVGQAASMGSLLLAAGTPGMRHSLPNSRIMIHQPSGGARGQATDIAIQAEEIMKLKKQLYNIYAKHTKQSLQVIESAMERDRYMSPMEAQEFGILDKVLVHPPQDGEDEPTLVQKEPVEAAPAAEPVPAST

SEQ ID NO: 3356 - protein, 83 aa, Homo sapiens
  misc_feature (1)...(83): Xaa = any amino acid or nothing
FNYNFCRNLHMPSFLVXPGMCGLLAKHLSFHIVGAFLITLGVAALCKFAVAXPRKKAYADFYRNYNXIKEFEVRKANISQSTK

SEQ ID NO: 3357 - protein, 133 aa, Homo sapiens
  misc_feature (1)...(133): Xaa = any amino acid or nothing
ALGSCGGLLGTGLLKGTMSGTLWSKGIFAGYKRRIRIQREHTAVLKIEGVYARDETEFYLRMICANVYKANNNTVTPVLTPDKTRVMWRKVTQAHGISIMVRAQFRTNLPADAIGHRIRMMLXPSRMYTTEPS

SEQ ID NO: 3358 - protein, 939 aa, Homo sapiens
  misc_feature (1)...(939): Xaa = any amino acid or nothing
FCSKDKCCLYLPDSINRSKSCTAKPGAHSQDRHAVMDSERQVKDTDDIESPKRSIRDSGYIDCWDSERSDSLSPPRHGRDDSFDSLDSFGSRSRQTPSPDVVLRGSSDGRGSDSESDLPHRKLPDVKKDDMSARRTSHGEPKSAVPFNQYLPNKSNQTAYVPAPLRKKKAEREEYRKSWSTATSPAGLGKKALQDYGPRTPVSDDAESTSMFDMRCEEEAAVQPHSRARQEQLQLINNQLREEDDKWQDDLARWKSRKRSVSQDLIKKEEERKKMEKLLAGEDGTSERRKSIKTYREIVQEKERRERELHEAYKNARSQEEAEGILQQYIERFTISEAVLERLEMPKILERSHSTEPNLSSFLNDPNPMKYLRQQSLPPPKFTATVETTIARASVLDTSMSAGSGSPSKTVTPKAVPMLTPKPYSQPKNSQDVLKTFKVDGKVSVNGETVHREEEKERECPTVAPAHSLTKSQMFEGVARVHGSPLELKQDNGSIEINIKKPNSVPQELAATTEKTEPNSQEDKNDGGKSRKGNIELASSEPQHFTTTVTRCSPTVAFVEFPSSPQLKNDVSEEKDQKKPENEMSGKVELVLSQKVVKPKSPEPEATLTFPFLDKMPEANQLHLPNLNSQVDSPSSEKSPVTTPFKFWAWDPEEERRRQEKWQQEQERLLQERYQKEQDKLKEEWEKAQKEVEEEERRYYEEEPXIIEDPVVPFTVSSSSADQLSTSSSMTEGSGTMNKIDLGNCQDEKQDRRWKKSFQGDDSDLLLKTRESDRLEEKGSLTEGALAHSGNPVSKGVHEDHQLDTEAGAPHCGTNPQLAQDPSQNQQTSNPTHSSEDVKPKTLPLDKSINHQIESPSERRKSISGKKLCSSCGLPLGKGAAMIIETLNLYFHIQCFRCGICKGQLGDAVSGTDVRIRNGLLNCNDCYMRSRSAGQPTTL

SEQ ID NO: 3359 - protein, 122 aa, Homo sapiens
  misc_feature (1)...(122): Xaa = any amino acid or nothing
EVTASREGRGACAWECGSSRGPWGLLRGTFAPVRAATPXSXLPKGSLRHRPXCPPPVHLPPKSSCPPRAWAGRATSMXTSSYSSEYQPQTPXALVTLPPRSYYLLTHLLTLTHLHHQILFEP

SEQ ID NO: 3360 - protein, 129 aa, Homo sapiens
  misc_feature (1)...(129): Xaa = any amino acid or nothing
ARGIGSLGRDHSGSGGGTGMAGAWVRKAADYVRSKDFRDYLMSTHFWGPVANWGLPIAAITDMKKSPEIISRRMTFALXCYSLTFVRFAHYVQPWNWLMLGCHTAVDFDQLISSMPCISHGMTASASAL

SEQ ID NO: 3361 - protein, 1357 aa, Homo sapiens
  misc_feature (1)...(1357): Xaa = any amino acid or nothing
LLLGRANSPPYNSVVRTLPPATLLLRRAGWESFWSCQSRSPWPPRPEVRAPAKGPRGVAGAAGACSAGARLGDAAGGDPASGQAARGCGARAPRGLGRTARARDTAMEDAGAAGPGPEPEPEPEPEPEPAPEPEPEPKPGAGTSEAFSRLWTDVMGILDGSLGNIDDLAQQYADYYNTCFSDVCERMEELRKRRVSQDLEVEKPDASPTSLQLRSQIEESLGFCSAVSTPEVERKNPLHKSNSEDSSVGKGDWKKKNKYFWQNFRKNQKGIMRQTSKGEDVGYVASEITMSDEERIQLMMMVKEKMITIEEALARLKEYEAQHRQSAALDPADWPDGSYPTFDGSSNCNSREQSDDETEESVKFKRLHKLVNSTRRVRKKLIRVEEMKKPSTEGGEEHVFENSPVLDERSALYSGVHKKPLFFDGSPEKPPEDDSDSLTTSPSSSSLDTWGAGRKLVKTFSKGESRGLIKPPKKMGTFFSYPEEEKAQKVSRSLTEGEMKKGLGSLSHGRTCSFGGFDLTNRSLHVGSNNSDPMGKEGDFVYKEVIKSPTASRISLGKKVKSVKETMRKRMSKKYSSSVSEQDSGLDGMPGSPPPSQPDPEHLDKPKLKAGGSVESLRSSLSGQSSMSGQTVSTTDSSTSNRESVKSEDGDDEEPPYRGPFCGRARVHTDFTPSPYDTDSLKLKKGDIIDIISKPPMGTWMGLLNNKVGTFNFIYVDVLSEDEEKPKRPTRRRRKGRPPQPKSVEDLLDRINLKEHMPTFLFNGYEDLDTFKLLEEEDLDELNIRDPEHRADLLTAVELLQEYDSNSDQSGSQEKLLVDSQGLSGCSPRDSXCYESSENLENGKTRKASLLSAKSSTEPSLKAFSRNQLGNYPTLPLMKSGDALKQGQEEGRLGGGLAPDTSKSCDPPGCXLVLNKNRRKPPSFPSCRSCETLEGPQTVDTWPRSHSLDDLQVEPGAEQDVPTEVTEPPPQIVPEVPQKTTASSTKAQPLEQDSAVDNALLLTQSKRFSEPQKLTTKKLEGSIAASGRGLSPPQCLPRNYDAQPPGAKHGLARTPLEGHRKGHEFEGTHHPLGTKEGVDAEQRMQPKIPSQPPPVPAKKSRERLANGLHPVPMGPSGALPSPDAPCLPVKRGSPASPTSPSDCPPALAPRPLSGQALGSPPSTRPPPWLSELPENTSLQEHGVKLGPALTRKVSCARGVDLETLTENKLHAEGIRSSRREPYSXLRHGRCGIPEALVQRYAEDLDQPERDVAANMDQIRVKQLRKQHRMAIPSGGLTEICRKPVSPGCISSVSDWLISIGLPMYAGTLSTAGFSTLSQVPSLSHTCLQEAGITEERHIRKLLSAARLFKLPPGPEAM

SEQ ID NO: 3362 - protein, 1550 aa, Homo sapiens
  misc_feature (1)...(1550): Xaa = any amino acid or nothing
FRGGVGYAHTLHLLPFAGSSVVLARARRTDRWTSGLVEMATLSLTVNSGDPPLGALLAVEHVKDDVSISVEEGKENILHVSENVIFTDVNSILRYLARVATTAGLYGSNLMEHTEIDHWLEFSATKLSSCDSFTSTINELNHCLSLRTYLVGNSLSLADLCVWATLKGNAAWQEQLKQKKAPVHVKRWFGFLEAQQAFQSVGTKWDVSTTKARVAPEKKQDVGKFVELPGAEMGKVTVRFPPEASGYLHIGHAKAALLNQHYQVNFKGKLIMRFDDTNPEKEKEDFEKVILEDVAMLHIKPDQFTYTSDHFETIMKYAEKLIQEGKAYVDDTPGEQIKAEREQRIESKHRKNPIEKNLQMWEEMKKGSQFGHSCCLRAKIDMSSNNGCMRDPTLYRCKIQPHPRTGNXYNVYPTYDFACPIVDSIEGVTHALRTTEYHDRDEQFYWIIEALGIRKPYIWEYSRLNLNNTVLSKRKLTWFVNEGLVDGWDDPRFPTVRGVLRRGMTVEGLKQFIAAQGSSRSVVNMEWDKIWAFNKKVIDPVAPRYVALLKKEVIPVNVPEAQEEMKEVAKHPKNPEVGLKPVWYSPKVFIEGADAETFSEGEMVTFINWGNLNITKIHKNADGKIISLDAKLNLENKDYKKTTKVTWLAETTHALPIPVICVTYEHLITKPVLGKDEDFKQYVNKNSKHEELMLGDPCLKDLKKGDIIQLQRRGFFICDQPYEPVSPYSCKEAPCVLIYIPDGHTKEMPTSGSKEKTKVEATKNETSAPFKERPTPSLNNNCTTSEDSLVLYNRVAVQGDVVRELKAKKAPKEDVDAAVKQLLSLKAEYKEKTGQEYKPGNPPAEIGQNISSNSSASILESKSLYDEVAAQGEVVRKLKAEKSPKAKINEAVECLLSLKAQYKEKTGKEYIPGQPPLSQSSDSSPTRNSEPAGLETPEAKVLFDKVASQGEVVRKLKTEKAPKDQVDIAVQELLQLKAQYKSLIGVEYKPVSATGAEDKDKKKKEKENKSEKQNKPQKQNDGQRKDPSKNQGGGLSSSGAGEGQGPKKQTRLGLEAKKEENLADWYSQVITKSEMIEYHDISGCYILRPWAYAIWEAIKDFFDAEIKKLGVENCYFPMFVSQSALEKEKTHVADFAPEVAWVTRSGKTELAEPIAIRPTSETVMYPAYAKWVQSHRDLPIKLNQWCNVVRWEFKHPQPFLRTREFLWQEGHSAFATMEEAAEEVLQILDLYAQVYEELLAIPVVKGRKTEKEKFAGGDYTTTIEAFISASGRAIQGGTSHHLGQNFSKMFEIVFEDPKIPGEKQFAYQNSWGLTTRTIGVMTMVHGDNMGLVLPPRVACVQVVIIPCGITNALSEEDKEALIAKCNDYRRRLLSVNIRVRADLRDNYSPGWKFNHWELKGVPIRLEVGPRDMKSCQFVAVRRDTGEKLTVAENEAETKLQAILEDIQVTLFTRASEDLKTHMVVANTMEDFQKILDSGKIVQIPFCGEIDCEDWIKKTTARDQDLEPGAPSMGAKSLCIPFKPLCELQPGAKCVCGKNPAKYYTLFGRSY

SEQ ID NO: 3363 - protein, 760 aa, Homo sapiens
  misc_feature (1)...(760): Xaa = any amino acid or nothing
LGGAAPETMPFPVTTQGSQQTQPPQKHYGITSPISLAAPKETDCVLTQKLIETLKPFGGFLKKEEGTASRRNFNFGKNXINLVKEWIRRNQXKAKNLPQSVIENVGGKIFTFLGSYRLGEVHTKGADIDGVCVFAPRHVDRSDFFTSFYDKLKLQEEVKDLRAVEEAFVPVIKLCFDGIEIDILFARLALQTIPEDLDLRDDSLLKNLDIRCIRSLNGCRVTDEILHLVPNIDNFRLTLRAIKLWAKRHNIYSNILGFLGGVSWAMLVARTCQLYPNAIASTLVHKFFLVFSKWEWPNPVLLKQPEECNLNLPVWDPRVNPSDRYHLMPIITPAYPQQNSTYNVSVSTRMVMVEEFKQGLAITDEILLSKAEWSKLFEAPNFFQKYKHYIVLLASAPTENQRLEWVGLVESKIRILVGSLEKNEFITLAHVNPQSFPAPKENPDKEEFRTMWVIGLVFKKTENSENLSVDLTYDIQSFTDTVYRQAINSKMFEVDMKIAAMHVKRKQLHQLLPNHVLQKKKKHSTEGVKLTALNDSSLDLSMDSDNSMSVPSPTSATKTSPLNSSGSSQGRNSPAPAVTAASVTNIQATEVSVPQVNSSESSGGTSSESIPQTATQPAISPPPKPTVSRVVSSTRLVNPPPRSSGNAATSGNAATKIPTPIVGVKRTSSPHKEESPKKTKTEEDETSEDANCLALSGHDKTEAKEQLDTETSTTQSETIQTAASLLASQKTSSTDLSDIPALPANPIPVIKNSIKLRLNR

SEQ ID NO: 3364 - protein, 1007 aa, Homo sapiens
  misc_feature (1)...(1007): Xaa = any amino acid or nothing
SARTMSYDYHQNWGRDGGPRSSGGGYGGGPAGGHGGNRGSGGGGGGGGGGRGWQGPASRAPERPRNRHVVREKTGAEEQWKRRGKRELLVHMDERREEQIVQLLNSVQAKNDKESEAQISWFAPEDHGYGTEVSTKNTPCSENKLDIQEKKLINQEKKMFRIRNRSYIDRDSEYLLQENEPDGTLDQKLLEDLQKKKNDLRYIEMQHFREKLPSYGMQKELVNLIDNHQVTVISGETGCGKTTQVTQFILDNYIERGKGSACRIVCTQPRRISAISVAERVAAERAESCGSGNSTGYQIRLQSRLPRKQGSILYCTTGIILQWLQSDPYLSSVSHIVLDEIHERNLQSDVLMTVVKDLLNFRSDLKVILMSATLNAEKFSEYFGNCPMIHIPGFTFPVVEYLLEDVIEKIRYVPEQKEHRCQFKRGFMQGHVNSQEKEEKEAIYKERWPDYVRELRRRYSASTVDVIEMMEDDKVDLNLIVALIRYIVLEEEDGAILVFLPGWDNISTLHDLLMSQVMFKSDKFLIIPLHSLMPTVNQTQVFKRTPPGVRKIVIATNIAETSITIDDVVYVIDGGKIKETHFDTQNNISTMSAEWVSKANAKQRKGRAGRVQPGSLLFICINGSXEASLLGWTIQLPEIFRGTPLEELCLQIKVLRLGGIGLFLSRLMDPPSNEAVLLSIRQLRSLNALDKQEELTPLGVHLARLPVEPHIGKMILFGALFCCLDPVLTIAASLSFKDPFVIPLGKEKIADARRKELAKDTRSDHLTVVNAFEGWEEARRRGFRYEKDYCWEYFLSSNTLQMLHNMKGQFAEHLLGAGFVSSRNPKDPESNINSDNEKIIKAVICAGLYPKVAKIRLNLGKKRKMVKVYTKTDGLVAVHPKSVNVEQTDFHYNWLIYHLKMRTSSIYLYDCTEVSPYCLLFFGGDISIQKDNDQETIAVDEWIVFQSPARIAHLVKRAVVHMDERREEQIVQLLNSVQAKNDKESEAQISWFAPEDHGYDKKYFFKE

SEQ ID NO: 3365 - protein, 146 aa, Homo sapiens
  misc_feature (1)...(146): Xaa = any amino acid or nothing
ECCNVRPLRETDLLKMKRKPRASSPVVEEQPRANTKETRKKKSFSQPMSASTKEESQDGRRKGKXLKGRARKKNAPQKSMALRILEEGSRPTPSGHSDQLNEELXQNELQLEQPEGTXLEQQSEGTQPEQQSGRMPTISTLSLSSE

SEQ ID NO: 3366 - protein, 275 aa, Homo sapiens
  misc_feature (1)...(275): Xaa = any amino acid or nothing
FRGYWGVREAFTDASWSGGLGPGKPGMKITRQKHAKKHLGFFRNNFGVREPYQILLDGTFCQAALRGRIQLREQLPRYLMGETQLCTTRCVLKELETLGKDLYGAKLIAQKCQVRNCPHFKNAVSGSECLLSMVEEGNPHHYFVATQDQNLSVKVKKKPGVPLMFIIQNTMVLDKPSPKTIAFVKAVESGRLSQCMRKKVSNISKRNRVXXKTLNRGRRKKRKKISGPNPLSCLKKKKKAPDTQSSASEKKRKRKRIRNRSNPKVLSEKQNAEGE

SEQ ID NO: 3367 - protein, 474 aa, Homo sapiens
  misc_feature (1)...(474): Xaa = any amino acid or nothing
MLWGCRAKACWGPRLSDLVASLSPQRECISVHVGQAGVQIGNACWELFCLEHGIQADGTFDAQASKINDDDSFTTFFSETGNGKHVPRAVMIDLEPTVVDEVRAGTYRQLFHPEQLITGKEDAANNYARGHYTVGKESIDLVLDRIRKLTDACSGLQGFLIFHSFGGGTGSGFTSLLMERLSLDYGKKSKLEFAIYPAPQVSTAVVEPYNSILTTHTTLEHSDCAFMVDNEAIYDICRRNLDIERPTYTNLNRLISQIVSSITASLRFDGALNVDLTEFQTNLVPYPRIHFPLVTYAPIISAEKAYHEQLSVAEITSSCFEPNSQMVKCDPRHGKYMACCMLYRGDVVPKDVNVAIAAIKTKRTIQFVDWCPTGFKVGINYQPPTVVPGGDLAKVQRAVCMLSNTTAIAEAWARLDHKFDLMYAKRAFVHWYVGEGMEEGEFSXRPGEDLAALEKDYEEVGTDSFEEENEGEEF

SEQ ID NO: 3368 - protein, 863 aa, Homo sapiens
  misc_feature (1)...(863): Xaa = any amino acid or nothing
SLLEETMDEDSSLREYTVSLDSDMDDASKCLQEYDSGTGNTREALRPCPRTVSTKAQPGRSASSSSGDKTTSFAEQKIRKLNHTDGESSGSSSQKTTPEGSELNIPHAGAWAQIPEETGLPQGRDTTQLLASEMVHLMMKLKEKRRAIXAQKKKMEAAFTKQRQKMGRTAFLTVVKKKGDGISPLREEAAGAEDEKVYTDRAKEKESQKTDGQRSKSLADIKESMENPQAKWLKSPTTPIDPEKQGNLASPSEETLNEGEILEYTKSIEKLNSSLHFLQQEMQRLSLQQEMLMQMREQQSWVISPPQPSPQKQIRDFKPSKQAGLSSAIAPFSSDSPRPTHPSSTSLLNRKSASFSVKSQRTPRPNELKITPLNRTLTPPRSVDSLPRLRRFSPSQVPIQTRSFVCFGDDGEPQLKESKPKEEVKKEELESKGTLEQRGHNPEEKEIKPFESTVSEVLSLPVTETVCLTPNEDQLNQPTEPPPKPVFPPTAPKNVNLIEVSLSDLKPPEKADVPVEKYDGESDKEQFDDDQKVCCGFFFKDDQKAENDMAMKRAALLEKRLRREKETQLRKQQLEAEMEHKKEETRRKTEEERQKKEDERARREFIRQEYMRRKQLKLMEDMDTVIKPRPQVVKQKKQRPKSIHRDHIESPKTPIKGPPVSSLSLASLNTGDNESVHSGKRTPRSESVEGFLSPSRCGSRNGEKDWENASTTSSVASGTEYTGPKLYKEPSAKSNKHIIQNALAHCCLAGKVNEGQKKKILEEMEKSDANNFLILFRDSGCQFRSLYTYCPETEEINKLTGIGPKSITKKMIEGLYKYNSDRKQFSHIPAKTLSASVDAITIHSHLWQTKRPVTPKKLLPTKA

SEQ ID NO: 3369 - protein, 128 aa, Homo sapiens
RGSGLTQEPGSVGQLALACAEGAVEWLYPAGALRLTLGGPDPRARPGIACLRPVRPFAGAQVFAERAGGALELLLAEGPGPAGGRCVRWGPRERRALFLQATPHQDISRRVAAFRFELREDGRPEIAP

SEQ ID NO: 3370 - protein, 284 aa, Homo sapiens
  misc_feature (1)...(284): Xaa = any amino acid or nothing
DLSLECTGFKETNLGVYFLSSKWVLRLYALHIIDYSAVLFPCXAMDHLESFIAECDRRTELAKKRLAETQEEISAEVSAKAEKVHELNEEIGKLLAKAEQLGAEGNVDESQKILMEVEKVRAKKKEAEKTVAEKQEKRNQDRLRRREEREREERLSRRSGSRTRDRRRSRSRDRRRRRSRSTSRERRKLSRSRSRDRHRRHRSRSRSHSRGHRRASRDRSAKYKFSRERASREESWESGRSERGPPDWRLESSNGKMASRRSEEKEAGGDLLNRMIVWKHGLLI

SEQ ID NO: 3371 - protein, 284 aa, Homo sapiens; identical to SEQ ID NO: 3370
  misc_feature (1)...(284): Xaa = any amino acid or nothing

SEQ ID NO: 3372 - protein, 1035 aa, Homo sapiens
  misc_feature (1)...(1035): Xaa = any amino acid or nothing
PMQNCMCSLTLSVLPLGPQPPVPEKRPPEIQHFRMSDDVHSLGKVTSDLAKRRKLTSXGGLSEELGSARRSGEVTLTKGDPGSLEEWETVVGDDFSLYYDSYSVDERVDSDSKSEVEALTEQLSEEEEEEEEEEEEEEEEEEEEEEEEDEESGNQSDRSGSSGRRKAKKKWRKDSPWVKPSRKRRKREPPRAKEPRGVNGVGSSGPSEYMEVPLGSLELPSEGTLSPNHAGVSNDTSSLETERGFEELPLCSCRMEAPKIDRISERAGHKCMATESVDGELSGCNAAILKRETMRPSSRVALMVLCETHRARMVKHHCCPGCGYFCTAGTFLECHPDFRVAHRFHKACVSQLNGMVFCPHCGEDASEAQEVTIPRGDGVTPPAGTAAPAPPPLSQDVPGRADTSQPSARMRGHGEPRRPPCDPLADTIDSSGPSLTLPNGGCLSAVGLPLGPGREALEKALVIQESERRKKLRFHPRQLYLSVKQGELQKVILMLLDNLDPNFQSDQQSKRTPLHAAAQKGSVEICHVLLQAGANINAVDKQQRTPLMEAVVNNHLEVARYMVQRGGCVYSKEEDGSTCLHHAAKIGNLEMVSLLLSTGQVDVNAQDSGGWTPIIWAAEHKHIEVIRMLLTRGADVTLTDNEENICLHWASFTGSAAIAEVLLNARCDLHAVNYHGDTPLHIAARESYHDCVLLFLSRGANPELRNKEGDTAWDLTPERSDVWFALQLNRKLRLGVGNRAIRTEKIICRDVARGYENVPIPCVNGVDGEPCPEDYKYISENCETSTMNIDRNITHLQHCTCVDDCSSSNCLCGQLSIRCWYDKDGRLLQEFNKIEPPLIFECNQACSCWRNCKNRVVQSGIKVRLQLYRTAKMGWGVRALQTIPQGTFICEYVGELISDAEADVREDDSYLFDLDNKDGEVYCIDARYYGNISRFINHLCDPNIIPVRVFMLHQDLRFPRIAFFSSRDIRTGEELGFDYGDRFWDIKSKYFTCQCGSEKCKHSAEAIALEQSRLARLDPHPELLPELGSLPPVNT

SEQ ID NO: 3373 - protein, 333 aa, Homo sapiens
  misc_feature (1)...(333): Xaa = any amino acid or nothing
PDGRLIVSCSEDKTIKIWDTTNKQCVNNFSDSVGFANFVDFNPSGTCIASAGSDQTVKVWDVRVNKLLQHYQVHSGGVNCISFHPSGNYLITASSDGTLKILDLLKGRLIYTLQGHTGPVFTVSFSKGGELFASGGADTQVLLWRTNFDELHCKGLTKRNLKRLHFDSPPHLLDIYPRTPHPHEEKVETVEDFFLHLLRLIQSLRXSICRSLLPLLWISFLLILPQQQKPVVGLCQTRVKRPVDISXTLPXCHQNVCQQPRKRKQKTXVTSPVKVKVSIPLAVTDALEHIMEQLNVLTQTVSILEQRLTLTEDKLKDCLENQQKLFSAVQQKS

SEQ ID NO: 3374 - protein, 127 aa, Homo sapiens
  misc_feature (1)...(127): Xaa = any amino acid or nothing
WLYPMALSILDIKMSPSWYFHMAIGIINWNTTAGLSGTLYPKVPQKYILFDSVILLLGMLRKIRQVCQNVYMKGCSPITLFKIVHYWPGAVAHAYNPSTLGGQVGWQITXGQEFETSLDYMVKPHLY

SEQ ID NO: 3375 - protein, 349 aa, Homo sapiens
  misc_feature (1)...(349): Xaa = any amino acid or nothing
VPTQQILAFPEQTNTKDWTVTPEHVLPESQSLLTFEEVAMYFSQEEWELLDPTQKALYNDVMQENYETVISLALFVLPKPKVISCLEQGEEPWVQVSPEFKDSAGKSPTGLKLKNDTENHQPVSLSDLEIQASAGVISKKAKVKVPQKTAGKENHFDMHRVGKWHQDFPVKKRKKLSTWKQELLKLMDRHKKDCAREKPFKCQECGKTFRVSSDLIKHQRIHTEEKPYKCQQCDKRFRWSSDLNKHLTTHQGIKPYKCSWGGKSFSQNTNLHTHQRTHTGEKPFTCHECGKKFSQNSHLIKHRRTHTGEQPYTCSICRRNFSRRSSLLRHQKLHLXREACPVSHFWKTF

SEQ ID NO: 3376 - protein, 730 aa, Homo sapiens
  misc_feature (1)...(730): Xaa = any amino acid or nothing
SFESPAPLPSTCFPQERQDPGPCYVSGAMAGLGPGVGDSEGGPRPLFCRKGALRQKVVHEVKSHKFTARFFKQPTFCSHCTDFIWGIGKQGLQCQVCSFVVHRRCHEFVTFECPGAGKGPQTDDPRNKHKFRLHSYSSPTFCDHCGSLLYGLVHQGMKCSCCEMNVHRRCVRSVPSLCGVDHTERRGRLQLEIRAPTADEIHVTVGEARNLIPMDPNGLSDPYVKLKLIPDPRNLTKQKTRTVKATLNPVWNETFVFNLKPGDVERRLSVEVWDWDRTSRNDFMGAMSFGVSELLKAPVDGWYKLLNQEEGEYYNVPVADADNCSLLQKFEACNYPLELYERVRMGPSSSPIPSPSPSPTDPKRCFFGASPGRLHISDFSFLMVLGKGSFGKVMLAERRGSDELYAIKILKKDVIVQDDDVDCTLVEKRVLALGGRGPGGRPHFLTQLHSTFQTPDRLYFVMEYVTGGDLMYHIQQLGKFKEPHAAFYAAEIAIGLFFLHNQGIIYRDLKLDNVMLDAEGHIKITDFGMCKENVFPGTTTRTFCGTPDYIAPEIIAYQPYGKSVDWWSFGVLLYEMLAGQPPFDGEDEEELFQAIMEQTVTYPKSLSREAVAICKGFLTKHPGEAPGASGPXWGNLTIRAHGFFPLGFDWERLERLEIPASFSRPRPCGPQRRGIFDKFFTRAAPALTPPARLVLDSIDQADFQGFTYVNPDFVQPDARSPTSTVHVPVM

SEQ ID NO: 3377 - protein, 59 aa, Homo sapiens
SSMLWGFSVFRRSWILNCWLSSSQVGISAACKFSTLTHTHTHTHTHTRHAPFCGTCLYY

SEQ ID NO: 3378 - protein, 224 aa, Homo sapiens
  misc_feature (1)...(224): Xaa = any amino acid or nothing
FSKLIMKTFIIGISGVTNSGKTTLAKNLQKHLPNCSVISQDDFFKPESEIETDKNGFLQYDVLEALNMEKMMSAISCWMESARHSVVSTDQESAEEIPILIIEGFLLFNYKPLDTIWNRSYFLTIPYEECKRRRSTRVYQPPDSPGYFDGHVWPMYLKYRQEMQDITWEVVYLDGTKSEEDLFLQVYEDLIQELAKQKCLQVTAXRRNTTNPSCKXIRKLQGVI

SEQ ID NO: 3379 - protein, 224 aa, Homo sapiens; identical to SEQ ID NO: 3378
  misc_feature (1)...(224): Xaa = any amino acid or nothing

SEQ ID NO: 3380 - protein, 216 aa, Homo sapiens
ARRGELAGGGRASGGRSGGDGGGGGGARAPEGVRAPAAGQPRATKGAPPPPGTPPPSPMSSAIERKSLDPSEEPVDEVLQIPPSLLTCGGCQQNIGDRYFLKAIDQYWHEDCLSCDLCGCRLGEVGRRLYYKLGRKLCRRDYLRLFGQDGLCASCDKRIRAYEMTMRVKDKVYHLECFKCAACQKHFCVGDRYLLINSDIVCEQDIYEWTKINGMI

SEQ ID NO: 3381 - protein, 157 aa, Homo sapiens
  misc_feature (1)...(157): Xaa = any amino acid or nothing
SLKLRKPPLPTDGVHFVFVESQLDFWGPQEMLTQQGMALQNYDNKLVKCIEELCQKQEELCWQIQQEEDKKQRLQNEVRQLTEKLACVNEKLARVNENLARKIASCSKFYQTIAETEATYLKILESFXTLLSVRKREAGNLTKATAPDQKSSGGRDS

SEQ ID NO: 3382 - protein, 486 aa, Homo sapiens
  misc_feature (1)...(486): Xaa = any amino acid or nothing
GIRGKMADRGGVGEAAAVGASPASVPGLNPTLGWRERLRAGLAGTGASLWFVAGLGLLYALRIPLRLCENLAAVTVFLNSLTPKFYVALTGTSSLISGLIFIFEWWYFHKHGTSFIEQVSVSHLQPLMGGTESSISEPGSPSRNRENETSRQNLSECKVWRNPLNLFRGAEYRRYTWVTGKEPLTYYDMNLSAQDHQTFFTCDTDFLRPSDTVMQKAWRERNPPARIKAAYQALELNEXLCHCICSTGXGRSNNYCRCXKVIXTGTQGRRNNLXAVTAVPAPKSSAXSSTEERYQCTGIYXLKIGNVCKKIRKNKRSSKNNERFDEXISSSYHVEHPXKSLKSLLELQAYPDVQAVLAKYDDISLPKSAAICYTAALLKTRTVSEKFSPETASTRGLSAAEINAVDAIHRAVEFNPHVPKYLLEMKSLILPPEHILKRGDSEAIAYAFFHLQHWKRIEGALNLLQCTWEGSKYSFPKVTLISLTIH

SEQ ID NO: 3383 - protein, 715 aa, Homo sapiens
  misc_feature (1)...(715): Xaa = any amino acid or nothing
RGKGFKEFFLGVCQTFIPCLCAEGIQLQFFCSGSGSSPLLKDLESMKTGLFFLCLLGTAAAIPTNARLLSDHSKPTAETVAPDNTAIPSLRAEAEENEKETAVSTEDDSHHKAEKSSVLKSKEESHEQSAEQGKSSSQELGIEGFKRDSDGSLXVWNLEYGTNLKGTLDIKEDMSEPQEKKLSENTDFLAPGVSSFTDSNQQESITKREENQEQPRNYSHHQLNRSSKHSQGLRDQGNQEQDPNISNGEEEEEKEPGEVGTHNDNQERKTELPREHANSKQEEDNTQSDDILEESDQPTQVSKMQEDEFDQGNQEQEDNSNAEMEEENASNVNKHIQETEWQSQEGKTGLEAISNHKETEEKTVSEALLMEPTDDGNTTPRNHGVDDDGDDDGDDGGTDGPRHSASDDYFHPKPGLFWEAERAHSIAYSPSKLREQREKVHENENIGTTEPGEHQEAKKAENSSNEEETSSEGNMRVHAVDSCMSFQCKRGHICKADQQGKTSLVSCQDPVTCPPTKPLDQVCGTDNQTYASSCHLFATKCRLEGTKKGHQLQLDYFGASKSIPTCRDFEVIQFPLRMRDWLKNILMQLYEANSEHAGYLNEKQRNKVKKIYLDEKRLLAGDHPIDLLLRDFKKNYHMYVYPVHWQFSELDQHPMDRVLTHSELAPLRASLVPMEHCITRFFEECDPNKDKHITLKEWGHCFGIKEEDIDENLLF

SEQ ID NO: 3384 - protein, 743 aa, Homo sapiens
  misc_feature (1)...(743): Xaa = any amino acid or nothing
PSRPHPTHAAMAGPEGFQYRALYPFRRERPEDLELLPGDVLVVSRAALQALGVAEGGERCPQSVGWMPGLNERTRQRGDFPGTYVEFLGPVALARPGPRPRGPRPLPARPRDGAPEPGLTLPDLPEQFSPPDVAPPLLVKLVEAIERTGLDSESHYRPELPAPRTDWSLSDVDQWDTAALADGIKSFLLALPAPLVTPEASAEARRALREAAGPVGPALEPPTLPLHRALTLRFLLQHLGRVASRAPALGPAVRALGATFGPLLLRAPPPPSSPPPGGAPDGSEPSPDFPALLVEKLLQEHLEEQEVAPPALPPKPPKAKPASTVPGPNGGSPPSLQDAEWYWGDISREEVNEKLRDTPDGTFLVRDASSKIQGEYTLTLRKGGNNKLIKVFHRDGHYGFSEPLTFCSVVDLINHYRHESLAQYNAKLDTRLLYPVSKYQQDQIVKEDSVEAVGAQLKVYHQQYQDKSREYDQLYEEYTRTSQELQMKRTAIEAFNETIKIFEEQGQTQEKCSKEYLERFRREGNQTKEMQRILLNSERLKSRIAEIHESRTKLEQQLLVPRASDNKRDIDKPHXTSLKPDLMQLRKIRDQYLVWLTQKGARQKKINEWLGIKNETEDQYALMEDEDDLPHHEERTWYVGKINRTQAEEMLSGKRDGTFLIRESSQRGCYACSVVVDGDTKHCVIYRTATGFGFAEPYNLYGSLKELVLHYQHASLVQHNDALTVTLAHPVRAPGPGPPPAAR

SEQ ID NO: 3385 - protein, 1252 aa, Homo sapiens
  misc_feature (1)...(1252): Xaa = any amino acid or nothing
TRDVNSWKELCFNHYNKETTNCYRTTRKWTNYKIIFLGPFRELRSQGNQVILNLGKERCQLRETGLKLYLPGMDSARHHISHSTSAGPIPSQKEEEMTESQGTVTFKDVAIDFTQEEWKRLDPAQRKLYRNVMLXNYNNLITVGYPFTKPDVIFKLEQEEKPWVMEEEVLRRHWQGEIWGVDEHQKNQDRLLRQVEVKFQKTLTEEKGNECQKKFANVFPLNSDFFPSRHNLYEYDLFGKCLEHNFDCHNNVKCLMRKEHCEYNEPVKSYGNSSSHFVITPFKCNHCGKGFNQTLDLIRHLRIHTGEKPYECSNCRKAFSHKEKLIKHYKIHSREQSYKCNECGKAFIKMSNLIRHQRIHTGEKPYACKECEKSFSQKSNLIDHEKIHTGEKPYECNECGKAFSQKQSLIAHQKVHTGEKPYACNECGKAFPRIASLALHMRSHTGEKPYKCDKCGKAFSQFSMLIIHVRIHTGEKPYECNECGKAFSQSSALTVHMRSHTGEKPYECKECRKAFSHKKNFITHQKIHTREKPYECNECGKAFIQMSNLVRHQRIHTGEKPYICKECGKAFSQKSNLIAHEKIHSGEKPYECNECGKAFSQKQNFITHQKVHTGEKPYDCNECGKAFSQIASLTLHLRSHTGEKPYECDKCGKAFSQCSLLNLHMRSHTGEKPYVCNECGKAFSQRTFLIVHMRGHTGEKPYECNECGKAFSQSSSLTIHIRGHTGEKPYECKECRKAFSHKKNFITHQKIHTREKPFKCNHCGKGFNQTLDLIRHLRIHTGEKPYECSNCRKAFSHKEKLIKHYKIHSREQSYKCNECGKAFIKMSNLIRHQRIHTGEKPYACKECEKSFSQKSNLIDHEKIHTGEKPYECNECGKAFSQKQSLIAHQKVHTGEKPYACNECGKAFPRIASLALHMRSHTGEKPYKCDKCGKAFSQFSMLIIHVRIHTGEKPYECNECGKAFSQSSALTVHMRSHTGEKPYECKECRKAFSHKKNFITHQKIHTREKPYECNECGKAFIQMSNLVRHQRIHTGEKPYICKECGKAFSQKSNLIAHEKIHSGEKPYECNECGKAFSQKQNFITHQKVHTGEKPYDCNECGKAFSQIASLTLHLRSHTGEKPYECDKCGKAFSQCSLLNLHMRSHTGEKPYVCNECGKAFSQRTFLIVHMRGHTGEKPYECNECGKAFSQSSSLTIHIRGHTGEKPYECKECRKAFSHKKNFITHQKIHTRENPLSVIIVEKASIRLWTSSDI

SEQ ID NO: 3386 - protein, 276 aa, Homo sapiens
  misc_feature (1)...(276): Xaa = any amino acid or nothing
WDDYPQGALRRREAAEGLHFLGPPGRVRGQLRGITGPAWYCHSPSHSLLSAFCHLPTPSRCPAMARPPVPGSVVVPNWHESRRGQGVPGLHSAQEPPAGVWAAXAASAAAALSIDTASYKIFVSGKSGVGKTALVAKLAGLEVPVVHHETTGIQTTVVFWPAKLQASSRVVMFRFEFWDCGESALKKFDHMLLACMENTDAFLFLFSFTDRASFEDLPGQLARIAGEAPGVVRMVIGSKFDQYMHTDVPERDLTAFRQAWELPLLRVKSVPGRRLG

SEQ ID NO: 3387 - protein, 510 aa, Homo sapiens
  misc_feature (1)...(510): Xaa = any amino acid or nothing
GSSPDPASLITMKNQDKKNGAAKQSNPKSSPGQPEAGPEGAQERPSQAAPAVEAEGPGSSQAPRKPEGAQARTAQSGALRDVSEELSRQLEDILSTYCVDNNQGGPGEDGAQGEPAEPEDAEKSRTYVARNGEPEPTPVVNGEKEPSKGDPNTEEIRQSDEVGDRDHRRPQEKKKAKGLGKEITLLMQTLNTLSTPEEKLAALCKKYAELLEEHRNSQKQMKLLQKKQSQLVQEKDHLRGEHSKAVLARSKLESLCRELQRHNRSLKEEGVQRAREEEEKRKEVTSHFQVTLNDIQLQMEQHNERNSKLRQENMELAERLKKLIEQYELREEHIDKVFKHKDLQQQLVDAKLQQAQEMLKEAEERHQREKDFLLKEAVESQRMCELMKQQETHLKQQLALYTEKFEEFQNTLSKSSEVFTTFKQEMEKMTKKIKKLEKETTMYRSRWESSNKALLEMAEEKTVRDKELEGLQVKIQRLEKLCRALQTGAQXPVRGQRWGSHRTSAVRIFS

SEQ ID NO: 3388 - protein, 1033 aa, Homo sapiens
  misc_feature (1)...(1033): Xaa = any amino acid or nothing
ARPEVPAPPAWLSRRGAAKMGDKKDDKDSPKKNKGKERRDLDDLKKEVAMTEHKMSVEEVCRKYNTDCVQGLTHSKAQEILARDGPNALTPPPTTPEWVKFCRQLFGGFSILLWIGAILCFLAYGIQAGTEDDPSGDNLYLGIVLAAVVIITGCFSYYQEAKSSKIMESFKNMVPQQALVIREGEKMQVNAEEVVVGDLVEIKGGDRVPADLRIISAHGCKVDNSSLTGESEPQTRSPDCTHENPLKTRNITFFSNNFVEGTARGVVVATGDRTVMGRIATLASGLEVGKTPIAIEIEHFIQLITGVAVFLGVSFFILSLILGYTWLEAVIFLIGIIVANVPEGLLATVTVCLTLTAKRMARKNCLVKNLEAVETLGSTSTICSDKTGTLTQNRMTVAHMWFDNQIHEADTTEDQSGTSFDKSSHTWVALFXHLLGFCNRPVFKGGQDNIPVLKRDVAGDASESALLKCIELSSGSVKLMRERNKKVAEIPFNSTNKYQLSIHETEDPNDNRYLLVMKGAPERILDRCSTILLQGKEQPLDEEMKEAFQNAYLELGGLGERVLGFCHYYLPEEQFPKGFAFDCDDVNFTTDNLCFVGLMSMIGPPRAAVPDAVGKCRSAGIKVIMVTGDHPITAKAIAKGVGIIFEGNETVEDIAARLNIPVSQVNPRDAKACVIHGTDLKDFTSEQIDEILQNHTEIVFARTSPQQKLIIVEGCQRQGAIVAVTGDGVNDSPALKKADIGVAMGIAGSDVSKQAADMILLDDNFASIVTGVEEGRLIFDNLKKSIAYTLTSNIPEITPFLLFIMANIPLPLGTITILCIDLGTDMVPAISLAYEAAESDIMKRQPRNPRTDKLVNERLISMAYGQIGMIQALGGFFSYFVILAENGFLPGNLVGIRLNWDDRTVNDLEDSYGQQWTYEQRKVVEFTCHTAFFVSIVVVQWADLIICKTRRNSVFQQGMKNKILIFGLFEETALAAFLSYCPGMDVALRMYPLKPSWWFCAFPYSFLIFVYDEIRKLILRRNPGGWVEKETYY

SEQ ID NO: 3389 - protein, 1736 aa, Homo sapiens
  misc_feature (1)...(1736): Xaa = any amino acid or nothing
VERLLGCRNSKRTWRMLISKNMPWRRLQGISFGMYSAEELKKLSVKSITNPRYLDSLGNPSANGLYDLALGPADSKEVCSTCVQDFSNCSGHLGHIELPLTVYNPLLFDKLYLLLRGSCLNCHMLTCPRAVIHLLLCQLRVLEVGALQAVYELERILNRFLEENPDPSASEIREELEQYTTEIVQNNLLGSQGAHVKNVCESKSKLIALFWKAHMNAKRCPHCKTGRSVVRKEHNSKLTITFPAMVHRTAGQKDSEPLGIEEAQIGKRGYLTPTSAREHLSALWKNEGFFLNYLFSGMDDDGMESRFNPSVFFLDFLVVPPSRYRPVSRLGDQMFTNGQTVNLQAVMKDVVLIRKLLALMAQEQKLPEEVATPTTDEEKDSLIAIDRSFLSTLPGQSLIDKLYNIWIRLQSHVNIVFDSEMDKLMMDKYPGIRQILEKKEGLFRKHMMGKRVDYAARSVICPDMYINTNEIGIPMVFATKLTYPQPVTPWNVQELRQAVINGPNVHPGASMVINEDGSRTALSAVDMTQREAVAKQLLTPATGAPKPQGTKIVCRHVKNGDILLLNRQPTLHRPSIQAHRARILPEEKVLRLHYANCKAYNADFDGDEMNAHFPQSELGRAEAYVLACTDQQYLVPKDGQPLAGLIQDHMVSGASMTTRGCFFTREHYMELVYRGLTDKVGRVKLLSPSILKPFPLWTGKQVVSTLLINIIPEDHIPLNLSGKAKITGKAWVKETPRSVPGFNPDSMCESQVIIREGELLCGVLDKAHYGSSAYGLVHCCYEIYGGETSGKVLTCLARLFTAYLQLYRGFTLGVEDILVKPKADVKRQRIIEESTHCGPQAVRAALNLPEAASYDEVRGKWQDAHLGKDQRDFNMIDLKFKEEVNHYSNEINKACMPFGLHRQFPENTLQLMVQSGAKGSTVNTMQISCLLGQIELEGRSTPLMASGKSLPCFEPYEFTPRAGGFVTGRFLTGIKPPEFFFHCMAGREGLVDTAVKTSRSGYLQRCIIKHLEGLVVQYDLTVRDSDGSVVQFLYGEDGLDIPKTQFLQPKQFPFLASNYEVIMKSQHLHEVLSRADPKKALHHFRAIKKWQSKHPNTLLRRGAFLSYSQKIQEAVKALKLESENRNGRRPWDSGRMLRMWYELDEESRRKYQKKAAACPDPSLSVWRPDIYFASVSETFETKVDDYSQEWAAQTEKSYEKSELSLDRLRTLLQLKWQRSLCEPGEAVGLLAAQSIGEPSTQMTLNTFHFAGRGEMNVTLGIPRLREILMVASANIKTPMMSVPVLNTKKALKRVKSLKKQLTRVCLGEVLQKIDVQESFCMEEKQNKFQVYQLRFQFLPHAYYQQEKCLRPEDILRFMETRFFKLLMESIKKKNNKASAFRNVNTRRATQRDLDNAGELGRSRGEQEGDEEEEGHIVDAEAEEGDADASDAKRKEKQEEEVDYESEEEEEREGEENDDEDMQEERNPHREGARKTQEQDEEVGLGHXGGPVPSRPPDAAPETHPQPGAPGAEAMERRVQAVREIHPFIDDYQYDTEESLWCQVTVKLPLMKINFDMSSLVVSLAHGAVIYATKGITRCLLNETTNNKNEKELVLNTEGINLPELFKYAEVLDLRRLYSNDIHAIANTYGIEAALRVIEKEIKDVFAVYGIAVDPRHLSLVADYMCFEGVYKPLNRFGIRSNSSPLQQMTFETSFQFLKQATMLGSHDELRSPSACLVVGKVVRGGTGLFELKQPLR

SEQ ID NO: 3390 - protein, 690 aa, Homo sapiens
  misc_feature (1)...(690): Xaa = any amino acid or nothing
ILPPLEGPPAQASPSSTMLGEGSQPDWPGGSRYDLDEIDAYWLELINSELKEMERPELDELTLERVLEELETLCHQNMARAIETQEGLGIEYDEDVVCDVCRSPEGEDGNEMVFCDKCNVCVHQACYGILKVPTGSWLCRTCALGVQPKCLLCPKRGGALKPTRSGTKWVHVSCALWIPEVSIGCPEKMEPITKISHIPASRWALSCSLCKECTGTCIQCSMPSCVTAFHVTCAFDHGLEMRTILADNDEVKFKSFCQEHSDGGPRNEPTSEPTEPSQAGEDLEKVTLRKQRLQQLEEDFYELVEPAEVAERLDLAEALVDFIYQYWKLKRKANANQPLLTPKTDEVDNLAQQEQDVLYRRLKLFTHLRQDLERVRNLCYMVTRRERTKHAICKLQEQIFHLQMKLIEQDLCRAGLSTSFPIDGTFFNSWLAQSVQITAENMAMSEWPLNNGHREDPAPGLLSEELLQDEETLLSFMRDPSLRPGDPARKARGRTRLPAKKKPPPPPPQDGPGSRTTPDKAPKKTWGQDAGSGKGGQGPPTRKPPRRTSSHLPSSPAAGDCPILATPESPPPLAPETPDEAASVAADSDVQVPGPAASPKPLGRLRPPPREPRXTRRLPGCARPDAGDGDHLSAVAERPKVSLHFDTETDGYFSDGEMSNSDVEAEDGGVQRGPREAGAKEVVRMGVLAS

SEQ ID NO: 3391 - protein, 409 aa, Homo sapiens
  misc_feature (1)...(409): Xaa = any amino acid or nothing
NSFLHFLHLKVRTMFLFPSFPVLLLSVVTASCSKTKACADTQKTCSMITCGIPVTNGTPGRDGRDRPKGEKGEPGLGQVSVASXISTSGRCSSKSVLEPATRGLKHRLGEAPLSSGPMLHSEQPLXNAIASKTKLFVDSLGSHISTQELGVCGCPFRGVSCLVGELALVQALHXVAGESFFFGSDHWLIGCAGGEQEWSIELLGKKKRVTATGSSSLCLATGQGLRGLQGPPGKMGPPGNTGTSGIPGPRGQKGDRGDNSVAEAKLANLERKLXSLRSELDHTKKLXPFSLGKMSGKKLFVTNGERMPFSKVKALCAGLQATVAAPKNAEENKAIQDVAKDTAFLGITDEATEGQFMYLTGGRLTYSNWKKDEPNDHGSGEDCVILLNNGLWNGISCTSSFIAICEFPA

SEQ ID NO: 3392 - protein, 519 aa, Homo sapiens
  misc_feature (1)...(519): Xaa = any amino acid or nothing
GGSRRNQRRSIPVLGYFLKQKKMTKAQESLTLEDVAVDFTWEEWQFLSPAQKDLYRDVMLENYSNLVSVGYQAGKPDALTKLEQGEPLWTLEDEIHSPAHPEIEKADDHLQQPLQNQKILKRTGQRYEHGRTLKSYLGLTNQSRRYNRKEPAEFNGDGAFLHDNHEQMPTEIEFPESRKPISTKSQFLKHQQTHNIEKAHECTDCGKAFLKKSQLTEHKRIHTGKKPHVCSLCGKAFYKKYRLTEHERAHRGEKPHGCSLCGKAFYKRYRLTEHERAHKGEKPYGCSECGKAFPRKSELTEHQRIHTGIKPHQCSECGRAFSRKSLLVVHQRTHTGEKPHTCSECGKGFIQKGNLNIHQRTHTGEKPYGCIDCGKAFSQKSCLVAHQRYHTGKTPFVCPECGQPCSQKSGLIRHQKIHSGEKPYKCSDCGKAFLTKTMLIVHHRTHTGERPYGCDECEKAYFYMSCLVKHKRIHSREKRGDCSEGGKSFHSKSQLKSXXTCAGEKPCXYGNCGNGGRAV

SEQ ID NO: 3393 - protein, 468 aa, Homo sapiens
  misc_feature (1)...(468): Xaa = any amino acid or nothing
ARSLSGAPSGSSRQDGTSLLRTGAGYSSSQSIETLSLPPGPSHLVGDKSQGGRSCQGQITSAASGKTSKSEPNHVIFKKISRDKSVTIYLGNRDYIDHVSQVQPVDGVVLVDPDLVKGKKVYVTLTCAFRYGQEDIDVIGLTFRRDLYFSRVQVYPPVGAASTPTKLQESLLKKLGSNTYPFLLTFPDYLPCSVMLQPAPQDSGKSCGVDFEVKAFATDSTDAEEDKIPKKSSVRLLIRKVQHAPLEMGPQPRAEAAWQFFMFDKPLHLAVSLNKRDLFPMGSPIPVPVSVPNNTEKPVKKIKASVEQVANVVLYSSDYYVKPVAMEEAQEKVPPNSTWTKALTLLPWLVNNRERRGIALDGKIKHEDTNLASSTIIKEGIDRKRSWEILVSYPDQRXSSTVSGFLGRASPSQXSRPTXRSQFRLMHPQPEDPAKESYQDANLVFEEFARPXILKDAGEAXEGKRDQE

SEQ ID NO: 3394 - protein, 459 aa, Homo sapiens
  misc_feature (1)...(459): Xaa = any amino acid or nothing
RPPTMAADQRPKADTLALRQRLISSSCRLFFPEDPVKIVRAQGQYMYDEQGAEYIDCISNVAHVGHCHPLVVQAAHEQNQVLNTNSRYLHDNIVDYAQRLSETLPEQLCVFYFLNSGSEANDLALRLARHYTGHQDVVVLDHAYHGHLSSLIDISPYKFRNLDGQKEWVHVAPLPDTYRGPYREDHPTHVEDGLEKAFSXKRVVQGRNRQICRRQIAAFFAESLPSVGGQIIPPAGYFSQVAEHIRKAGGVFVADEIQVGFGRVGKHFWAFQLQGKDFVPDIVTMGKSIGNGHPVACVAATQPVARAFEATGVEYFNTFGGSPVSCAVGLAVLNVLEKEQLQDHATSVGSFLMQLLGQQKIKHPIVGDVRGVGLFIGVDLIKDEATRTPATEEAAYLVSRLKENYVLLSTDGPGRNILKFKPPMCFSLDNARQVVAKLDAILTDMEEKVRSCETLRLQP

SEQ ID NO: 3395 - protein, 474 aa, Homo sapiens
  misc_feature (1)...(474): Xaa = any amino acid or nothing
FRDGFSLRCGCNAELPGRGGDDAADRAIQRFLRTGAAVRYKVMKNWGVIGGIAAALAAGIYVIWGPITERKKRRKGLVPGLVNLGNTCFMNSLLQGLSACPAFIRWLEEFTSQYSRDQKEPPSHQYLSLTLLHLLKALSCQEVTDDEVLHASCLLDVLRMYRWQISSFEEQDAHELFHVITSSLEDERDRQPRVTHLFDVHSLEHSQKXLPKQITCRTRGSPHPTSNHWKSQHPFHGRLTSNMVCKHCEHQSPVRFDTFDSLSLSIPAATWGHPLTLDHCLHHFISSESVRDVVCDNCTKIEAKGTLNGEKVEHQRTTFVKQLKLGKLPQCLCIHLQRLSWSSHGTPLKRHEHVQFNEFLMMDIYKYHLLGHKPSQHNPKLNKNPGPTLELQDGPGAPTPGLNQPGAPKTQIFMNGACSPSLLPTLSAPMPFPLPVVPDYSSSTYLFRLMGSCRPPWETWHSGTLCSFTDGPHL

SEQ ID NO: 3396 - protein, 570 aa, Homo sapiens
  misc_feature (1)...(570): Xaa = any amino acid or nothing
TQEAGLIFFSPPFSLSLSLSLPLSLFLLSHPHSRTPPNRTPRRTRIPQRPAVMYSPLCLTQDEFHPFIEALLPHVRAFAYTWFNLQARKRKYFKKHEKRMSKEEERAVKDELLSEKPEVKQKWASRLLAKLRKDIRPEYREDFVLTVTGKKPPCCVLSNPDQKGKMRRIDCLRQADKVWRLDLVMVILFKGIPLESTDGERLVKSPQCSNPGLCVQPHHIGVSVKELDLYLAYFVHAADSSQSESPSQAKXRXHXGPARKWDIWGFQDSFVTSGVFSVTXAXLRVSQTPIAAGTGPNFSLSDLESSSYYSMSPGAMRRSLPSTSSTSSTKRLKSVEDEMDSPGEEPFYTGQGRSPGSGSQSSGWHEVEPGMPSPTTLKKSEKSGFSSPSPSQTSSLGTAFTQHHRPVITGTQSKFHIATPSILHFPRHSPFFQQPGPYFSHPAIRYHPQETLKEFVQLVCPDAGQQAGQPNGSSQGKVHNPFLPTPMLPPPPPPPMARPVPLPVPDTKPPTTSTEGGAASPTSPTTRSPGRTRPQQPFLSYGPPXPSNALIGGGGGGAGERAGERADLEM

SEQ ID NO: 3397 - protein, 666 aa, Homo sapiens
  misc_feature (1)...(666): Xaa = any amino acid or nothing
TGTLTEDGLDVMGVVPLKGQAFLPLVPEPRRLPVGPLLRALATCHALSRLQDTPVGDPMDLKMVESTGWVLEEEPAADSAFGTQVLAVMRPPLWEPQLQAMEEPPVPVSVLHRFPFSSALQRMSVVVAWPGATQPEAYVKGSPELVAGLCNPETVPTDFAQMLQSYTAAGYRVVALASKPLPSVPSLEAAQQLTRDTVEGDLSLLGLLVMRNLLKPQTTPVIQALRRTRIRAVMVTGDNLQTAVTVARGCGMVAPQEHLIIVHATHPERGQPASLEFLPMESPTAVNGVKDPDQAASYTVEPDPRSRHLALSGPTFGIIVKHFPKLLPKVLVQGTVFARMAPEQKTELVCELQKLQYCVGMCGDGANDCGALKAADVGISLSQAEASVVSPFTSSMASIECVPMVIREGRCSLDTSFSVFKYMALYSLTQFISVLILYTINTNLGDLQFLAIDLVITTTVAVLMSRTGPALVLGRVRPPGALLSVPVLSSLLLQMVLVTGVQLGGYFLTLAQPWFVPLNRTVAAPDNLPNYENTVVFSLSSFQYLILAAAVSKGAPFRRPLTNNVPFLLASALXSSVLVVLVLSPGLLHGPLALRNITDTGFKLLLVGLVTLNFVGGLHAGERARPVPPRLPAPPPAQAGSKKRFKQLERELAEQPWPPLPAGPLR

SEQ ID NO: 3398 - protein, 204 aa, Homo sapiens
  misc_feature (1)...(204): Xaa = any amino acid or nothing
FPFRMLTGYLYLMWRRKAFWSGTQRHPLPGGLKRRRRPGRGPWPAPGGQGVGPSALXKAGSPPANRPGQGEPGLISPKPVTEVLPDVQGAPVPVPPLPTPPSLPHLQNQPPTVQHYLLSFSWKPSQGPEXRAXPSPLPPAAMRPDGXPGPASQGPDQPGPCPPASLPTSPPGKGFQKTETRKHPPPRQQHKPKCTANRPLASFL

SEQ ID NO: 3399 - protein, 62 aa, Homo sapiens
  misc_feature (1)...(62): Xaa = any amino acid or nothing
HHHHHHHHHHHHHLVAFGKVQXLQNSPSSSSSSSSGCFWQARFSSYRTLHHHHHHHHHHHHH

SEQ ID NO: 3400 - protein, 501 aa, Homo sapiens
  misc_feature (1)...(501): Xaa = any amino acid or nothing
PFLSVHRSPHGPSKLCDDPQASLVPEPVPGGCQEPEEMSWPPSGEIASPPELPSSPPPGLPEVAPDATSTGLPDTPAAPETSTNYPVECTEGSAGPQSLPLPILEPVKNPCSVKDQTPLQLSVEDTTSPNTKPCPPTPTTPETSPPPPPPPPSSTPCSAHLTPSSLFPSSLESSSEQKFYNFVILHARADEHIALRVSGRSWEALGVPDGATFCEDFQVPGRGELSCLQDAIDHSAFIILLLTSNFDCRLSLHQVNQAMMSNLTRQGSQDCVIPFLPLESSPARLSSDTASLLSGLVRLDEHSQIFARKVANTFKPHRLQARKAMWRKEQDTRALREQSQHLDGERMQAAALNAAYSAYLQSYLSYQAQMEQLQVAFGSHMSFGTGAPYGARMPFGGQVPLGAPPPFPTWPGCPQPPPLHAWQAGTPPPPSPQPAAFPQSLPFPAVPKPFPTASTAPPSEPKGWQPLIIHHAQMVTSWGXNKHMWNQRGSQAPEDKTQEAE

SEQ ID NO: 3401 - protein, 411 aa, Homo sapiens
  misc_feature (1)...(411): Xaa = any amino acid or nothing
EWGWLGAAQPPEEEAEAEDQESPSSLCREALAEIKKEISPLFIGMEKCSVGGLELTEQTPALLGNMAMATSLMDIGDSFGHPACPLVSRSRNSPVEDDDDDDDVVFIESIQPPSISAPAIADQRNFIFASSKNEKPQGNYSVIPPSSRDLASQKGNISETIVIDDEEDIETNGGAEKKSSCFIEWGLPGTKNKTNDLDFSTSSLSRSKVNAGMGNSGITTELTLKYIITNVTTLETGISSVNAGQDVNIIITYKTSLXNTNLGDVAKGLQSSNFGVNIQTYTPSLTPQTKTGVNLLTLVEXMWQETYFRMENLQLIICPEDASTKKANVILPVESSKSFQEFYSTSCLSPCENNWNLKKGVFNKSRCTICSKLAEVWIFIPKLLFRLTVIILTFKCYYVLFHLHNARVLDV

SEQ ID NO: 3402 - protein, 411 aa, Homo sapiens; identical to SEQ ID NO: 3401
  misc_feature (1)...(411): Xaa = any amino acid or nothing

SEQ ID NO: 3403 - protein, 716 aa, Homo sapiens
  misc_feature (1)...(716): Xaa = any amino acid or nothing
SRHCTPAERQNETHRAPDFAMSAVLGHQPPFFPALTLPPNGAAALSLPGALAKPIMDQLVGAAETGIPFSSLGPQAHLRPLKTMEPEEEVEDDPKVHLEAKELWDQFHKRGTEMVITKSGRRMFPPFKVRCSGLDKKAKYILLMDIIAADDCRYKFHNSRWMVAGKADPEMPKRMYIHPDSPATGEQWMSKVVTFHKLKLTNNISDKHGFTILNSMHKYQPRFHIVRANDILKLPYSTFRTYLFPETEFIAVTAYQNDKITQLKIDNNPFAKGFRDTGNGRREKRKQLTLQSMRVFDERHKKENGTSDESSSEQAAFNCFAQASSPAAPLXRTSNLKDFSPSRGXRATPEAEEQRGSTAPRPATRAKISPHPRRRSPAVTRAAPAVKAHLFAAERPRDSGRLDKASPDSRHSPATISSSTRGLGAEERRSPVREGQAPAKVEEARALPGKEAFAPLTVQTDAAAAHLAQGPLPGLGFAPGLAGQQFFNGHPLFLHPSQFAMGGAFSSMAAAGMGPLLATVSGASTGVSGLDSTAMASAAAAQGLSGASAATLPFHLQQHVLASQGLAMSPFGSLFPYPYTYMAAAAAASSAAASASVHRTPFNLNTMRPRLRYSPYSIPVPVPDGSSLLTTALPSMAAAAGPLDGKAAALAASPASVAVDSGSELNSRSSTLSSSSMSLSPKLCAEKEAATSELQSIQRLVSGLEAKPDRSRSASP

SEQ ID NO: 3404 - protein, 74 aa, Homo sapiens
  misc_feature (1)...(74): Xaa = any amino acid or nothing
LKKFLEVPQSYSLLLSSPFLQWRAXRPQNAIGXQFIIKTLVFFGIMRSAGDVLSTQVSCALRIMRTAGCSHSSP

SEQ ID NO: 3405 - protein, 330 aa, Homo sapiens
  misc_feature (1)...(330): Xaa = any amino acid or nothing
PRPPTQRLSRFAPPCRTAEFPFRRRAVVTRPAPPRACTVVGRSSPVTGLAVGAAVAMLTVAARSRPFAPVLSATSRGVAGALTPXMQATVPATPEQPVLDLKRPFLSRESLSGQAVRRPLVASVGLNVPASVCYSHTDIKVPDFSEYRRLEVLDSTKSSRESSEARKGFSYLVTGVTTVGVAYAAKNAVTQFVSSMSASADVLALAKIEIKLSDIPEGKNMAFKWRGKPLFVRHRTQKEIEQEAAVELSQLRDPQHDLDRVKKPEWVILIGVCTHLGCVPIANAGDFGGYYCPCHGSHYDASGRIRLGPAPLNLEVPTYEFTSDDMVIVG

SEQ ID NO: 3406 - protein, 863 aa, Homo sapiens
  misc_feature (1)...(863): Xaa = any amino acid or nothing
CLYPDFCRSVTCAMPCFTHRSCREDPGTSESREMDPVAFKDVAVNFTQEEWALLDISQKNLYREVMLETFWNLTSIGKKWKDQNIEYEYQNPRRNFRSVTEEKVNEIKEDSHCGETFTPVPDDRLNFQKKKASPEVKSCDSFVCEVGLGNSSSNMNIRGDTGHKACECQEYGPKPWKSQQPKKAFRYHPSLRTQERDHTGKKPYACKECGKNIIYHSSIQRHMVVHSGDGPYKCKFCGKAFHWLSLYLIHERTHTGEKPYECKQCGKSFSYSATHRIHERTHIGEKPYECQECGKAFHSPRSCHRHERSHMGEKAYQCKECGKAFMCPRYVRRHERTHSRKKLYECKQCGKALSSLTSFQTHIRMHSGERPYECKTCGKGFYSAKSFQRHEKTHSGEKPYKCKQCGKAFTRSGSFRYHERTHTGEKPYECKQCGKAFRSAPNLQSHGRTHTGEKPYECKECGKAFIFVNNLQSHERTQTHIRIHSGERRYKCKICGKGFYCPKSFQRHEKTHTGEKLYECTATFSSSFSSSSSFXYHERTHTGEKPYKCEQCGKAFRAVSILXMHGRTHPEEKPYECEQXRKAFRSAPHLXIRGRTHNGEKPYACKKCGKPFGSAQNLRIHERTQTHIMHSVERPYKCKICGRGFYSAKSFQTHEKSYTGEKPYECKQCGKAFVSFTSFRYHERTHTGENPYECKQFGKAFRSVKNLRFHKRTHTGEKPCEYMKRLTLEGNTMNASNVAKLSLLPVLFNIMKEFTLGRNPISVSNVRKPLFLPLLFNIMKGLTWERNPMSVCHVGKPSFLLVPFNIMKGLTLERSPMNISNVGKPSDQPRTFKCMEGLTLEKNPMNVSSMGKRSDLTRFFEYR

SEQ ID NO: 3407 - protein, 473 aa, Homo sapiens
  misc_feature (1)...(473): Xaa = any amino acid or nothing
PAAPSGASPGRVCGVETARPLGVQRRQSADEGPPGVAGLRHEPPTVWLGSVAHRGTWVCAHRWFGPAVTRAAQAATMVKLLVAKILCMVGVFFFMLLGSLLPVKIIETDFEKAHRSKKILSLCNTFGGGVFLATCLTALLARCXGKSSRRSWSLGHISTDYPLAETILLLGFFMTVFLEQLILTFAQENAVLHRPGDLQRRIGRGQRLGVXEPLHGGRAGPRAVRGAPRPRPQPERAGPLAPSPVRLLSLAFALSAHSVFEGLALGLQEEGEKVVSLFVGVAVHETLVPVALGISMAGSAMPLRDAAKLAVTVSPMIPLGIGLGLGIEKAQGVPGSVASVLLQGPGGRHLSLFITFPGKSWPRSWRKKSDRLLKVLFLVVGYTVLAGMGLPQVVSGLAIVPAAGSPPGAPGRTQAASPGRASPKSEHCGPGPPPVHKGPPGTRLCPRSYTLSLRALLLFKILLSLKSLYQKKK

SEQ ID NO: 3408 - protein, 1469 aa, Homo sapiens
  misc_feature (1)...(1469): Xaa = any amino acid or nothing
EARDRLAQSRAKEKELNSVASELSARQEESEHSHKHLIELRREFKKNVPEEIREMVAPVLKSFQAEVVALSKRSQEAEAAFLSVYKQLIEAPALWELKLKSRPALGDSRVQQGQHDPKTDNQNTQQKAGFKEGWLAEASEREAFGPGFKDPVPVFEAARSLDDRLQPPSFDPSGQPRRDLHTSWKRNPELLSPKALKATQAELLELRRKYDEEAASKADEVGLIMTNLEKANQRAEAAQREVESLREQLASVNSSIRLACCSPQGPSGDKVNFTLCSGPRLEAALASKDREILRLLKDVQHLQSSLQELEEASANQIADLERQLTAKSEAIEKLEEKLQAQSDYEEIKTELSILKAMKLASSTCSLPQGMAKPEDSLLIAKEAFFPTQKFLLEKPSLLASPEEDPSEDDSIKDSLGTEQSYPSPQQLPPPPGPEDPLSPSPGQPLLGPSLGPDGTRTFSLSPFPSLASGERLMMPPAAFKGEAGGLLVFPPAFYGAKPPTAPATPAPGPEPLGGPEPADGGGGGAAGPGAEEEQLDTAEIAFQVKEQLLKHNIGQRVFGHYVLGLSQGSVSEILARPKPWRKLHGXXGKEPFIKMKQFLSDEQNVLALRTIQVRQRGSITPRIRTPETGSDDAIKSILEQAKKEIESQKGGEPKTSVAPLSIANGTTPASTSEDAIKSILEQARREMQAQQQALLEMEVAPRGRSVPPSPPERPSLATASQNGAPALVKQEEGSGGPAQAPLPVLSPAAFVQSIIRKVKSEIGDAGYFDHHWASDRGLLSRPYASVSPSLSSSSSSGYSGQPNGRAWPRGDEAPVPPEDEAAAGAEDEPPRTGELKAEGATAEAGARLPYYPAYVPRTLKPTVPPLTPEQYELYMYREVDTLELTRQVKEKLAKNGICQRIFGEKVLGLSQGSVSDMLSRPKPWSKLTQKGREPFIRMQLWLSDQLGQAVGQQPGASQASPTEPRSSPSPPPSPTEPEKSSQEPLSLSLESSKENQQPEGRSSSSLSGKMYSGSQAPGGIQEIVAMSPELDTYSITKRVKEVLTDNNLGQRLFGESILGLTQGSVSDLLSRPKPWHKLSLKGREPFVRMQLWLNDPHNVEKLRDMKKLEKKAYLKRRYGLISTGSDSESPATRSECPSPCLQPQDLSLLQIKKPRVVLAPEEKEALRKAYQLEPYPSQQTIELLSFQLNLKTNTVINWFHNYRSRMRREMLVEGTQDEPDLDPSGGPGILPPGHSHPDPTPQSPDSETEDQKPTVKELELQEGPEENSTPLTTQDKAQVRIKQEQMEEDAEEEAGSQPQDSGELDKGQGPPKEEHPDPPGNDGLPKVAPGPLLPGGSTPDCPSLHPQQESEAGERLHPDPLSFKSASESSRCSLEVSLNSPSAASSPGLMMSVSPVPSSSAPISPSPPGAPPAKVPSASPTADMAGALHPSAKVNPNLQRRHEKMANLNNIIYRLERAANREEALEWEF

SEQ ID NO: 3409 - protein, 515 aa, Homo sapiens
  misc_feature (1)...(515): Xaa = any amino acid or nothing
GPLSPGPYQCRPSLPAQLYPQSLMAAATLRTPTQGTVTFEDVAVHFSWEEWGLLDEAQRCLYRDVMLENLALLTSLDVHHQKQHLGEKHFISNVGRALFVKTCTFHVSGEPSTCREVGKDFLAKLGFLHQQAAHTGEQSNSKSDGGAISHRGKTHYNWGEHTKAFSGKHTLVQQQRTLTTERCYICSECGKSFSKSYSLNDHWRLHTGEKPYECRECGKSFRQSSSLIQHRRGHTAVRPHECDECGKLFSNKSNLIKHRRVHTGERPYECSECGKSFNQRSALLQHRGVHTGEKPYECTECGKSFSHNSSLIKHQRIHSGXRPYECTECGKSFSQNSSLIEHHRVHTGERPYKCSECGKSFRQRSALLQHRGVPTGERPYECSECGKFFPYSSSLGKHQRVHTGSRPYECSECGKSFTQNSGLIKHRRVHTGEKPYECTEXKKSFSHNSSLIKHQRIHSRXKPYECKCGNRXHPGESPXVHSECQKSFSXRPYLIECHTVHKGKTLLICRDVQLI

SEQ ID NO: 3410 - protein, 207 aa, Homo sapiens
  misc_feature (1)...(207): Xaa = any amino acid or nothing
LCMKGISGGVRVAALAARAEREELPVPAMEPQPTAWGSPHPEAVLQLEVAPESSGPCTDTAKDQQSDKLPDLMPPAEPLGSALELRASLEIDVAERGCEHGPSQQLPRCPXSWAWSEPWCQRPGCAVXAPLPYXREASFIYQSHSPAASGPFHSAGAGAVYLQAGGVGEQEKEAVRKGSGSSSCSQRGPPPPGMEVCPLLGFWAICP

SEQ ID NO: 3411 - protein, 148 aa, Homo sapiens
  misc_feature (1)...(148): Xaa = any amino acid or nothing
ASLSKPAGISTMPWALILLFLLTHSAVSVVQAGLTQPPSVSKDLRQTATLTCTGNSNNVGHQGVIWLQQHQGHPPKLLSYRNNNRPSGISERLSAYKSGNAASLTIYGLQTEHEADXXCRPRRKLIPKTARLFFFFLIDNEEYLLRVY

SEQ ID NO: 3412 - protein, 694 aa, Homo sapiens
  misc_feature (1)...(694): Xaa = any amino acid or nothing
RRGIPGSASLSLTMCVRSCFQSPRLQWVWRTAFLKHTQRRHQGSHRWTHLGGSTYRAVIFDMGGVLIPSPGRVAAEWEVQNRIPSGTILKALMEGGENGPWMRFMRAEITAEGFLREFGRLCSEMLKTSVPVDSFFSLLTSERVAKQFPVMTEAITQIRAKGLQTAVLSNNFYLPNQKSFLPLDRKQFDVIVESCMEGICKPDPRIYKLCLEQLGLQPSESIFLDDLGTNLKEAARLGIHTIKVNDPETAVKELEALLGFTLRVGVPNTRPVKKTMEIPKDSLQKYLKDLLGIQTTGPLELLQFDHGQSNPTYYIRLANRDLVLRKKPPGTLLPSAHAIEREFRIMKALANAGVPVPNVLDLCEDSSVIGTPFYVMEYCPGLIYKDPSLPGLEPSHRRAIYTAMNTVLCKIHSVDLQAVGLEDYGKQGSTTWVYSSRRARGALLFLDWELSYPWGDPFADVGYSCLAHYLPSSFPVLRGINDCDLTQLGIPAAEEYFRMYCLQMGLPPTENWNFYMAFSFFRVAAILQGVYKRSLTGQASSTYAEQTGKLTEFVSNLAWDFAVKEGFRVFKEMPFTNPLTRSYHTWARPQSQWCPTGSRSYSSVPEASPAHTSRGGLVISPESLSPPVRELYHRLKHFMEQRVYPAEPELQSHQASAARWSPSPLIEDLKVKQPWXGGRSGRTSWRLLALGCHT

SEQ ID NO: 3413 - protein, 490 aa, Homo sapiens
  misc_feature (1)...(490): Xaa = any amino acid or nothing
PESRHQCFSDRSSHFLTMEMEQEKMTMNKELSPDAAAYCCSACHGDETWSYNHPIRGRAKSRSLSASPALGSTKEFRRTRSLHGPCPVTTFGPKACVLQNPQTIMHIQDPASQRLTWNKSPKSVLVIKKMRDASLLQPFKELCTHLMEENMIVYVEKKVLEDPAIASDESFGAVKKKFCTFREDYDDISNQIDFIICLGGDGTLLYASSLFQGSVPPVMAFHLGSLGFLTPFSFENFQSQVTQVIEGNAAVVLRGSRLKVRVVKELRGKKTAVHNGLGEKGSQAAGLDMDVGKQAMQYQVLNEVVIDRGPSSYLSNVDVYLDGHLITTVQGDGXGPQHLSWGPXAFLGREXRLRLSLSGVIVSTPTGSTAYAAAAGASMIHPNVPAIMITPICPHSLSFRPIVVPAGVELKIMLSPEARNTAWVSFDGRKRQEIRHGDSISITTSCYPLPSICVRDPVSDWFESLAQCLHWNVRKKQAHFEEEEEEEEEG

SEQ ID NO: 3414 - protein, 860 aa, Homo sapiens
  misc_feature (1)...(860): Xaa = any amino acid or nothing
VIVNKNVNWINYIYYNQQQRAFHELKEKLMSALALGLPDLTKPFTFYESEREKMAVGVLTQTVGPWPRPVAYLSKQLDGVSKGWPPCLRALAATALLAQEADKLTLGQNLNIKAPHAVVTLMNTKGHHWLTNARLTKYQSLPCENPHITIEVCNTLNPTTLLPVSESPGEHNCVEVLDSVYSSRPDLRDQPWASSVDWELYMDGSSFINSQGERCAGYAVVTLDAVIKAKLWLQGTSAQKAELIALTRAVELSEGQESLEELLGRYFYVSHLPAFAKAVAQLCITCRQHNARQSPTVSPHIQAYGAAPFEDLQVDFTEMPKCGGNKYLLVLTCTYSGWVEAYPTRTEKAYEVTRVLLRDLIPRFGLPLRIGSHNGPVFVADLDCVEINVDTGVIWATWIKNEKDPVQLQKGKSGPSCTKGQCNPLELVITNPLDPRWKKGERVTLGINGAGLNPRVNILVRGEVYKCSLEPVFQTFYDELNVPITEFPGKTRNLFLQLAEHVAQSLTVTSCYVCGGTVIADQWPWEARELVPTDPVPDEFPAQKNHPDNFWVLKASIIRQYYIARVEKDFTLPVGRLHGGRSNHTEKNPFSKFPKLQTVXAHPESHRDWTAPTGLYWICGHRAYTKLPASSCVIGTIKPSFFLLSIKTGELLGFPVYASRKSIAIRNXNNDKWPPERIIQYYGPATXAQDGSWGYRIPIYMINRIIRLQAVLKIITATGRALTILAQQETQMRNAIYQNRLALDYLLAAEGEVCRKFNLTNCCLHIDNQGQVVEDIVRDMTKVAHVPVQVWHGFDPGAMFRKWFPALGGFKTLIIRVIIVIGTYLLLPRLLPVLLQMIKSFIATLVYQNASAQVYYINHY

SEQ ID NO: 3415 - protein, 117 aa, Homo sapiens
  misc_feature (1)...(117): Xaa = any amino acid or nothing
NMSWRGRSTYRPRPRRSLQPPELIGAMLEPTDEEPKEEKPPTKSRNPTPDQKREDDSGSAAXDFKWPEPGKPIFQGAMVRPKTGGCGCEGGYXCQGEDSPKAEHFKMPEAGEGKSQV

SEQ ID NO: 3416 - protein, 292 aa, Homo sapiens
FFFFQRINFIEHSGSVSLLALACDLGWCEDWSCCLVQGGGDLVDVVQTNHGEDEAGGDTDSVDEARCKESQQEAQENLREDLCLESFAKDKILQIIEGSEREHEETRTKQAALDGEPLGGGQLTAVHLHPSKEQQGQEGGERQRGARTHHWRGWEKGRRVRLRPPSGKLRADQPVRKLGGPTPSTELPGLQPHAPTPHTAPATPTYSPAPDTPNPPVRWKCPLPVEPRTRQLCRERTRKACPPKPRPPLGLPGDPTGPVTHHAPPVSPTGASGQERRAEPGAVSYAHASATK

SEQ ID NO: 3417 - protein, 201 aa, Homo sapiens
CLKYMYTYIFCPNCVSYKMKTDHFSLRYLHSSCAEDNKSSVDSSGQAAHPSKGKFFPHGTHWGTQCRGHISVLGWQCSCPSTGCRVGLGLAMCQTHAYIHTHTHTHTHTPTDYGAHHTDPLQRWGLGPRKSEAGPLPQLSRDQSHPGPLSPGASPRSAGLPGWHPAHQEPRARGRCARDGLSLQTRLTNKYDIQCCQEMRK

SEQ ID NO: 3418 - protein, 1023 aa, Homo sapiens
LDEYEARLTLANLDDFEEDNEDDDENRVNQEEKAAKITELINKLNFLDEAEKDLATVNSNPFDDPDAAELNPFGDPDSEEPITETASPRKTEDSFYNNSYNPFKEVQTPQYLNPFDEPEAFVTIKDSPPQSTKRKNIRPVDMSKYLYADSSKTEEEELDESNPFYEPKSTPPPNNLVNPVQELETERRVKRKAPAPPVLSPKTGVLNENTVSAGKDLSTSPKPSPIPSPVLGRKPNASQSLLVWCKEVTKNYRGVKITNFTTSWRNGLSFCAILHHFRPDLIDYKSLNPQDIKENNKKAYDGFASIGISRLLEPSDMVLLAIPDKLTVMTYLYQIRAHFSGQELNVVQIEENSSKSTYKVGNYETDTNSSVDQEKFYAELSDLKREPELQQPISGAVDFLSQDDSVFVNDSGVGESESEHQTPDDHLSPSTASPYCRRTKSDTEPQKSQQSSGRTSGSDDPGICSNTDSTQAQVLLGKKRLLKAETLELSDLYVSDKKKDMSPPFICEETDEQKLQTLDIGSNLEKEKLENSRSLECRSDPESPIKKTSLSPTSKLGYSYSRDLDLAKKKHASLRQTESDPDADRTTLNHADHSSKIVQHRLLSRQEELKERARVLLEQARRDAALKAGNKHNTNTATPFCNRQLSDQQDEERRRQLRERARQLIAEARSGVKMSELPSYGEMAAEKLKERSKASGDENDNIEIDTNEEIPEGFVVGGGDELTNLENDLDTPEQNSKLVDLKLKKLLEVQPQVANSPSSAAQKAVTESSEQDMKSGTEDLRTERLQKTTERFRNPVVFSKDSTVRKTQLQSFSQYIENRPEMKRQRSIQEDTKKGNEEKAAITETQRKPSEDEVLNKGFKDSSQYVVGELAALENEQKQIDTRAALVEKRLRYLMDTGRNTEEEEAMMQEWFMLVNKKNALIRRMNQLSLLEKEHDLERRYELLNRELRAMLAIEDWQKTEAQKRREQLLLDELVALVNKRDALVRDLDAQEKQAEEEDEHLERTLEQNKGKMAKKEEKCVLQ

SEQ ID NO: 3419 - protein, 1023 aa, Homo sapiens; identical to SEQ ID NO: 3418

SEQ ID NO: 3420 - protein, 149 aa, Homo sapiens
ENLGPNYSHRLLHHPTFYKKIHKKHHEWTAPIGVISLYAHPIEHAVSNMLPVIVGPLVMGSHLSSITMWFSLALIITTISHCGYHLPFLPSPEFHDYHHLKFNQCYGVLGVLDHLHGTDTMFKQTKAYERHVLLLGFTPLSESIPDSPK

SEQ ID NO: 3421 - protein, 660 aa, Homo sapiens
LLTPCDGRIPGRPSVGAESGSDFQQRRRRRRDPEEPEKTELSERELAVAVAVSQENDEENEERWVGPLPVEATLAKKRKVLEFERVYLDNLPSASMYERSYMHRDVITHVVCTKTDFIITASHDGHVKFWKKIEEGIEFVKHFRSHLGVIESIAVSSEGALFCSVGDDKAMKVFDVVNFDMINMLKLGYFPGQCEWIYCPGDAISSVAASEKSTGKIFIYDGRGDNQPLHIFDKLHTSPLTQIRLNPVYKAVVSSDKSGMIEYWTGPPHEYKFPKNVNWEYKTDTDLYEFAKCKAYPTSVCFSPDGKKIATIGSDRKVRIFRFVTGKLMRVFDESLSMFTELQQMRQQLPDMEFGRRMAVERELEKVDAVRLINIVFDETGHFVLYGTMLGIKVINVETNRCVRILGKQENIRVMQLALFQGIAKKHRAATTIEMKASENPVLQNIQADPTIVCTSFKKNRFYMFTKREPEDTKSADSDRDVFNEKPSKEEVMAATQAEGPKRVSDSAIIHTSMGDIHTKLFPVECPKTVENFCVHSRNGYYNGHTFHRIIKGFMIQTGDPTGTGMGGESIWGGEFEDEFHSTLRHDRPYTLSMANAGSNTNGSQFFITVVPTPWLDNKHTVFGRVTKGMEVVQRISNVKVNPKTDKPYEDVSIINITVK

SEQ ID NO: 3422 - protein, 683 aa, Homo sapiens
FVLVCAPLTWAGARHRRMAASKKPPRVRVNHQDFQLRNLRIIEPNEVTHSGDTGVETDGRMPPKVTSELLRQLRQAMRNSEYVTEPIQAYIIPSGDAHQSEYIAPCDCRRAFVSGFDGSAGTAIITEEHAAMWTDGRYFLQAAKQMDSNWTLMKMGLKDTPTQEDWLVSVLPEGSRVGVDPLIIPTDYWKKMAKVLRSAGHHLIPVKENLVDKIWTDRPERPCKPLLTLGLDYTGISWKDKVADLRLKMAERNVMWFVVTALDEIAWLFNLRGSDVEHNPVFFSYAIIGLETIMLFIDGDRIDAPSVKEHLLLDLGLEAEYRIQVHPYKSILSELKALCADLSPREKVWVSDKASYAVSETIPKDHRCCMPYTPICIAKAVKNSAESEGMRRAHIKDAVALCELFNWLEKEVPKGGVTEISAADKAEEFRRQQADFVDLSFPTISSTGPNGAIIHYAPVPETNRTLSLDEVYLIDSGAQYKDGTTDVTRTMHFGTPTAYEKECFTYVLKGHIAVSAAVFPTGTKGHLLDSFARSALWDSGLDYLHGTGHGVGSFLNVHEGPCGISYKTFSDEPLEAGMIVTDEPGYYEDGAFGIRIENVVLVVPVKTKYNFNNRGSLTFEPLTLVPIQTKMIDVDSLTDKECDWLNNYHLTCRDVIGKELQKQGRQEALEWLIRETQPISKQH

SEQ ID NO: 3423 - protein, 1526 aa, Homo sapiens
FKMPENPATDKLQVLQVLDRLKMKLQEKGDTSQNEKLSMFYETLKSPLFNQILTLQQSIKQLKGQLNHIPSDCSANFDFSRKGLLVFTDGSITNGNVHRPSNNSTVSGLFPWTPKLGNEDFNSVIQQMAQGRQIEYIDIERPSTGGLGFSVVALRSQNLGKVDIFVKDVQPGSVADRDQRLKENDQILAINHTPLDQNISHQQAIALLQQTTGSLRLIVAREPVHTKSSTSSSLNDTTLPETVCWGHVEEVELINDGSGLGFGIVGGKTSGVVVRTIVPGGLADRDGRLQTGDHILKIGGTNVQGMTSEQVAQVLRNCGNSVRMLVARDPAGDISVTPPAPAALPVALPTVASKGPGSDSSLFETYNVELVRKDGQSLGIRIVGYVGTSHTGEASGIYVKSIIPGSAAYHNGHIQVNDKIVAVDGVNIQGFANHDVVEVLRNAGQVVHLTLVRRKTSSSTSPLEPPSDRGTVVEPLKPPALFLTGAVETETNVDGEDEEIKERIDTLKNDNIQALEKLEKVPDSPENELKSRWENLLGPDYEVMVATLDTQIADDAELQKYSKLLPIHTLRLGVEVDSFDGHHYISSIVSGGPVDTLGLLQPEDELLEVNGMQLYGKSRREAVSFLKEVPPPFTLVCCRRLFDDEASVDEPRRTETSLPETEVDHNMDVNTEEDDDGELALWSPEVKIVELVKDCKGLGFSILDYQDPLDPTRSVIVIRSLVADGVAERSGGLLPGDRLVSVNEYCLDNTSLAEAVEILKAVPPGLVHLGICKPLVEDNEEESCYILHSSSNEDKTEFSGTIHDINSSLILEAPKGFRDEPYFKEELVDEPFLDLGKSFHSQQKEIEQSKEAWEMHEFLTPRLQEMDEEREMLVDEEYELYQDPSPSMELYPLSHIQEATPVPSVNELHFGTQWLHDNEPSESQEARTGRTVYSQEAQPYGYCPENVMKENFVMESLPSVPSTEGNSQQGRFDDLENLNSLAKTSLDLGMIPNDVQGPSLLIDLPVVAQRREQEDLPLYQHQATRVISKASAYTGMLSSRYATDTCELPEREEGEGEETPNFSHWGPPRIVEIFREPNVSLGISIVGGQTVIKRLKNGEELKGIFIKQVLEDSPAGKTNALKTGDKILEVSGVDLQNASHSEAVEAIKNAGNPVVFIVQSLSSTPRVIPNVHNKANKITGNQNQDTQEKKEKRQGTAPPPMKLPPPYKALTDDSDENEEEDAFTDQKIRQRYADLPGELHIIELEKDKNGLGLSLAGNKDRSRMSIFVVGINPEGPAAADGRMHIGDELLEINNQILYGRSHQNASAIIKTAPSKVKLVFIRNEDAVNQMAVTPFPVPSSSPSSIEDQSGTEPISSEEDGSLEVGIKQLPESESFKLAVSQMKQQKYPTKVSFSSQEIPLAPASSYHSTDADFTGYGGFQAPLSVDPATCPIVPGQEMIIEISKRRSGLGLSIVGGKDTPLVNGVDLRNSSHEEAITALRQTPQKVRLVVYRDEAHYRDEENLEIFPVDLQKKAGRGLGLSIVGKR

SEQ ID NO: 3424 - protein, 349 aa, Homo sapiens
HASERVVQLPDFVWDQYTHSLGRVEREFKNRKRHTRRVKLVFDKGLPARPKSPLDPKKDGESLSYSMLPLSDGPEGSSSRPQMIRGRLCDDTKPETFNQLWTVEEQKKLEQLLIKYPPEEVESRRWQKIADELGNRTAKQVASRVQKYFIKLTKAGIPVPGRTPNLYIYSKKSSTSRRQHPLNKHLFKPGTFMTSHEPPVYMDEDDDRSCFHSHMNTAVEDASDDESIPIMYRNLPEYKELLQFKKLKKQKLQHMQAESGFVQHVGFKCDNCGIEPIQGVRWHCRDCPPEMSLDFCDSCSDCLHETDIHKGDHQLEPIYRSETFLDRDYCVSQGTSYNYLDPNYFPANR

SEQ ID NO: 3425 - protein, 349 aa, Homo sapiens; identical to SEQ ID NO: 3424

SEQ ID NO: 3426 - protein, 516 aa, Homo sapiens
LFVVVHDDPRWGTPRYWLGALYRNQQSSPTAPPGLLPLEYFPAAPHCSHSRQWRCSQTHRIHHHPQMLGPCRQEICGITMAAGTLYTYPENWRAFKALIAAQYSGAQVRVLSAPPHFHFGQTNRTPEFLRKFPAGKVPAFEGDDGFCVFESNAIAYYVSNEELRGSTPEAAAQVVQWVSFADSDIVPPASTWVFPTLGIMHHNKQATENAKEEVRRILGLLDAYLKTRTFLVGERVTLADITVVCTLLWLYKQVLEPSFRQAFPNTNRWFLTCINQPQFRAVFGEVKLCEKMAQFDAKKFAETQPKKDTPRKEKGSREEKQKPQAERKEEKKAAAPAPEEEMDECEQALAAEPKAKDPFAHLPKSTFVLDEFKRKYSNEDTLSVALPYFWEHFDKDGWSLWYSEYRFPEELTQTFMSCNLITGMFQRLDKLRKNAFASVILFGTNNSSSISGVWVFRGQELAFPLSPDWQVDYESYTWRKLDPGSEETQTLVREYFSWEGAFQHVGKAFNQGKIFK

SEQ ID NO: 3427 - protein, 233 aa, Homo sapiens
TAARRRQKGTAARRRQKGTAARRRQKGTAARRRQKGTAARRRQKGTAARRRQKGTAARRRQKGTAARRRQKGTAARRRQKGTAARRRQKGTAARRRQKGLSNLDAAEWLPPKKGGEKKKGPFLAINEVVTREYPINILKRIHGVGFKKRAPRALKEIRKFAMKEMGTPDVRIDTRLNKAVWAKGIRNVPYRIRVRLSRKRNEDEDSPNKLYTLVTYVPVTTFKNLQTVNVDEN

SEQ ID NO: 3428 - protein, 644 aa, Homo sapiens
LPLSLSFSEMPLPLLPMDLKGEPGPPGKPGPWGPPGPPGFPGKPGHGKPGLHGQPGPAGPPGFSRMGKAGPPGLPGNVGPPGQPGLRGEPGIRGDQGLRGPPGPPGLPGPSGITIPGKPGAQGVPGPPGFQGEPGPQGEPGPPGDRGLKGDNGVGQPGLPGAPGQGGAPGPPGLPGPAGLGKPGLDGLPGAPGDKGESGPPGVPGPRGEPGAVGPKGPPGVDGVGVPGAAGLPGPQGPSGAKGEPGTRGPPGLIGPTGYGMPGLPGPKGDRGPAGVPGLLGDRGEPGEDGEPGEQGPQGLGGPPGLPGSAGLPGRRGPPGPKGEAGPGGPPGVPGIRGDQGPSGLAGKPGVPGERGLPGAHGPPGPTGPKGEPGFTGRPGGPGVAGALGQKGDLGLPGQPGLRGPSGIPGLQGPAGPIGPQGLPGLKGEPGLPGPPGEGRAGEPGTAGPRGPPGVPGSPGITGPPGLPGPPGAPGAFDETGIAGLHLPNGGVEGAVLGKGGKPQFGLGELSAHATPAFTAVLTSPLPASGMPVKFDRTLYNGHSGYNPATGIFTCPVGGVYYFAYHVHVKGTNVWVALYKNNVPATYTYDEYKKGYLDQASGGAVLQLRPNDQVWVQMPSDQANGLYSTEYIHSSFSGFLLCPT

SEQ ID NO: 3429 - protein, 287 aa, Homo sapiens
EGLTGPCERVPFLLGRGPPHGATRAGHRRAVRWAGPESLPPLPRSLIMDSPRAGTHQGPLDAETEVGADRCTSTAYQEQRPQVEQVGKQAPLSPGLPAMGGPGPGPCEDPAGAGGAGAGGSEPLVTVTVQCAFTVALRARRGADLSSLRALLGQALPHQAQLGQLSYLAPGEDGHWVPIPEEESLQRAWQDAAACPRGLQLQCRGAGGRPVLYQVVAQHSYSAQGPEDLGFRQGDTVDVLCEVDQAWLEGHCDGRIGIFPKCFVVPAGPRMSGAPGRLPRSQQGDQP

SEQ ID NO: 3430 - protein, 393 aa, Homo sapiens
INKYINIRKKIKLLSPLPPLWSHLALLQASATKWVLTPAAFAGKLLSVFRQPLSSLWRSLVPLFCWLRATFWLLATKRRKQQLVLRGPDETKEEEEDPPLPTTPTSVNYHFTRQCNYKCGFCFHTAKTSFVLPLEEAKRGLLLLKEAGLEKINFSGGEPFLQDRGEYLGKLVRFCKVELRLPSVSIVSNGSLIRERWFQNYGEYLDILAISCDSFDEEVNCPIGRGNGKKNHVENLQKLRRWCRDYRVPFKINSVINPFNVEEDMTEQIKALNPVRWKVFQCLLIEGENCGEDALREAERFVIGDEEFERFLERHKEVSCLVPESNQKMKDSYLILDEYMRFLNCRKGRKDPSKSILDVGVEEAIKFSGFDEKMFLKRGGKYIWSKADLKLDW

SEQ ID NO: 3431 - protein, 1106 aa, Homo sapiens
ACGFLPGRCHFSTFKQCQEWLSRLSRATARPAKPEDLFAFAYHAWCLGLTEEDQHTHLCQPGEHIRCRQEAELARMGFDLQNVWRVSHINSNYKLCPSYPQKLLVPVWITDKELENVASFRSWKRIPVVVYRHLRNGAAIARCSQPEISWWGWRNADDEYLVTSIAKACALDPGTRATGGSLSTGNNDTSEACDADFDSSLTACSGVESTAAPQKLLILDARSYTAAVANRAKGGGCECEEYYPNCEVVFMGMANIHAIRNSFQYLRAVCSQMPDPSNWLSALESTKWLQHLSVMLKAAVLVANTVDREGRPVLVHCSDGWDRTPQIVALAKILLDPYYRTLEGFQVLVESDWLDFGHKFGDRCGHQENVEDQNEQCPVFLQWLDSVHQLLKQFPCLFEFNEAFLVKLVQHTYSCLYGTFLANNPCEREKRNIYKRGTCSVWALLRAGNKNFHNFLYTPSSDMVLHPVCHVRALHLWTAVYLPASSPCTLGEENMDLYLSPVAQSQEFSGRSLDRLPKTRSMDDLLSACDTSSPLTRTSSDPNLNNHCQEVRVGLEPWHSNPEGSETSFVDSGVGGPQQTVGEVGLPPPLPSSQKDYLSNKPFKSHKSCSPSYKLLNTAVPREMKSNTSDPEIKVLEETKGPAPDPSAQDELGRTLDGIGEPPEHCPETEAVSALSKVISNKCDGVCNFPESSQNSPTGTPQQAQPDSMLGVPSKCVLDHSLSTVCNPPSAACQTPLDPSTDFLNQDPSGSVASISHQEQLSSVPDLTHGEEDIGKRGNNRNGQLLENPRFGKMPLELVRKPISQSQISEFSFLGSNWDSFQGMVTSFPSGEATPRRLLSYGCCSKRPNSKQMRATGPCFGGQWAQREGVKSPVCSSHSNGHCTGPGGKNQMWLSSHPKQVSSTKPVPLNCPSPVPPLYLDDDGLPFPTDVIQHRLRQIEAGYKQEVEQLRRQVRELQMRLDIRHCCAPPAEPPMDYEDDFTCLKESDGSDTEDFGSDHSEDCLSEASWEPVDKKETEVTRWVPDHMASHCYNCDCEFWLAKRRHHCRNCGNVFCAGCCHLKLPIPDQQLYDPVLVCNSCYEHIQVSRARELMSQQLKKPIATASS

SEQ ID NO: 3432 - protein, 612 aa, Homo sapiens
MTFFSSVADFIGLDPRIAAWLIDPSDATPSFEDLVEKYCEKSITVKVNSTYGNSSRNIVNQNVRENLKTLYRLTMDLCSKLKDYGLWQLFRTLELPLIPILAVMESHAIQVNKEEMEKTSALLGARLKELEQEAHFVAGERFLITSNNQLREILFGKLKLHLLSQRNSLPRTGLQKYPSTVSEALNALRDLHPLPKIILEYRQVHKIKSTFVDGLLACMKKGSISSTWNQTGTVTGRLSAKHPNIQGISKHPIQITTPKNFKGKEDKILTISPRAMFVSSKGHTFLAADFSQIELRILTHLSGDPELLKLFQESERDDVFSTLTSQWKDVPVEQVTHADREQTKKVVYAVVYGAGKERLAACLGVPIQEAAQFLESFLQKYKKIKDFARAAIAQCHQTGCVVSIMGRRRPLPRIHAHDQQLRAQAERQAVNFVVQGSAADLCKLAMIHVFTAVAASHTLTARLVAQIHDELLFEVEDPQIPECAALVRRTMESLEQVPLKVSLSAGRSWGHLVPLQEAWALRQAHVALSLPATAWLPLGPLPAPSPHPCIFRLHFVCSPRQQWEERTGFQQSIVWPSPRSPALYAPGRINPLGLGWPAIPWSKCLCKALKKK

SEQ ID NO: 3433 - protein, 334 aa, Homo sapiens
IPPKERAPGIRASCLAITAGARPTSYGRVGCEGDVRLSPVSPLLAPPDPRLASRWEGRSRMKGKKGIVAASGSETEDEDSMDIPLDLSSSAGSGKRRRRGNLPKESVQILRDWLYEHRYNAYPSEQEKALLSQQTHLSTLQVCNWFINARRRLLPDMLRKDGKDPNQFTISRRGAKISETSSVESVMGIKNFMPALEETPFHSFTAGPNPTLGRPLSAKPSQSPGSVLARPSVICHTTVTAIERLSLSLSCQSVGCGQNTDIQQIATRNLRDSSLMYPEDTCKSGPSTNTQSGLFNTPPPTPPDLNQDFSGFQLLVDVALKRAAEMELQAKLTA

SEQ ID NO: 3434 - protein, 404 aa, Homo sapiens
NGPVPPGGSKTKWAGGSAAEGSPRLSPSPGAAQVPALLRGEPRGGAAAGSFWKPLHQHSCGLRPPPPPDRLSRLPGKTLSACDRENGARRPLLLGSTSFIPIGRRTYASAAEPVGSKAVLVTGCDSGFGFSLAKHLHSKGFLVFAGCLMKDKGHDGVKELDSLNSDRLRTVQLNVCSSEEVEKVVGDCPLEPEGPEKGMWGLVNNAGISTFGEVEFTSLETYKQVAEVNLWGTVRMTKSFLPLIRRAKGRVVNISSMLGRMANPARSPYCITKFGVEAFSDCLRYEMYPLGVKVSVVEPGNFIAATSLYSPESIQAIAKKMWEELPEVVRKDYGKKYFDEKIAKMETYCSSGSTDTSPVIDAVTHALTATTPYTRYHPMDYYWWLRMQIMTHLPGAISDMIYIR

SEQ ID NO: 3435 - protein, 918 aa, Homo sapiens
ENQQQMLVAKEQRLHFLKQQERRQQQSISENEKLQKLKERVEAQENKLKKIRAMRGQVDYSKIMNGNLSAEIERFSAMFQEKKQEVQTAILRVDQLSQQLEDLKKGKLNGFQSYNGKLTGPAAVELKRLYQELQIRNQLNQEQNSKLQQQKELLNKRNMEVAMMDKRISELRERLYGKKIQACEKVFLNRVNGTSSPQSPLSTSGRVAAVGPYIQVPSAGSFPVLGDPIKPQSLSIASNAAHGRSKSANDGNWPTLKQNSSSSVKPVQVAGADWKDPSVEGSVKQGTVSSQPVPFSALGPTEKPGIEIGKVPPPIPGVGKQLPPSYGTYPSPTPLGPGSTSSLERRKEGSLPRPSAGLPSRQRPTLLPATGSTPQPGSSQQIQQRISVPPSPTYPPAGPPAFPAGDSKPELPLTVAIRPFLADKGSRPQSPRKGPQTVNSSSIYSMYLQQATPPKNYQPAAHSALNKSVKAVYGKPVLPSGSTSPSPLPFLHGSLSTGTPQPQPPSESTEKEPEQDGPAAPADGSTVESLPRPLSPTKLTPIVHSPLRYQSDADLEALRRKLANAPRPLKKRSSITEPEGPGGPNIQKLLYQRFNTLAGGMEGTPFYQPSPSQDFMVTLADVDNGNTNANGNLEELPPAQPTAPLPAEPAPSSDANDNELPSPEPEELICPQTTHQTAEPAEDNNNNVATVPTTEQIPSPVAEAPSPGEEQVPPAPLPPASHPPATSTNKRTNLKKPNSERTGHGLRVRFNPLALLLDASLEGEFDLVQRIIYEVEDPSKPNDEGITPLHNAVCAGHHHIVKFLLDFGVNVNAADSDGWTPLHCAASCNSVHLCKQLVESGAAIFASTISDIETAADKCEEMEEGYIQCSQFLYGVQEKLGVMNKGVAYALWDYEAQNSDELSFHEGDALTILRRKDE

SEQ ID NO: 3436 - protein, 867 aa, Homo sapiens
GSTHASEKMKTGRSALVVTDTGDMSVLNSPRHQSCIMHVDMDCFFVSVGIRNRPDLKGKPVAVTSNRGTGRAPLRPGANPQLEWQYYQNKILKGKADIPDSSLWENPDSAQANGIDSVLSRAEIASCSYEARQLGIKNGMFFGHAKQLCPNLQAVPYDFHAYKEVAQTLYETLASYTHNIEAVSCDEALVDITEILAETKLTPDEFANAVRMEIKDQTKCAASVGIGSNILLARMATRKAKPDGQYHLKPEEVDDFIRGQLVTNLPGVGHSMESKLASLGIKTCGDLQYMTMAKLQKEFGPKTGQMLYRFCRGLDDRPVRTEKERKSVSAEINYGIRFTQPKEAEAFLLSLSEEIQRRLEATGMKGKRLTLKIMVRKPGAPVETAKFGGHGICDNIARTVTLDQATDNAKIIGKAMLNMFHTMKLNISDMRGVGIHVNQLVPTNLNPSTCPSRPSVQSSHFPSGSYSVRDVFQVQKAKKSTEEEHKEVFRAAVDLEISSASRTCTFLPPFPAHLPTSPDTNKAESSGKWNGLHTPVSVQSRLNLSIEVPSPSQLDQSVLEALPPDLREQVEQVCAVQQAESHGDKKKEPVNGCNTGILPQPVGTVLLQIPEPQESNSDAGINLIALPAFSQVDPEVFAALPAELQRELKAAYDQRQRQGENSTHQQSASASVPKNPLLHLKAAVKEKKRNKKKKTIGSPKRIQSPLNNKLLNSPAKTLPGACGSPQKLIDGFLKHEGPPAEKPLEELSASTSGVPGLSSLQSDPAGCVRPPAPNLAGAVEFNDVKTLLREWITTISDPMEEDILQVVKYCTDLIEEKDLEKLDLVIKYMKRLMQQSVESVWNMAFDFILDNVQVVLQQTYGSTLKVT

SEQ ID NO: 3437 - protein, 1334 aa, Homo sapiens
SLLRLLKAQWGSSGAASEPVVLGEEGCGFPSTNEYPDLEEERATYPQEEDRFLTPGRAQLLWSPWSPLDQEEACASRQLHSLASFSTVTARRNPLHNPWGMELAASENTDSPSPRPLRPGVTLPPGALTMNTKDTTEVAENSHHLKIFLPKKLLECLPRCPLLPPERLRWNTNEEIASYLITFEKHDEWLSCAPKTRPQNGSIILYNRKKVKYRKDGYLWKKRKDGKTTREDHMKLKVQGMECLYGCYVHSSIVPTFHRRCYWLLQNPDIVLVHYLNVPALEDCGKGCSPIFCSISSDRREWLKWSREELLGQLKPMFHGIKWSCGNGTEEFSVEHLVQQILDTHPTKPAPRTHACLCSGGLGSGSLTHKCSSTKHRIISPKVEPRALTLTSIPHPHPPEPPPLIAPLPPELPKAHTSPSSSSSSSSSGFAEPLEIRPSPPTSRGGSSRGGTAILLLTGLEQRAGGLTPTRHLAPQADPRPSMSLAVVVGTEPSAPPAPPSPAFDPDRFLNSPQRGQTYGGGQGVSPDFPEAEAAHTPCSALEPAAALEPQAAARGPPPQSVAGGRRGNCFFIQDDDSGEELKGHGAAPPIPSPPPSPPPSPAPLEPSSRVGRGEALFGGPVGASELEPFSLSSFPDLMGELISDEAPSIPAPTPQLSPALSTITDFSPEWSYPEGGVKVLITGPWTEAAEHYSCVFDHIAVPASLVQPGVLRCYCPAHEVGLVSLQVAGREGPLSASVLFEYRARRFLSLPSTQLDWLSLDDNQFRMSILERLEQMEKRMAEIAAAGQVPCQGPDAPPVQDEGQGPGFEARVVVLVESMIPRSTWKGPERLAHGSPFRGMSLLHLAAAQGYARLIETLSQWRSVETGSLDLEQEVDPLNVDHFSCTPLMWACALGHLEAAVLLFRWNRQALSIPDSLGRLPLSVAHSRGHVRLARCLEELQRQEPSVEPPFALSPPSSSPDTGLSSVSSPSELSDGTFSVTSAYSSAPDGSPPPAPLPASEMTMEDMAPGQLSSGVPEAPLLLMDYEATNSKGPLSSLPALPPASDDGAAPEDADSPQAVDVIPVDMISLAKQIIEATPERIKREDFVGLPEAGASMRERTGAVGLSETMSWLASYLENVDHFPSSTPPSELPFERGRLGLSLTAPSWAEFLSCIPPVGKIGKLIFALLTLSDQEQRELYEAARVIQTAFRKYKGRRLKEQQEVAAAVIQRCYRKYKQLTWIALKFALYKKMTQAAILIQSKFRSYYEQKRFQQSRRAAVLIQQHYRSYRRRPGPPHRTSATLPARNKGSFLTKKQDQAARKIMRFLRRCRHRMRELKQNQELEGLPQPGLAT

SEQ ID NO: 3438 - protein, 710 aa, Homo sapiens
FGRLLWGTAFKSWKMKAPIPHLILLYATFTQSLKVVTKRGSADGCTDWSIDIKKYQVLVGEPVRIKCALFYGYIRTNYSLAQSAGLSLMWYKSSGPGDFEEPIAFDGSRMSKEEDSIWFRPTLLQDSGLYACVIRNSTYCMKVSISLTVGENDTGLCYNSKMKYFEKAELSKSKEISCRDIEDFLLPTREPEILWYKECRTKTWRPSIVFKRDTLLIREVREDDIGNYTCELKYGGFVVRRTTELTVTAPLTDKPPKLLYPMESKLTIQETQLGDSANLTCRAFFGYSGDVSPLIYWMKGEKFIEDLDENRVWESDIKILKEHLGEQEVSISLIVDSVEEGDLGNYSCYVENGNGRRHASVLLHKRELMYTVELAGGLGAILLLLVCLVTIYKCYKIEIMLFYRNHFGAEELDGDNKDYDAYLSYTKVDPDQWNQETGEEERFALEILPDMLEKHYGYKLFIPDRDLIPTGTYIEDVARCVDQSKRLIIVMTPNYVVRRGWSIFELETRLRNMLVTGEIKVILIECSELRGIMNYQEVEALKHTIKLLTVIKWHGPKCNKLNSKFWKRLQYEMPFKRIEPITHEQALDVSEQGPFGELQTVSAISMAAATSTALATAHPDLRSTFHNTYHSQMRQKHYYRSYEYDVPPTGTLPLTSIGNQHTYCNIPMTLINGQRPQTKSSREQNPDEAHTNSAILPLLPRETSISSVIW

SEQ ID NO: 3439 - protein, 594 aa, Homo sapiens
GPGNSSILIGGGHLFLIRSCLNLLLLNSKENTEHTMAKKVAVIGAGVSGLSSIKCCVDEDLEPTCFERSDDIGGLWKFTERGSSLSVMIWPLALSLLRHGGFCYSDFPFHEDYPNFMNHEKFWDYLQEFAEHFDLLKYIQFKTTVCGITKRPDFSETGQWDVVTETEGKQNRAVFDAVMVCTGHFLNPHLPLEAFPGIHKFKGQILHSQEYKIPEGFQGKRVLVIGLGNTGGDIAVELSRTAAQVLLSTRTGTWVLGRSSDWGYPYNMMVTRRCCSFIAQVLPSRFLNWIQERKLNKRFNHEDYGLSITKGKKAKFIVNDELPNCILCGAITMKTSVIEFTETSAVFEDGTVEENIDVVIFTTGYTFSFPFFEEPLKSLCTKKIFLYKQVFPLNLERATLAIIGLIGLKGSILSGTELQARWVTRVFKGLCKRPASQKLMMEATEKEQLIKRGVFKDTSKDKFDYIAYMDDIAACIGTKPSIPLLFLKDPRLAWEVFFGPCTPYQYRLMGPGKWDGARNAILTQWDRTLKPLKTRIVPDSSKAWPSMSHYLKAWGAPVLLASLLLICKSSLFLKLVRDKLQDRMSPYLVSLWRG

SEQ ID NO: 3440 - protein, 1177 aa, Homo sapiens
IMPCGSSRLLRGCWTHPNEPVSDLSYFDCIESVMENSKVLGESMAGISQNAKTGDLPAFGECVGIASKALCGLTEAAAQAAYLVGIFDPNSQAGHQGLVDPIQFARANQAIQMACQNLVDPGSSPSQVLSAATIVAKHTSALCNACRIASSKTANPVAKRHFVQSAKEVANSTANLVKTIKALDGDFSEDNRNKCRIATAPLIEAVENLTAFASNPEFVSIPAQISSEGSQAQEPILVSAKPMLESSSYLIRTARSLAINPKDPPTWSVLAGHSHTVSDSIKSLITSIRDKAPGQRECDYSIDGINRCIRDIEQASLAAVSQSLATRDDISVEALQEQLTSVVQEIGHLIDPIATAARGEAAQLGHKGTQLASYFEPLILAAVGVASKILDHQQQMTVLDQTKTLAESALQMLYAAKEGGGNPKAQHTHDAITEAAQLMKEAVDDIMVTLNEAASEVGLVGGMVDAIAEAMSKLDEGTPPEPKGTFVDYQTTVVKYSKAIAVTAQEMMTKSVTNPEELGGLASQMTSDYGHLAFQGQMAAATAEPEEIGFQIRTRVQDLGHGCIFLVQKAGALQVCPTDSYTKRELIECARAVTEKVSLVLSALQAGNKGTQACITAATAVSGIIADLDTTIMFATAGTLNAENSETFADHRENILKTAKALVEDTKLLVSGAASTPDKLAQAAQSSAATITQLAEVVKLGAASLGSDDPETQVVLINAIKDVAKALSDLISATKGAASKPVDDPSMYQLKGAAKVMVTNVTSLLKTVKAVEDEATRGTRALEATIECIKQELTVFQSKDVPEKTSSPEESIRMTKGITMATAKAVAAGNSCRQEDVIATANLSRKAVSDMLTACKQASFHPDVSDEVRTRALRFGTECTLGYLDLLEHVLVILQKPTPELKQQLAAFSKRVAGAVTELIQAAEAMKGTEWVDPEDPTVIAETELLGAAASIEAAAKKLEQLKPRAKPKQADETLDFEEQILEAAKSIAAATSALVKSASAAQRELVAQGKVGSIPANAADDGQWSQGLISAARMVAAATSSLCEAANASVQGHASEEKLISSAKQVAASTAQLLVACKVKADQDSEAMRRLQAAGNAVKRASDNLVRAAQKAAFGKADDDDVVVKTKFVGGIAQIIAAQEEMLKKERELEEARKKLAQIRQQQYKFLPTELREDEG

SEQ ID NO: 3441 - protein, 525 aa, Homo sapiens
NSARGGVGVRGARAMATVQEKAAALNLSALHSPAHRPPGFSVAQKPFGATYVWSSIINTLQTQVEVKKRRHRLKRHNDCFVGSEAVDVIFSHLIQNKYFGDVDIPRAKVVRVCQALMDYKVFEAVPTKVFGKDKKPTFEDSSCSLYRFTTIPNQDSQLGKENKLYSPARYADALFKSSDIRSASLEDLWENLSLKPANSPHVNISTTLSPQVINEVWQEETIGRLLQLVDLPLLDSLLKQQEAVPKIPQPKRQSTMVNSSNYLDRGILKAYSDSQEDEWLSAAIDCLEYLPDQMVVEISRSFPEQPDRTDLVKELLFDAIGRYYSSREPLLNHLSDVHNGIAELLVNGKTEIALEATQLLLKLLDFQNREEFRRLLYFMAVAANPSEFKLQKESDNRMVVKRIFSKAIVDNKNLSKGKTDLLVLFLMDHQKDVFKIPGTLHKIVSVKLMAIQNGRDPNRDAGYIYCQRIDQRDYSNITEKTTIDELLYLLKTLDEDSKLSAKEKKKLLGQFYKCHPDIFIEHFGD

SEQ ID NO: 3442 - protein, 221 aa, Homo sapiens
SPASGHCRLNGAAVAMFGCLVAGRLVQTAAQQVAEDKFVFDLPDYESINHVVVFMLGTIPFPEGMGGSVYFSYPDSNGMPVWQLLGFVTNGKPSAIFKISGLKSGEGSQHPFGAMNIVRTPSVAQIGISVELLDSMAQQTPVGNAAVSSVDSFTQFTQKMLDNFYNFASSFAVSQVPDDTQRPSEMFIPANVVLKWYENFQRRTSTEPSLLENIIWIKINF

SEQ ID NO: 3443 - protein, 456 aa, Homo sapiens
SWHVRRRWLEATMAGGMKVAVSPAVGPGPWGSGVGGGGTVRLLLILSGCLVYGTAETDVNVVMLQESQVCEKRASQQFCYTNVLIPQWHDIWTRIQIRVNSSRLVRVTQVENEEKLKELEQFSIWNFFSSFLKEKLNDTYVNVGLYSTKTCLKVEIIEKDTKYSVIVIRRFDPKLFLVFLLGLMLFFCGDLLSRSQIFYYSTGMTVGIVASLLIIIFILSKFMPKKSPIYVILVGGWSFSLYLIQLVFKNLQEIWRCYWQYLLSYVLTVGFMSFAVCYKYGPLENERSINLLTWTLQLMGLCFMYSGIQIPHIALAIIIIALCTKNLEHPIQWLYITCRKVCKGAEKPVPPRLLTEEEYRIQGEVETRKALEELREFCNSPDCSAWKTVSRIQSPKRFADFVEGSSHLTPNEVSVHEQEYGLGSIIAQDEIYEEASSEEEDSYSRCPAITQNNFLT

SEQ ID NO: 3444 - protein, 383 aa, Homo sapiens
KGLERTCCAMEESDSEKTTEKENLGPRMDPPLGEPGGSLGWVLPNTAMKKKVLLMGKSGSGKTSMRSIIFANYIARDTRRLGATILDRIHSLQINSSLSTYSLVDSVGNTKTFDVEHSHVRFLGNLVLNLWDCGGQDTFMENYFTSQRDNIFRNVEVLIYVFDVESRELEKDMHYYQSCLEAILQNSPDAKIFCLVHKMDLVQEDQRDLIFKEREEDLRRLSRPLECSCFRTSIWDETLYKAWSSIVYQLIPNVQQLEMNLRNFAEIIEADEVLLFERATFLVISHYQCKEQRDAHRFEKISNIIKQFKLSCSKLAASFQSMEVRNSNFAAFIDIFTSNTYVMVVMSDPSIPSAATLINIRNARKHFEKLERVDGPKQCLLMR

SEQ ID NO: 3445 - protein, 383 aa, Homo sapiens; identical to SEQ ID NO: 3444

SEQ ID NO: 3446 - protein, 383 aa, Homo sapiens; identical to SEQ ID NO: 3444

SEQ ID NO: 3447 - protein, 976 aa, Homo sapiens
VLLGPLWDKLSTADHPVIVTMASKRKSTTPCMIPVKTVVLQDASMEAQPAETLPEGPQQDLPPEASAASSEAAQNPSSTDGSTLANGHRSTLDGYLYSCKYCDFRSHDMTQFVGHMNSEHTDFNKDPTFVCSGCSFLAKTPEGLSLHNATCHSGEASFVWNVAKPDNHVVVEQSIPESTSTPDLAGEPSAEGADGQAEIIITKTPIMKIMKGKAEAKKIHTLKENVPSQPVGEALPKLSTGEMEVREGDHSFINGAVPVRQASASSAKNPHAANGPLIGTVPVLPAGIAQFLSLQQQPPVHAQHHVHQPLPTAKALPKVMIPLSSIPTYSAAMDSNSFLKNSFHKFPYPTKAELCYLTVVTKYPEEQLKIWFTAQRLKQGISWSPEEIEDARKKMFNTVIQSVPQPTITVLNTPLVASAGNVQHLIQAALPGHVVGQPEGTGGGLLVTQPLMANGLQATSSPLPLTVTSVPKQPGVAPINTVCSNTTSAVKVVNAAQSLLTACPSITSQAFLDASIYKNKKSHEQLSALKGSFCRNQFPGQSEVEHLTKVTGLSTREVRKWFSDRRYHCRNLKGSRAMIPGDHRSIIIDSVPEVSFSPSSKVPEVTCIPTTATLATHPSAKRQSWHQTPDFTPTKYKERAPEQLRALESSFAQNPLPLDEELDRLRSETKMTRREIDSWFSERRKKVNAEETKKAEENASQEEEEAAEDEGGEEDLASELRVSGENGSLEMPSSHILAERKVSPIKINLKNLRVTEANGRNEIPGLGACDPEDDESNKLAEQLPGKVSCKKTAQQRHLLRQLFVQTQWPSNQDYDSIMAQTGLPRPEVVRWFGDSRYALKNGQLKWYEDYKRGNFPPGLLVIAPGNRELLQDYYMTHKMLYEEDLQNLCDKTQMSSQQVKQWFAEKMGEETRAVADTGSEDQGPGTGELTAVHKGMGDTYSEVSENSESWEPRVPEASSEPFDTSSPQAGRQLETD

SEQ ID NO: 3448 - protein, 439 aa, Homo sapiens
FVARAEKGFRTREAHLLQVAGVGTGLQNGASLSGLASGVMAQRAFPNPYADYNKSLAEGYFDAAGRLTPEFSQRLTNKIRELLQQMERGLKSADPRDGTGYTGWAGIAVLYLHLYDVFGDPAYLQLAHGYVKQSLNCLTKRSITFLCGDAGPLAVAAVLYHKMNNEKQAEDCITRLIHLNKIDPHAPNEMLYGRIGYIYALLFVNKNFGVEKIPQSHIQQICETILTSGENLARKRNFTAKSPLMYEWYQEYYVGAAHGLAGIYYYLMQPSLQVSQGKLHSLVKPSVDYVCQLKFPSGNYPPCIGDNRDLLVHWCHGAPGVIYMLIQAYKVFREREKYLCDAYQCADVIWQYGLLKKGYGLCYGSAGNAYAFLTLYNLTQDMKYLYRACKFAEWCLEYGEHGCRTPDTPFSLFEGMAGTIYFLADLLFPTKARFPAFEL

SEQ ID NO: 3449 - protein, 794 aa, Homo sapiens
SRHVTGAARSPSRAGPSDPPAMGDEDDDESCAVELRITEANLTGHEEKVSVENFELLKVLGTGAYGKVFLVRKAGGHDAGKLYAMKVLRKAALVQRAKTQEHTRTERSVLELVRQAPFLVTLHYAFQTDAKLHLILDYVSGGEMFTHLYQRQYFKEAEVRVYGGEIVLALEHLHKLGIIYRDLKLENVLLDSEGHIVLTDFGLSKEFLTEEKERTFSFCGTIEYMAPEIIRSKTGHGKAVDWWSLGILLFELLTGASPFTLEGERNTQAEVSRRILKCSPPFPPRIGPVAQDLLQRLLCKDPKKRLGAGPQGAQEVRNHPFFQGLDWVALAARKIPAPFRPQIRSELDVGNFAEEFTRLEPVYSPPGQPPPGDPRIFQGYSFVAPSILFDHNNAVMTDGLEAPGAGDRPGRAAVARSAMMQDSPFFQQYELDLREPALGQGSFSVCRRCRQRQSGQEFAVKILSRRLEANTQREVAALRLCQSHPNVVNLHEVHHDQLHTYLVLELLRGGELLEHIRKKRHFSESEASQILRSLVSAVSFMHEEAGVVHRDLKPENILYADDTPGAPVKIIDFGFSPRLRPQSPGVPMQTPSFTLQYAAPELLAQQGYDESCDLWSLGVILYMMLSGQAPFQGASGQGGQSQAAEIMCKIREGRFSLDGEAWQGVSEEAKELVRGLLTVDPAKRLKLEGLRGSSWLQDGSARSSPPLRTPDVLESSGPAVRSGLNATFMAFNRGKREGFFLKSVENAPLAKRRKQKLRSATASRRGSPAPANPGRAPVASKGAPRRANGPLPPS

SEQ ID NO: 3450 - protein, 500 aa, Homo sapiens
KGTEMNKSRWQSRRRHGRRSHQQNPWFRLRDSEDRSDSRAAQPAHDSGHGDDESPSTSSGTAGTSSVPELPGFYFDPEKKRYFRLLPGHNNCNPLTKESIRQKEMESKRLRLLQEEDRRKKIARMGFNASSMLRKSQLGFLNVTNYCHLAHELRLSCMERKKVQIRSMDPSALASDRFNLILADTNSDRLFTVNDVTVGGSKYGIINLQSLKTPTLKVFMHENLYFTNRKVNSVCWASLNHLDSHILLCLMGLAETPGCATLLPASLFVNSHPAGIDRPGMLCSFRIPGAWSCAWSLNIQANNCFSTGLSRRVLLTNVVTGHRQSFGTNSDVLAQQFALMAPLLFNGCRSGEIFAIDLRCGNQGKGWKATRLFHDSAVTSVRILQDEQYLMASDMAGKIKLWDLRTTKCVRQYEGHVNEYAYLPLHVHEEEGILVAVGQDCYTRIWSLHDARLLRTIPSPYPASKADIPSVAFSSRLGGSRGAPGLLMAVGQDLYCYSYS

SEQ ID NO: 3451 - protein, 2002 aa, Homo sapiens
LLSAMLSHGAGLALWITLSLLQTGLAEPERCNFTLAESKASSHSVSIQWRILGSPCNFSLIYSSDTLGAALCPTFRIDNTTYGCNLQDLQAGTIYNFKIISLDEERTVVLQTDPLPPARFGVSKEKTTSTGLHVWWTPSSGKVTSYEVQLFDENNQKIQGVQIQESTSWNEYTFFNLTAGSKYNIAITAVSGGKRSFSVYTNGSTVPSPVKDIGISTKANSLLISWSHGSGNVERYRLMLMDKGILVHGGVVDKHATSYAFHGLSPGYLYNLTVMTEAAGLQNYRWKLVRTAPMEVSNLKVTNDGSLTSLKVKWQRPPGNVDSYNITLSHKGTIKESRVLAPWITETHFKELVPGRLYQVTCSAVSLGELSAQKMAVGRTFPDKVANLEANNNGRMRSLVVSWSPPAGDWEQYRILLFNDSVVLLNITVGKEETQYVMDGTGLVPGRQYEVEVIVESGNLKNSERCQGRTVPLAVLQLRVKHANETSLSIMWQTPVAEWEKYIISLADRDLLLIHKSLSKDAKEFTFTDLVPGRKYMATVTSISGDLKNSSSVKGRTVPAQVTDLHVANQGMTSSLFTNWTQAQGDVEFYQVLLIHENVVIKNESISSETSRYSFHSLKSGSLYSVVVTTVSGGISSRQVVVEGRTVPSSVSGVTVNNSGRNDYLSVSWLLAPGDVDNYEVTLSHDGKVVQSLVIAKSVRECSFSSLTPGRLYTVTITTRSGKYENHSFSQERTVPDKVQGVSVSNSARSDYLRVSWVHATGDFDHYEVTIKNKNNFIQTKSIPKSENECVFVQLVPGRLYSVTVTTKSGQYEANEQGNGRTIPEPVKDLTLRNRSTEDLHVTWSGANGDVDQYEIQLLFNDMKVFPPFHLVNTATEYRFTSLTPGRQYKILVLTISGDVQQSAFIEGFTVPSAVKNIHISPNGATDSLTVNWTPGGGDVDSYTVSAFRHSQKVDSQTIPKHVFEHTFHRLEAGEQYQIMIASVSGSLKNQINVVGRTVPASVQGVIADNAYSSYSLIVSWQKAAGVAERYDILLLTENGILLRNTSEPATTKQHKFEDLTPGKKYKIQILTVSGGLFSKEAQTEGRTVPAAVTDLRITENSTRHLSFRWTASEGELSWYNIFLYNPDGNLQERAQVDPLVQSFSFQNLLQGRMYKMVIVTHSGELSNESFIFGRTVPASVSHLRGSNRNTTDSLWFNWSPASGDFDFYELILYNPNGTKKENWKDKDLTEWRFQGLVPGRKYVLWVVTHSGDLSNKVTAESRTAPSPPSLMSFADIANTSLAITWKGPPDWTDYNDFELQWLPRDALTVFNPYNNRKSEGRIVYGLRPGRSYQFNVKTVSGDSWKTYSKPIFGSVRTKPDKIQNLHCRPQNSTAIACSWIPPDSDFDGYSIECRKMDTQEVEFSRKLEKEKSLLNIMMLVPHKRYLVSIKVQSAGMTSEVVEDSTITMIDRPPPPPPHIRVNEKDVLISKSSINFTVNCSWFSDTNGAVKYFTVVVREADGSDELKPEQQHPLPSYLEYRHNASIRVYQTNYFASKCAENPNSNSKSFNIKLGAEMESLGGKCDPTQQKFCDGPLKPHTAYRISIRAFTQLFDEDLKEFTKPLYSDTFFSLPITTESEPLFGAIEGVSAGLFLIGMLVAVVALLICRQKVSHGRERPSARLSIRRDRPLSVHLNLGQKGNRKTSCPIKINQFEGHFMKLQADSNYLLSKEYEELKDVGRNQSCDIALLPENRGKNRYNNILPYDATRVKLSNVDDDPCSDYINASYIPGNNFRREYIVTQGPLPGTKDDFWKMVWEQNVHNIVMVTQCVEKGRVKCDHYWPADQDSLYYGDLILQMLSESVLPEWTIREFKICGEEQLDAHRLIRHFHYTVWPDHGVPETTQSLIQFVRTVRDYINRSPGAGPTVVHCSAGVGRTGTFIALDRILQQLDSKDSVDIYGAVHDLRLHRVHMVQTECQYVYLHQCVRDVLRARKLRSEQENPLFPIYENVNPEYHRDPVYSRH

SEQ ID NO: 3452 - protein, 337 aa, Homo sapiens
FFRSSSDNGSPIRQYEHSTPAHQGPVMGLEGKSARNSQLRIVLVGKTGAGKSATGNSILGRKVFHSGTAAKSITKKCEKRSSSWKETELVVVDTPGIFDTEVPNAETSKEIIRCILLTSPGPHALLLVVPLGRYTEEEHKATEKILKMFGERARSFMILIFTRKDDLGDTNLHDYLREAPEDIQDLMDIFGDRYCALNNKATGAEQEAQRAQLLGLIQRVVRENKEGCYTNRMYQRAEEEIQKQTQAMQELHRVELEREKARIREEYEEKIRKLEDKVEQEKRKKQMEKKLAEQEAHYAVRQQRARTEVESKDGILELIMTALQIASFILLRLFAED

SEQ ID NO: 3453 - protein, 719 aa, Homo sapiens
GPITFLKKKAKMKDMPLRIHVLLGLAITTLVQAVDKKVDCPRLCTCEIRPWFTPRSIYMEASTVDCNDLGLLTFPARLPANTQILLLQTNNIAKIEYSTDFPVNLTGLDLSQNNLSSVTNINGKKMPQLLSVYLEENKLTELPEKCLSELSNLQELYINHNLLSTISPGAFIGLHNLLRLHLNSNRLQMINSKWFDALPNLEILMIGENPIIRIKDMNFKPLINLRSLVIAGINLTEIPDNALVGLENLESISFYDNRLIKVPHVALQKVVNLKFLDLNKNPINRIRRGDFSNMLHLKELGINNMPELISIDSLAVDNLPDLRKIEATNNPRLSYIHPNAFFRLPKLESLMLNSNALSALYHGTIESLPNLKEISIHSNPIRCDCVIRWMNMNKTNIRFMEPDSLFCVDPPEFQGQNVRQVHFRDMMEICLPLIAPESFPSNLNVEAGSYVSFHCRATAEPQPEIYWITPSGQKLLPNTLTDKFYVHSEGTLDINGVTPKEGGLYTCIATNLVGADLKSVMIKVDGSFPQDNNGSLNIKIRDIQANSVLVSWKASSKILKSSVKWTAFVKTENSHAAQSARIPSDVKVYNLTHLNPSTEYKICIDIPTIYQKNRKKCVNVTTKGLHPDQKEYEKNNTTTLMACLGGLLGIIGVICLISCLSPEMNCDGGHSYVRNYLQKPTFALGELYPPLINLWEAGKEKSTSLKVKATVIGLPTNMS

SEQ ID NO: 3454 - protein, 533 aa, Homo sapiens
ERYLFATYVAPSATLDIGLQQEKKKEIYMKIQPPFEDLFDTAEEYILLLLLEPWTKMVKSDQIAYKKVELVEETRQLDSTYFRKLQALHKETFSKKAEDTTCEIGTGILSLSNVSKRTEYWDNVPAEYKHFKFSDLLNNKLEFEHFRQFLETHSSSMDLMCWTDIEQFRRITYRDRNQRKAKSIYIKNKYLNKKYFFGPNSPASLYQQNQVMHLSGGWGKILHEQLDAPVLVEIQKHVQNRLENVWLPLFLASEQFAARQKIKVQMKDIAEELLLQKAEKKIGVWKPVESKWISSSCKIIAFRKALLNPVTSRQFQRFVALKGDLLENGLLFWQEVQKYKDLCHSHCDESVIQKKITTIINCFINSSIPPALQIDIPVEQAQKIIEHRKELGPYVFREAQMTFLGVMFKFWPQFCEFRKNLTDENIMSVLERRQEYNKQKKKLAVLQNDEKSGKDGIKQYANTSVPAIKTALLSDSFLGLQPYGRQPTWCYSKYIEALEQERILLKIQEELEKSCLQACNLSQILRLALQLCL

SEQ ID NO: 3455 - protein, 1033 aa, Homo sapiens
APTAQAMMSFGGADALLGAPFAPLHGGGSLHYALARKGGAGGTRSAAGSSSGFHSWTRTSVSSVSASPSRFRGAGAASSTDSLDTLSNGPEGCMVAVATSRSEKEQLQALNDRFAGYIDKVRQLEAHNRSLEGEAAALRQQQAGRSAMGELYEREVREMRGAVLRLGAARGQLRLEQEHLLEDIAHVRQRLDDEARQREEAEAAARALARFAQEAEAARVDLQKKAQALQEECGYLRRHHQEEVGELLGQIQGSGAAQAQMQAETRDALKCDVTSALREIRAQLEGHAVQSTLQSEEWFRVRLDRLSEAAKVNTDAMRSAQEEITEYRRQLQARTTELEALKSTKDSLERQRSELEDRHQADIASYQEAIQQLDAELRNTKWEMAAQLREYQDLLNVKMALDIEIAAYRKLLEGEECRIGFGPIPFSLPEGLPKIPSVSTHIKVKSEEKIKVVEKSEKETVIVEEQTEETQVTEEVTEEEDKEAKEEEGKEEEGGEEEEAEGGEEETKSPPAEEAASPEKEAKSPVKEEAKSPAEAKSPEKEEAKSPAEVKSPEKAKSPAKEEAKSPPEAKSPEKDGKQNFQAEVKSPEKAKSPAKEEAKSPAEAKSPEKAKSPVKEEAKSPAEAKSPVKEEAKSPAEVKSPEKAKSPTKEEAKSPEKAKSPEKAKSPEKEEAKSPEKAKSPVKAEAKSPEKAKSPVKAEAKSPEKAKSPVKEEAKSPEKAKSPVKEEAKSPEKAKSPVKEEAKTPEKAKSPVKEEAKSPEKAKSPEKAKTLDVKSPEAKTPAKEEARSPADKFPEKAKSPVKEEVKSPEKAKSPLKEDAKAPEKEIPKKEEVKSPVKEEEKPQEVKVKEPPKKAEEEKAPATPKTEEKKDSKKEEAPKKEAPKPKVEEKKEPAVEKPKESKVEAKKEEAEDKKKVPTPEKEAPAKVEVKEDAKPKEKTEVAKKEPDDAKAKEPSKPAEKKEAAPEKKDTKEEKAKKPEEKPKTEAKAKEDDKTLSKEPSKPKAEKAEKSSSTDQKDSKPPEKATEDKAAKGK

SEQ ID NO: 3456 - protein, 401 aa, Homo sapiens
YLSFIPGHASKSAPMNGHCFAENGPSQKSSLPPLLIPPSENLGPHEEDQVVCGFKKLTVNGVCASTPPLTPIKNSPSLFPCAPLCERGSRPLPPLPISEALSLDDTDCEVEFLTSSDTDFLLEDSTLSDFKYDVPGRRSFRGCGQINYAYFDTPAVSAADLSYVSDQNGGVPDPNPPPPQTHRRLRRSHSGPAGSFNKPAIRISNCCIHRASPNSDEDKPEVPPRVPIPPRPVKPDYRRWSAEVTSSTYSDEDRPPKVPPREPLSPSNSRTPSPKSLPSYLNGVMPPTQSFAPDPKYVSSKALQRQNSEGSASKVPCILPIIENGKKVSSTHYYLLPERPPYLDKYEKFFREAKKKNGGAQIQPLPADCGISSATEKPDSKTKMDLGGHVKRKHLSYVGTP

SEQ ID NO: 3457 - protein, 1621 aa, Homo sapiens
FILSSSSSASSEHFHHHYSFGNWWPGSFKGHRMSLPFYQRCHQHYDLSYRNKDVRSTVSHYQREKKRSAVYTQGSTAYSSRSSAAHRRESEAFRRASASSSQQQASQHALSSEVSRKAASAYDYGSSHGLTDSSLLLDDYSSKLSPKPKRAKHSLLSGEEKENLPSDYMVPIFSGRQKHVSGITDTEEERIKEAAAYIAQRNLLASEEGITTPKQSTASKQTTASKQSTASKQSTASKQSTASRQSTASRQSVVSKQATSALQQEETSEKKSRKVVIRGKAERLSLRKTLEETETYHAKLNEDHLLHAPEFIIKPRSHTVWEKENVKLHCSIAGWPEPRVTWYKNQVPINVHANPGKYIIESRYGMHTLEINACDFEDTAQYRASAMNVKGELSAYASVVVKRYKGEFDETRFHAGASTMPLSFGVTPYGYASRFEIHFDDKFDVSFGREGETMSLGCRVVITPEIKHFQPEIQWYRNGVPLSPSKWVQTLWSGERATLTFSHLNKEDEGLYTIRVRMGEYYEQYSAYVFVRDADAEIEGAPAAPLDVKCLEANKDYIIISWKQPAVDGGSPILGYFIDKCEVGTDSWSQCNDTPVKFARFPVTGLIEGRSYIFRVRAVNKMGIGFPSRVSEPVAALDPAEKARLKSPPLSTLDWTVIVTEEEPSEGIVPGPPTDLSVTEATRSYVVLSWKPPGQRGHEGIMYFVEKCEAGTENWQRVNTELPVKSPRFALFDLAEGKSYCFRVRCSNSAGVGEPSEATEVTVVGDKLDIPKAPGKIIPSRNTDTSVVVSWEESKDAKELVGYYIEANVAGSGKWEPCNNNPVKTHRFTCHGLVTGQSYIFRVRAVNAAGLSEYSQDSEAIEVKAAIAPPSPPCDITCLESFRDSMVLGWKQPDKIGGAEITGYYVNYREVIDGVPGKWREANVKAVSEEAYKISNLKENMVYQFQVAAMNMAGLGAPSAVSECFKCEEWTIAVPGPPHSLKCSEVRKDSLVLQWKPPVHSGRTPVTGYFVDLKEAKAKEDQWRGLNEAAIKNVYLKVRGLKEGVSYVFRVRAINQAGVGKPSDLAGPVVAETRPGTKEVVVNVDDDGVISLNFECDKMTPKSEFSWSKDYVSTEDSPRLEVESKGNKTKMTFKDLGMDDLGIYSCDVTDTDGIASSYLIDEEELKRLLALSHEHKFPTVPVKSELAVEILEKGQVRFWMQAEKLSGNAKVNYIFNEKGIFEGPKYKMHIDRNTGIIEMFMEKLQDEDEGTYTFQLQDGKATNHSTVVLVGDVFKKLQKEAEFQRQEWIRKQGPHFVEYLSWEVTGECNVLLKCKVANIKKETHIVWYKDEREISVDEKHDFKDGICTLLITEFSKKDAGIYEVILKDDRGKDKSRLKLVDEAFKELMMEVCKKIALSATDLKIQSTAEGIQLYSFVTYYVEDLKVNWSHNGSAIRYSDRVKTGVTGEQIWLQINEPTPNDKGKYVMELFDGKTGHQKTVDLSGQAYDEAYAEFQRLKQAAIAEKNRARVLGGLPDVVTIQEGKALNLTCNVWGDPPPEVSWLKNEKALASDDHCNLKFEAGRTAYFTINGVSTADSGKYGLVVKNKYGSETSDFTVSVFIPEEEARMAALESLKGGKKAK

SEQ ID NO: 3458 - protein, 1045 aa, Homo sapiens
LSRSSSDNNTNTLGRNVMSTATSPLMGAQSFPNLTTPGTTSTVTMSTSSVTSSSNVATATTVLSVGQSLSNTLTTSLTSTSSESDTGQEAEYSLYDFLDSCRASTLLAELDDDEDLPEPDEEDDENEDDNQEDQEYEEVMILRRPSLQRRAGSRSDVTHHAVTSQLPQVPAGAGSRPIGEQEEEEYETKGGRRRTWDDDYVLKRQFSALVPAFDPRPGRTNVQQTTDLEIPPPGTPHSELLEEVECTPSPRLALTLKVTGLGTTREVELPLTNFRSTIFYYVQKLLQLSCNGNVKSDKLRRIWEPTYTIMYREMKDSDKEKENGKMGCWSIEHVEQYLGTDELPKNDLITYLQKNADAAFLRHWKLTGTNKSIRKNRNCSQLIAAYWDLGEHGTKSGLNQGAISTLQSSDILNLTKEQPQAKAGNGQNSCGVEDVLQLLRILYIVASDPYSRISQEDGDEQPQFTFPPDEFTSKKITTKILQQIEEPLALASGALPDWCEQLTSKCPFLIPFETRQLYFTCTAFGASRAIVWLQNRREATVERTRTTSSVRRDDPGEFRVGRLKHERVKVPRGESLMEWAENVMQIHADRKSVLEVEFLGEEGTGLGPTLEFYALVAAEFQRTDLGAWLCDDNFPDDESRHVDLGGGLKPPGYYVQRSCGLFTAPFPQDSDELERITKLFHFLGIFLAKCIQDNRLVDLPISKPFFKLMCMGDIKSNMSKLIYESRGDRDLHCTESQSEASTEEGHDSLSVGSFEEDSKSEFILDPPKPKPPAWFNGILTWEDFELVNPHRARFLKEIKDLAIKRRQILSNKGLSEDEKNTKLQELVLKNPSGSGPPLSIEDLGLNFQFCPSSRIYGFTAVDLKPSGEDEMITMDNAEEYVDLMFDFCMHTGIQKQMEAFRDGFNKVFPMEKLSSFSHEEVQMILCGNQSPSWAAEDIINYTEPKLGYTRDSPGFLRFVRVLCGMSSDERKAFLQFTTGCSTLPPGGLANLHPRLTVVRKVDATDASYPSVNTCVHYLKLPEYSSEEIMRERLLAATMEKGFHLN

SEQ ID NO: 3459 - protein, 171 aa, Homo sapiens
SCGPRGLASLGLGFSGRCDDQNKGRSDGPEAQAEACSGERTYQELLVNQNPIAQPLASRRLTRKLYKCIKKAVKQKQIRRGVKEVQKFVNKGEKGIMVLAGDTLPIEVYCHLPVMCEDRNLPYVYIPSKTDLGAAAGSKRPTCVIMVKPHEEYQEAYDECLEEVQSLPLPL

SEQ ID NO: 3460 - protein, 618 aa, Homo sapiens
QVTNMSDKSELKAELERKKQRLAQIREEKKRKEEERKKKETDQKKEAVAPVQEESDLEKKRREAEALLQSMGLTPESPIVPPPMSPSSKSVSTPSEAGSQDSGDGAVGSRRGPIKLGMAKITQVDFPPREIVTYTKETQTPVMAQPKEDEEEDDDVVAPKPPIEPEEEKTLKKDEENDSKAPPHELTEEEKQQILHSEEFLSFFDHSTRIVERALSEQINIFFDYSGRDFENDKEGEIQAGAKLSLNRQFFDERWSKASGWVSCLDWSSQYPELLVASYNNNEDAPHEPDGVALVWNMKYKKTTPEYVFHCQSAVMSATFAKFHPNLVVGGTYSGQIVLWDNRSNKRTPVQRTPLSAAAHTHPVYCVNVVGTQNAHNLISISTDGKICSWSLDMLSHPQDSMELVHKQSKAVAVTSMSFPVGDVNNFVVGSEEGSVYTACRHGSKAGISEMFEGHQGPITGIHCHAAVGAVDFSHLYVTSSFDWTVKLWTTKNNKPLYSFEDNAGYVYDVMWSPTHPALFACVDGMGRLDLWNLNNDTEVPTASISVEGNPALNRVRWTHSGREIAVGDSEGQIVIYDVGEQIAVPRNDEWARFGRTLAEINANRADAEEEAATRIPA

SEQ ID NO: 3461 - protein, 618 aa, Homo sapiens; identical to SEQ ID NO: 3460

SEQ ID NO: 3462 - protein, 879 aa, Homo sapiens
TAPEFSRSTHASAHASVARVLRNREIAQLKKEQRRQEFQIRALESQKRQQEMVLRRKTQEVSALRRLAKPMSERVAGRAGLKPPMLDSGAEVSASTTSSEAESGARSVSSIVRQWNRKINHFLGDHPAPTVNGTRPARKKFQKKGASQSFSKAARLKWQSLERRIIDIVMQRMTIVNLEADMERLIKKREELFLLQEALRRKRERLQAESPEEEKGLQELAEEIEVLAANIDYINDGITDCQATIVQLEETKEELDSTDTSVVISSCSLAEARLLLDNFLKASIDKGLQVAQKEAQIRLLEGRLRQTDMAGSSQNHLLLDALREKAEAHPELQALIYNVQQENGYASTDEEISEFSEGSFSQSFTMKGSTSHDDFKFKSEPKLSAQMKAVSAECLGPPLDISTKNITKSLASLVEIKEDGVGFSVRDPYYRDRVSRTVSLPTRGSTFPRQSRATETSPLTRRKSYDRGQPIRSTDVGFTPPSSPPTRPRNDRNVFSRLTSNQSQGSALDKSDDSDSSLSEVLRGIISPVGGAKGARTAPLQCVSMAEGHTKPILCLDATDELLFTGSKDRSCKMWNLVTGQEIAALKGHPNNVVSIKYCSHSGLVFSVSTSYIKVWDIRDSAKCIRTLTSSGQVISGDACAATSTRAITSAQGEHQINQIALSPSGTMLYAASGNAVRIWELSRFQPVGKLTGHIGPVMCLTVTQTASQHDLVVTGSKDHYVKMFELGECVTGTIGPTHNFEPPHYDGIECLAIQGDILFSGSRDNGIKKWDLDQQELIQQIPNAHKDWVCALAFIPGRPMLLSACRAGVIKVWNVDNFTPIGEIKGHDSPINAICTNAKHIFTASSGCRVKVWNYVPGLTPCLPRRVLAIKGRATTLP

SEQ ID NO: 3463 - protein, 980 aa, Homo sapiens
SGEPRPEPGNMATCIGEKIEDFKVGNLLGKGSFAGVYRAESIHTGLEVAIKMIDKKAMYKAGMVQRVQNEVKIHCQLKHPSILELYNYFEDSNYVYLVLEMCHNGEMNRYLKNRVKPFSENEARHFMHQIITGMLYLHSHGILHRDLTLSNLLLTRNMNIKIADFGLATQLKMPHEKHYTLCGTPNYISPEIATRSAHGLESDVWSLGCMFYTLLIGRPPFDTDTVKNTLNKVVLADYEMPTFLSIEAKDLIHQLLRRNPADRLSLSSVLDHPFMSRNSSTKSKDLGTVEDSIDSGHATISTAITASSSTSISGSLFDKRRLLIGQPLPNKMTVFPKNKSSTDFSSSGDGNSFYTQWGNQETSNSGRGRVIQDAEERPHSRYLRRAYSSDRSGTSNSQSQAKTYTMERCHSAEMLSVSKRSGGGENEERYSPTDNNANIFNFFKEKTSSSSGSFERPDNNQALSNHLCPGKTPFPFADPTPQTETVQQWFGNLQINAHLRKTTEYDSISPNRDFQGHPDLQKDTSKNAWTDTKVKKNSDASDNAHSVKQQNTMKYMTALHSKPEIIQQECVFGSDPLSEQSKTRGMEPPWGYQNRTLRSITSPLVAHRLKPIRQKTKKAVVSILDSEEVCVELVKEYASQEYVKEVLQISSDGNTITIYYPNGGRGFPLADRPPSPTDNISRYSFDNLPEKYWRKYQYASRFVQLVRSKSPKITYFTRYAKCILMENSPGADFEVWFYDGVKIHKTEDFIQVIEKTGKSYTLKSESEVNSLKEEIKMYMDHANEGHRICLALESIISEEERKTRSAPFFPIIIGRKPGSTSSPKALSPPPSVDSNYPTRDRASFNRMVMHSAASPTQAPILNPSMVTNEGLGLTTTASGTDISSNSLKDCLPKSAQLLKSVFVKNVGWATQLTSGAVWVQFNDGSQLVVQAGVSSISYTSPNGQTTRYGENEKLPDYIKQKLQCLSSILLMFSNPTPNFH

SEQ ID NO: 3464 - protein, 110 aa, Homo sapiens
AVRTVSGTSLGPRSHSRSPGRCHCFSAVTFSSPRLAASEAPDPMEEWDVPQMKKEVESLKYQLAFQREMASKTIPELLKWIEDGIPKDPFLNPDLMKNNPWVEKGKCTIL

SEQ ID NO: 3465 - protein, 1711 aa, Homo sapiens
VRKLDRERVGAWWRGAWARHPRQEAGEHAKRRKGHAETPRGRRKGRAGRSAAAVGELRPARRSLETSRAAAAMAKDSPSPLGASPKKPGCSSPAAAVLENQRRELEKLRAELEAERAGWRAERRRFAARERQLREEAERERRQLADRLRSKWEAQRSRELRQLQEEMQREREAEIRQLLRWKEAEQRQLQQLLHRERDGVVRQARELQRQLAEELVNRGHCSRPGASEVSAAQCRCRLQEVLAQLRWQTDGEQAARIRYLQAALEVERQLFLKYILAHFRGHPALSGSPDPQAVHSLEEPLPQTSSGSCHAPKPACQLGSLDSLSAEVGVRSRSLGLVSSACSSSPDGLLSTHASSLDCFAPACSRSLDSTRSLPKASKSEERPSSPDTSTPGSRRLSPPPSPLPPPPPPSAHRKLSNPRGGEGSESQPCEVLTPSPPGLGHHELIKLNWLLAKALWVLARRCYTLQEENKQLRRAGCPYQADEKVKRLKVKRAELTGLARRLADRARELQETNLRAVSAPIPGESCAGLELCQVFARQRARDLSEQASAPLAKDKQIEELRQECHLLQARVASGPCSDLHTGRGGPCTQWLNVRDLDRLQRESQREVLRLQRQLMLQQGNGGAWPEAGGQSATCEEVRRQMLALERELDQRRRECQELGAQAAPARRRGEEAETQLQAALLKNAWLAEENGRLQAKTDWVRKVEAENSEVRGHLGRACQERDASGLIAEQLLQQAARGQDRQQQLQRDPQKALCDLHPSWKEIQALQCRPGHPPEQPWETSQMPESQVKGSRRPKFHARAEDYAVSQPNRDIQEKREASLEESPVALGESASVPQVSETVPASQPLSKKTSSQSNSSSEGSMWATVPSSPTLDRDTASEVDDLEPDSVSLALEMGGSAAPAAPKLKIFMAQYNYNPFEGPNDHPEGELPLTAGDYIYIFGDMDEDGFYEGELEDGRRGLVPSNFVEQIPDSYIPGCLPAKSPDLGPSQLPAGQDEALEEDSLLSGKAQGVVDRGLCQMVRVGSKTEVATEILDTKTEACQLGLLQSMGKQGLSRPLLGTKGVLRMAPMQLHLQNVTATSANITWVYSSHRHPHVVYLDDREHALTPAGVSCYTFQGLCPGTHYRARVEVRLPRDLLQVYWGTMSSTVTFDTLLAGPPYPPLDVLVERHASPGVLVVSWLPVTIDSAGSSNGVQVTGYAVYADGLKVCEVADATAGSTLLEFSQLQVPLTWQKVSVRTMSLCGESLDSVPAQIPEDFFMCHRWPETPPFSYTCGDPSTYRVTFPVCPQKLSLAPPSAKASPHNPGSCGEPQAKFLEAFFEEPPRRQSPVSNLGSEGECPSSGAGSQAQELAEAWEGCRKDLLFQKSPQNHRPPSVSDQTGEKENCYQHMGTSKSPAPGFIHLRTECGPRKEPCQEKAALERVLRQKQDAQGFTPPQLGASQQYASDFHNVLKEEQEALCLDLWGTERREERREPEPHSRQGQALGVKRGCQLHEPSSALCPAPSAKVIKMPRGGPQQLGTGANTPARVFVALSDYNPLVMSANLKAAEEELVFQKRQLLRVWGSQDTHDFYLSECNRQVGNIPGRLVAEMEVGTEQTDRRWRSPAQGHLPSVAHLEDFQGLTIPQGSSLVLQGNSKRLPLWTPKIMIAALDYDPGDGQMGGQGKGRLALRAGDVVMVYGPMDDQGFYYGELGGHRGLVPANLRIKMSSQGH

SEQ ID NO: 3466 - protein, 370 aa, Homo sapiens
MSKPPDLLLRLLRGAPRQRVCTLFIIGFKFTFFVSIMIYWHVVGEPKEKGQLYNLPAEIPCPTLTPPTPPSHGPTPGNIFFLETSDRTNPNFLFMCSVESAARTHPESHVLVLMKGLPGGNASLPRHLGISLLSCFPNVQMLPLDLRELFRDTPLADWYAAVQGRWEPYLLPVLSDASRIALMWKFGGIYLDTDFIVLKNLRNLTNVLGTQSRYVLNGAFLAFERRHEFMALCMRDFVDHYNGWIWGHQGPQLLTRVFKKWCSIRSLAESRACRGVTTLPPEAFYPIPWQDWKKYFEDINPEELPRLLSATYAVHVWNKKSQGTRFEATSRALLAQLHARYCPTTHEDHENVLVKGPAGHLPNLLLMGHW

SEQ ID NO: 3467 - protein, 723 aa, Homo sapiens
MAKVILKQSKQCKNLLTCKVAQVCPVCGCLHCYFWWLSGLESRRPSSPLIDIKPIEFGVLSAKKEPIQPSVLRRTYNPDDYFRKFEPHLYSLDSNSDDVDSLTDEEILSKYQLGMLHFSTQYDLLHNHLTVRVIEARDLPPPISHDGSRQDMAHSNPYVKICLLPDQKNSKQTGVKRKTQKPVFEERYTFEIPFLEAQRRTLLLTVVDFDKFSRHCVIGKVSVPLCEVDLVKGGHWWKAHDSQFSAPGLPADQQFFADLFSGLVLNPQLLGRVWFASQPASLPVGSLCIDFPRLDIVLRGEYGNLLEAKQQRLVEGEMLFIPARAANLPVNNKPVMLLSLVFAPTWLGLSFYDSRTTSLLHPARQIQLPSLQRGEGEAMLSALTLFSRSPLEQNIIQPLVLSLLHLCGSVVNMPPGNSQPRGDFLYHSICTWVQDNYAQPLTRESVAQFFNITPNHLSKLFAQHGTMRFIEYVRWVRMAKARMILQKYHLSIHEVAQRCGFPDSDYFCRVFRRQFGMDYVDILQIHRWDYNTPIEETLEALNDVVKAGKARYIGASSMHASQFAQALELQKQHGWAQFVSMQDHYNLIYREEEREMLPLCYQEGVAVIPWSPLARGRLTRPWGETTARLVSDEVGKNLYKESDENDAQIAERLTGVSEELGATRAQVALAWLLSKPGIAAPIIGTSREEQLDELLNAVDITLKPEQIAELETPYKPHPVVGFK

SEQ ID NO: 3468 - protein, 1019 aa, Homo sapiens
ALPLPLPTLYPGMSRRKQRKPQQLISDCEGPSASENGDASEEDHPQVCAKCCAQFTDPTEFLAHQNACSTDPPVMVIIGGQENPNNSSASSEPRPEGHNNPQVMDTEHSNPPDSGSSVPTDPTWGPERRGEESSGHFLVAATGTAAGGGGGLILASPKLGATPLPPESTPAPPPPPPPPPPPGVGSGHLNIPLILEELRVLQQRQIHQMQMTEQICRQVLLLGSLGQTVGAPASPSELPGTGTASSTKPLLPLFSPIKPVQTSKTLASSSSSSSSSSGAETPKQAFFHLYHPLGSQHPFSAGGVGRSHKPTPAPSPALPGSTDQLIASPHLAFPSTTGLLAAQCLGAARGLEATASPGLLKPKNGSGELSYGEVMGPLEKPGGRHKCRFCAKVFGSDSALQIHLRSHTGERPYKCNVCGNRFTTRGNLKVHFHRHREKYPHVQMNPHPVPEHLDYVITSSGLPYGMSVPPEKAEEEAATPGGGVERKPLVASTTALSATESLTLLSTSAGTATAPGLPAFNKFVLMKAVEPKNKADENTPPGSEGSAISGVAESSTATRMQLSKLVTSLPSWALLTNHFKSTGSFPLPLCARALGASPSETSKLQQLVEKIDRQGAVAVTSAASGAPTTSAPAPSSSASSGPNQCVICLRVLSCPRALRLHYGQHGGERPFKCKVCGRAFSTRGNLRAHFVGHKASPAARAQNSCPICQKKFTNAVTLQQHVRMHLGGQIPNGGTALPEGGGAAQENGSEQSTVSGAGSFPQQQSQQPSPEEELSEEEEEEDEEEEEDVTDEDSLAGRGSESGGEKAISVRGDSEEASGAEEEVGTVAAAATAGKEMDSNEKTTQQSSLPPPPPPDSLDQPQPMEQGSSGVLGGKEEGGKPERSSSPASALTPEGEATSVTLVEELSLQEAMRKEPGESSSRKACEVCGQAFPSQAALEEHQKTHPKEGPLFTCVFCRQGFLERATLKKHMLLAHHQVQPFAPHGPQNIAALSLVPGCSPSITSTGLSPFPRKDDPTIP

SEQ ID NO: 3469 - protein, 1886 aa, Homo sapiens
NLRPLSFALFLGDPNMANLEESFPRGGTRKIHKPEKAFQQSVEQDNLFDISTEEGSTKRKKSQKGPAKTKKLKIEKRESSKSAREKFEILSVESLCEGMRILGCVKEVNELELVISLPNGLQGFVQVTEICDAYTKKLNEQVTQEQPLKDLLHLPELFSPGMLVRCVVSSLGITDRGKKSVKLSLNPKNVNRVLSAEALKPGMLLTGTVSSLEDHGYLVDIGVDGTRAFLPLLKAQEYIRQKNKGAKLKVGQYLNCIVEKVKGNGGVVSLSVGHSEVSTAIATEQQSWNLNNLLPGLVVKAQVQKVTPFGLTLNFLTFFTGVVDFMHLDPKKAGTYFSNQAVRACILCVHPRTRVVHLSLRPIFLQPGRPLTRLSCQNLGAVLDDVPVQGFFKKAGATFRLKDGVLAYARLSHLSDSKNVFNPEAFKPGNTHKCRIIDYSQMDELALLSLRTSIIEAQYLRYHDIEPGAVVKGTVLTIKSYGMLVKVGEQMRGLVPPMHLADILMKNPEKKYHIGDEVKCRVLLCDPEAKKLMMTLKKTLIESKLPVITCYADAKPGLQTHGFIIRVKDYGCIVKFYNNVQGLVPKHELSTEYIPDPERVFYTGQVVKVVVLNCEPSKERMLLSFKLSSDPEPKKEPAGHSQKKGKAINIGQLVDVKVLEKTKDGLEVAVLPHNIRAFLPTSHLSDHVANGPLLHHWLQAGDILHRVLCLSQSEGRVLLCRKPALVSTVEGGQDPKNFSEIHPGMLLIGFVKSIKDYGVFIQLPSGLSGLAPKAIMSDKFVTSTSDHFVEGQTVAAKVTNVDEEKQRMLLSLRLSDCGLGDLAITSLLLLNQCLEELQGVRSLMSNRDSVLIQTLAEMTPGMFLDLVVQEVLEDGSVVFSGGPVPDLVLKASRYHRAGQEVESGQKKKVVILNVDLLKLEVHVSLHQDLVNRKARKLRKGSEHQAIVQHLEKSFAIASLVETGHLAAFSLTSHLNDTFRFDSEKLQVGQGVSLTLKTTEPGVTGLLLAVEGPAAKRTMRPTQKDSETVDEDEEVDPALTVGTIKKHTLSIGDMVTGTVKSIKPTHVVVTLEDGIIGCIHASHILDDVPEGTSPTTKLKVGKTVTARVIGGRDMKTFKYLPISHPRFVRTIPELSVRPSELEDGHTALNTHSVSPMEKIKQYQAGQTVTCFLKKYNVVKKWLEVEIAPDIRGRIPLLLTSLSFKVLKHPDKKFRVGQALRATVVGPDSSKTFLCLSLTGPHKLEEGEVAMGRVVKVTPNEGLTVSFPFGKIGTVSIFHMSDSYSETPLEDFVPQKVVRCYILSTADNVLTLSLRSSRTNPETKSKVEDPEINSIQDIKEGQLLRGYVGSIQPHGVFFRLGPSVVGLARYSHVSQHSPSKKALYNKHLPEGKLLTARVLRLNHQKNLVELSFLPGDTGKPDVLSASLEGQLTKQEERKTEAEERDQKGEKKNQKRNEKKNQKGQEEVEMPSKEKQQPQKPQAQKRGGRECRESGSEQERVSKKPKKAGLSEEDDSLVDVYYREGKEEAEETNVLPKEKQTKPAEAPRLQLSSGFAWNVGLDSLTPALPPLAESSDSEEDEKPHQATIKKSKKERELEKQKAEKELSRTEEALMDPGRQPESADDFDRLVLSSPNSSILWLQYMAFHLQATEIEKARAVAERALKTISFREEQEKLNVWVALLNLENMYGSQESLTKVFERAVQYNEPLKVFLHLADIYAKSEKFQEAGELYNRMLKRFRQEKAVWIKYGAFLLRRSQAAASHRVLQRALECLPSKEHVDVIAKFAQLEFQLGDAERAKAIFENTLSTYPKRTDVWSVYIDMTIKHGSQKDVRDIFERVIHLSLAPKRMKFFFKRYLDYEKQHGTEKDVQAVKAKALEYVEAKSSVLED

SEQ ID NO: 3470 - protein, 368 aa, Homo sapiens
TAAAPVAPGTMDDATVLRKKGYIVGINLGKGSYAKVKSAYSERLKFNVAVKIIARKKTPTDFVERFLPREMDILATVNHGSIIKTYEIFETSDGRIYIIMELGVQGDLLEFIKCQGALHEDVARKMFRQLSSAVKYCHDLDIVHRDLKCENLLLDKDFNIKLSDFGFSKRCLRDSNGRIILSKTFCGSAAYAAPEVLQSIPYQPKVYDIWSLGVILYIMVCGSMPYDDSDIRKMLRIQKEHRVDFPRSKNLTCECKDLIYRMLQPDVSKRLHIDEILSHSWLQPPKPKATSSASFKREGEGKYRAECKLDTKTGLRPDHRPDHKLGAKTQHRLLVVPENENRMEDRLAETSRAKDHHISGAEVGKAST

SEQ ID NO: 3471 - protein, 129 aa, Homo sapiens
TERGAPQHPTLPLPSLTPSSVHTGQPKTTPSVILFLPSCEEPQANKATLVCLMNNFYPGILMVTWKADGTLITQSVEKTTPSKQSNNKYVASSYLSLTPEQWRSRRSYSCQVMQEGSTVEKSVAPAECS

SEQ ID NO: 3472 - protein, 757 aa, Homo sapiens
DKPTRHKTYLSSSWAKMAAAEGPVGDGELWQTWLPNHVVFLRLREGLKNQSPTEAEKPASSSLPSSPPPQLLTRNVVFGLGGELFLWDGEDSSFLVVRLRGPSGGGEEPALSQYQRLLCINPPLFEIYQVLLSPTQHHVALIGIKGLMVLELPKRWGKNSEFEGGKSTVNCSTTPVAERFFTSSTSLTLKHAAWYPSEILDPHVVLLTSDNVIRIYSLREPQTPTNVIILSEAEEESLVLNKGRAYTASLGETAVAFDFGPLAAVPKTLFGQNGKDEVVAYPLYILYENGETFLTYISLLHSPGNIWKAVGSIAHASAAEDNYGYDACAVLCLPCVPNILVIATESGMLYHCVVLEGEEEDDHTSEKSWDSRIDLIPSLYVFECVELELALKLASGEDDPFDSDFSCPVKLHRDPKCPSRYHCTHEAGVHSVGLTWIHKLHKFLGSDEEDKDSLQELSTEQKCFVEHILCTKPLPCRQPAPIRGFWIVPDILGPTMICITSTYECLIWPLLSTVHPASPPLLCTREDVEVAESPLRVLAETPDSFEKHIRSILQRSVANPAFLKASEKDIAPPPEECLQLLSRATQVFREQYILKQDLAKEEIQRRVKLLCDQKKKQLEDLSYCREERKSLREMAERLADKYEEAKEKQEDIMNRMKKLLHSFHSELPVLSDSERDMKKELQLIPDQLRHLGNAIKQVTMKKDYQQQKMEKVLSLPKPTIILSAYQRKCIQSILKEEGEHIREMVKQINDIRNHVNF

SEQ ID NO: 3473 - protein, 757 aa, Homo sapiens; identical to SEQ ID NO: 3472

SEQ ID NO: 3474 - protein, 598 aa, Homo sapiens
DRRREPERHVRVKQRTSVLNMLRRLDKIRFRGHKRDDFLDLAESPNASDTECSDEIPLKVPRTSPRDSEELRDPAGPGTLIMATGVQDFNRTEFDRLNEIKGHLEIALLEKHFLQEELRKLREETNAEMLRQELDRERQRRMELEQKVQEVLKARTEEQMAQQPPKGQAQASNGAERRSQGLSSRLQKWFYERFGEYVEDFRFQPEENTVETEEPLSARRLTENMRRLKRGAKPVTNFVKNLSALSDWYSVYTSAIAFTVYMNAVWHGWAIPLFLFLAILRLSLNYLIARGWRIQWSIVPEVSEPVEPPKEDLTVSEKFQLVLDVAQKAQNLFGKMADILEKIKNLFMWVQPEITQKLYVALWAAFLASCFFPYRLVGLAVGLYAGIKFFLIDFIFKRCPRLRAKYDTPYIIWRSLPTDPQLKERSSAAVSRRLQTTSSRSYVPSAPAGLGKEEDAGRFHSTKKGNFHEIFNLTENERPLAVCENGWRCCLINRDRKMPTDYIRNGVLYVTENYLCFESSKSGSSKRNKVIKLVDITDIQKYKVLSVLPGSGMGIAVSTPSTQKPLVFGAMVHRDEAFETILSQYIKITSAAASGGDS

SEQ ID NO: 3475 - protein, 374 aa, Homo sapiens
TAARRRQKGAAAAAETHGQAKAKSGWLKPYYFIELMESRKDITNQEELWKMKPRRNLEEDDYLHKDTGETSMLKRPVLLHLHQTAHADEFDCPSELQHTQELFPQWHLPIKIAAIIASLTFLYTLLREVIHPLATSHQQYFYKIPILVINKVLPMVSITLLALVYLPGVIAAIVQLHNGTKYKKFPHWLDKWMLTRKQFGLLSFFFAVLHAIYSLSYPMRRSYRYKLLNWAYQQVQQNKEDALIEHDVWRMEIYVSLGIVGLAILALLAVTSIPSVSDSLTWREFHYIQSKLGIVSLLLGTIHALIFAWNKWIDIKQFVWYTPPTFMIAVFLPIVVLIFKSILFLPCLRKKILKIRHGWEDVTKINKTEICSQL

SEQ ID NO: 3476 - protein, 1015 aa, Homo sapiens
AKAPPTGESSEPEAKVLHTKRLYRAVVEAVHRLDLILCNKTAYQEVFKPENISLRNKLRELCVKLMFLHPVDYGRKAEELLWRKVYYEVIQLIKTNKKHIHSRSTLECAYRTHLVAGIGFYQHLLLYIQSHYQLELQCCIDWTHVTDPLIGCKKPVSASGKEMDWAQMACHRCLVYLGDLSRYQNELAGVDTELLAERFYYQALSVAPQIGMPFNQLGTLAGSKYYNVEAMYCYLRCIQSEVSFEGAYGNLKRLYDKAAKMYHQLKKCETRKLSPGKKRCKDIKRLLVNFMYLQSLLQPKSSSVDSELTSLCQSVLEDFNLCLFYLPSSPNLSLASEDEEEYESGYAFLPDLLIFQMVIICLMCVHSLERAGSKQYSAAIAFTLALFSHLVNHVNIRLQAELEEGENPVPAFQSDGTDEPESKEPVEKEEEPDPEPPPVTPQVGEGRKSRKFSRLSCLRRRRHPPKVGDDSDLSEGFESDSSHDSARASEGSDSGSDKSLEGGGTAFDAETDSEMNSQESRSDLEDMEEEEGTRSPTLEPPRGRSEAPDSLNGPLGPSEASIASNLQAMSTQMFQTKRCFRLAPTFSNLLLQPTTNPHTSASHRPCVNGDVDKPSEPASEEGSESEGSESSGRSCRNERSIQEKLQVLMAEGLLPAVKVFLDWLRTNPDLIIVCAQSSQSLWNRLSVLLNLLPAAGELQESGLALCPEVQDLLEGCELPDLPSSLLLPEDMALRNLPPLRAAHRRFNFDTDRPLLSTLEESVVRICCIRSFGHFIARLQGSILQFNPEVGIFVSIAQSEQESLLQQAQAQFRMAQEEARRNRLMRDMAQLRLQLEVSQLEGSLQQPKAQSAMSPYLVPDTQALCHHLPVIRQLATSGRFIVIIPRTVIDGLDLLKKEHPGARDGIRYLEAEFKKGNRYIRCQKEVGKSFERHKLKRQDADAWTLYKILDSCKQLTLAQGAGEEDPSGMVTIITGLPLDNPSVLSGPMQAALQAAAHASVDIKNVLDFYKQWKEIG

SEQ ID NO: 3477 - protein, 1300 aa, Homo sapiens
MTEPRERRGYSVPPRPEVGTQATEWRVEESNFNKIFLKKDAELGRSNHLPTWDKPEDASWLPQSCLGGDAVATTGEIHEEKAWKTRALEVGQPAQRDIRRGELWGKEHGADQAIQETLEDLSSLERTLVVSESSPLGGDCQEVTTLTVKYQVSEEVPSGTVIGKLSQELGREERRRQAGAAFQVLQLPQALPIQVDSEEGLLSTGRRLDREQLCRQWDPCLVSFDVLATGDLALIHVEIQVLDINDHQPRFPKGEQELEISESASLRTRIPLDRALDPDTGPNTLHTYTLSPSEHFALDVIVGPDETKHAELIVVKELDREIHSFFDLVLTAYDNGNPPKSGTSLVKVNVLDSNDNSPAFAESSLALEIQEDAAPGTLLIKLTATDPDQGPNGEVEFFLSKHMPPEVLDTFSIDAKTGQVILRRPLDYEKNPAYEVDVQARDLGPNPIPAHCKVLIKVLDVNDNIPSIHVTWASQPSLVSEALPKDSFIALVMADDLDSGNNGLVHCWLSQELGHFRLKRTNGNTYMLLTNATLDREQWPKYTLTLLAQDQGLQPLSAKKQLSIQISDINDNAPVFEKSRYEVSTRENNLPSLHLITIKAHDADLGINGKVSYRIQDSPVAHLVAIDSNTGEVTAQRSLNYEEMAGFEFQVIAEDSGQPMLASSVSVWVSLLDANDNAPEVVQPVLSDGKASLSVLVNASTGHLLVPIETPNGLGPAGTDTPPLATHSSRPFLLTTIVARDADSGANGEPLYSIRSGNEAHLFILNPHTGQLFVNVTNASSLIGSEWELEIVVEDQGSPPLQTRALLRVMFVTSVDHLRDSARKPGALSMSMLTVICLAVLLGIFGLILALFMSICRTEKKDNRAYNCREAESTYRQQPKRPQKHIQKADIHLVPVLRGQAGEPCEVGQSHKDVDKEAMMEAGWDPCLQAPFHLTPTLYRTLRNQGNQGAPAESREVLQDTVNLLFNHPRQRNASRENLNLPEPQPATGQPRSRPLKVAGSPTGRLAGDQGSEEAPQRPPASSATLRRQRHLNGKVSPEKESGPRQILRSLVRLSVAAFAERNPVEELTVDSPPVQQISQLLSLLHQGQFQPKPNHRGNKYLAKPGGSRSAIPDTDGPSARAGGQTDPEQEEGPLDPEEDLSVKQLLEEELSSLLDPSTGLALDRLSAPDPAWMARLSLPLTTNYRDNVISPDAAATEEPRTFQTFGKAEAPELSPTGTRLASTFVSEMSSLLEMLLEQRSSMPVEAASEALRRLSVCGRTLSLDLATSAASGMKVQGDPGGKTGTEGKSRGSSSSSRCL

SEQ ID NO: 3478 - protein, 534 aa, Homo sapiens
TLPPPGNSGCHRLCFPEFEFLQVTKMEFSGRKWRKLRLAGDQRNASYPHCLQFYLQPPSENISLIEFENLAIDRVKLLKSVENLGVSYVKGTEQYQSKLESELRKLKFSYRENLEDEYEPRRRDHISHFILRLAYCQSEELRRWFIQQEMDLLRFRFSILPKDKIQDFLKDSQLQFEAISDEEKTLREQEIVASSPSLSGLKLGFESIYKIPFADALDLFRGRKVYLEDGFAYVPLKDIVAIILNEFRAKLSKALALTARSLPAVQSDERLQPLLNHLSHSYTGQDYSTQGNVGKISLDQIDLLSTKSFPPCMRQLHKALRENHHLRHGGRMQYGLFLKGIGLTLEQALQFWKQEFIKGKMDPDKFDKGYSYNIRHSFGKEGKRTDYTPFSCLKIILSNPPSQGDYHGCPFRHSDPELLKQKLQSYKISPGGISQILDLVKGTHYQVACQKYFEMIHTVDDCGFSLSHPNQYFCESQRILNGGKDIKKEPIQPETPQPKPSVQKTKDASSALASLNSSLEMDMEGLEDYFSEDS

SEQ ID NO: 3479 - protein, 186 aa, Homo sapiens
RPELELWRLRSRSWRPLGVPRRCHRRNWKEPVRAQPLSVTVWAPRCQRPQPPAPEPSSPNAAVPEAIPTPRAAASAALELPLGPAPVSVAPQAEAEARSTPGPAGSRLGPETFRQRFRQFRYQDAAGPREAFRQLRELSPRQWLRPDIRTKEQIVEMLVQEQLLAILPEAARARRIRRRTDVRITG

SEQ ID NO: 3480 - protein, 702 aa, Homo sapiens
RRGSRSRGPFAEPAAPGGLCSSSEEKTEEGGMAVGLCKAMSQGLVTFRDVALDFSQEEWEWLKPSQKDLYRDVMLENYRNLVWLGLSISKPNMISLLEQGKEPWMVERKMSQGHCADWESWWEIEELSPKWFIDEDEISQEMVMERLASHGLECSSFREAWKYKGEFELHQGNAERHFMQVTAVKEISTGKRDNEFSNIWEKHTPEISIFNTTESPTIQQVHKFDIYDKLFPQNSVIIEYKRLHAEKESLIGNECEEFNQSTYLSKDIGIPPGEKPYESHDFSKLLSFHSLFTQHQTTHFGKLPHGYDECGDAFSCYSFFTQPQRIHSGEKPYACNDCGKAFSHDFFLSEHQRTHIGEKPYECKECNKAFRQSAHLAQHQRIHTGEKPFACNECGKAFSRYAFLVEHQRIHTGEKPYECKECNKAFRQSAHLNQHQRIHTGEKPYECNQCGKAFSRRIALTLHQRIHTGEKPFKCSECGKTFGYRSHLNQHQRIHTGEKPYECIKCGKFFRTDSQLNRHHRIHTGERPFECSKCGKAFSDALVLIHHKRSHAGEKPYECNKCGKAFSCGSYLNQHQRIHTGEKPYECSECGKAFHQILSLRLHQRIHAGEKPYKCNESQRVRRSELAVSRGLTTKPADTGPDSTLNAAKVAEPARAGTEAALRPALSVAESATSLGPLHQGRRFPEAPAAHPGGTGFTVCAS

SEQ ID NO: 3481 - protein, 506 aa, Homo sapiens
ASRHGMTPGALLMLLGALGPPLAPGVRGSEAEGRLREKLFSGYDSSVRPAREVGDRVRVSVGLILAQLISLNEKDEEMSTKVYLDLEWTDYRLSWDPAEHDGIDSLRITAESVWLPDVVLLNNNDGNFDVALDISVVVSSDGSVRWQPPGIYRSSCSIQVTYFPFDWQNCTMVFSSYSYDSSEVSLQTGLGPDGQGHQEIHIHEGTFIENGQWENIHKPSRLIQPPGDPRGGREGQRQEVIFYLIIRRKPLFYLVNVIAPCILITLLAIFVFYLPPDAGEKMGLSIFALLTLTVFLLLLADKVPETSLSVPIIIKYLMFTMVLVTFSVILSVVVLNLHHRSPHTHQMPLWVRQIFIHKLPLYLRLKRPKPERDLMPEPPHCSSPGSGWGRGTDEYFIRKPPSDFLFPKPNRFQPELSAPDLRRFIDGPNRAVALLPELREVVSSISYIARQLQEQEDHDALKEDWQFVAMVVDRLFLWTFIIFTSVGTLVIFLDATYHLPPPDPFP

SEQ ID NO: 3482 - protein, 366 aa, Homo sapiens
ERWDSGGADAEWYALADWTAVWLPRSDFYTRLQTGEGHVPALRLPAGMPPDSPRELVPKQAPCSPSDPALPWTLGHGNQPPAVVPEPQGPMGPAGVAARPGRFFGVYLLYCLNPRYRVRVYVGFTVNTARRVQQHNGGRKKGGAGRTSGRGPWEMVLVVHGFPSSVAALRFEWAWQHPHASRRLAHVGPRLRGETAFAFHLRVLAHMLRAPPWARLPLTLRWVRPDLRQDLCLPPPPHVLLAFGPPPAQVPRPQRRRAGPFDDAEPEPDQGDPGACCSLCAQTIQDEEGPLCCPHPGCLLRAHVICLAEEFLQEEPGQLLPLEGQCPCCEKSLLWGDLIWLCQMDTEKEVEDSELEEAHWTDLLET

SEQ ID NO: 3483 - protein, 1152 aa, Homo sapiens
WRPWPCIDTSWNLQVAARTLRVSSAQCGLVPTMARVESPVPAARASLTGSCVLGQAMPLRGGAGPSPASHGPTHGPSDPRTCLPGRGAGGMRPHGRGALGCCGLCSFYTCHGAAGDEIMHQDIVPLCAADIQDQLKKRFAYLSGGRGQDGSPVITFPDYPAFSEIPDKEFQNVMTYLTSIPSLQDAGIGFILVIDRRRDKWTSVKASVLRIAASFPANLQLVLVLRPTGFFQRTLSDIAFKFNRDDFKMKVPVIMLSSVPDLHGYIDKSQLTEDLGGTLDYCHSRWLCQRTAIESFALMVKQTAQMLQSFGTELAETELPNDVQSTSSVLCAHTEKKDKAKEDLRLALKEGHSVLESLRELQAEGSEPSVNQDQLDNQATVQRLLAQLNETEAAFDEFWAKHQQKLEQCLQLRHFEQGFREVKAILDAASQKIATFTDIGNSLAHVEHLLRDLANFQEKSGVFVERARALSLTASSFIGNKHYAVDSIRPKCQELRHLCDQFSAEIARRRGLLSKSLELHRRLETSMKWCDEGIYLLASQPVDKCQSQDGAEAALQEIEKFLETGAENKIQELNAIYKEYESILNQDLMEHVRKVFQKQASMEEVFHRRQASLKKLAARQTRPVQPVAPRPEALAKSPCPSPGIRRGSENSSSEGGALRRGPYRRAKSEMSESRQGRGSAGEEEESLAILRRHVMSELLDTERAYVEELLCVLEGYAAEMDNPLMAHLLSTGLHNKKDVLFGNMEEIYHFHNRIFLRELENYTDCPELVGRCFLERMEDFQIYEKYCQNKPRSESLWRQCSDCPFFQECQRKLDHKLSLDSYLLKPVQRITKYQLLLKEMLKYSRNCEGAEDLQEALSSILGILKAVNDSMHLIAITGYDGNLGDLGKLLMQGSFSVWTDHKRGHTKVKELARFKPMQRHLFLHEKAVLFCKKREENGEGYEKAPSYSYKQSLNMAAVGITENVKGDAKKFEIWYNAREEVYIVQAPTPEIKAAWVNEIRKVLTSQLQACREASQHRALEQSQSLPLPAPTSTSPSRGNSRNIKKLEERKTDPLSLEGYVSSAPLTKPPEKGKGWSKTSHSLEAPEDDGGWSSAEEQINSSDAEEDGGLGPKKLVPGKYTVVADHEKGGPDALRVRSGDVVELVQEGDEGLW

SEQ ID NO: 3484 - protein, 1963 aa, Homo sapiens
VTMAQQAADKYLYVDKNFINNPLAQADWAAKKLVWVPSDKSGFEPASLKEEVGEEAIVELVENGKKVKVNKDDIQKMNPPKFSKVEDMAELTCLNEASVLHNLKERYYSGLIYTYSGLFCVVINPYKNLPIYSEEIVEMYKGKKRHEMPPHIYAITDTAYRSMMQDREDQSILCTGESGAGKTENTKKVIQYLAYVASSHKSKKDQGELERQLLQANPILEAFGNAKTVKNDNSSRFGKFIRINFDVNGYIVGANIETYLLEKSRAIRQAKEERTFHIFYYLLSGAGEHLKTDLLLEPYNKYRFLSNGHVTIPGQQDKDMFQETMEAMRIMGIPEEEQMGLLRVISGVLQLGNIVFKKERNTDQASMPDNTAAQKVSHLLGINVTDFTRGILTPRIKVGRDYVQKAQTKEQADFAIEALAKATYERMFRWLVLRINKALDKTKRQGASFIGILDIAGFEIFDLNSFEQLCINYTNEKLQQLFNHTMFILEQEEYQREGIEWNFIDFGLDLQPCIDLIEKPAGPPGILALLDEECWFPKATDKSFVEKVMQEQGTHPKFQKPKQLKDKADFCIIHYAGKVDYKADEWLMKNMDPLNDNIATLLHQSSDKFVSELWKDVDRIIGLDQVAGMSETALPGAFKTRKGMFRTVGQLYKEQLAKLMATLRNTNPNFVRCIIPNHEKKAGKLDPHLVLDQLRCNGVLEGIRICRQGFPNRVVFQEFRQRYEILTPNSIPKGFMDGKQACVLMIKALELDSNLYRIGQSKVFFRAGVLAHLEEERDLKITDVIIGFQACCRGYLARKAFAKRQQQLTAMKVLQRNCAAYLKLRNWQWWRLFTKVKPLLQVSRQEEEMMAKEEELVKVREKQLAAENRLTEMETLQSQLMAEKLQLQEQLQAETELCAEAEELRARLTAKKQELEEICHDLEARVEEEEERCQHLQAEKKKMQQNIQELEEQLEEEESARQKLQLEKVTTEAKLKKLEEEQIILEDQNCKLAKEKKLLEDRIAEFTTNLTEEEEKSKSLAKLKNKHEAMITDLEERLRREEKQRQELEKTRRKLEGDSTDLSDQIAELQAQIAELKMQLAKKEEELQAALARVEEEAAQKNMALKKIRELESQISELQEDLKCERASRNKAEKQKRDLGEELEALKTELEDTLDSTAAQQELRSKREQEVNILKKTLEEEAKTHEAQIQEMRQKHSQAVEELAEQLEQTKRVKANLEKAKQTLENERGELANEVKVLLQGKGDSEHKRKKVEAQLQELQVKFNEGERVRTELADKVTKLQVELDNVTGLLSQSDSKSSKLTKDFSALESQLQDTQELLQEENRQKLSLSTKLKQVEDEKNSFREQLEEEEEEAKHNLEKQIATLHAQVADMKKKMEDSVGCLETAEEVKRKLQKDLEGLSQRHEEKVAAYDKLEKTKTRLQQELDDLLVDLDHQRQSACNLEKKQKKFDQLLAEEKTISAKYAEERDRAEAEAREKETKALSLARALEEAMEQKAELERLNKQFRTEMEDLMSSKDDVGKSVHELEKSKRAIEQQVEEMKTQLEELEDELQATEDAKLRLEVNLQAMKAQFERDLQGRDEQSEEKKKQLVRQVREMEAELEDERKQRSMAVAARKKLEMDLKDLEAHIDSANKNRDEAIKQLRKLQAQMKDCMRELDDTRASREEILAQAKENEKKLKSMEAEMIQLQEELAAAERAKRQAQQERDELADEIANSSGKGALALEEKRRLEARIAQLEEELEEEQGNTELINDRLKKANLQIDQINTDLNLERSHAQKNENARQQLERQNKELKVKLQEMEGTVKSKYKASITALEAKIAQLEEQLDNETKERQAACKQVRRTEKKLKDVLLQVDDERRNAEQYKDQADKASTRLKQLKRQLEEAEEEAQRANASRRKLQRELEDATETADAMNREVSSLKNKLRRGDLPFVVPRRMARKGAGDGSDEEVDGKADGAEAKPAE

SEQ ID NO: 3485 - protein, 593 aa, Homo sapiens
CSTGVSKAPLTYLMSYGFELGWRKGNRAVACREDRGGESVGMGQESILSQVHWWEAEPVEKTPGRDSEATIMSLRVHTLPTLLGAVVRPGCRELLCLLMITVTVGPGASGVCPTACICATDIVSCTNKNLSKVPGNLFRLIKRLDLSYNRIGLLDSEWIPVSFAKLNTLILRHNNITSISTGSFSTTPNLKCLDLSSNKLKTVKNAVFQELKVLEVLLLYNNHISYLDPSAFGGLSQLQKLYLSGNFLTQFPMDLYVGRFKLAELMFLDVSYNRIPSMPMHHINLVPGKQLRGIYLHGNPFVCDCSLVSLLVFWYRRHFSSVMDFKNDYTCRLWSDSRHSRQVLLLQDSFMNCSDSIINGSFRALGFIHEAQVGERLMVHCDSKTGNANTDFIWVGPDNRLLEPDKEMENFYVFHNGSLVIESPRFEDAGVYSCIAMNKQRLLNETVDVTINVSNFTVSRSHAHEAFNTAFTTLAACVASIVLVLLYLYLTPCPCKCKTKRQKNMLHQSNAHSSILSPGPASDASADERKAGAGKRVVFLEPLKDTAAGQNGKVRLFPSEAVIAEGILKSTRGKSDSDSVNSVFSDTPFVAST

SEQ ID NO: 3486 - protein, 272 aa, Homo sapiens
GDPRETKVFPSRSFARNTVGVSHHQSHLFHTVSRIYVEDKHKILYCEVPKAGCSNWKRILMVLNGLASSAYNISHNAVHYGKHLKKLDSFDLKGIYTRLDTYTKLVLVRDPMERLVSAFRDKFDHPNSYYHPVFGKAIIKKYRPNACEEALINGSGVKFKEFIHYLLDSHRPVGMDIHWEKVSKLCYPCLINYDFVGKFETLEEDANYFLQMIGAPKELKFPNFKDRHSSDERTNAQVVRQYLKDLTRTERQLIYDFYYLDYLMFNYTTPFL

SEQ ID NO: 3487 - protein, 1092 aa, Homo sapiens
CDKSGAVPFSTTRSPRRPSPRSAGPSLSSVSPRSQLWASSGLSEEHAAPLLPAWPRHPCPPSLTPGPSMAQGAMRFCSEGDCAISPPRCPRRWLPEGPVPQSPPASMYGSTGSLLRRVAGPGPRGRELGRVTAPCTPLRGPPSPRVAPSPWAPSSPTGQPPPGAQSSVVIFRFVEKASVRPLNGLPAPGGLSRSWDLGGVSPPRPTPALGPGSNRKLRLEASTSDPLPARGGSALPGSRNLVHGPPAPPQVGADGLYSSLPNGLGDPPERLATLFGGPADTGFLNQGDTWSSPREVSSHAQRIARAKWEFFYGSLDPPSSGAKPPEQAPPSPPGVGSRQGSGVAVGRAAKYSETDLDTVPLRCYRETDIDEVLAEREEADSAIESQPSSEGPPGTAYPPAPRPGPLPGPHPSLGSGNEDEDDDEAGGEEDVDDEVFEASEGARPGSRMPLKSPVPFLPGTSPSADGPDSFSCVFEAILESHRAKGTSYTSLASLEALASPGPTQSPFFTFELPPQPPAPRPDPPAPAPLAPLEPDSGTSSAADGPWTQRGEEEEAEARAKLAPGREPPSPCHSEDSLGLGAAPLGSEPPLSQLVSDSDSELDSTERLALGSTDTLSNGQKADLEAAQRLAKRLYRLDGFRKADVARHLGKNNDFSKLVAGEYLKFFVFTGMTLDQALRVFLKELALMGETQERERVLAHFSQRYFQCNPEALSSEDGAHTLTCALMLLNTDLHGHNIGKRMTCGDFIGNLEGLNDGGDFPRELLKALYSSIKNEKLQWAIDEEELRRFLSELADPNPKVIKRISGGSGSGSSPFLDLTPEPGAAVYKHGALVRKVHADPDCRKTPRGKRGWKSFHGILKGMILYLQKEEYKPGKALSETELKNAISIHHALATRASNYSKRPHVFYLRTADWRVFLFQAPSLEQMQSWITRINVVAAMFSAPPFPAAVSSQKKFSRPLLPSAATRLSQEEQVRTHEAKLKAMASELREHRAAQLGKKGRGKEAEEQRQKEAYLEFEKSRYSTYAALLRVKLKAGSEELDAVEAALAQAGSTEDGLPPSHSSPSLQPKPSSQPRAQRHSSEPRPGAGSGRRKP

SEQ ID NO: 3488 - protein, 508 aa, Homo sapiens
GTETPHCWGRGTAGLRRELDREERDGPGTATMSFPHFGHPYRGAFQFLASASSSTTCCESTLRSVSYVASGSTPAPALCCAPYDSRLLGSARPELGAALGIYGAPYAAAAAAQSYPGYLPYSPEPPSLYGALNPQYEFKEAAGSFTSSLAQPGAYYPYERTLGQYQYERYGAVELSGAGRRKNATRETTSTLKAWLNEHRKNPYPTKGEKIMLAIITKMTLTQVSTWFANARRRLKKENKMTWAPKNKGGEERKAEGGEEDSLGCLTADTKEVTASQEARGLRLSDLEDLEEEEEEEEEAEDEEVVATAGDRLTEFRKGAQSLPGPCAAAREGRLERRECGLAAPRFSFNDPSGSEEADFLSAETGSPRLTMHYPCLEKPRIWSLAHTATASAVEGAPPARPRPRSPECRMIPGQPPASARRLSVPRDSACDESSCIPKAFGNPKFALQGLPLNCAPCPRRSEPVVQCQYPSGAEGSGPPAALGVSMQKTPTYRPARQLHTLCHSSLP

SEQ ID NO: 3489 - protein, 451 aa, Homo sapiens
IAAYHKALSYRGHVHANNRGTNNVHFTPPPSPSRGILPMNPRNMMNHSQVGQGIGIPSRTNSMSSSGLGSPNRSSPSIICMPKQQPSRQPFTVNSMSGFGMNRNQAFGMNNSLSSNIFNGTDGSENVTGLDLSDFPALADRNRREGSGNPTPLINPLAGRAPYVGMVTKPANEQSQDFSIHNEDFPALPGSSYKDPTSSNDDSKSNLNTSGKTTSSTDGPKFPGDKSSTTQNNNQQKKGIQVLPDGRVTNIPQGMVTDQFGMIGLLTFIRAAETDPGMVHLALGSDLTTLGLNLNSPENLYPKFASPWASSPCRPQDIDFHVPSEYLTNIHIRDKLFFFFSWTAIKLGRYGEDLLFYLYYMNGGDVLQLLAAVELFNRDWRYHKEERVWITRAPGMEPTMKTNTYERGTYYFFDCLNWRKVAKEFHLEYDKLEERPHLPSTFNYNPAQQAF

SEQ ID NO: 3490 - protein, 943 aa, Homo sapiens
FVAKMATSQYFDFAQGGGPQYSTQAPTLPLPTVGASYTGQPTPGMDPAVNPAFPPAAPAGYGGYQPHSGQDFAYGSRPQEPVPTATTMATYQDSYSYGQSAAARSYEDRPYFQSAALQSGRMTAADSGQPGTQEACGQPSPHGSHSHAQPPQQAPIVESGQPASTLSSGYTYPTATGVQPESSASIVTSYPPPSYNPTCTAYTAPSYPNYDASVYSAASPFYPPAQPPPPPGPPQQLPPPPAPAGSGSSPRADSKPPLPSKLPRPKAGPRQLQLHYCDICKISCAGPQTYREHLGGQKHRKKEAAQKTGVQPNGSPRGVQAQLHCDLCAVSCTGADAYAAHIRGSKHQKVFKLHAKLGKPIPTLEPALATESPPGAEAKPTSPTGPSVCASSRPALAKRPVASKALCEGPPEPQAAGCRPQWGKPAQPKLEGPGAPTQGGSKEAPAGCSDAQPVGPEYVEEVFSDEGRVLRFHCKLCECSFNDLNAKDLHVRGRRHRLQYRKKVNPDLPIATEPSSRARKVLEERMRKQRHLAEERLEQLRRWHAERRRLEEEPPQDVPPHAPPDWAQPLLMGRPESPASAPLQPGRRPASSDDRHVMCKHATIYPTEQELLAVQRAVSHAERALKLVSDTLAEEDRGRREEEGDKRSSVAPQTRVLKGVMRVGILAKGLLLRGDRNVRLALLCSEKPTHSLLRRIAQQLPRQLQMVTEDEYEVSSDPEANIVISSCEEPRMQVTISVTSPLMREDPSTDPGVEEPQADAGDVLSPKKCLESLAALRHARWFQARASGLQPCVIVIRVLRDLCRRVPTWGALPAWAMELLVEKAVSSAAGPLGPGDAVRRVLECVATGTLLTDGPGLQDPCERDQTDALEPMTLQEREDVTASAQHALRMLAFRQTHKVLGMDLLPPRHRLGARFRKRQRGPGEGEEGAGEKKRGRRGGEGLV

SEQ ID NO: 3491 - protein, 438 aa, Homo sapiens
FVGDGALSGCRRGRAPRVPSMAGSLPPCVVDCGTGYTKLGYAGNTEPQFIIPSCIAIRESAKVVDQAQRRVLRGVDDLDFFIGDEAIDKPTYATKWPIRHGIIEDWDLMERFMEQVVFKYLRAEPEDHYFLMTEPPLNTPENREYLAEIMFESFNVPGLYIAVQAVLALAASWTSRQVGERTLTGIVIDSGDGVTHVIPVAEGYVIGSCIKHIPIAGRDITYFIQQLLREREVGIPPEQSLETAKAIKEKYCYICPDIVKEFAKYDVDPRKWIKQYTGINAINQKKFVIDVGYERFLGPEIFFHPEFANPDFMESISDVVDEVIQNCPIDVRRPLYKNVVLSGGSTMFRDFGRRLQRDLKRVVDARLRLSEELSGGRIKPKPVEVQVVTHHMQRYAVWFGGSMLASTPEFFQVCHTKKDYEEYGPSICRHNPVFGVMS

SEQ ID NO: 3492 - protein, 673 aa, Homo sapiens
PNGVALLHLPGAAVIPNTNYMFQDALGGRSRGSREESPAPSRAPASASLWRRLVVVEAKMAAHAAAAAQAAAAQAAHAEAADSWYLALLGFAEHFRTSSPPKIRLCVHCLQAVFPFKPPQRIEARTHLQLGSVLYHHTKNSEQARSHLEKAWLISQQIPQFEDVKFEAASLLSELYCQENSVDAAKPLLRKAIQISQQTPYWHCRLLFQLAQLHTLEKDLVSACDLLGVGAEYARVVGSEYTRALFLLSKGMLLLMERKLQEVHPLLTLCGQIVENWQGNPIQKESLRVFFLVLQVTHYLDAGQVKSVKPCLKQLQQCIQTISTLHDDEILPSNPADLFHWLPKEHMCVLVYLVTVMHSMQAGYLEKAQKYTDKALMQLEKLKMLDCSPILSSFQVILLEHIIMCRLVTGHKATALQEISQVCQLCQQSPRLFSNHAAQLHTLLGLYCVSVNCMDNAEAQFTTALRLTNHQELWAFIVTNLASVYIREGNRHQEVVLYSLLERINPDHSFPVSSHCLRAAAFYVRGLFSFFQGRYNEAKRFLRETLKMSNAEDLNRLTACSLVLLGHIFYVLGNHRESNNMVVPAMQLASKIPDMSVQLWSSALLRDLNKACGNAMDAHEAAQMHQNFSQQLLQDHIEACSLPEHNLITWTDGPPPVQFQAQNGPNTSLASLL

SEQ ID NO: 3493 - protein, 673 aa, Homo sapiens; identical to SEQ ID NO: 3492

SEQ ID NO: 3494 - protein, 536 aa, Homo sapiens
VLRGQRGPAGGLAEERRRGRNEWRIHDVTTAPFPGLVQRRSRLLIVSQVRYFLKNKVSPDLCNEDGLTALHQCCIDNFEEIVKLLLSHGANVNAKDNELWTPLHAAATCGHINLVKILVQYGADLLAVNSDGNMPYDLCEDEPTLDVIETCMAYQGITQEKINEMRVAPEQQMIADIHCMIAAGQDLDWIDAQGATLLHIAGANGYLRAAELLLDHGVRVDVKDWDGWEPLHAAAFWGQMQMAELLVSHGANLNARTSMDEMPIDLCEEEEFKVLLLELKHKHDVIMKSQLRHKSSLSRRTSHRQASSVGKVVRRTQPVGTGPNLYRKEYEGEEAILWQRSAAEDQRTSTYNGDIRETRTDQENKDPNPRLEKPVLLSEFPTKIPRGELDMPVENGLRAPVSAYQYALANGDVWKVHEVPDYSMAYGNPGVADATPPWSSYKEQSPQTLLELKRQRAAAKLLSHPFLSTHLGSSMARTGESSSEGKAPLIGGRTSPYSSNGTSVYYTVTSGDPPLLKFKAPIEEMEEKVHGCCRIS

SEQ ID NO: 3495 - protein, 249 aa, Homo sapiens
APMADTTPNGPQGAGAVQFMMTNKLDTAMWLSRLFTVYCSALFVLPLLGLHEAASFYQRALLANALTSALRLHQRLPHFQLSRAFLAQALLEDSCHYLLYSLIFVNSYPVTMSIFPVLLFSLLHAATYTKKVLDARGSNSLPLLRSVLDKLSANQQNILKFIACNEIFLMPATVFMLFSGQGSLLQPFIYYRFLTLRYSSRRNPYCRTLFNELRIVVEHIIMKPACPLFVRRLCLQSIAFISRLAPTVP

SEQ ID NO: 3496 - protein, 954 aa, Homo sapiens
SSRTREMEEKEILRRQIRLLQGLIDDYKTLHGNAPAPGTPAASGWQPPTYHSGRAFSARYPRPSRRGYSSHHGPSWRKKYSLVNRPPGPSDPPADHAVRPLHGARGGQPPVPQQHVLERQVQLSQGQNVVIKVKPPSKSGSASASGAQRGSLEEFEDTPWSDQRPREGEGEPPRGQLQPSRPTRARGTCSVEDPLLVCQKEPGKPRMVKSVGSVGDSPREPRRTVSESVIAVKASFPSSALPPRTGVALGRKLGSHSVASCAPQLLGDRRVDAGHTDQPVPSGSVGGPARPASGPRQAREASLVVTCRTNKFRKNNYKWVAASSKSPRVARRALSPRVAAENVCKASAGMANKVEKPQLIADPEPKPRKPATSSKPGSAPSKYKWKASSPSASSSSSFRWQSEAGSKDHASQLSPVLSRSPSGDRPALAHSGLKPLSGETPLSAYKVKTRTKIIRRRGSTSLPGDKKSGTSPAATAKSHLSLRRRQALRGKSSPVLKKTPNKGLVQVTKHRLCRLPPSRAHLPTKEASSLHAVRTAPTSKVIKTRYRIVKKTPASPLSAPPFPLSLPSWRARRLSLSRSLVLNRLRPVASGGGKAQPGSPWWRSKGYRCIGGVLYKVSANKLSKTSGQPSDAGSRPLLRTGRLDPAGSCSRSLASRAVQRSLAIIRQARQRREKRKEYCMYYNRFGRCNRGERCPYIHDPEKVAVCTRFVRGTCKKTDGTCPFSHHVSKEKMPVCSYFLKGICSNSNCPYSHVYVSRKAEVCSDFLKGYCPLGAKCKKKHTLLCPDFARRGACPRGAQCQLLHRTQKRHSRRAATSPAPGPSDATARSRVSASHGPRKPSASQRPTRQTPSSAALTAAAVAAPPHCPGGSASPSSSKASSSSSSSSSPPASLDHEAPSLQEAALAAACSNRLCKLPSFISLQSSPSPGAQPRVRAPRAPLTKDSGKPLHIKPRL

SEQ ID NO: 3497 - protein, 480 aa, Homo sapiens
ATARDLGCARRIDRVVMESTPSRGLNRVHLQCRNLQEFLGGLSPGVLDRLYGHPATCLAVFRELPSLAKNWVMRMLFLEQPLPQAAVALWVKKEFSKAQEESTGLLSGLRIWHTQLLPGGLQGLILNPIFRQNLRIALLGGGKAWSDDTSQLGPDKHARDVPSLDKYAEERWEVVLHFMVGSPSAAVSQDLAQLLSQAGLMKSTEPGEPPCITSAGFQFLLLDTPAQLWYFMLQYLQTAQSRGMDLVEILSFLFQLSFSTLGKDYSVEGMSDSLLNFLQHLREFGLVFQRKRKSRRYYPTRALAINLSSGVSGAGGTVHQPGFIVVETNYRLYAYTESELQIALIALFSEMLYPFPNMVVARVTRESVQQAIASGITAQQIIHFLRTRAHPVMLKQTPVLPPTITDQIRLWELERDRLRFTEGVLYNQFLSQVDFELLLAHAPKLGVLVFENTPAKRLMVVTPAGHSDVKRFWKRQKHSS

SEQ ID NO: 3498 - protein, 199 aa, Homo sapiens
RDLGPAALMTASASSFSSSQGVQQPSIYSFSQITRSLFLSNGVAANDKLLLSSNRITAIVNASVGSGQRILRGLQYIKVPVTDARDSRLYDFFDPIADLIHTVSMRQGRTLLNCMAGMSRSASLCLAYLMKYHSMSLLDAHTWATKSRRPIIRPNNGFWEQLINYEFKLFNNNTVRMINSPVGNIPDIYEKDLRMMISM

SEQ ID NO: 3499 - protein, 518 aa, Homo sapiens
TAGFLLAPLEMQRLLTPVKRILQLTRAVQETSLTPARLLPVAHQRFSTASAVPLAKTDTWPKDVGILALEVYFPAQYVDQTDLEKYNNVEAGKYTVGLGQTRMGFCSVQEDINSLCLTVVQRLMERIQLPWDSVGRLEVGTETIIDKSKAVKTVLMELFQDSGNTDIEGIDTTNACYGGTASLFNAANWMESSSWDGRYAMVVCGDIAVYPSGNARPTGGAGAVAMLIGPKAPLALERGLRGTHMENVYDFYKPNLASEYPIVDGKLSIQCYLRALDRCYTSYRKKIQNQWKQAGSDRPFTLDDLQYMIFHTPFCKMVQKSLARLMFNDFLSASSDTQTSLYKGLEAFGGLKLEDTYTNKDLDKALLKASQDMFDKKTKASLYLSTHNGNMYTSSLYGCLASLLSHHSAQELAGSRIGAFSYGSGLAASFFSFRVSQDAAPGSPLDKLVSSTSDLPKRLASRKCVSPEEFTEIMNQREQFYHKVNFSPPGDTNSLFPGTWYLERVDEQHRRKYARRPV

SEQ ID NO: 3500 - protein, 836 aa, Homo sapiens
MLPTEVPQSHPGPSALLLLQLLLPPTSAFFPNIWSLLAAPGSITHQDLTEEAALNVTLQLFLEQPPPGRPPLRLEDFLGRTLLADDLFAAYFGPGSSRRFRAALGEVSRANAAQDFLPTSRNDPDLHFDAERLGQGRARLVGALRETVVAARALDHTLARQRLGAALHALQDFYSHSNWVELGEQQPHPHLLWPRQELQNLAQVADPTCSDCEELSCPRNWLGFTLLTSGYFGTHPPKPPGKCSHGGHFDRSSSQPPRGGINKDSTSPGFSPHHMLHLQAAKLALLASIQAFSLLRSRLGDRDFSRLLDITPASSLSFVLDTTGSMGEEINAAKIQARHLVEQRRGSPMEPVHYVLVPFHDPGFGPVFTTSDPDSFWQQLNEIHALGGGDEPEMCLSALQLALLHTPPLSDIFVFTDASPKDAFLTNQVESLTQERRCRVTFLVTEDTSRVQGRARREILSPLRFEPYKAVALASGGEVIFTKDQHIRDVAAIVGESMAALVTLPLDPPVVVPGQPLVFSVDGLLQKITVRIHGDISSFWIKNPAGVSQGQEEGGGPLGHTRRFGQFWMVTMDDPPQTGTWEIQVTAEDTPGVRVQAQTSLDFLFHFGIPMEDGPHPGLYPLTQPVAGLQTQLLVEVTGLGSRANPGDPQPHFSHVILRGVPEGAELGQVPLEPVGPPERGLLAASLSPTLLSTPRPFSLELIGQDAAGRRLHRAAPQPSTVVPVLLELSGPSGFLAPGSKVPLSLRIASFSGPQDLDLRTFVNPSFSLTSNLSRAHLELNESAWGRLWLEVPDSAAPDSVVMVTVTAGGREANPVPPTHAFLRLLVSAPAPQDRH

SEQ ID NO: 3501 - protein, 1522 aa, Homo sapiens
RRAHPSHSRLSPYLSVSRDPYFFVTVSRTILTLSAPAPPRRTPAPSMGTALLQRGGCFLLCLSLLLLGCWAELGSGLEFPGAEGQWTRFPKWNACCESEMSFQLKTRSARGLVLYFDDEGFCDFLELILTRGGRLQLSFSIFCAEPATLLADTPVNDGAWHSVRIRRQFRNTTLFIDQVEAKWVEVKSKRRDMTVFSGLFVGGLPPELRAAALKLTLASVREREPFKGWIRDVRVNSSQVLPVDSGEVKLDDEPPNSGGGSPCEAGEEGEGGVCLNGGVCSVVDDQAVCDCSRTGFRGKDCSQEDNNVEGLAHLMMGDQGKEEYIATFKGSEYFCYDLSQNPIQSSSDEITLSFKTLQRNGLMLHTGKSADYVNLALKNGAVSLVINLGSGAFEALVEPVNGKFNDNAWHDVKVTRNLRQHSGIGHAMVTISVDGILTTTGYTQEDYTMLGSDDFFYVGGSPSTADLPGSPVSNNFMGCLKEVVYKNNDVRLELSRLAKQGDPKMKIHGVVAFKCENVATLDPITFETPESFISLPKWNAKKTGSISFDFRTTEPNGLILFSHGKPRHQKDAKHPQMIKVDFFAIEMLDGHLYLLLDMGSGTIKIKALLKKVNDGEWYHVDFQRDGRSGTISVNTLRTPYTAPGESEILDLDDELYLGGLPENKAGLVFPTEVWTALLNYGYVGCIRDLFIDGQSKDIRQMAEVQSTAGVKPSCSKETAKPCLSNPCKNNGMCRDGWNRYVCDCSGTGYLGRSCEREATVLSYDGSMFMKIQLPVVMHTEAEDVSLRFRSQRAYGILMATTSRDSADTLRLELDAGRVKLTVNLDCIRINCNSSKGPETLFAGYNLNDNEWHTVRVVRRGKSLKLTVDDQQAMTGQMAGDHTRLEFHNIETGIITERRYLSSVPSNFIGHLQSLTFNGMAYIDLCKNGDIDYCELNARFGFRNIIADPVTFKTKSSYVALATLQAYTSMHLFFQFKTTSLDGLILYNSGDGNDFIVVELVKGYLHYVFDLGNGANLIKGSSNKPLNDNQWHNVMISRDTSNLHTVKIDTKITTQITAGARNLDLKSDLYIGGVAKETYKSLPKLVHAKEGFQGCLASVDLNGRLPDLISDGSFSCNGTDSRRGMWKGPSTTCQEDSCSNQGVCLQQWDGFSCDCSMTSFSGPLCNDPGTTYIFSKGGGQITYKWPPNDRPSTRADRLAIGFSTVQKEAVLVRVDSSSGLGDYLELHIHQGKIGVKFNVGTDDIAIEESNAIINDGKYHVVRFTRSGGNATLQVDSWPVIERYPAGRQLTIFNSQATIIIGGKEQGQPFQGQLSGLYYNGLKVLNMAAENDANIAIVGNVRLVGEVPSSMTTESTATAMQSEMSTSIMETTTTLATSTARRGKPPTKEPISQTTDDILVASAECPSDDEDIDPCEPSSGGLANPTRAGGREPYPGSAEVIRESSSTTGMVVGIVAAAALCILILLYAMYKYRNRDEGSYHVDESRNYISNSAQSNGAVVKEKQPSSAKSSNKNKKNKDKEYYV

SEQ ID NO: 3502 - protein, 108 aa, Homo sapiens
KPAHLPFTVIIMPKRKPSEGAMSDKVKAKFELQRRSAGLFSKPTPPKPETRPKKDPANQRQKLPKVRKGKADASKEGNSPAEERCSMVQTQKVEGWRSGSELPVALSF

SEQ ID NO: 3503 - protein, 1104 aa, Homo sapiens
SGGRGPVRVRSEQLSPSAEQVSQISQISLGRRPLSSLPPPPSRALAPTRAPDTALTIMEVAEVESPLNPSCKIMTFRPSMEEFREFNKYLAYMESKGAHRAGLAKVIPPKEWKPRQCYDDIDNLLIPAPIQQMVTGQSGLFTQYNIQKKAMTVKEFRQLANSGKYCTPRYLDYEDLERKYWKNLTFVAPIYGADINGSIYDEGVDEWNIARLNTVLDVVEEECGISIEGVNTPYLYFGMWKTTFAWHTEDMDLYSINYLHFGEPKSWYAIPPEHGKRLERLAQGFFPSSSQGCDAFLRHKMTLISPSVLKKYGIPFDKITQEAGEFMITFPYGYHAGFNHGFNCAESTNFATVRWIDYGKVAKLCTCRKDMVKISMDIFVRKFQPDRYQLWKQGKDIYTIDHTKPTPASTPEVKAWLQRRRKVRKASRSFQCARSTSKRPKADEEEEVSDEVDGAEVPNPDSVTDDLKVSEKSEAAVKLRNTEASSEEESSASRMQVEQNLSDHIKLSGNSCLSTSVTEDIKTEDDKAYAYRSVPSISSEADDSIPLSTGYEKPEKSDPSELSWPKSPESCSSVAESNGVLTEGEESDVESHGNGLEPGEIPAVPSGERNSFKVPSIAEGENKTSKSWRHPLSRPPARSPMTLVKQQAPSDEELPEVLSIEEEVEETESWAKPLIHLWQTKPPNFAAEQEYNATVARMKPHCAICTLLMPYHKPDSSNEENDARWETKLDEVVTSEGKTKPLIPEMCFIYSEENIEYSPPNAFLEEDGTSLLISCAKCCVRVHASCYGIPSHEICDGWLCARCKRNAWTAECCLCNLRGGALKQTKNNKWAHVMCAVAVPEVRFTNVPERTQIDVGRIPLQRLKLKCIFCRHRVKRVSGACIQCSYGRCPASFHVTCAHAAGVLMEPDDWPYVVNITCFRHKVNPNVKSKACEKVISVGQTVITKHRNTRYYSCRVMAVTSQTFYEVMFDDGSFSRDTFPEDIVSRDCLKLGPPAEGEVVQVKWPDGKLYGAKYFGSNIAHMYQVEFEDGSQIAMKREDIYTLDEELPKRVKARFVSAGRCHLGTCQVNSLSSPHVSQAQQETYLGFWINSKKSQCNIFLSGTY

SEQ ID NO: 3504 - protein, 327 aa, Homo sapiens
RGEEQFDAEFRRFACLGFGERLQEFSRLLRAVHRSRAWTCYLAIRMLMATCCPSPTTTACTGPWQRAPPLRLLVQKREADSSGLAFASNSLQRRKKGLLLRPVAPLRTRPPLLISLPQDFRQVSSVIDVDLLPETHRRVRLHKHGSDRPLGFYIRDGMSVRVAPQGLERVPGIFISRLVRGGLAESTGLLAVSDEILEVNGIEVAGKTLNQVTDMMVANSHNLIVTVKPANQRNNVVRGASGRLTGPPSAGPGPAEPDSDDDSSDLVIENRQPPSSNGLSQGPPCWDLHPGCRHPGTRSSLPSLDDQEQASSGWGSRIRGDGSGFSL

SEQ ID NO: 3505 - protein, 963 aa, Homo sapiens
SCRSATSQSGCGGGRSWLCSSLKMAAQPPRGIRLSALCPKFLHTNSTSHTWPFSAVAELIDNAYDPDVNAKQIWIDKTVINDHICLTFTDNGNGMTSDKLHKMLSFGFSDKVTMNGHVPVGLYGNGFKSGSMRLGKDAIVFTKNGESMSVGLLSQTYLEVIKAEHVVVPIVAFNKHRQMINLAESKASLAAILEHSLFSTEQKLLAELDAIIGKKGTRIIIWNLRSYKNATEFDFEKDKYDIRIPEDLDEITGKKGYKKQERMDQIAPESDYSLRAYCSILYLKPRMQIILRGQKVKTQLVSKSLAYIERDVYRPKFLSKTVRITFGFNCRNKDHYGIMMYHRNRLIKAYEKVGCQLRANNMGVGVVGIIECNFLKPTHNKQDFDYTNEYRLTITALGEKLNDYWNEMKVKKNTEYPLNLPVEDIQKRPDQTWVQCDACLKWRKLPDGMDQLPEKWYCSNNPDPQFRNCEVPEEPEDEDLVHPTYEKTYKKTNKEKFRIRQPEMIPRINAELLFRPTALSTPSFSSPKESVSKRRHLSEGTNSYATRLLNNHQVPPQSEPESNSLKRRLSTRSSILNAKNRRLSSQFENSVYKGDDDDEDVIILEENSTPKPAVDHDIDMKSEQSHVEQGGVQVEFVGDSEPCGQTGSTSTSSSRCDQGNTAATQTEVPSLVVKKEETVEDEIDVRNDAVILPSCVEAEAKIHETQETTDKSADDAGCQLQELRNQLLLVTEEKENYKRQCHMFTDQIKVLQQRILEMNDKYVKKETCHQSTETDAVFLLESINGKSESPDHMVSQYQQALEEIERLKKQCSALQHVKAECSQCSNNESKSEMDEMAVQLDDVFRQLDKCSIERDQYKSEVELLEMEKSQIRSQCEELKTEVEQLKSTNQQTATDVSTSSNIEESVNHMDGESLKLRSLRVNVGQLLAMIVPDLDLQQVNYDVDVVDEILGQVVEQMSEISST

SEQ ID NO: 3506 - protein, 705 aa, Homo sapiens
RPPEAGGRYRAGGRRQAAKPSRPPLPSRRRLPQGGRTRRAMDRPAAAAAAGCEGGGGPNPGPAGGRRPPRAAGGATAGSRQPSVETLDSPTGSHVEWCKQLIAATISSQISGSVTSENVSRDYKALRDGNKLAQMEEAPLFPGESIKAIVKDVMYICPFMGAVSGTLTVTDFKLYFKNVERDPHFILDVPLGVISRVEKIGAQSHGDNSCGIEIVCKDMRNLRLAYKQEEQSKLGIFENLNKHAFPLSNGQALFAFSYKEKFPINGWKVYDPVSEYKRQGLPNESWKISKINSNYEFCDTYPAIIVVPTSVKDDDLSKVAVFLAKGRVPVLSWIHPESQATITRCSQPLVGPNDKRCKEDEKYLQTIMDANAQSHKLIIFDARQNSVADTNKTKGGGYESESAYPNAELVFLEIHNIHVMRESLRKLKEIVYPSIDEARWLSNVDGTHWLEYIRMLLAGAVRIADKIESGKTSVVVHCSDGWDRTAQLTSLAMLMLDSYYRTIKGFETLVEKEWISFGHRFALRVGHGNDNHADADRSPIFLQFVDCVWQMTRQFPSAFEFNELFLITILDHLYSCLFGTFLCNCEQQRFKEDVYTKTISLWSYINSQLDEFSNPFFVNYENHVLYPVASLSHLELWVNYYVRWNPRMRPQMPIHQNLKELLAVRAELQKRVEGLQREVATRAVSSSSERGSSPSHFATSVHTLV

SEQ ID NO: 3507 - protein, 722 aa, Homo sapiens
GSSIKIRLTVLCAKNLAKKDFFRLPDPFAKIVVDGSGQCHSTDTVKNTLDPKWNQHYDLYVGKTDSITISVWNHKKIHKKQGAGFLGCVRLLSNAISRLKDTGYQRLDLCKLNPSDTDAVRGQIVVSLQTRDRIGTGGSVVDCRGLLENEGTVYEDSGPGRPLSCFMEEPAPYTDSTGAAAGGGNCRFVESPSQDQRLQAQRLRNPDVRGSLQTPQNRPHGHQSPELPEGYEQRTTVQGQVYFLHTQTGVSTWHDPRIPRDLNSVNCDELGPLPPGWEVRSTVSGRIYFVDHNNRTTQFTDPRLHHIMNHQCQLKEPSQPLPLPSEGSLEDEELPAQRYERDLVQKLKVLRHELSLQQPQAGHCRIEVSREEIFEESYRQIMKMRPKDLKKRLMVKFRGEEGLDYGGVAREWLYLLCHEMLNPYYGLFQYSTDNIYMLQINPDSSINPDHLSYFHFVGRIMGLAVFHGHYINGGFTVPFYKQLLGKPIQLSDLESVDPELHKSLVWILENDITPVLDHTFCVEHNAFGRILQHELKPNGRNVPVTEENKKEYVRLYVNWRFMRGIEAQFLALQKGFNELIPQHLLKPFDQKELELIIGGLDKIDLNDWKSNTRLKHCVADSNIVRWFWQAVETFDEERRARLLQFVTGSTRVPLQGFKALQGSTGAAGPRLFTIHLIDANTDNLRKAHTCFNRIDIPPYESYEKLYEKLLTAVEETCGFAVE

SEQ ID NO: 3508 - protein, 2127 aa, Homo sapiens
ILYINPADLGWNPPVSSWIEKREIQTERANLTILFDKYLPTCLDTLRTRFKKIIPIPEQSMVQMVCHLLECLLTTEDIPADCPKEIYEHYFVFAAIWAFGGAMVQDQLVDYRAEFSKWWLTEFKTVKFPSQGTIFDYYIDPETKKFEPWSKLVPQFEFDPEMPLQACLVHTSETIRVCYFMERLMARQRPVMLVGTAGTGKSVLVGAKLASLDPEAYLVKNVPFNYYTTSAMLQAVLEKPLEKKAGRNYGPPGNKKLIYFIDDMNMPEVDAYGTVQPHTIIRQHLDYGHWYDRSKLSLKEITNVQYVSCMNPTAGSFTINPRLQRHFSVFVLSFPGADALSSIYSIILTQHLKLGNFPASLQKSIPPLIDLALAFHQKIATTFLPTGIKFHYIFNLRDFANIFQGILFSSVECVKSTWDLIRLYLHESNRVYRDKMVEEKDFDLFDKIQTEVLKKTFDDIEDPVEQTQSPNLYCHFANGIGEPKYMPVQSWELLTQTLVEALENHNEVNTVMDLVLFEDAMRHVCHINRILESPRGNALLVGVGGSGKQSLTRLAAFISSMDVFQITLRKGYQIQDFKMDLASLCLKAGVKNLNTVFLMTDAQVADERFLVLINDLLASGEIPDLYSDDEVENIISNVRNEVKSQGLVDNRENCWKFFIDRIRRQLKVTLCFSPVGNKLRVRSRKFPAIVNCTAIHWFHEWPQQALESVSLRFLQNTEGIEPTVKQSISKFMAFVHTSVNQTSQSYLSNEQRYNYTTPKSFLEFIRLYQSLLHRHRKELKCKTERLENGLLKLHSTSAQVDDLKAKLAAQEVELKQKNEDADKLIQVVGVETDKVSREKAMADEEEQKVAVIMLEVKQKQKDCEEDLAKAEPALTAAQAALNTLNKTNLTELKSFGSPPLAVSNVSAAVMVLMAPRGRVPKDRSWKAAKVTMAKVDGFLDSLINFNKENIHENCLKAIRPYLQDPEFNPEFVATKSYAAAGLCSWVINIVRFYEVFCDVEPKRQALNKATADLTAAQEKLAAIKAKIAHLNENLAKLTARFEKATADKLKCQQEAEVTAVTISLANRLVGGLASENVRWADAVQNFKQQERTLCGDILLITAFISYLGFFTKKYRQSLLDRTWRPYLSQLKTPIPVTPALDPLRMLMDDADVAAWQNEGLPADRMSVENATILINCERWPLMVDPQLQGIKWIKNKYGEDLRVTQIGQKGYLQIIEQALEAGAVVLIENLEESIDPVLGPLLGREVIKKGRFIKIGDKECEYNPKFRLILHTKLANPHYQPELQAQATLINFTVTRDGLEDQLLAAVVSMERPDLEQLKSDLTKQQNGFKITLKTLEDSLLSRLSSASGNFLGETVLVENLEITKQTAAEVEKKVQEAKVTEVKINEAREHYRPAAARASLLYFIMNDLSKIHPMYQFSLKAFSIVFQKAVERAAPDESLRERVANLIDSITFSVYQYTIRGLFECDKLTYLAQLTFQILLMNREVNAVELDFLLRSPVQTGTASPVEFLSHQAWGAVKVLSSMEEFSNLDRDIEGSAKSWKKFVESECPEKEKLPQEWKNKTALQRLCMLRAMRPDRMTYALRDFVEEKLGSKYVVGRALDFATSFEESGPATPMFFILSPGVDPLKDVESQGRKLGYTFNNQNFHNVSLGQGQEVVAEAALDLAAKKGHWVILQNTLEMCSRETEFKSILFALCYFHAVVAERRKFGPQGWNRSYPFNTGDLTISVNVLYNFLEANAKVPYDDLRYLFGEIMYGGHITDDWDRRLCRTYLGEFIRPEMLEGELSLAPGFPLPGNMDYNGYHQYIDAELPPESPYLYGLHPNAEIGFLTQTSEKLFRTVLELQPRDSQARDGAGATREEKVKALLEEILERVTDEFNIPELMAKVEERTPYIVVAFQECGRMNILTREIQRSLRELELGLKGELTMTSHMENLQNALYFDMVPESWARRAYPSTAGLAAWFPDLLNRIKELEAWTGDFTMPSTVWLTGFFNPQSFLTAIMQSTARKNEWPLDQMALQCDMTKKNREEFRSPPREGAYIHGLFMEGACWDTQAGIITEAKLKDLTPPMPVMFIKAIPADRQDCGHVYSCPVTKTSQRDPTYVWTFNLKTKENPSKWVLAGVALLLQI

SEQ ID NO: 3509 - protein, 2127 aa, Homo sapiens; identical to SEQ ID NO: 3508

SEQ ID NO: 3510 - protein, 979 aa, Homo sapiens
AAGSGSRPPAPAARKMADLAECNIKVMCRFRPLNESEVNRGDKYIAKFQGEDTVVIASKPYAFDRVFQSSTSQEQVYNDCAKKIVKDVLEGYNGTIFAYGQTSSGKTHTMEGKLHDPEGMGIIPRIVQDIFNYIYSMDENLEFHIKVSYFEIYLDKIRDLLDVSKTNLSVHEDKNRVPYVKGCTERFVCSPDEVMDTIDEGKSNRHVAVTNMNEHSSRSHSIFLINVKQENTQTEQKLSGKLYLVDLAGSEKVSKTGAEGAVLDEAKNINKSLSALGNVISALAEGSTYVPYRDSKMTRILQDSLGGNCRTTIVICCSPSSYNESETKSTLLFGQRAKTIKNTVCVNVELTAEQWKKKYEKEKEKNKILRNTIQWLENELNRWRNGETVPIDEQFDKEKANLEAFTVDKDITLTNDKPATAIGVIGNFTDAERRKCEEEIAKLYKQLDDKDEEINQQSQLVEKLKTQMLDQEELLASTRRDQDNMQAELNRLQAENDASKEEVKEVLQALEELAVNYDQKSQEVEDKTKEYELLSDELNQKSATLASIDAELQKLKEMTNHQKKRAAEMMASLLKDLAEIGIAVGNNDVKQPEGTGMIDEEFTVARLYISKMKSEVKTMVKRCKQLESTQTESNKKMEENEKELAACQLRISQHEAKIKSLTEYLQNVEQKKRQLEESVDALSEELVQLRAQEKVHEMEKEHLNKVQTANEVKQAVEQQIQSHRETHQKQISSLRDEVEAKAKLITDLQDQNQKMMLEQERLRVEHEKLKATDQEKSRKLHELTVMQDRREQARQDLKGLEETVAKELQTLHNLRKLFVQDLATRVKKSAEIDSDDTGGSAAQKQKISFLENNLEQLTKSAQTSWYRDNADLRCELPKLEKRLRATAERVKALESALKEAKENASRDRKRYQQEVDRIKEAVRSKNMARRGHSAQIAKPIRPGQHPAASPTHPSAIRGGGAFVQNSQPVAVRGGGGKQV

SEQ ID NO: 3511 - protein, 584 aa, Homo sapiens
MASVQASRRQWCYLCDLPKMPWAMVWDFSEAVCRGCVNFEGADRIELLIDAARQLKRSHVLPEGRSPGPPALKHPATKDLAAAAAQGPQLPPPQAQPQPSGTGGGVSGQDRYDRATSSGRLPLPSPALEYTLGSRLANGLGREEAVAEGARRALLGSMPGLMPPGLLAAAVSGLGSRGLTLAPGLSPARPLFGSDFEKEKQQRNADCLAELNEAMRGRAEEWHGRPKAVREQLLALSACAPFNVRFKKDHGLVGRVFAFDATARPPGYEFELKLFTEYPCGSGNVYAGVLAVARQMFHDALREPGKALASSGFKYLEYERRHGSGEWRQLGELLTDGVRSFREPAPAEALPQQYPEPAPAALCGPPPRAPSRNLAPTPRRRKASPEPEGEAAGKMTTEEQQQRHWVAPGGPYSAETPGVPSPIAALKNVAEALGHSPKDPGGGGGPVRAGGASPAASSTAQPPTQHRLVARNGEAEVSPTAGAEAVSGGGSGTGATPGAPLCCTLCRERLEDTHFVQCPPVPEHKFCFPCSRKFIKAQGPAGEVYCPSGDKCPLVGSSVPWAFMQGEIATILAGDIKVKKERDP

SEQ ID NO: 3512 - protein, 663 aa, Homo sapiens
NTNSSSVTNSAAGVEDLNIVQVTVPDNEKERLSSIEKIKQLREQVNDLFSRKFGEAIGVDFPVKVPYRKITFNPGCVVIDGMPPGVVFKAPGYLEISSMRRILEAAEFIKFTVIRPLPGLELSNGEYSTVGKRKIDQEGRVFQEKWERAYFFVEVQNISTCLICKRSMSVSKEYNLRRHYQTNHSKHYDQYMERMRDEKLHELKKGLRKYLLGLSDTECPEQKQVFANPSPTQKSPVQPVEDLAGNLWEKLREKIRSFVAYSIAIDEITDINNTTQLAIFIRGVDENFDVSEELLDTVPMTGTKSGNEIFSRVEKSLKNFCINWSKLVSVASTGTPPMVDANNGLVTKLKSRVATFCKGAELKSICCIIHPESLCAQKLKMDHVMDVVVKSVNWICSRGLNHSEFTTLLYELDSQYGSLLYYTEIKWLSRGLVLKRFFESLEEIDSFMSSRGKPLPQLSSIDWIRDLAFLVDMTMHLNALNISLQGHSQIVTQMYDLIRAFLAKLCLWETHLTRNNLAHFPTLKLVSRNESDGLNYIPKIAELKTEFQKRLSDFKLYESELTLFSSPFSTKIDSVHEELQMEVIDLQCNTVLKTKYDKVGIPEFYKYLWGSYPKYKHHCAKILSMFGSTYICEQLFSIMKLSKTKYCSQLKDSQWDSVLHIAT

SEQ ID NO: 3513 - protein, 441 aa, Homo sapiens
FKSLLSVKWFCFSILVLIFLGTRCYWEMTQSRPSPDPHRGRWEGGRSRPKGGEEGRRRTRVPGLVTASGPGNPLPDRLGEMAGGRHRRVVGTLHLLLLVAALPWASRGVSPSASAWPEEKNYHQPAILNSSALRQIAEGTSISEMWQNDLQPLLIERYPGSPGSYAARQHIMQRIQRLQADWVLEIDTFLSQTPYGYRSFSNIISTLNPTAKRHLVLACHYDSKYFSHWNNRVFVGATDSAVPCAMMLELARALDKKLLSLKTVSDSKPDLSLQLIFFDGEEAFLHWSPQDSLYGSRHLAAKMASTPHPPGARGTSQLHGMDLLVLLDLIGAPNPTFPNFFPNSARWFERLQAIEHELHELGLLKDHSLEGRYFQNYSYGGVIQDDHIPFLRRGVPVLHLIPSPFPEVWHTMDDNEENLDESTIDNLNKILQVFVLEYLHL

SEQ ID NO: 3514 - protein, 441 aa, Homo sapiens; identical to SEQ ID NO: 3513

SEQ ID NO: 3515 - protein, 211 aa, Homo sapiens
LCRDLTTTMSSKRTKTKTKKRPQRATSNVFAMFDQSQIQEFKEAFNMIDQNRDGFIDKEDLHDMLASLGKNPTDEYLDAMMNEAPGPINFTMFLTMFGEKLNGTDPEDVIRNAFACFDEEATGTIQEDYLRELLTTMGDRFTDEEVDELYREAPIDKKGGIFNYIEFTRHLETGGPKDKDDRKITFQIPSPNVPWLATFGVFLEIFLLHGP

SEQ ID NO: 3516 - protein, 1721 aa, Homo sapiens
MAAAPSALLLLPPFPVLSTYRLQSRSRPSAPETDDSRVGGIMRGEKNYYFRGAAGDHGSCPTTTSPLASALLMPSEAVSSSWSESGGGLSGGDEEDTRLLQLLRTARDPSEAFQALQAALPRRGGRLGFPRRKEALYRALGRVLVEGGSDEKRLCLQLLSDVLRGQGEAGQLEEAFSLALLPQLVVSLREENPALRKDALQILHICLKRSPGEVLRTLIQQGLESTDARLRASTALLLPILLTTEDLLLGLDLTEVIISLARKLGDQETEEESETAFSALQQIGERLGQDRFQSYISRLPSALRRHYNRRLESQFGSQVPYYLELEASGFPEDPLPCAVTLSNSNLKFGIIPQELHSRLLDQEDYKNRTQAVEELKQVLGKFNPSSTPHSSLVGFISLLYNLLDDSNFKVVHGTLEVLHLLVIRLGEQVQQFLGPVIAASVKVLADNKLVIKQEYMKIFLKLMKEVGPQQVLCLLLEHLKHKHSRVREEVVNICICSLLTYPSEDFDLPKLSFDLAPALVDSKRRVRQAALEAFAVLASSMGSGKTSILFKAVDTVELQDNGDGVMNAVQARLARKTLPRLTEQGFVEYAVLMPSSAGGRSNHLAHGADTDWLLAGNRTQSAHCHCGDHVRDSMHIYGSYSPTICTRRVLSAGKGKNKLPWENEQPGIMGENQTSTSKDIEQFSTYDFIPSAKLKLSQGMPVNDDLCFSRKRVSRNLFQNSRDFNPDCLPLCAAGTTGTHQTNLSGKCAQLGFSQICGKTGSVGSDLQFLGTTSSHQEKVYASLNFGSKTQQTFGSQTECTSSNGQNPSPGAYILPSYPVSSPRTSPKHTSPLIISPKKSQDNSVNFSNSWPLKSFEGLSKPKSHRRSLSAQKSSDPTGRNHGENSQEKPPVQLTPALVRSPSSRRGLNGTKPVPPIPRGISLLPDKADLSTVGHKKKEPDDIWKCEKDSLPIDLSELNFKDKDLDQEEMHSSLRSLRNSAAKKRAKLSGSTSDLESPDSAMKLDLTMDSPSLSSSPNINSYSESGVYSQESLTSSLSTTPQGKRIMSDIFPTFGSKPCPTRLSSAKKKISHIAEQSPSAGSSSNPQQISSFDFTTTKALSEDSVVVVGKGVFGSLSSAPATCSQSVISSVENGDTFSIKQSIEPPSGIYGRSVQQNISSYLDVENEKDAKVSISKSTYNKMRQKRKEEKELFHNKDCEKKEKNSWERMRHTGTEKMASESETPTGAISQYKERMPSVTHSPEIMDLSELRPFSKPEIALTEALRLLADEDWEKKIEGLNFIRCLAAFHSEILNTKLHETNFAVVQEVKNLRSGVSRAAVVCLSDLFTYLKKSMDQELDTTVKVLLHKAGESNTFIREDVDKALRAMVNNVTPARAVVSLINGGQRYYGRKMLFFMMCHPNFEKMLEKYVPSKDLPYIKDSVRNLQQKGLGEIPLDTPSAKGRRSHTGSVGNTRSSSVSRDAFNSAERAVTEVREVTRKSVPRNSLESAEYLKLITGLLNAKDFRDRINGIKQLLSDTENNQDLVVGNIVKIFDAFKSRLHDSNSKVNLVALETMHKMIPLLRDHLSPIINMLIPAIVDNNLNSKNPGIYAAATNVVQALSQHVDNYLLLQPFCTKAQFLNGKAKQDMTEKLADIVTELYQRKPHATEQKVLVVLWHLLGNMTNSGSLPGAGGNIRTATAKLSKALFAQMGQNLLNQAASQPPHIKKSLEELLDMTILNEL

SEQ ID NO: 3517 - protein, 398 aa, Homo sapiens
QDLKPVLDREYLAIYLKMVFFTCNACGESVKKIQVEKHVSVCRNCECLSCIDCGKDFWGDDYKNHVKCISEDQKYGGKGYEKVKTHKGDASKQQAWIQKISELIKRPNVSPKVRELLEQISAFDNVPQKKAKFQNWMKNSLKVHNESILDQVWNIFSEASNSEPVNKEQDQRPLHPVANPHAEISTKVPASKVKDAVEQQGEVKKNKRERKEERQKKRKREKKELKLENHQENSRNQKPKKRKKGQEADLEAGGEEVPEANGSAGKRSKKKKQRKDSASEEEARVGAGKRKRRHSKVETDSKKKKMKLPEHPEGGEPEDDEAPAKGKFNWKGTIKAILKQAPDNEITIKKLRKKVLAQYYTVTDEHHRSEEELLVIFNKKISKNPTFKLLKDKVKLVK

SEQ ID NO: 3518 - protein, 210 aa, Homo sapiens
APDSNARNDHFDACSLRVQAGLSSAGPALGNSGLAALMASPSKAVIVPGNGGGDVTTHGWYGWVKKELEKIPGFQCLAKNMPDPITARESIWLPFMETELHCDEKTIIIGHSSGAIAAMRYAETHRVYAIVLVSAYTSDLGDENERASGYFTRPWQWEKIKANCPYIVQFGSTDDPFLPWKEQQEVADSWKPNCTNSLTVATFRTQSFMN

SEQ ID NO: 3519 - protein, 732 aa, Homo sapiens
VRETRREMAMAMSDSGASRLRRQLESGGFEARLYVKQLSQQSDGDRDLQEHRQRIQALAEETAQNLKRNVYQNYRQFIETAREISYLESEMYQLSHLLTEQKSSLESIPLTLLPAAAAAGAAAASGGEEGVGGAGGRDHLRGQAGFFSTPGGASRDGSGPGEEGKQRTLTTLLEKVEGCRHLLETPGQYLVYNGDLVEYDADHMAQLQRVHGFLMNDCLLVATWLPQRRGMYRYNALYSLDGLAVVNVKDNPPMKDMFKLLMFPENRIFQAENAKIKREWLEVLEDTKRALSEKRRREQEEAAAPRGPPQVTSKATNPFEDDEEEEPAVPEVEEEKVDLSMEWIQELPEDLDVCIAQRDFEGAVDLLDKLNHYLEDKPSPPPVKELRAKVEERVRQLTEVLVFELSPDRSLRGGPKATRRAVSQLIRLGQCTKACELFLRNRAAAVHTAIRQLRIEGATLLYIHKLCHVFFTSLLETAREFEIDFAGTDSGCYSAFVVWARSAMGMFVDAFSKQVFDSKESLSTAAECVKVAKEHCQQLGDIGLDLTFIIHALLVKDIQGALHSYKEIIIEATKHRNSEEMWRRMNLMTPEALGKLKEEMKSCGVSNFEQYTGDDCWVNLSYTVVAFTKQTMGFLEEALKLYFPELHMVLLESLVEIILVAVQHVDYSLRCEQDPEKKAFIRQNASFLYETVLPVVEKRFEEGVGKPAKQLQDLRNASRLIRVNPESTTSVV

SEQ ID NO: 3520 - protein, 387 aa, Homo sapiens
FVAHLAWPWRADGDMEDGVLNEGFLVKRGHIVHNWKARWFILRQNTLVYYKLEGGRRVTPPKGRILLDGCTITCPCLEYENRPLLIKLKTQTSTEYFLEACSREERRDAWAFEITGAIHAGQARGKVQQLHSLRNSFKLPPHISLHRIVDKMHDSNTGIRSSPNMEQGSTYKKTFLGSSLVDWLISNSFTASRLEAVTLASMLMEENFLRPVGVRSMGAIRSGDLAEQFLDDSTALYTFAESYKKKISPKEEISLSTVELSGTVVKQGYLAKQGHKRKNWKVRRFVLRKDPAFLHYYDPSKEENRPVGGFSLRGSLVSALEDNGVPTGVKGNVQGNLFKVITKDDTHYYIQASSKAERAEWIGSLSKSLNMNKDPEGTPDSLPSLPR

SEQ ID NO: 3521 - protein, 1020 aa, Homo sapiens
HASVSLSLGCPRPCADTPGPQPQPMDLRVGQRPPVEPPPEPTLLALQRPQRLHHHLFLAGLQQQRSVEPMRVKMELPACGATLSLVPSLPAFSIPRHQSQSSTPCPFLGCRPCPQLSMDTPMPELQEAPQEQELRQLLHKDKSKRSAVASSVVKQKLAEVILKKQQAALERTVHPNSPGIPYRTLEPLETEGATRSMLSSFLPPVPSLPSDPPEHFPLRKTVSEPNLKLRYKPKKSLERRKNPLLRKESAPPSLRRRPAETLGDSSPSSSSTPASGCSSPNDSEHGPNPILGSEALLGQRLRLQETSVAPFALPTVSLLPAITLGLPAPARADSDRRTHPTLGPRGPILGSPHTPLFLPHGLEPEAGGTLPSRLQPILLLDPSGSHAPLLTVPGLGPLPFHFAQSLMTTERLSGSGLHWPLSRTRSEPLPPSATAPPPPGPMQPRLEQLKTHVQVIKRSAKPSEKPRLRQIPSAEDLETDGGGPGQVVDDGLEHRELGHGQPEARGPAPLQQHPQVLLWEQQRLAGRLPRGSTGDTVLLPLAQGGHRPLSRAQSSPAAPASLSAPEPASQARVLSSSETPARTLPFTTGLIYDSVMLKHQCSCGDNSRHPEHAGRIQSIWSRLQERGLRSQCECLRGRKASLEELQSVHSERHVLLYGTNPLSRLKLDNGKLAGLLAQRMFVMLPCGGVGVDTDTIWNELHSSNAARWAAGSVTDLAFKVASRELKNGFAVVRPPGHHADHSTAMGFCFFNSVAIACRQLQQQSKASKILIVDWDVHHGNGTQQTFYQDPSVLYISLHRHDDGNFFPGSGAVDEVGAGSGEGFNVNVAWAGGLDPPMGDPEYLAAFRIVVMPIAREFSPDLVLVSAGFDAAEGHPAPLGGYHVSAKCFGYMTQQLMNLAGGAVVLALEGGHDLTAICDASEACVAALLGNRVDPLSEEGWKQKPNLNAIRSLEAVIRVHSKYWGCMQRLASCPDSWVPRVPGADKEEVEAVTALASLSVGILAEDRPSEQLVEEEEPMNL

SEQ ID NO: 3522 - protein, 198 aa, Homo sapiens
KMAALGEPVRLERDICRAIELLEKLQRSGEVPPQKLQALQRVLQSEFCNAVREVYEHVYETVDISSSPEVRANATAKATVAAFAASEGHSHPRVVELPKTEEGLGFNIMGGKEQNSPIYISRIIPGGIADRHGGLKRGDQLLSVNGVSVEGEHHEKAVELLKAAQGKVKLVVRYTPKVLEEMESRFEKMRSAKRRQQT

SEQ ID NO: 3523 - protein, 272 aa, Homo sapiens
IMAETSLLEAGASAASTAAALENLQVEASCSVCLEYLKEPVIIECGHNFCKACITRWWEDLERDFPCPVCRKTSRYRSLRPNRQLGSMVEIAKQLRPSSGRSGMRASAPQHHEALSLFCYEDQEAVCLICAISHTHRAHTVVPLDDATQEYKEKLQKCLEALNQKLQEITRCKSSEEKKPGELKRLVESRRQQILREFEELHRRLDEEQQVLLSRLEEEEQDILQRLRENAAHLGDKRRDLAHLAAEVEGKCLQSGFEMLKVRPLPLHSPSG

SEQ ID NO: 3524 - protein, 231 aa, Homo sapiens
PMVRHEAGEALGAIGDPEVLEILKQYSSDPVIEVAETCQLAVRRLEWLQQHGGEPAAGPYLSVDPAPPAEERDVGRLREALLDESRPLFERYRAMFALRNAGGEEAALALAEGLHCGSALFRHEVGYVLGQLQHEAAVPQLAAALARCTENPMVRHECAEALGAIARPACLAALQAHADDPERVVRESCKVALDMYEHETGRAFQYADGLEQLRGAPSLGPNPHPELPEDS

SEQ ID NO: 3525 - protein, 252 aa, Homo sapiens
EGLQRPEYLVASAAGFQGLAWGGEGRGRAGCSSSGFRDAEPLLLSCPGRNEPLKKERLKWKSDYPMTDGQLRSKRDEFWDTAPAFEGRKEIWDALKAAAYAAEANDHELAQAILDGASITLPHGTLCECYDELGNRYQLPIYCLSPPVNLLLEHTEEESLEPPEPPPSVRREFPLKVRLSTGKDVRLSASLPDTVGQLKRQLHAQEGTPKPSWQRWFFSGKLLTDRTRLQETKIQKDFVIQVIINQPPPPQD

SEQ ID NO: 3526 - protein, 1106 aa, Homo sapiens
PGNEGLGLAADHNEDLGHLSADAPWPAVTMAPRKRSHHGLGFLCCFGGSDIPEINLRDNHPLQFMEFSSPIPNAEELNIRFAELVDELDLTDKNREAMFALPPEKKWQIYCSKKKEQEDPNKLATSWPDYYIDRINSMAAMQSLYAFDEEETEMRNQVVEDLKTALRTQPMRFVTRFIELEGLTCLLNFLRSMDHATCESRIHTSLIGCIIALMNNSQGRAHVLAQPEAISTIAQSLRTENSKTKVAVLEILGAVCLVPGGHKKVLQAMLHYQVYAAERTRFQTLLNELDRSLGRYRDEVNLKTAIMSFINAVLNAGAGEDNLEFRLHLRYEFLMLGIQPVIDKLRQHENAILDKHLDFFEMVRNEDDLELARRFDMVHIDTKSASQMFELIHKKLKYTEAYPCLLSVLHHCLQMPYKRNGGYFQQWQLLDRILQQIVLQDERGVDPDLAPLENFNVKNIVNMLINENEVKQWRDQAEKFRKEHMELVSRLERKERECETKTLEKEEMMRTLNKMKDKLARESQELRQARGQVAELVAQLSELSTGPVSSPPPPGGPLTLSSSMTTNDLPPPPPPLPFACCPPPPPPPLPPGGPPTPPGAPPCLGMGLPLPQDPYPSSDVPLRKKRVPQPSHPLKSFNWVKLNEERVPGTVWNEIDDMQVFRILDLEDFEKMFSAYQRHQELITNPSQQKELGSTEDIYLASRKVKELSVIDGRRAQNCIILLSKLKLSNEEIRQAILKMDEQEDLAKDMLEQLLKFIPEKSDIDLLEEHKHEIERMARADRFLYEMSRIDHYQQRLQALFFKKKFQERLAEAKPKVEAILLASRELVRSKRLRQMLEVILAIGNFMNKGQRGGAYGFRVASLNKIADTKSSIDRNISLLHYLIMILEKHFPDILNMPSELQHLPEAAKVNLAELEKEVGNLRRGLRAVEVELEYQRRQVREPSDKFVPVMSDFITVSSFSFSELEDQLNEARDKFAKALMHFGEHDSKMQPDEFFGIFDTFLQAFSEARQDLEAMRRRKEEEERRARMEAMLKEQRERERWQRQRKVLAAGSSLEEGGEFDDLVSALRSGEVFDKDLCKLKRSRKRSGSQALEVTRERAINRLNY

SEQ ID NO: 3527 - protein, 244 aa, Homo sapiens
LLGTRMLAGQLEARDPKEGTHPEDPCPGAGAVMEKTAVAAEVLTEDCNTGEMPPLQQQIIRLHQELGRQKSLWADVHGKLRSHIDALREQNMELREKLRALQLQRWKARKKSAASPHAGQESHTLALEPAFGKISPLSADEETIPKYAGHKNQSGHSSWGQRSSSNNSAPPKPMSLKIERISSWKTPPQENRDKNLSRRRQDRRATPTGRPTPCAERRGVSEDGKVASDTCVTLHWPLGKFRFR

SEQ ID NO: 3528 - protein, 431 aa, Homo sapiens
RISKIQVYYSTGYSSRKMNPTLGLAIFLAVLLTVKGLLKPSFSPRNYKALSEVQGWKQRMAAKELARQNMDLGFKLLKKLAFYNPGRNIFLSPLSISTAFSMLCLGAQDSTLDEIKQGFNFRKMPEKDLHEGFHYIIHELTQKTQDLKLSIGNTLFIDQRLQPQRKFLEDAKNFYSAETILTNFQNLEMAQKQINDFIESKTHGKINNLIENIDPGTVMLLANYIFFRARWKHEFDPNVTKEEDFFLEKNSSVKVPMMFRSGIYQVGYDDKLSCTILEIPYQKNITAIFILPDEGKLKHLEKGLQVDTFSRWKTLLSRRVVDVSVPRLHMTGTFDLKKTLSYIGVSKIFEEHGDLTKIAPHRSLKVGEAVNKAELKMDERGTEGAAGTGAQTLPMETPLVVKIDKPYLLLIYSEKIPSVLFLGKIVNPIGK

SEQ ID NO: 3529 - protein, 1892 aa, Homo sapiens
VSSVSHENPTEVFEDGENPPSSRSSESGFTEFIQYQADRTDDIDRELSEGQGAAAIPIGSTSSETETASTVGSEETIIQTPSVVTQGTATRSRKTAQKTAMQCCLEYVQQFLTRLINLYIIQNNSFSQSLATEHQGDLGREQGETSKWDRNSQGDVKEKNISKQKTSKEYLSAFLAACQLFLECSSFPVYIAEGNHTSELRSEKLETDCEHVQPPQWLQTLMNACSQASDFSVQSVAISLVMDLVGLTQSVAMVTGENINSVEPAQPLSPNQGRVAVVIRPPLTQGNLRYIAEKTEFFKHVALTLWDQLGDGTPQHHQKSVELFYQLHNLVPSSSICEDVISQQLTHKDKKIRMEAHAKFAVLWHLTRDLHINKSSSFVRSFDRSLFIMLDSLNSLDGSTSSVGQAWLNQVLQRHDIARVLEPLLLLLLHPKTQRVSVQRVQAERYWNKSPCYPGEESDKHFMQNFACSNVSQVQLITSKGNGEKPLTMDEIENFSLTVNPLSDRLSLLSTSSETIPMVVSDFDLPDQQIEILQSSDSGCSQSSAGDNLSYEVDPETVNAQEDSQMPKESSPDDDVQQVVFDLICKVVSGLEVESASVTSQLEIEAMPPKCSDIDPDEETIKIEDDSIQQSQNALLSNESSQFLSVSAEGGHECVANGISRNSSSPCISGTTHTLHDSSVASIETKSRQRSHSSIQFSFKEKLSEKVSEKETIVKESGKQPGAKPKVKLARKKDDDKKKSSNEKLKQTSVFFSDGLDLENWYSCGEGDISEIESDMGSPGSRKSPNFNIHPLYQHVLLYLQLYDSSRTLYAFSAIKAILKTNPIAFVNAISTTSVNNAYTPQLSLLQNLLARHRISVMGKDFYSHIPVDSNHNFRSSMYIEILISLCLYYMRSHYPTHVKVTAQDLIGNRNMQMMSIEILTLLFTELAKVIESSAKGFPSFISDMLSKCKVQKVILHCLLSSIFSAQKWHSEKMAGKNLVAVEEGFSEDSLINFSEDEFDNGSTLQSQLLKVLQRLIVLEHRVMTIPEENETGFDFVVSDLEHISPHQPMTSLQYLHAQSITCQGMFLCAVIRALHQHCACKMHPQWIGLITSTLPYMGKVLQRVVVSVTLQLCRNLDNLIQQYKYETGLSDSRPLWMASIIPPDMILTLLEGITAIIHYCLLDPTTQYHQLLVSVDQKHLFEARSGILSILHMIMSSVTLLWSILHQADSSEKMTIAASASLTTINLGATKNLRQQILELLGPISMNHGVHFMAAIAFVWNERRQNKTTTRTKVIPAASEEQLLLVELVRSISVMRAETVIQTVKEVLKQPPAIAKDKKHLSLEVCMLQFFYAYIQRIPVPNLVDSWASLLILLKDSIQLSLPAPGQFLILGVLNEFIMKNPSLENKKDQRDLQDVTHKIVDAIGAIAGSSLEQTTWLRRNLEVKPSPKIMVDGTNLESDVEDMLSPAMETANITPSVYSVHALTLLSEVLAHLLDMVFYSDEKERVIPLLVNIMHYVVPYLRNHSAHNAPSYRACVQLLSSLSGYQYTRRAWKKEAFDLFMDPSFFQMDASCVNHWRAIMDNLMTHDKTTFRDLMTRVAVAQSSSLNLFANRDVELEQRAMLLKRLAFAIFSSEIDQYQKYLPDIQERLVESLRLPQVPTLHSQVFLFFRVLLLRMSPQHLTSLWPTMITELVQVFLLMEQELTADEDISRTSGPSVAGLETTYTGGNGFSTSYNSQRWLNLYLSACKFLDLALALPSENLPQFQMYRWAFIPEASDDSGLEVRRQGIHQREFKPYVVRLAKLLRKRAKKNPEEDNSGRTLGWEPGHLLLTICTVRSMEQLLPFFNVLSQVFNSKVTSRCGGHSGSPILYSNAFPNKDMKLENHKPCSSKARQKIEEMVEKDFLEGMIKT

SEQ ID NO: 3530 - protein, 1892 aa, Homo sapiens; identical to SEQ ID NO: 3529

SEQ ID NO: 3531 - protein, 638 aa, Homo sapiens
LISPSPALSSQDPALSLKENLEDISGWGLPEARSKESVSFKDVAVDFTQEEWGQLDSPQRALYRDVMLENYQNLLALGPPLHKPDVISHLERGEEPWSMQREVPRGPCPEWELKAVPSQQQGICKEEPAQEPIMERPLGGAQAWGRQAGALQRSQAAPGRRTCHGLGRPVEEFPLRCPLFAQQRVPEGGPLLDTRKNVQATEGRTKAPARLCAGENASTPSEPEKFPQVRRQRGAGAGEGEFVCGECGKAFRQSSSLTLHRRWHSREKAYKCDECGKAFTWSTNLLEHRRIHTGEKPFFCGECGKAFSCHSSLNVHQRIHTGERPYKCSACEKAFSCSSLLSMHLRVHTGEKPYRCGECGKAFNQRTHLTRHHRIHTGEKPYQCGSCGKAFTCHSSLTVHEKIHSGDKPFKCSDCEKAFNSRSRLTLHQRTHTGEKPFKCADCGKGFSCHAYLLVHRRIHSGEKPFKCNECGKAFSSHAYLIVHRRIHTGEKPFDCSQCWKAFSCHSSLIVHQRIHTGEKPYKCSECGRAFSQNHCLIKHQKIHSGEKSFKCEKCGEMFNWSSHLTEHQRLHSEGKPLAIQFNKHLLSTYYVPGSLLGAGDAGLRDVDPIDALDVAKLLCVVPPRAGRNFSLGSKPRN

SEQ ID NO: 3532 - protein, 1203 aa, Homo sapiens
HRELQDSPSAEPPAGSMPLRHWGMARGSKPVGDGAQPMAAMGGLKVLLHWAGPGGGEPWVTFSESSLTAEEVCIHIAHKVGITPPCFNLFALFDAQAQVWLPPNHILEIPRDASLMLYFRHRFYSRNWHGMNPREPAVYRCGPPGTEASSDQTAQGMQLLDPASFEYLFEQGKHEFVNDVASLWELSTEEEIHHFKNESLGMAFLHLCHLALRHGIPLEEVAKKTSFKDCIPRSFRRHIRQHSALTRLRLRNVFRRFLRDFQPGRLSQQMVMVKYLATLERLAPRFGTERVPVCHLRLLAQAEGEPCYIRDSGVAPTDPGPESAAGPPTHEVLVTGTGGIQWWPVEEEVNKEEGSSGSSGRNPQASLFGKKAKAHKAFGQPADRPREPLGAYFCDFRDITHVGLKEHCVSIHRQDNKCLELSLPSRAAALSFVSLVDGYFRLTADSSHYLCHEVAPPRLVMSIRDGIHGPLLEPFVQAKLRPEDGLYLIHWSTSHPYRLILTVAQRSQAPDGMQSLRLRKFPIEQQDGAFVLEGWGRSFPSVRELGAALQGCLLRAGDDCFSLRRCCLPQPGETSNLIIMRGARASPRTLNLSQLSFHRVDQKEITQLSHLGQGTRTNVYEGRLRVEGSGDPEEGKMDDEDPLVPGRDRGQELRVVLKVLDPSHHDIALAFYETASLMSQVSHTHLAFVHGVCVRGPENIMVTEYVEHGPLDVWLRRERGHVPMAWKMVVAQQLASALSYLENKNLVHGNVCGRNILLARLGLAEGTSPFIKLSDPGVGLGALSREERVERIPWLAPECLPGGANSLSTAMDKWGFGATLLEICFDGEAPLQSRSPSEKEHFYQRQHRLPEPSCPQLATLTSQCLTYEPTQRPSFRTILRDLTRLQPHNLADVLTVNPDSPASDPTVFHKRYLKKIRDLGEGHFGKVSLYCYDPTNDGTGEMVAVKALKADCGPQHRSGWKQEIDILRTLYHEHIIKYKGCCEDQGEKSLQLVMEYVPLGSLRDYLPRHSIGLAQLLLFAQQICEGMAYLHAQHYIHRDLAARNVLLDNDRLVKIGDFGLAKAVPEGHEYYRVREDGDSPVFWYAPECLKEYKFYYASDVWSFGVTLYELLTHCDSSQSPPTKFLELIGIAQGQMTVLRLTELLERGERLPRPDKCPCEVYHLMKNCWETEASFRPTFENLIPILKTVHEKYQGQAPSVFSVC

SEQ ID NO: 3533 - protein, 1094 aa, Homo sapiens
FRWLDFFRGSINSQFEFGRKKENMTSPAKFKKDKEIIAEYDTQVKEIRAQLTEQMKCLDQQCELRVQLLQDLQDFFRKKAEIEMDYSRNLEKLAERFLAKTRSTKDQQFKKDQNVLSPVNCWNLLLNQVKRESRDHTTLSDIYLNNIIPRFVQVSEDSGRLFKKSKEVGQQLQDDLMKVLNELYSVMKTYHMYNADSISAQSKLKEAEKQEEKQIGKSVKQEDRQTPRSPDSTANVRIEEKHVRRSSVKKIEKMKEKRQAKYTENKLKAIKARNEYLLALEATNASVFKYYIHDLSDLIDQCCDLGYHASLNRALRTFLSAELNLEQSKHEGLDAIENAVENLDATSDKQRLMEMYNNVFCPPMKFEFQPHMGDMASQLCAQQPVQSELLQRCLQLQSRLSTLKIENEEVKKTMEATLQTIQDIVTVEDFDVSDCFQYSNSMESVKSTVSETFMSKPSIAKRRANQQETEQFYFTKMKEYLEGRNLITKLQAKHDLLQKTLGESQRTDCSLARRSSTVRKQDSSQAIPLVVESCIRFISRHGLQHEGIFRVSGSQVEVNDIKNAFERGEDPLAGDQNDHDMDSIAGVLKLYFRGLEHPLFPKDIFHDLMACVTMDNLQERALHIRKVLLVLPKTTLIIMRYLFAFLNHLSQFSEENMMDPYNLAICFGPSLMSVPEGHDQVSCQAHVNELIKTIIIQHENIFPSPRELEGPVYSRGGSMEDYCDSPHGETTSVEDSTQDVTAEHHTSDDECEPIEAIAKFDYVGRTARELSFKKGASLLLYQRASDDWWEGRHNGIDGLIPHQYIVVQDTEDGVVERSSPKSEIEVISEPPEEKVTARAGASCPSGGHVADIYLANINKQRKRPESGSIRKTFRSDSHGLSSSLTDSSSPGVGASCRPSSQPIMSQSLPKEGPDKCSISGHGSLNSISRHSSLKNRLDSPQIRKTATAGRSKSFDNHRPMDPEVIAQDIEATMNSALNELRELERQSSVKHTPDVVLDTLEPLKTSPVVAPTSEPSSPLHTQLLKDPEPAFQRSASTAGDIACAFRPVKSVKMAAPVKPPATRPKPTVFPKTNATSPGVNSSTSPQSTDKSCTV

SEQ ID NO: 3534 - protein, 880 aa, Homo sapiens
FRRFVCPASRRPAAGLRDAASSAPRGMASEGPREPESEGIKLSADVKPFVPRFAGLNVAWLESSEACVFPSSAATYYPFVQEPPVTEQKIYTEDMAFGASTFPPQYLSSEITLHPYAYSPYTLDSTQNVYSVPGSQYLYNQPSCYRGFQTVKHRNENTCPLPQEMKALFKKKTYDEKKTYDQQKFDSERADGTISSEIKSARGSHHLSIYAENSLKSDGYHKRTDRKSRIIAKNVSTSKPEFEFTTLDFPELQGAENNMSEIQKQPKWGPVHSVSTDISLLREVVKPAAVLSKGEIVVKNNPNESVTANAATNSPSCTRELSWTPMGYVVRQTLSTELSAAPKNVTSMINLKTIASSADPKNVSIPSSEALSSDPSYNKEKHIIHPTQKSKASQGSDLEQNEASRKNKKKKEKSTSKYEVLTVQEPPRIEDAEEFPNLAVASERRDRIETPKFQSKQQPQDNFKNNVKKSQLPVQLDLGGMLTALEKKQHSQHAKQSSKPVVVSVGAVPVLSKECASGERGRRMSQMKTPHNPLDSSAPLMKKGKQREIPKAKKPTSLKKIILKERQERKQRLQENAVSPAFTSDDTQDGESGGDDQFPEQAELSGPEGMDELISTPSVEDKSEEPPGTELQRDTEASHLAPNHTTFPKIHSRRFRDYCSQMLSKEVDACVTDLLKELVRFQDRMYQKDPVKAKTKRRLVLGLREVLKHLKLKKLKCVIISPNCEKIQSKGGLDDTLHTIIDYACEQNIPFVFALNRKALGRSLNKAVPVSVVGIFSYDGAQDQFHKMVELTVAARQAYKTMLENVQQELVGEPSLRHLPAYPHRAPAALQKMAPQPVKEKEEPHYIEIWKKHLEAYSGCTLELEESLEASTSQMMNLNL

SEQ ID NO: 3535 - protein, 255 aa, Homo sapiens
LFQFQVCRSVLSPRAAGCTWSLAPRSRGAAGSPRRYRGPQPQPAPPSALPNSRPSPVASGREMVVLSVPAEVTVILLDIEGTTTPIAFVKDILFPYIEENVKEYLQTHWEEEECQQDVSLLRKQVFADVVPAVRKWREAGMKVYIYSSGSVEAQKLLFGHSTEGDILELVDGHFDTKIGHKVESESYRKIADSIGCSTNNILFLTDVTREASAAEEADVHVAVVVRPGNAGLTDDEKTYYSLITSFSELYLPSST

SEQ ID NO: 3536 - protein, 432 aa, Homo sapiens
GRPPTAPHTGRPPTANRGDPRLDLKRGCARLLTSIESRGRPAASAGLRRDRCALRRWPLRRAPLARATRRRAGSPRRCAPRPRACPQGWSRARHQPGGLCLLLLLLCQFMEDRSAQAGNCWLRQAKNGRCQVLYKTELSKEECCSTGRLSTSWTEEDVNDNTLFKWMIFNGGAPNCIPCKETCENVDCGPGKKCRMNKKNKPRCVCAPDCSNITWKGPVCGLDGKTYRNECALLKARCKEQPELEVQYQGRCKKTCRDVFCPGSSTCVVDQTNNAYCVTCNRICPEPASSEQYLCGNDGVTYSSACHLRKATCLLGRSIGLAYEGKCIKAKSCEDIQCTGGKKCLWDFKVGRGRCSLCDELCPDSKSDEPVCASDNATYASECAMKEAACSSGVLLEVKHSGSCNSISEDTEEEEEDEDQDYSFPISSILEW

SEQ ID NO: 3537 - protein, 613 aa, Homo sapiens
IGLFLQVAPLSVMAKSCPSVCRCDAGFIYCNDRFLTSIPTGIPEDATTLYLQNNQINNAGIPSDLKNLLKVERIYLYHNSLDEFPTNLPKYVKELHLQENNIRTITYDSLSKIPYLEELHLDDNSVSAVSIEEGAFRDSNYLRLLFLSRNHLSTIPWGLPRTIEELRLDDNRISTISSPSLQGLTSLKRLVLDGNLLNNHGLGDKVFFNLVNLTELSLVRNSLTAAPVNLPGTNLRKLYLQDNHINRVPPNAFSYLRQLYRLDMSNNNLSNLPQGIFDDLDNITQLILRNNPWYCGCKMKWVRDWLQSLPVKVNVRGLMCQAPEKVRGMAIKDLNAELFDCKDSGIVSTIQITTAIPNTVYPAQGQWPAPVTKQPDIKNPKLTKDHQTTGSPSRKTITITVKSVTSDTIHISWKLALPMTALRLSWLKLGHSPAFGSITETIVTGERSEYLVTALEPDSPYKVCMVPMETSNLYLFDETPVCIETETAPLRMYNPTTTLNREQEKEPYKNPNLPLAAIIGGAVALVTIALLALVCWYVHRNGSLFSRNCAYSKGRRRKDDYAEAGTKKDNSILEIRETSFQMLPISNEPISKEEFVIHTIFPPNGMNLYKNNH

SEQ ID NO: 3538 - protein, 1766 aa, Homo sapiens
WNVKPSLLVVQLFKFSDKEEHEQNDSISGKTGETGVEEMIATRKVEQDSKETVKLSHEDDHILEDAGSSDISSDAACTNPNKTENSLVGLPSCVDEVTECNLELKDTMGIADKTENTLERNKIEPLGYCEDAESNRQLESTEFNKSNLEVVDTSTFGPESNILENAICDVPDQNSKQLNAIESTKIESHETANLQDDRNSQSSSVSYLESKSVKSKHTKPVIHSKQNMTTDAPKKIVAAKYEVIHSKTKVNVKSVKRNTDVPESQQNFHRPVKVRKKQIDKEPKIQSCNSGVKSVKNQAHSVLKKTLQDQTLVQIFKPLTHSLSDKSHAHPGCLKEPHHPAQTGHVSHSSQKQCHKPQQQAPAMKTNSHVKEELEHPGVEHFKEEDKLKLKKPEKNLQPRQRRSSKSFSLDEPPLFIPDNIATIRREGSDHSSSFESKYMWTPSKQCGFCKKPHGNRFMVGCGRCDDWFHGDCVGLSLSQAQQMGEEDKEYVCVKCCAEEDKKTEILDPDTLENQATVEFHSGDKTMECEKLGLSKHTTNDRTKYIDDTVKHKVKILKRESGEGRNSSDCRDNEIKKWQLAPLRKMGQPVLPRRSSEEKSEKIPKESTTVTCTGEKASKPGTHEKQEMKKKKVEKGVLNVHPAASASKPSADQIRQSVRHSLKDILMKRLTDSNLKVPEEKAAKVATKIEKELFSFFRDTDAKYKNKYRSLMFNLKDPKNNILFKKVLKGEVTPDHLIRMSPEELASKELAAWRRRENRHTIEMIEKEQREVERRPITKITHKGEIEIESDAPMKEQEAAMEIQEPAANKSLEKPEGSEKRKEEVDSMSKDTTSQHRQHLFDLNCKICIGRMAPPVDDLSPKKVKVVVGVARKHSDNEAESIADALSSTSNILASEFFEEEKQESPKSTFSPAPRPEMPGTVEVESTFLARLNFIWKGFINMPSVAKFVTKAYPVSGSPEYLTEDLPDSIQVGGRISPQTVWDYVEKIKASGTKEICVVRFTPVTEEDQISYTLLFAYFSSRKRYGVAANNMKQVKDMYLIPLGATDKIPHPLVPFDGPGLELHRPNLLLGLIIRQKLKRQHSACASTSHIAETPESAPPIALPPDKKSKIEVSTEEAPEEENDFFNSFTTVLHKQRNKPQQNLQEDLPTAVEPLMEVTKQEPPKPLRFLPGVLIGWENQPTTLELANKPLPVDDILQSLLGTTGQVYDQAQSVMEQNTVKEIPFLNEQTNSKIEKTDNVEVTDGENKEIKVKVDNISESTDKSAEIETSVVGSSSISAGSLTSLSLRGKPPDVSTEAFLTNLSIQSKQEETVESKEKTLKRQLQEDQENNLQDNQTSNSSPCRSNVGKGNIDGNVSCSENLVANTARSPQFINLKRDPRQAAGRSQPVTTSESKDGDSCRNGEKHMLPGLSHNKEHLTEQINVEEKLCSAEKNSCVQQSDNLKVAQNSPSVENIQTSQAEQAKPLQEDILMQNIETVHPFRRGSAVATSHFEVGNTCPSEFPSKSITFTSRSTSPRTSTNFSPMRPQQPNLQHLKSSPPGFPFPGPPNFPPQSMFGFPPHLPPPLLPPPGFGFAQNPMVPWPPVVHLPGQPQRMMGPLSQASRYIGPQNFYQVKDIRRPERRHSDPWGRQDQQQLDRPFNRGKGDRQRFYSDSHHLKRERHEKEWEQESERHRRRDRSQDKDRDRKSREEGHKDKERARLSHGDRGTDGKASRDSRNVDKKPDKPKSEDYEKDKEREKSKHREGEKDRDRYHKDRDHTDRTKSKR

SEQ ID NO: 3539 - protein, 536 aa, Homo sapiens
GSWTVELSLKPSASPSLKWVCLPGAAAVNKHRSGAGGLIRSLIQCTWAPAGPARRGGRGIEDFPYLFFQLTHCQQRICSVTQAGVQWCDHSSLQPQTPGLNQSSHLSLLSSRDYRMLSSFNEWFWQDRFWLPPNVTWTELEDRDGRVYPHPQDLLAALPLALVLLAMRLAFERFIGLPLSRWLGVRDQTRRQVKPNATLEKHFLTEGHRPKEPQLSLLAAQCGLTLQQTQRWFRRRRNQDRPQLTKKFCEASWRFLFYLSSFVGGLSVLYHESWLWAPVMCWDRYPNQLTLSCPAADSEASLYWWYLLELGFYLSLLIRLPFDVKRKGGGPSSIKPRPHYDPPSTADFKEQVIHHFVAVILMTFSYSANLLRIGSLVLLLHDSSDYLLEACKMVNYMQYQQVCDALFLIFSFVFFYTRLVLFPTQILYTTYYESISNRGPFFGYYFFNGLLMLLQLLHVFWSCLILRMLYSFMKKGQMEKDIRSDVEESDSSEEAAAAQEPLQLKNGTAGGPRPAPTDGPRSRVAGRLTNRHTTAT

SEQ ID NO: 3540 - protein, 377 aa, Homo sapiens
SPAGYCHSGLLPGCSRSACADLAKHQELPGKKLLSEKKLKRYFVDYRRVLVCGGNGGAGASCFHSEPRKEFGGPDGGDGGNGGHVILRVDQQVKSLSSVLSRYQGFSGEDGGSKNCFGRSGAVLYIRVPVGTLVKEGGRVVADLSCVGDEYIAALGGAGGKGNRFFLANNNRAPVTCTPGQPGQQRVLHLELKTVAHAGMVGFPNAGKSSLLRAISNARPAVASYPFTTLKPHVGIVHYEGHLQIAVADIPGIIRGAHQNRGLGSAFLRHIERCRFLLFVVDLSQPEPWTQVDDLKYELEMYEKGLSARPHAIVANKIDLPEAQANLSQLRDHLGQEVIVLSALTGENLEQLLLHLKVLYDAYAEAELGQGRQPLRW

SEQ ID NO: 3541 - protein, 2668 aa, Homo sapiens
DTQVSETLKRFAGKVTTASVKERREILSELGKCVAGKDLPEGAVKGLCKLFCLTLHRYRDAASRRALQAAIQQLAEAQPEATAKNLLHSLQSSGIGSKAGVPSKSSGSAALLALTWTCLLVRIVFPSRAKRQGDIWNKLVEVQCLLLLEVLGGSHKHAVDGAVKKLTKLWKENPGLVEQYLSAILSLEPNQNYAGMLGLLVQFCTSHKEMDVVSQHKSALLDFYMKNILMSKVKPPKYLLDSCAPLLRYLSHSEFKDLILPTIQKSLLRSPENVIETISSLLASVTLDLSQYAMDIVKGLAGHLKSNSPRLMDEAVLALRNLARQCSDSSAMESLTKHLFAILGGSEGKLTVVAQKMSVLSGIGSVSHHVVSGPSSQVLNGIVAELFIPFLQQEVHEGTLVHAVSVLALWCNRFTMEVPKKLTEWFKKAFSLKTSTSAVRHAYLQCMLASYRGDTLLQALDLLPLLIQTVEKAASQSTQVPTITEGVAAALLLLKLSVADSQAEAKLSSFWQLIVDEKKQVFTSEKFLVMASEDALCTVLHLTERLFLDHPHRLTGNKVQQYHRALVAVLLSRTWHVRRQAQQTVRKLLSSLGGFKLAHGLLEELKTVLSSHKVLPLEALVTDAGEVTEAGKAYVPPRVLQEALCVISGVPGLKGDVTDTEQLAQEMLIISHHPSLVAVQSGLWPALLARMKIDPEAFITRHLDQIIPRMTTQSPLNQSSMNAMGSLSVLSPDRVLPQLISTITASVQNPALRLVTREEFAIMQTPAGELYDKSIIQSAQQDSIKKANMKRENKAYSFKEQIIELELKEEIKKKKGIKEEVQLTSKQKEMLQAQLDREAQVRRRLQELDGELEAALGLLDIILAKNPSGLTQYIPVLVDSFLPLLKSPLAAPRIKNPFLSLAACVMPSRLKALGTLVSHVTLRLLKPECVLDKSWCQEELSVAVKRAVMLLHTHTITSRVGKGEPGAAPLSAPAFSLVFPFLKMVLTEMPHHSEEEEEWMAQILQILTVQAQLRASPNTPPGRVDENGPELLPRVAMLRLLTWVIGTGSPRLQVLASDTLTTLCASSSGDDGCAFAEQEEVDVLLCALQSPCASVRETVLRGLMELHMVLPAPDTDEKNGLNLLRRLWVVKFDKEEEIRKLAERLWSMMGLDLQPDLCSLLIDDVIYHEAAVRQAGAEALSQAVARYQRQAAEVMGRLMEIYQEKLYRPPPVLDALGRVISESPPDQWEARCGLALALNKLSQYLDSSQVKPLFQFFVPDALNDRHPDVRKCMLDAALATLNTHGKENVNSLLPVFEEFLKNAPNDASYDAVRQSVVVLMGSLAKHLDKSDPKVKPIVAKLIAALSTPSQQVQESVASCLPPLVPAIKEDAGGMIQRLMQQLLESDKYAERKGAAYGLAGLVKGLGILSLKQQEMMAALTDAIQDKKNFRRREGALFAFEMLCTMLGKLFEPYVVHVLPHLLLCFGDGNQYVREAADDCAKAVMSNLSAHGVKLVLPSLLAALEEESWRTKAGSVELLGAMAYCAPKQLSSCLPNIVPKLTEVLTDSHVKVQKAGQQALRQIGSVIRNPEILAIAPVLLDALTDPSRKTQKCLQTLLDTKFVHFIDAPSLALIMPIVQRAFQDRSTDTRKMAAQIIGNMYSLTDQKDLAPYLPSVTPGLKASLLDPVPEVRTVSAKALGAMVKGMGESCFEDLLPWLMETLTYEQSSVDRSGAAQGLAEVMAGLGVEKLEKLMPEIVATASKVDIAPHVRDGYIMMFNYLPITFGDKFTPYVGPIIPCILKALADENEFVRDTALRAGQRVISMYAETAIALLLPQLEQGLFDDLWRIRFSSVQLLGDLLFHISGVTGKMTTETASEDDNFGTAQSNKAIITALGVERRNRVLAGLYMGRSDTQLVVRQASLHVWKIVVSNTPRTLREILPTLFGLLLGFLASTCADKRTIAARTLGDLVRKLGEKILPEIIPILEEGLRSQKSDERQGVCIGLSEIMKSTSRDAVLYFSESLVPTARKALCDPLEEVREAAAKTFEQLHSTIGHQALEDILPFLLKQLDDEEVSEFALDGLKQVMAIKSRVVLPYLVPKLTTPPVNTRVLAFLSSVAGDALTRHLGVILPAVMLALKEKLGTPDEQLEMANCQAVILSVEDDTGHRIIIEDLLEATRSPEVGMRQAAAIILNIYCSRSKADYTSHLRSLVSGLIRLFNDSSPVVLEESWDALNAITKKLDAGNQLALIEELHKEIRLIGNESKGEHVPGFCLPKKGVTSILPVLREGVLTGSPEQKEEAAKALGLVIRLTSADALRPSVVSITGPLIRILGDRFSWNVKAALLETLSLLLAKVGIALKPFLPQLQTTFTKALQDSNRGVRLKAADALGKLISIHIKVDPLFTELLNGIRAMEDPGVRDTMLQALRFVIQGAGAKVDAVIRKNIVSLLLSMLGHDEDNTRISSAGCLGELCAFLTEEELSAVLQQCLLADVSGIDWMVRHGRSLALSVAVNVAPGRLCAGRYSSDVQEMILSSATADRIPIAVSGVRGMGFLMRHHIETGGGQLPAKLSSLFVKCLQNPSSDIRLVAEKMIWWANKDPLPPLDPQAIKPILKALLDNTKDKNTVVRAYSDQAIVNLLKMRQGEEVFQSLSKILDVASLEVLNEVNRRSLKKLASQADSTEQVDDTILT

SEQ ID NO: 3542 - protein, 355 aa, Homo sapiens
PWNPQDFPGNRGLMGQKGEIGPPGQQGKKGAPGMPGLMGSNGSPGQPGTPGSKGSKGEPGIQGMPGASGLKGEPGATGSPGEPGYMGLPGIQGKKGDKGNQGEKGIQGQKGENGRQGIPGQQGIQGHHGAKGERGEKGEPGVRGAIGSKGESGVDGLMGPAGPKGQPGDPGPQGPPGLDGKPGREFSEQFIRQVCTDVIRAQLPVLLQSGRIRNCDHCLSQHGSPGIPGPPGPIGPEGPRGLPGLPGRDGVPGLVGVPGRPGVRGLKGLPGRNGEKGSQGFGYPGEQGPPGPPGPEGPPGISKEGPPGDPGLPGKDGDHGKPGIQGQPGPPGICDPSLCFSVIARRDPFRKGPNY

SEQ ID NO: 3543 - protein, 153 aa, Homo sapiens
PARSLEKMKASVVLSLLGYLVVPSGAYILGRCTVAKKLHDGGLDYFERYSLENWVCLAYFESKFNPSAIYENTREGYTGFGLFQMRGSDWCGDHGRNRCHMSCSALLNPNLEKTIKCAKTIVKGKEGMGAWPTWSRYCQYSDTLARWLDGCKL

SEQ ID NO: 3544 - protein, 356 aa, Homo sapiens
SCRLAAGRLAQWLLRASRSGMLRAGWLRGAAALALLLAARVVAAFEPITVGLAIGAASAITGYLSYNDIYCRFAECCREERPLNASALKLDLEEKLFGQHLATEVIFKALTGFRNNKNPKKPLTLSLHGWAGTGKNFVSQMGAENLHPKGLKSNFVHLFVSTLHFPHEQKIKLYQDQLQKWIRGNVSACANSVFIFDEMDKLHPGIIEAIKPFLDYYEHVERVSYRKAIFIFLSNAGGDLITKTALDFWRAGRKREDIQLKDLEPVLSVGVFNNKHSGLWHSGLIDKNLIDYFIPFLPLEYRHVKMCVRAEMRARGSAIDEDIVTRVAEEMTFFPRDEKIYSDKGCKTVQSRLDFH

SEQ ID NO: 3545 - protein, 89 aa, Homo sapiens
  misc_feature (1)...(89): Xaa = any amino acid or nothing
SAQGRSWGRFYRQIKRHPGIIPMIGLICLGMGSAALYLLRLALRSPDVWXSWDRKNNPEPWNRLSPNDQYKFLAVSTDYKKLKKDRPDF

SEQ ID NO: 3546 - protein, 189 aa, Homo sapiens
  misc_feature (1)...(189): Xaa = any amino acid or nothing
ALSTETRTPDMRRLLLVTSLVVVLLWEAGAVPAPKVPIKMQVKHWPSEQDPEKAWGARVVEPPEKDDQLVVLFPVQKPKLLTTEEKPRGQGRGPILPGTKAWMETEDTLGRVLSPEPDHDSLYHPPPEEDQGEERPRLWVMPNHQVLLGPEEDQDHIYHPQXGSRGHHCPRPVPRPRLLGLGPSLPCPS

SEQ ID NO: 3547 - protein, 189 aa, Homo sapiens; identical to SEQ ID NO: 3546
  misc_feature (1)...(189): Xaa = any amino acid or nothing

SEQ ID NO: 3548 - protein, 545 aa, Homo sapiens
  misc_feature (1)...(545): Xaa = any amino acid or nothing
TWLPSVPAEEVQQPEMAAVLNAERLEVSVDGLTLSPDPEERPGAEGAPLAAATAATALATWIRSRPGRLRGTARSPGRRAAGGAAEEARRLEQRWGFGLEELYGLALRFFKEKDGKAFHPTYEEKLKLVALHKQVLMGPYNPDTCPEVGFFDVLGNDRRREWAALGNMSKEDAMVEFVKLLNRCCHLFSTYVASHKIEKEEQEKKRKEEEERRRREEEERERLQKEEEKRRREEEERLRREEEERRRIEEERLRLEQQKQQIMAALNSQTAVQFQQYAAQQYPGNYEQQQILIRQLQEQHYQQYMQQLYQVQLAQQQAALQKQQEVVVAGSSLPTSSKVECNCTQVIXCQFNRQAKTHTDSSEKELEPEAAEEALENGPKESLPVIAAPSMWTRPQIKDFKEKIQQDADSVITVGRGEVVTVRVPTHEEGSYLFWEFATDNYDIGFGVYFEWTDSPNTAVSVHVSESSDDDEEEEENIGCEEKAKKNANKPLLDEIVPVYRRDCHEEVYAGSHQYPGRGVYLLKFDNSYSLWRSKSVYYRVYYTR

SEQ ID NO: 3549 - protein, 585 aa, Homo sapiens
PAVLVLEPASQSRKQQNTASATAQHWSAQIHKESFLAPVFTKDEQKHRRPYEFEVERDAKARGLEQFSATHGHTPIILNGWHGESAMDLSCSSEGSPGATSPFPVSASTPKIGAISSLQGALGMDLSGILQAGLIHPVTGQIVNGSLRRDDAATRRRRGRRKHVEGGMDLIFLKEQTLQAGILEVHEDPGQATLSTTHPEGPGPATSAPEPATAASSQAEKSIPSKSLLDWLRQQADYSLEVPGFGANFSDKPKQRRPRCKEPGKLDVSSLSGEERVPAIPKEPGLRGFLPENKFNHTLAEPILRDTGPRRRGRRPRSELLKAPSIVADSPSGMGPLFMNGLIAGMDLVGLQNMRNMPGIPLTGLVGFPAGFATMPTGEEVKSTLSMLPMMLPGMAAVPQMFGVGGLLSPPMATTCTSTAPASLSSTTKSGTAVTEKTAEDKPSSHDVKTDTLAEDKPGPGPFSDQSEPAITTSSPVAFNPFLIPGVSPGLIYPSMFLSPGMGMALPAMQQARHSEIVGLESQKRKKKKTKGDNPNSHPEPAPSCEREPSGDENCAEPSAPLPAEREHGAQAGEGALKDSNNDTN

SEQ ID NO: 3550 - protein, 82 aa, Homo sapiens
  misc_feature (1)...(82): Xaa = any amino acid or nothing
QLNLNKIATSQKHRDFVAESVGEKPVGSLAGIGEVMDKKLEEGCFDKAYVVLGQFLVLKKDEDLFXEWLRDTGGARTRGSRE

SEQ ID NO: 3551 - protein, 1301 aa, Homo sapiens
  misc_feature (1)...(1301): Xaa = any amino acid or nothing
GDLLEVGLPPGLEFPRGICLRGLRRTMSLDFGSVALPVQNEDEEYDEEDYEREKELQQLLTDLPHDMLDDDLSSPELQYSDCSEDGTDGQPHHPEQLEMSWNEQMLPKSQSVNGPSCQGLEPYNKVTYKPYQSSAQNNGSPAQEITGSDTFEGLQQQFLGANENSAENMQIIQLQVLNKAKERQLENLIEKLNESERQIRYLNHQLVIIKDEKDGLTLSLRESQKLFQNGKEREIQLEAQIKALETQIQALKVNEEQMIKKSRTTEMALESLKQQLVDLHHSESLQRAREQHESIVMGLTKKYEEQVLSLQKNLDATVTALKEQEDICSRLKDHVKQLERNQEAIKLEKTEIINKLTRSLEESQKQCAHLLQSGSVQEVAQLQFQLQQAQKAHAMSANMNKALQEELTELKDEISLYESAAKLGIHPSDSEGELNIELTESYVDLGIKKVNWKKSKVTSIVQEEDPNEELSKDEFILKLKAEVQRLLGSNSMKRHLVSQLQNDLKDCHKKIEDLHQVKKDEKSIEVETKTDTSEKPKNQLWPESSTSDVVRDDILLLKNEIQVLQQQNQELKETEGKLRNTNQDLCNQMRQMVQDFDHDKQEAVDRCERTYQQHHEAMKTQIRESLLAKHALEKQQLFEAYERTHLQLRSELDKLNKEVTAVQECYLEVCREKDNLELTLRKTTEKEQQTQEKIKEKLIQQLEKEWQSKLDQTIKAMKKKTLDCGSQTDQVTTSDVISKKEMAIMIEEQKCTIQQNLEQEKDIAIKGAMKKLEIELELKHCENITKQVEIAVQNAHQRWLGELPELAEYQALVKAEQKKWEEQHEVSVNKRISFAVSEAKEKWKSELENMRKNILPGKELEEKIHSLQKELELKNEEVPVVIRAELAKARSEWNKEKQEEIHRIQEQNEQDYRQFLDDHRNKINEVLAAAKEDFMKQKTELLLQKETELQTCLDQSRREWTMQEAKRIQLEIYQYEEDILTVLGVLLSDTQKEHISDSEDKQLLEIMSTCSSKWMSVQYFEKLKGCIQKAFQDTLPLLVENADPEWKKRNMAELSKDSASQGTGQGDPGPAAGHHAQPLALQATEAEADKKKVLEIKDLCCGHCFQELEKAKQECQDLKGKLEKCCRHLQHLERKHKAVVEKIGEENNKVVEELIEENNDMKNKLEELQTLCKTPPRSLSAGAIENACLPCSGGALEELRGQYIKAVKKIKCDMLRYIQESKERAAEMVKAEVLXERQETARKMRKYYLICLQQILQDDGKEGAEKKIMNAASKLATMAKLLETPISSKSQSKTTQSGMSK

SEQ ID NO: 3552 - protein, 131 aa, Homo sapiens
  misc_feature (1)...(131): Xaa = any amino acid or nothing
ARTRQTSGQAREPEKESPAPGGGGLAEIRSRQQLSQTSRIPPLAKDQAVEAMFPPARGKELLSFEDVAMYFTREEWGHLNWGQKDLYRDVMLENYRNMVLLVYFQFDAAIPLCXTSLAHSSWLQLYFRLYF

SEQ ID NO: 3553 - protein, 529 aa, Homo sapiens
  misc_feature (1)...(529): Xaa = any amino acid or nothing
PGVRGVEAPGGVAPGRNAMRRGERRDAGGPRPESPVPAGRASLEEPPDGPSAGQATGPGEGRRSTESEVYDDGTNTFFWRAHTLTVLFILTCTLGYVTLLEETPQDTAYNTKRGIVASILVFLCFGVTQAKDGPFSRPHPAYWRFWLCVSVVYELFLIFILFQTVQDGRQFLKYVDPKLGVPLPERDYGGNCLIYDPDNETDPFHNIWDKLDGFVPAHFLGWYLKTLMIRDWWMCMIISVMFEFLEYSLEHQLPNFSECWWDHWIMDVLVCNGLGIYCGMKTLEWLSLKTYKWQGLWNIPTYKGKMKRIAFQFTPYSWVRFEWKPASSLRRWLAVCGIILVFLLAELNTFYLKFVLWMPPEHYLVLLRLVFFVNVGGVAMREIYDFMDDPKPHKKLGPQAWLVAAITATELLIVVKYDPHTLTLSLPFYISQCWTLGSVLALTWTVWRFFLRDITLRYKETRWQKWQNKDDQGSTVGNGDQHPLGLDEDLLGPGVAEGEGAPTPNXPRGPAPRPLPSAPRAVCGASSRR

SEQ ID NO: 3554 - protein, 701 aa, Homo sapiens
  misc_feature (1)...(701): Xaa = any amino acid or nothing
FDEFSALPSPSLQTSWSFGPMSRRALRRLRGEQRGQEPLGPGALHFDLRDDDDAEEEGPKRELGVRRPGGAGKEGVRVNNRFELINIDDLEDDPVVNGERSGCALTDAVAPGNKGRGQRGNTESKTDGDDTETVPSEQSHASGKLRKKKKKQKNKKSSTGEASENGLEDIDRILERIEDSTGLNRPGPAPLSSRKHVLYVEHRHLNPDTELKRYFGARAILGEQRPRQRQRVYPKCTWLTTPKSTWPRYSKPGLSMRLLESKKGLSFFAFEHSEEYQQAQHKFLVAVESMEPNNIVVLLQTSPYHVDSLLQLSDACRFQEDQEMARDLVERALYSMECAFHPLFSLTSGACRLDYRRPENRSFYLALYKQMSFLEKRGCPRTALEYCKLILSLEPDEDPLCMLLLIDHLALRARNYEYLIRLFQEWEVGASLAHRNLSQLPNFAFSVPLAYFLLSQQTDLPECEQSSARQKASLLIQQALTMFPGVLLPLLESCSVRPDASVSSHRFFGPNAEISQPPALSQLVNLYLGRSHFLWKEPATMSWLEENVHEVLQAVDAGDPAVEACENRRKVLYQRAPRNIHRHVILSEIKEAVAALPPDVTTQSVMGFDPLPPSDTIYSYVRPERLSPISHGNTIALFFRSLLPNYTMEGERPEEGVAGGLNRNQGLNRLMLAVRDMMANFHLNDLEAPHEDDAXGEGEWD

SEQ ID NO: 3555 - protein, 701 aa, Homo sapiens; identical to SEQ ID NO: 3554
  misc_feature (1)...(701): Xaa = any amino acid or nothing

SEQ ID NO: 3556 - protein, 579 aa, Homo sapiens
  misc_feature (1)...(579): Xaa = any amino acid or nothing
KTRGTMFYYPNVLQRHTGCFATIWLAATRGSRLVKREYLRVNVVKTCEEILNYVLVRVQPPQPGLPRPRFSLYLSAQLQIGVIRVYSQQCQYLVEDIQHILERLHRAQLQIRIDMETELPSLLLPNHLAMMETLEDAPDPFFGMMSVDPRLPSPFDIPQIRHLLEAAIPERVEEIPPEVPTEPREPERIPVTVLPPEAITILEAEPIRMLEIEGERELPEVSRRELDLLIAEEEEAILLEIPRLPPPAPAEXGQELLDQVGCQCWEGSPHFSCPFPLRVEGMGEALGPEELRLTGWEPGALLMEVTPPEELRLPAPPSPERRPPVPPPPRRRRRRRLLFWDKETQISPEKFQEQLQTRAHCWECPMVQPPERTIRGPAELFRTPTLSGWLPPELLGLWTHCAQPPPKALRRELPEEAAAEEERRKIEVPSEIEVPREALEPSVPLMVSLEISLEAAEEEKSRISLIPPEERWAWPEVEAPEAPALPVVPELPEVPMEMPLVLPPELELLSLEAVHRAVALELQANREPDFSSLVSPLSPRRMAARVFYLLLVLSAQQILHVKQEKPYGRLLIQPGPRFH

SEQ ID NO: 3557 - protein, 579 aa, Homo sapiens; identical to SEQ ID NO: 3556
  misc_feature (1)...(579): Xaa = any amino acid or nothing

SEQ ID NO: 3558 - protein, 623 aa, Homo sapiens
  misc_feature (1)...(623): Xaa = any amino acid or nothing
IRPRPRGRRRALDSPNAAAPPVYVCRSPGEPTSLVNMASEDIAKLAETLAKTQVAGGQLSFKGKSLKLNTAEDAKDVIKEIEDFDSLEALRLEGNTVGVEAARVIAKALXKKSELKRCHWSDMFTGRLRTEIPPALISLGEGLITAGAQLVELDLSDNAFGPDGVQGFEALLKSSACFTLQELKLNNCGMGIGGGKILAAALTECHRKSSAQGKPLALKVFVAGRNRLENDGATALAEAFRVIGTLEEVHMPQNGINHPGITALAQAFAVNPLLRVINLNDNTFTEKGAVAMAETLKTLRQVEVINFGDCLVRSKGAVAIADAIRGGLPKLKELNLSFCEIKRDAALAVAEAMADKAELEKLDLNGNTLGEEGCEQLQEVLEGFNMAKVLASLSDDEDEEEEEEGEEEEEEAEEEEEEDEEEEEEEEEEEEEEPQQRGQGEKSATPSRKILDPNTGEPAPVLSSPPPADVSTFLAFPSPEKLLRLGPKSSVLIAQQTDTSDPEKVVSAFLKVSSVFKDEATVRMAVQDAVDALMQKAFNSSSFNSNTFLTRLLVHMGLLKSEDKVKAIANLYGPLMALNHMVQQDYFPKALAPLLLAFVTKPNSALESCSFARHSLLQTLYKV

SEQ ID NO: 3559 - protein, 623 aa, Homo sapiens; identical to SEQ ID NO: 3558
  misc_feature (1)...(623): Xaa = any amino acid or nothing

SEQ ID NO: 3560 - protein, 398 aa, Homo sapiens
  misc_feature (1)...(398): Xaa = any amino acid or nothing
FVRELPRPRPGAATAAIMVSVINTVDTSHEDMIHDAQMDYYGTRLATCSSDRSVKIFDVRNGGQILIADLRGHEGPVWQVAWAHPMYGNILASCSYDRKVIIWREENGTWEKSHEHAGHDSSVNSVCWAPHDYGLILACGSSDGAISLLTYTGEGQWEVKKINNAHTIGCNAVSWAPAVVPGSLIDHPSGQKPNYIKRFASGGCDNLIKLWKEEEDGQWKEEQKLEAHSDWVRDVAWAPSIGLPTSTIASCSQDGRVFIWTCDDASSNTWSPKLLHKFNDVVWHVSWSITANILAVSGGDNKVTLWKESVDGQWVCISDVNKGQGSVSASVTEGQQNEQXQDRWGLAPHPPAPGLPLPGPTNQTTGKSPQLQQDYFPRRSYRCSHRLIICLNVIGDAL

SEQ ID NO: 3561 - protein, 151 aa, Homo sapiens
  misc_feature (1)...(151): Xaa = any amino acid or nothing
WRVKEMTSTLPKALGRKTASRSHTTLQGGSCCPVLWTAKLRCRKLRFPLPPPPPSSSAWPWQGWGIRGEQEAEGPLGETGPPVGPELSGLRQWRKLIKGRYGEWRGSGQKTGQPSXTTMQGGETEENRTETTTGNKQRESEAPWVRHTYIT

SEQ ID NO: 3562 - protein, 559 aa, Homo sapiens
PMMAMPFFERFKSSIQRPSPVLVLSQNTKRESGRKVQSGNINAAKTIADIIRTCLGPKSMMKMLLDPMGGIVMTNDGNAILREIQVQHPAAKSMIEISRTQDEEVGDGTTSVIILAGEMLSVAEHFLEQQMHPTVVISAYRKALDDMISTLKKISIPVDISDSDMMLNIINSSITTKAISRWSSLACNIALDAVKMVQFEENGRKEIDIKKYARVEKIPGGIIEDSCVLRGVMINKDVTHPRMRRYIKNPRIVLLDSSLEYKKGESQTDIEITREEDFTRILQMEEEYIQQLCEDIIQLKPDVVITEKGISDLAQHYLMRANITAIRRVRKTDNNRIARACGARIVSRPEELREDDVGTGAGLLEIKKIGDEYFTFITDCKDPKACTILLRGASKEILSEVERNFQDAMQVCRNVLLDPQLVPGGGASEMAVAHALTEKSKAMTGVEQWPYRAVAQALEVIPRTLIQNCGASTIRLLTSLRAKHTQENCETWGVNGETGTLVDMKELGIWEPLAVKLQTYKTAVETAVLLLRIDDIVSGHKKKGDDQSRQGGAPDAGQE

SEQ ID NO: 3563 - protein, 337 aa, Homo sapiens
GPSLLGTRGTPNPARTLQIFFLIIGRRLTGRMAAVDDLQFEEFGNAATSLTANPDATTVNIEDPGETPKHQPGSPRGSGREEDDELLGNDDSDKTELLAGQKKSSPFWTFEYYQTFFDVDTYQVFDRIKGSLLPIPGKNFVRLYIRSNPDLYGPFWICATLVFAIAISGNLSNFLIHLGEKTYHYVPEFRKVSIAATIIYAYAWLVPLALWGFLMWRNSKVMNIVSYSFLEIVCVYGYSLFIYIPTAILWIIPHKAVRWILVMIALGISGSLLAMTFWPAVREDNRRVALATIVTIVLLHMLLSVGCLAYFFDAPEMDHLPTTTATPNQTVAAAKSS

SEQ ID NO: 3564 - protein, 109 aa, Homo sapiens
NSRVDDFVAHLQRPLLGPASCLGILRPAMTAHSFALPGIIFTTFWGLVGIAGPWFVPKGPNRGVIITMLVATAVCCYLFWLIAILAQLNPLFGPQLKNETIWYVRFLWE

SEQ ID NO: 3565 - protein, 359 aa, Homo sapiens
FVTDFPARSMAATSLMSALAARLLQPAHSCSLRLRPFHLAAVRNEAVVISGRKLAQQIKQEVRQEVEEWVASGNKRPHLSVILVGENPASHSYVLNKTRAAAVVGINSETIMKPASISEEELLNLINKLNNDDNVDGLLVQLPLPEHIDERRICNAVSPDKDVDGFHVINVGRMCLDQYSMLPATPWGVWEIIKRTGIPTLGKNVVVAGRSKNVGMPIAMLLHTDGAHERPGGDATVTISHRYTPKEQLKKHTILADIVISAAGIPNLITADMIKEGAAVIDVGINRVHDPVTAKPKLVGDVDFEGVRQKAGYITPVPGGVGPMTVAMLMKNTIIAAKKVLRLEEREVLKSKELGVATN

SEQ ID NO: 3566 - protein, 375 aa, Homo sapiens
SCRRGRQQQRRNVSLSSQFAHTMAAPAQQTTQPGGGKRKGKAQYVLAKRARRCDAGGPRQLEPGLQGILITCNMNERKCVEEAYSLLNEYGDDMYGPEKFTDKDQQPSGSEGEDDDAEAALKKEVGDIKASTEMRLRRFQSVESGANNVVFIRTLGIEPEKLVHHILQDMYKTKKKKTRVILRMLPISGTCKAFLEDMKKYAETFLEPWFKAPNKGTFQIVYKSRNNSHVNREEVIRELAGIVCTLNSENKVDLTNPQYTVVVEIIKAVCCLSVVKDYMLFRKYNLQEVVKSPKDPSQLNSKQGNGKEAKLESADKSDQNNTAEGKNNQQVPENTEELGQTKPTSNPQVVNEGGAKPELASQATEGSKSNENDFS

SEQ ID NO: 3567 - protein, 1083 aa, Homo sapiens
GKKDSSPWTCPFHPPLQLFFVIRNTRQLGDFHLAKIKVRNYWTADGDLDIGAKNVKLYVNRNLIFNGKLDKGDREAPADHSILVDQKNEKSEQLEEAMNAHSEESKGTHEMAGASGDKELGLGCSPPAETLADAKLSSQGNVSGKRKNSTNCRKDSLSQLEEYLRLSAVPTSMGDMPSAPATSPPVKCPPVHEEPSLIQQLENLMGRKICEPPGKTPSWLQPSPTGKDRKQGGRKPKPLWLSPEKPLAWKGRLPSDDVIGEGPGETEARDKGLRHEPGWGTSRSVNTKERPQRATTKVHSDDSDIFNQPPNRERPASGRRGSRKDAGSSSHGDDQPASREDTWSSRTPSRSRWRSEQEHTLHESWSSLSAFDRSHRGRISNTELPGDILDELLQQKSSRHSDLPPSKKGEQPGLSRGQDGYSGETDAGGDFKIPVLPYGQRLVIDIKSTWGDRHYVGLNGIEIFSSKGEPVQISNIKADPPDINILPAYGKDPRVVTNLIDGVNRTQDDMHVWLAPFTRGRSHSITIDFTHPCHVALIRIWNYNKSRIHSFRGVKDITMLLDTQCIFEGEIAKASGTLAGAPEHFGDTILFTTDDDILEAIFYSDEMFDLDVGSLDSLQDEEAMRRPSTADGEGDERPFTQAGLGADERIPELELPSSSPVPQVTTPEPGIYHGICLQLNFTASWGDLHYLGLTGLEVVGKEGQALPIHLHQISASPRDLNELPEYSDDSRTLDKLIDGTNITMEDEHMWLIPFSPGLDHVVTIRLDRAESIAGLRFWNYNKSPEDTYRGAKIVHVSLDGLCVSPPEGFLIRKGPGNCHFDFAQEILFVDYLRAQLLPQPARRLDMRSLECASMDYEAPLMPCGFIFQFQLLTSWGDPYYIGLTGLELYDERGEKIPLSENNIAAFPDSVNSLEGVGGDVRTPDKLIDQVNDTSDGRHMWLAPILPGLVNRVYVIFDLPTTVSMIKLWNYAKTPHRGVKEFGLLVDDLLVYNGILAMVSHLVGGILPTCEPTVPYHTILFTEDRDIRHQEKHTTISNQAEDQDVQMMNENQIITNAKRKQSVVDPALRPKTCISEKETRRRRC

SEQ ID NO: 3568 - protein, 558 aa, Homo sapiens
AQGGTLSAASRFCRGGLLGPWLHPASEMAATLDLKSKEEKDAELDKRIEALRRKNEALIRRYQEIEEDRKKAELEGVAVTAPRKGRSVEKENVAVESEKNLGPSRRSPGTPRPPGASKGGRTPPQQGGRAGMGRASRSWEGSPGEQPRGGGAGGRGRRGRGRGSPHLSGAGDTSISDRKSKEWEERRRQNIEKMNEEMEKIAEYERNQREGVLEPNPVRNFLDDPRRRSGPLEESERDRREESRRHGRNWGGPDFERVRCGLEHERQGRRAGLGSAGDMTLSMTGRERSEYLRWKQEREKIDQERLQRHRKPTGQWRREWDAEKTDGMFKDGPVPAHEPSHRYDDQAWARPPKPPTFGEFLSQHKAEASSRRRRKSSRPQAKAAPRAYSDHDDRWETKEGAASPAPETPQPTSPETSPKETPMQPPEIPAPAHRPPEDEGEENEGEEDEEWEDISEDEEEEEIEVEEGDEEEPAQDHQAPEAAPTGIPCSEQAHGVPFSPEEPLLEPQAPGTPSSPFSPPSGHQPVSDWGEEVELNSPRTTHLAGALSPGEAWPFESV

SEQ ID NO: 3569 - protein, 304 aa, Homo sapiens
MGRVGRAGVQLGRRRTTWAAERTGQAAAGGPGRALRGQRPDLRSGGAADSPAAGRGELYCGVLPRSPWFLSERRRQMADFDTYDDRAYSSFGGGRGSRGSAGGHGSRSQKELPTEPPYTAYVGNLPFNTVQGDIDAIFKDLSIRSVRLVRDKDTDKFKGFCYVEFDEVDSLKEALTYDGALLGDRSLRVDIAEGRKQDKGGFGFRKGGPDDRGFRDDFLGGRGGSRPGDRRTGPPMGSRFRDGPPLRGSNMDFREPTEEERAQRPRLQLKPRTVATPLNQVANPNSAIFGGARPREEVVQKEQE

SEQ ID NO: 3570 - protein, 304 aa, Homo sapiens; identical to SEQ ID NO: 3569

SEQ ID NO: 3571 - protein, 34 aa, Homo sapiens
RHFFGNLCAMRAKWRKKRMRRLKRKRRKMRQRSK

SEQ ID NO: 3572 - protein, 399 aa, Homo sapiens
QSEPHRKVRVDPPVRDRPPPHPPPLLVQRALPGQGQAEGSDGADGAKRRAMAHQTGIHATEELKEFFAKARAGSVRLIKVVIEDEQLVLGASQEPVGRWDQDYDRAVLPLLDAQQPCYLLYRLDSQNAQGFEWLFLAWSPDNSPVRLKMLYAATRATVKKEFGGGHIKDELFGTVKDDLSFAGYQKHLSSCAAPAPLTSAERELQQIRINEVKTEISVESKHQTLQGLAFPLQPEAQRALQQLKQKMVNYIQMKLDLERETIELVHTEPTDVAQLPSRVPRDAARYHFFLYKHTHEGDPLESVVFIYSMPGYKCSIKERMLYSSCKSRLLDSVEQDFHLEIAKKIEIGDGAELTAEFLYDEVHPKQHAFKQAFAKPKGPGGKRGHKRLIRGPGENGDDS

SEQ ID NO: 3573 - protein, 607 aa, Homo sapiens
PHCEPNPGAGAMVLLHVLFEHAVGYALLALKEVEEISLLQPQVEESVLNLGKFHSIVRLVAFCPFASSQVALENANAVSEGVVHEDLRLLLETHLPSKKKKVLLGVGDPKIGAAIQEELGYNCQTGGVIAEILRGVRLHFHNLVKGLTDLSACKAQLGLGHSYSRAKVKFNVNRVDNMIIQSISLLDQLDKDINTFSMRVREWYGYHFPELVKIINDNATYCRLAQFIGNRRELNEDKLEKLEELTMDGAKAKAILDASRSSMGMDISAIDLINIESFSSRVVSLSEYRQSLHTYLRSKMSQVAPSLSALIGEAVGARLIAHAGSLTNLAKYPASTVQILGAEKALFRALKTRGNTPKYGLIFHSTFIGRAAAKNKGRISRYLANKCSIASRIDCFSEVPTSVFGEKLREQVEERLSFYETGEIPRKNLDVMKEAMVQAEAEEAAAEITRKLEKQEKKRLKKEKKRLAALALASSENSSSTPEECEETSEKPKKKKKQKPQEVPQENGMEDPSISFSKPKKKKSFSKEELMSSDLEETAGSTSIPKRKKSTPKEETVNDPEEAGHRSRSKKKRKFSKEEPVSSGPEEAVGKSSSKKKKKFHKASQED

SEQ ID NO: 3574 - protein, 582 aa, Homo sapiens
CGNERTARLWVQPVVSTMPQASEHRLGRTREPPVNIQPRVGSKLPFAPRARSKERRNPASGPNPMLRPLPPRPGLPDERLKKLELGRGRTSGPRPRGPLRADHGVPLPGSPPPTVALPLPSRTNLARSKSVSSGDLRPMGIALGGHRGTGELGAALSRLALRPEPPTLRRSTSLRRLGGFPGPPTLFSIRTEPPASHGSFHMISARSSEPFYSDDKMAHHTLLLGSGHVGLRNLGNTCFLNAVLQCLSSTRPLRDFCLRRDFRQEVPGGGRAQELTEAFADVIGALWHPDSCEAVNPTRFRAVFQKYVPSFSGYSQQDAQEFLKLLMERLHLEINRRGRRAPPILANGPVPSPPRRGGALLEEPELSDDDRANLMWKRYLEREDSKIVDLFVGQLKSCLKCQACGYRSTTFEVFCDLSLPIPKKGFAGGKVSLRDCFNLFTKEEELESENAPVCDRCRQKTRSTKKLTVQRFPRILVLHLNRFSASRGSIKKSSVGVDFPLQRLSLGDFASDKAGSPVYQLYALCNHSGSVHYGHYTALCRCQTGWHVYNDSRVSPVSENQVASSEGYVLFYQLMQEPPRCL

SEQ ID NO: 3575 - protein, 802 aa, Homo sapiens
RELDSLADLPERIKPPYANGLSTSHLRSSSVEDVKLIISEGRPTIEVRRCSMPSVICEHTKQFQTISEESNQGSLLTVPGDTSPSPKPEVFSNVPERDLSNVSNIHSSFATSPTGASNSKYVSADRNLIKNTAPVNTVMDSPVHLEPSSQVGVIQNKSWEMPVDRLETLSTRDFICPNSNIPDQESSLQSFCNSENKVLKENADFLSLRQTELPGNSCAQDPASFMPPQQPCSFPSQSLSDAESISKHMSLSYVANQEPGILQQKNAVQIISSALDTDNESTKDTENTFVLGDVQKTDAFVPVYSDSTIQEASPNFEKAYTLPVLPSEKDFNGSDASTQLNTHYAFSKLTYKSSSGHEVENSTTDTQVISHEKENKLESLVLTHLSRCDSDLCEMNAGMPKGNLNEQDPKHCPESEKCLLSIEDEESQQSILSSLENHSQQSTQPEMHKYGQLVKVELEENAEDDKTENQIPQRMTRNKANTMANQSKQILASCTLLSEKDSESSSPRGRIRLTEDDDPQIHHPRKRKVSRVPQPVQVSPSLLQAKEKTQQSLAAIVDSLKLDEIQPYSSERANPYFEYLHIRKKIEEKRKLLCSVIPQAPQYYDEYVTFNGSYLLDGNPLSKICIPTITPPPSLSDPLKELFRQQEVVRMKLRLQHSIEREKLIVSNEQEVLRVHYRAARTLANQTLPFSACTVLLDAEVYNVPLDSQSDDSKTSVRDRFNARQFMSWLQDVDDKFDKLKTCLLMRQQHEAAALNAVQRLEWQLKLQELDPATYKSISIYEIQEFYVPLVDVNDDFELTPI

SEQ ID NO: 3576 - protein, 472 aa, Homo sapiens
LRLAWHDGARWPLGTPRAAATRREAAALPPVTLALLCLDGVFLSSAENDFVHRIQEELDRFLLQKQLSKVLLFPPLSSRLRYLIHRTAENFDLLSSFSVGEGWKRRTVICHQDIRVPSSDGLSGPCRAPASCPSRYHGPRPISNQGAAAVPRGARAGRWYRGRKPDQPLYVPRVLRRQEEWGLTSTSVLKREAPAGRDPEEPGDVGAGDPNSDQGLPVLMTQGTEDLKGPGQRCENEPLLDPVGPEPLGPESQSGKGDMVEMATRFGSTLQLDLEKGKESLLEKRLVAEEEEDEEEVEEDGPSSCSEDDYSELLQEITDNLTKKEIQIEKIHLDTSSFMEELPGEKDLAHVVEIYDFEPALKTEDLLATFSEFQEKGFRIQWVDDTHALGIFPCRASAAEALTREFSVLKIRPLTQGTKQSKLKALQRPKLLRLVKERPQTNATVARRLVARALGLQHKKKERPAVRGPLPP

SEQ ID NO: 3577 - protein, 631 aa, Homo sapiens
DTRTPGSLEMGPLQFRDVAIEFSLEEWHCLDTAQRNLYRNVMLENYSNLVFLGIVVSKPDLIAHLEQGKKPLTMKRHEMVANPSGPVICSHFAQDLWPEQNIKDSFQKVILRRYEKRGHGNLQLIKRCESVDECKVHTGGYNGLNQCSTTTQSKVFQCDKYGKVFHKFSNSNRHNIRHTEKKPFKCIECGKAFNQFSTLITHKKIHTGEKPYICEECGKAFKYSSALNTHKRIHTGEKPYKCDKCDKAFIASSTLSKHEIIHTGKKPYKCEECGKAFNQSSTLTKHKKIHTGEKPYKCEECGKAFNQSSTLTKHKKIHTGEKPYVCEECGKAFKYSRILTTHKRIHTGEKPYKCNKCGKAFIASSTLSRHEFIHMGKKHYKCEECGKAFIWSSVLTRHKRVHTGEKPYKCEECGKAFKYSSTLSSHKRSHTGEKPYKCEECGKAFVASSTLSKHEIIHTGKKPYKCEECGKAFNQSSSLTKHKKIHTGEKPYKCEECGKAFNQSSSLTKHKKIHTGEKPYKCEECGKAFNQSSTLIKHKKIHTREKPYKCEECGKAFHLSTHLTTHKILHTGEKPYRCRECGKAFNHSATLSSHKKIHSGEKPYECDKCGKAFISPSSLSRHEIIHTGEKP

SEQ ID NO: 3578 - protein, 427 aa, Homo sapiens
RPRRRGTHHFSCVLGSFRVSAMFPRVSTFLPLRPLSRHPLSSGSPETSAAAIMLLTVRHGTVRYRSSALLARTKNNIQRYFGTNSVICSKKDKQSVRTEETSKETSESQDSEKENTKKDLLGIIKGMKVELSTVNVRTTKPPKRRPLKSLEATLGRLRRATEYAPKKRIEPLSPELVAAASAVADSLPFDKQTTKSELLSQLQQHEEESRAQRDAKRPKISFSNIISDMKVARSATARVRSRPELRIQFDEGYDNYPGQEKTDDLKKRKNIFTGKRLNIFDMMAVTKEAPETDTSPSLWDVEFAKQLATVNEQPLQNGFEELIQWTKEGKLWEFPINNEAGFDDDGSEFHEHIFLEKHLESFPKQGPIRHFMELVTCGLSKNPYLSVKQKVEHIEWFRNYFNEKKDILKESNIQFKLRPWKFLFRNN

SEQ ID NO: 3579 - protein, 427 aa, Homo sapiens; identical to SEQ ID NO: 3578

SEQ ID NO: 3580 - protein, 684 aa, Homo sapiens
LYCVAPYSRHLLGRMSHLPMKLLRKKIEKRNLKLRQRNLKFQGASNLTLSETQNGDVSEETMGSRKVKKSKQKPMNVGLSETQNGGMSQEAVGNIKVTKSPQKSTVLTNGEAAMQSSNSESKKKKKKKRKMVNDAEPDTKKAKTENKGKSEEESAETTKETENNVEKPDNDEDESEVPSLPLGLTGAFEDTSFASLCNLVNENTLKAIKEMGFTNMTEIQHKSIRPLLEGRDLLAAAKTGSGKTLAFLIPAVELIVKLRFMPRNGTGVLILSPTRELAMQTFGVLKELMTHHVHTYGLIMGGSNRSAEAQKLGNGINIIVATPGRLLDHMQNTPGFMYKNLQCLVIDEADRILDVGFEEELKQIIKLLPTRRQTMLFSATQTRKVEDLARISLKKEPLYVGVDDDKANATVDGLEQGYVVCPSEKRFLLLFTFLKKNRKKKLMVFFSSCMSVKYHYELLNYIDLPVLAIHGKQKQNKRTTTFFQFCNADSGTLLCTDVAARGLDIPEVDWIVQYDPPDDPKEYIHRVGRTARGLNGRGHALLILRPEELGFLRYLKQSKVPLSEFDFSWSKISDIQSQLEKLIEKNYFLHKSAQEAYKSYIRAYDSHSLKQIFNVNNLNLPQVALSFGFKVPPFVDLNVNSNEGKQKKRGGGGGFGYQKTKKVEKSKIFKHISKKSSDSRQFSH

SEQ ID NO: 3581 - protein, 143 aa, Homo sapiens
LCRCICIKNITPHCLWDKVLSQFTYILDNLSNFMSHHPHSLRNSCLIRMDLLYWQFTIYTITFCFSHLSGRLTLSAQHISHRPCLLSYSLLFWKVHHLFLEGFPCSPRLDEMSFHQFPQHPVHVSVVHLPIVYKGSMTQVSPH

SEQ ID NO: 3582 - protein, 315 aa, Homo sapiens
TRGCGNKMAGKKNVLSSLAVYAEDSEPESDGEAGIEAVGSAAEEKGGLVSDAYGEDDFSRLGGDEDGYEEEEDENSRQSEDDDSETEKPEADDPKDNTEAEKRDPQELVASFSERVRNMSPDEIKIPPEPPGRCSNHLQDKIQKLYERKIKEGMDMNYIIQRKKEFRNPSIYEKLIQFCAIDELGTNYPKDMFDPHGWSEDSYYEALAKAQKIEMDKLEKAKKERTKIEFVTGTKKGTTTNATSTTTTTASTAVADAQKRKSKWDSAIPVTTIAQPTILTTTATLPAVVTVTTSASGSKTTVISAVGTIVKKAKQ

SEQ ID NO: 3583 - protein, 315 aa, Homo sapiens; identical to SEQ ID NO: 3582

SEQ ID NO: 3584 - protein, 379 aa, Homo sapiens
PGSTISSRADRLGAPVLAHPKMAERQEEQRGSPPLRAEGKADAEVKLILYHWTHSFSSQKVRLVIAEKALKCEEHDVSLPLSEHNEPWFMRLNSTGEVPVLIHGENIICEATQIIDYLEQTFLDERTPRLMPDKESMYYPRVQHYRELLDSLPMDAYTHGCILHPELTVDSMIPAYATTRIRSQIGNTESELKKLAEENPDLQEAYIAKQKRLKSKLLDHDNVKYLKKILDELEKVLDQVETELPRRNEETPEEGQQPWLCGESFTLADVSLAVTLHRLKFLGFARRNWGNGKRPNLETYYERVLKRKTFNKVLGHVNNILISAVLPTAFRVAKKRAPKVLGTTLVVGLLAGVGYFAFMLFRKRLGSMILALRPRPNYF

SEQ ID NO: 3585 - protein, 592 aa, Homo sapiens
RRHSPGSPAFAPSSRATAICPRAARAPATLLLALGAVLWPAAGAWELTILHTNDVHSRLEQTSEDSSKCVNASRCMGGVARLFTKVQQIRRAEPNVLLLDAGDQYQGTIWFTVYKGAEVAHFMNALRYDAMALGNHEFDNGVEGLIEPLLKEAKFPILSANIKAKGPLASQISGLYLPYKVLPVGDEVVGIVGYTSKETPFLSNPGTNLVFEDEITALQPEVDKLKTLNVNKIIALGHSGFEMDKLIAQKVRGVDVVVGGHSNTFLYTGNPPSKEVPAGKYPFIVTSDDGRKVPVVQAYAFGKYLGYLKIEFDERGNVISSHGNPILLNSSIPEDPSIKADINKWRIKLDNYSTQELGKTIVYLDGSSQSCRFRECNMGNLICDAMINNNLRHTDEMFWNHVSMCILNGGGIRSPIDERNNGTITWENLAAVLPFGGTFDLVQLKGSTLKKAFEHSVHRYGQSTGEFLQVGGIHVVYDLSRKPGDRVVKLDVLCTKCRVPSYDPLKMDEVYKVILPNFLANGGDGFQMIKDELLRHDSGDQDINVVSTYISKMKVIYPAVEGRIKFSTGSHCHGSFSLIFLSLWAVIFVLYQ

SEQ ID NO: 3586 - protein, 172 aa, Homo sapiens
LSNKDVLSPQLKDENSKLRRKLNEVQSFSEAQTEMVRTLERKLEAKMIKEESDYHDLESVVQQVEQNLELMTKRAVKAENHVVKLKQEISLLQAQVSNFQRENEALRCGQGASLTVVKQNADVALQNLRVVMNSAQASIEQLVSGAETLNLVAEILKSIDRISEVKDEEEDS

SEQ ID NO: 3587 - protein, 517 aa, Homo sapiens
GCVGRGLPLPPRHPTPPSSSSSPFVLLAFLLLVRLDPAVSGKMAAPRPPPARLSGVMVPAPIQDLEALRALTALFKEQRNRETAPRTIFQRVLDILKKSSHAVELACRDPSQVENLASSLQLITECFRCLRNACIECSVNQNSIRNLDTIGVAVDLILLFRELRVEQESLLTAFRCGLQFLGNIASRNEDSQSIVWVHAFPELFLSCLNHPDKKIVAYSSMILFTSLNHERMKELEENLNIAIDVIDAYQKHPESEWPFLIITDLFLKSPELVQAMFPKLNNQERVTLLDLMIAKITSDEPLTKDDIPVFLRHAELIASTFVDQCKTVLKLASEEPPDDEEALATIRLLDVLCEMTVNTELLGYLQVFPGLLERVIDLLRVIHVAGKETTNIFSNCGCVRAEGDISNVANGFKSHLIRLIGNLCYKNKDNQDKVNELDGIPLILDNCNISDSNPFLTQWVIYAIRNLTEDNSQNQDLIAKMEEQGLADASLLKKVGFEVEKKGEKLILKSTRDTPKP

SEQ ID NO: 3588 - protein, 486 aa, Homo sapiens
DSPRNRFEILGRPTRTPTRPGPRPAMEDLDALLSDLETTTSHMPRSGAPKERPAEPLTPPPSYGHQPQTGSGESSGASGDKDHLYSTVCKPRSPKPAAPAAPPFSSSSGVLGTGLCELDRLLQELNATQFNITDEIMSQFPSSKVASGEQKEDQSEDKKRPSLPSSPSPGLPKASATSATLELDRLMASLSDFRVQNHLPASGPTQPPVVSSTNEGSPSPPEPTGKGSLDTMLGLLQSDLSRRGVPTQAKGLCGSCNKPIAGQVVTALGRAWHPEHFVCGGCSTALGGSSFFEKDGAPFCPECYFERFSPRCGFCNQPIRHKMVTALGTHWHPEHFCCVSCGEPFGDEGFHEREGRPYCRRDFLQLFAPRCQGCQGPILDNYISALSALWHPDCFVCRECFAPFSGGSFFEHEGRPLCENHFHARRGSLCATCGLPVTGRCVSALGRRFHPDHFTCTFCLRPLTKGSFQERAGKPYCQPCFLKLFG

SEQ ID NO: 3589 - protein, 2189 aa, Homo sapiens
SPPKKSRKCNLSFRLISAERWRFFLLILMEMPRKPRLTLFVQRRIENIATEREFDPEEFYYLLEAAEGHAKEGQGIKTDIPRYIISQLGLNKDPLEEMAHLGNYDSGTAETPETDESVSSSNASLKLRRKPRESDFETIKLISNGAYGAVYFVRHKESRQRFAMKKINKQNLILRNQIQQAFVERDILTFAENPFVVSMYCSFETRRHLCMVMEYVEGGDCATLMKNMGPLPVDMARMYFAETVLALEYLHNYGIVHRDLKPDNLLVTSMGHIKLTDFGLSKVGLMSMTTNLYEGHIEKDAREFLDKQVCGTPEYIAPEVILRQGYGKPVDWWAMGIILYEFLVGCVPFFGDTPEELFGQVISDEINWPEKDEAPPPDAQDLITLLLRQNPLERLGTGGAYEVKQHRFFRSLDWNSLLRQKAEFIPQLESEDDTSYFDTRSEKYHHMETEEEDDTNDEDFNVEIRQFSSCSHRFSKVFSSIDRITQNSAEEKEDSVDKTKSTTLPSTETLSWSSEYSEMQQLSTSNSSDTESNRHKLSSGLLPKLAISTEGEQDEAASCPGDPHEEPGKPALPPEECAQEEPEVTTPASTISSSTLSVGSFSEHLDQINGRSECVDSTDNSSKPSSEPASHMARQRLESTEKKKISGKVTKSLSASALSLMIPGDMFAVSPLGSPMSPHSLSSDPSSSRDSSPSRDSSAASASPHQPIVIHSSGKNYGFTIRAIRVYVGDSDIYTVHHIVWNVEEGSPACQAGLKAGDLITHINGEPVHGLVHTEVIELLLKSGNKVSITTTPFENTSIKTGPARRNSYKSRMVRRSKKSKKKESLERRRSLFKKLAKQPSPLLHTSRSFSCLNRSLSSGESLPGSPTHSLSPRSPTPSYRSTPDFPSGTNSSQSSSPSSSAPNSPAGSGHIRPSTLHGLAPKLGGQRYRSGRRKSAGNIPLSPLARTPSPTPQPTSPQRSPSPLLGHSLGNSKIAQAFPSKMHSPPTIVRHIVRPKSAEPPRSPLLKRVQSEEKLSPSYGSDKKHLCSRKHSLEVTQEEVQREQSQREAPLQSLDENVCDVPPLSRARPVEQGCLKRPVSRKVGRQESVDDLDRDKLKAKVVVKKADGFPEKQESHQKFHGPGSDLENFALFKLEEREKKVYPKAVERSSTFENKASMQEAPPLGSLLKDALHKQASVRASEGAMSDGPVPAEHRQGGGDFRRAPAPGTLQDGLCHSLDRGISGKGEGTEKSSQAKELLRCEKLDSKLANIDYLRKKMSLEDKEDNLCPVLKPKMTAGSHECLPGNPVRPTGGQQEPPPASESRAFVSSTHAAQMSAVSFVPLKALTGRVDSGTEKPGLVAPESPVRKSPSEYKLEGRSVSCLEPIEGTLDIALLSGPQASKTELPSPESAQSPSPSGDVRASVPPVLPSSSGKKNDTTSARELSPSSLKMNKSYLLEPWFLPPSRGLQNSPAVSLPDPEFKRDRKGPHPTARSPGTVMESNPQQREGSSPKHQDHTTDPKLLTCLGQNLHSPDLARPRCPLPPEASPSREKPGLRESSERGPPTARSERSAARADTCREPSMELCFPETAKTSDNSKNLLSVGRTHPDFYTQTQAMEKAWAPGGKTNHKDGPGEARPPPRDNSSLHSAGIPCEKELGKVRRGVEPKPEALLARRSLQPPGIESEKSEKLSSFPSLQKDGAKEPERKEQPLQRHPSSIPPPPLTAKDLSSPAARQHCSSPSHASGREPGAKPSTAEPSSSPQDPPKPVAAHSESSSHKPRPGPDPGPPKTKHPDRSLSSQKPSVGATKGKEPATQSLGGSSREGKGHSKSGPDVFPATPGSQNKASDGIGQGEGGPSVPLHTDRAPLDAKPQPTSGGRPLEVLEKPVHLPRPGHPGPSEPADQKLSAVGEKQTLSPKHPKPSTVKDCPTLCKQTDNRQTDKSPSQPAANTDRRAEGKKCTEALYAPAEGDKLEAGLSFVHSENRLKGAERPAAGVGKGFPEARGKGPGPQKPPTEADKPNGMKRSPSATGQSSFRSTALPEKSLSCSSSFPETRAGVREASAASSDTSSAKAAGGMLELPAPSNRDHRKAQPAGEGRTHMTKSDSLPSFRVSTLPLESHHPDPNTMGGASHRDRALSVTATVGETKGKDPAPAQPPPARKQNVGRDVTKPSPAPNTDRPISLSNEKDFVVRQRRGKESLRSSPHKKAL

SEQ ID NO: 3590 - protein, 310 aa, Homo sapiens
RATTRPKNEVQDYVSVEYLSPHMGGTDPFKYSYPPLVDDDFQTPLCENGPITSEDETSSKEDIESDGKETLETISNEEQTPLLKKINPTESTSKAEENEKVDSKVKAFKKPLSVFKGPLLHISPAEELYFGSTESGEKKTLIVLTNVTKNIVAFKVRTTAPEKYRVKPSNSSCDPGASVDIVVSPHGGLTVSAQDRFLIMAAEMEQSSGTGPAELTQFWKEVPRNKVMEHRLRCHTVESSKPNTLTLKDNAFNMSDKTSEDICLQLSRLLESNRKLEDQVQRCIWFQQLLLSLTMLLLAFVTSFFYLLYS

SEQ ID NO: 3591 - protein, 100 aa, Homo sapiens
GGSWGPLCPVSPAMSLSDPGLGYHPTCWTLRWPPLCSLHALHVFHCLFSSRLGTPVSPRLAMDPNCSCEAGGSCACAGSCKCKKCKCTSCKKSCCSCCPL

SEQ ID NO: 3592 - protein, 242 aa, Homo sapiens
GKTMMRKMLLAAALSVTAMTAHADYQCSVTPRDDVIVSPQTVQVKGENGNLVITPDGNVMYNGKQYSLNAAQREQAKDYQAELRSTLPWIDEGAKSRVEKARIALDKIIVQEMGESSKMRSRLTKLDAQVKEQMNRIIETRSDGLTFHYKAIDQVRAEGQQLVNQAMGGILQDSINEMGAKAVLKSGGNPLQNVLGSLGGLQSSIQTEWKKQEKDFQQFGKDVCSRVVTLEDSRKALVGNLK

SEQ ID NO: 3593 - protein, 611 aa, Homo sapiens
LSFEKVDIQTDNDLTKEMYEGKENVSFELQRDFSQETDFSEASLLEKQQEVHSAGNIKKEKSNTIDGTVKDETSPVEECFFSQSSNSYQCHTITGEQPSGCTGLGKSISFDTKLVKHEIINSEERPFKCEELVEPFRCDSQLIQHQENNTEEKPYQCSECGKAFSINEKLIWHQRLHSGEKPFKCVECGKSFSYSSHYITHQTIHSGEKPYQCKMCGKAFSVNGSLSRHQRIHTGEKPYQCKECGNGFSCSSAYITHQRVHTGEKPYECNDCGKAFNGNAKLIQHQRIHTGEKPYECNECGKGFRCSSQLRQHQSIHTGEKPYQCKECGKGFNNNTKLIQHQRIHTASLAEQLFKASGNHPNWGCCLTISSPGPSVYGPKMNMRGAPNSRLAGGREKRTQDTDFGQCSFLPSHSPSCFEPWNVTDYDSSWYRQKQVLSGVWSSPLSILKLPRTLIRISIHIQEMDTPGEMLMTGRGSLGPTLTTEAPAAAQPGKQGPPGTGRCLQAPGTEPGEQTPEGARELSPLQESSSPGGVKAEEEQRAGAEPGTRPSLARSDDNDHEVGALGLQQGKSPGAGNPEPEQDCAARAPVRAEAVRRMPPGAEAGSVVLDD

SEQ ID NO: 3594 - protein, 73 aa, Homo sapiens
RAAMMDTSRVQPIKLAIVIKVLGRTGSQGQCTQVRVEFMDDTSRSIIRSVKGPVREGDVLTLLESEREARRLR

SEQ ID NO: 3595 - protein, 301 aa, Homo sapiens
GRVGTKHQMADDAGAAGGPGGPGGPGMGNRGGFRGGFGSGIRGRGRGRGRGRGRGRGARGGKAEDKEWMPVTKLGRLVKDMKIKSLEEIYLFSLPIKESEIIDFFLGASLKDEVLKIMPVQKQTRAGQRTRFKAFVAIGDYNGHVGLGVKCSKEVATAIRGAIILAKLSIVPVRRGYWGNKIGKPHTVPCKVTGRCGSVLVRLIPAPRGTGIVSAPVPKKLLMMAGIDDCYTSARGCTATLGNFAKATFDAISKTYSYLTPDLWKETVFTKSPYQEFTDHLVKTHTRVSVQRTQAPAVATT

SEQ ID NO: 3596 - protein, 951 aa, Homo sapiens
DERRVGAADMFGRSRSWVGGGHGKTSRNIHSLDHLKYLYHVLTKNTTVTEQNRNLLVETIRSITEILIWGDQNDSSVFDFFLEKNMFVFFLNILRQKSGRYVCVQLLQTLNILFENISHETSLYYLLSNNYVNSIIVHKFDFSDEEIMAYYISFLKTLSLKLNNHTVHFFYNEHTNDFALYTEAIKFFNHPESMVRIAVRTITLNVYKVSLDNQAMLHYIRDKTAVPYFSNLVWFIGSHVIELDDCVQTDEEHRNRGKLSDLVAEHLDHLHYLNDILIINCEFLNDVLTDHLLNRLFLPLYVYSLENQDKGGERPKISLPVSLYLLSQVFLIIHHAPLVNSLAEVILNGDLSEMYAKTEQDIQRSSAKPSIRCFIKPTETLERSLEMNKHKGKRRVQKRPNYKNVGEEEDEEKGPTEDAQEDAEKAKGTEGGSKGIKTSGESEEIEMVIMERSKLSELAASTSVQEQNTTDEEKSAAATCSESTQWSRPFLDMVYHALDSPDDDYHALFVLCLLYAMSHNKGMDPEKLERIQLPVPNAAEKTTYNHPLAERLIRIMNNAAQPDGKIRLATLELSCLLLKQQVLMSAGCIMKDVHLACLEGAREESVHLVRHFYKGEDIFLDMFEDEYRSMTMKPMNVEYLMMDASILLPPTGTPLTGIDFVKRLPCGDVEKTRRAIRVFFMLRSLSLQLRGEPETQLPLTREEDLIKTDDVLDLNNSDLIACTVITKDGGMVQRSLAVDIYQMSLVEPDVSRLGWGVVKFAGLLQDMQVTGVEDDSRALNITIHKPASSPHSKPFPILQATFIFSDHIRCIIAKQRLAKGRIQARRMKMQRIAALLDLPIQPTTEVLGFGLGSSTSTQHLPFRFYDQGRRGSSDPTVQRSVFASVDKVPGFAVAQCINEHSSPSLSSQSPPSASGSPSGSGSTSHCDSGGTSSSSTPSTAQSPAGIGHVTQ

SEQ ID NO: 3597 - protein, 50 aa, Homo sapiens
GVRRIQHHWAQMHECNVHTYASLFCLFLLHTGKLCCLNSHRHFHCIKYSK

SEQ ID NO: 3598 - protein, 167 aa, Homo sapiens
FRPRTKKATAMYLEHYLDSIENLPCELQRNFQLMRELDQRTEDKKAEIDILAAEYISTVKTLSPDQRVERLQKIQNAYSKCKEYSDDKVQLAMQTYEMVDKHIRRLDADLARFEADLKDKMEGSDFESSGGRGLKKGRGQKEKRGSRGRGRRTSEEDTPKKKKHKGG

SEQ ID NO: 3599 - protein, 1301 aa, Homo sapiens
KTITALAFSPDGKYLVTGESGHMPAVRVWDVAEHSQVAELQEHKYGVACVAFSPSAKYIVSVGYQHDMIVNVWAWKKNIVVASNKVSSRVTAVSFSEDCSYFVTAGNRHIKFWYLDDSKTSKVNATVPLLGRSGLLGELRNNLFTDVACGRGKKADSTFCITSSGLLCEFSDRRLLDKWVELRVYPEVKDSNQACLPPSSFITCSSDNTIRLWNTESSGVHGSTLHRNILSSDLIKIIYVDGNTQALLDTELPGGDKADASLLDPRVGIRSVCVSPNGQHLASGDRMGTLRVHELQSLSEMLKVEAHDSEILCLEYSKPDTGLKLLASASRDRLIHVLDAGREYSLQQTLDEHSSSITAVKFAASDGQVRMISCGADKSIYFRTAQKSGDGVQFTRTHHVVRKTTLYDMDVEPSWKYTAIGCQDRNIRIFNISSGKQKKLFKGSQGEDGTLIKVQTDPSGIYIATSCSDKNLSIFDFSSGECVATMFGHSEIVTGMKFSNDCKHLISVSGDSCIFVWRLSSEMTISMRQRLAELRQRQRGGKQQGPSSPQRASGPNRHQAPSMLSPGPALSSDSDKEGEDEGTEEELPALPVLAKSTKKALASVPSPALPRSLSHWEMSRAQESVGFLDPAPAANPGPRRRGRWVQPGVELSVRSMLDLRQLETLAPSLQDPSQDSLAIIPSGPRKHGQEALETSLTSQNEKPPRPQASQPCSYPHIIRLLSQEEGVFAQDLEPAPIEDGIVYPEPSDNPTMDTSEFQVQAPARGTLGRVYPGSRSSEKHSPDSACSVDYSSSCLSSPEHPTEDSESTEPLSVDGISSDLEEPAEGDEEEEEEEGGMGPYGLQEGSPQTPDQEQFLKQHFETLASGAAPGAPVQVPERSESRSISSRFLLQVQTRPLREPSPSSSSLALMSRPAQVPQASGEQPRGNGANPPGAPPEVEPSSGNPSPQQAASVLLPRCRLNPDSSWAPKRVATASPFSGLQKAQSVHSLVPQERHEASLQAPSPGALLSREIEAQDGLGSLPPADGRPSRPHSYQNPTTSSMAKISRSISVGENLGLVAEPQAHAPIRVSPLSKLALPSRAHLVLDIPKPLPDRPTLAAFSPVTKGRAPGEAEKPGFPVGLGKAHSTTERWACLGEGTTPKPRTECQAHPGPSSPCAQQLPVSSLFQGPENLQPPPPEKTPNPMECTKPGAALSQDSEPAVSLEQCEQLVAELRGSVRQAVRLYHSVAGCKMPSAEQSRIAQLLRDTFSSVRQELEAVAGAVLSSPGSSPGAVGAEQTQALLEQYSELLLRAVERRMERKL

SEQ ID NO: 3600 - protein, 257 aa, Homo sapiens
IPGSTISCSMALCEAAGCGSALLWPRLLLFGDSITQFSFQQGGWGASLADRLVRKCDVLNRGFSGYNTRWAKIILPRLIRKGNSLDIPVAVTIFFGANDSALKDENPKQHIPLEEYAANLKSMVQYLKSVDIPENRVILITPTPLCETAWEEQCIIQGCKLNRLNSVVGEYANACLQVAQDCGTDVLDLWTLMQDSQDFSSYLSDGLHLSPKGNEFLFSHLWPLIEKKVSSLPLLLPYWRDVAEAKPELSLLGDGDH

SEQ ID NO: 3601 - protein, 59 aa, Homo sapiens
VHFPLIPQLAKCFWTMNRAARNKSEKRYYSEFLQIAHLFNYGLSSFLREFIIFLIKLLQ

SEQ ID NO: 3602 - protein, 362 aa, Homo sapiens
VPKPASGKRRLEFRPQDSKACAATPHSPGRITSRTRGSQKVRSVPPRLPWAQASASTDWEGLRGVPGPALRRENFLEAAASGRSGRTPTGGVGFRDVGGPHFPIFPAAHFLWCNLHTPRRPACNAPWHSPVGEISPPPRESQLRRDPEVHFESPAHPLGFRLLPGRGLPANAVTVETAAMAAPRQIPSHIVRLKPSCSTDSSFTRTPVPTVSLASRELPVSSWQVTEPSSKNLWEQICKEYEAEQPPFPEGYKVKQEPVITVAPVEEMLFHGFSAEHYFPVSHFTMISRTPCPQDKSETINPKTCSPKEYLETFIFPVLLPGMASLLHQAKKEKCFEVVLQMTPSGGKACVWGHLPSSSHTI

SEQ ID NO: 3603 - protein, 100 aa, Homo sapiens
NISNKAEVSSHPSVISHSMDSFGQPRPEDNQSVLRRMQKKYWKTKQVFIKATGKKEDEHLVASDAELDAKLEVFHSVQETCTELLKIIEKYQLRLNGMKS

SEQ ID NO: 3604 - protein, 779 aa, Homo sapiens
QPRRRVFPAAGRGPGRKCSQWGRQASVSFEDVTVDFSKEEWQHLDPAQRRLYWDVTLENYSHLLSVGYQIPKSEAAFKLEQGEGPWMLEGEAPHQSCSGEAIGKMQQQGIPGGIFFHCERFDQPIGEDSLCSILEELWQDNDQLEQRQENQNNLLSHVKVLIKERGYEHKNIEKIIHVTTKLVPSIKRLHNCDTILKHTLNSHNHNRNSATKNLGKIFGNGNNFPHSPSSTKNENAKTGANSCEHDHYEKHLSHKQAPTHHQKIHPEEKLYVCTECVMGFTQKSHLFEHQRIHAGEKSRECDKSNKVFPQKPQVDVHPSVYTGEKPYLCTQCGKVFTLKSNLITHQKIHTGQKPYKCSECGKAFFQRSDLFRHLRIHTGEKPYECSECGKGFSQNSDLSIHQKTHTGEKHYECNECGKAFTRKSALRMHQRIHTGEKPYVCADCGKAFIQKSHFNTHQRIHTGEKPYECSDCGKSFTKKSQLHVHQRIHTGEKPYICTECGKVFTHRTNLTTHQKTHTGEKPYMCAECGKAFTDQSNLIKHQKTHTGEKPYKCNGCGKAFIWKSRLKIHQKSHIGERHYECKDCGKAFIQKSTLSVHQRIHTGEKPYVCPECGKAFIQKSHFIAHHRIHTGEKPYECSDCGKCFTKKSQLRVHQKIHTGEKPNICAECGKAFTDRSNLITHQKIHTREKPYECGDCGKTFTWKSRLNIHQKSHTGERHYECSKCGKAFIQKATLSMHQIIHTGKKPYACTECQKAFTDRSNLIKHQKMHSGEKRYKASD

SEQ ID NO: 3605 - protein, 106 aa, Homo sapiens
SFRMSGRGKGGKGLGKGGAKRHRKVLRDNIQGITKPAIRRLARRGGVKRISGLIYEETRGVLKVFLENVIRDAVTYTEHAKRKTVTAMDVVYALKRQGRTLYGFGG

SEQ ID NO: 3606 - protein, 583 aa, Homo sapiens
VPVTAEAKLMGFTQGCVTFEDVAIYFSQEEWGLLDEAQRLLYRDVMLENFALITALVCWHGMEDEETPEQSVSVEGVPQVRTPEASPSTQKIQSCDMCVPFLTDILHLTDLPGQELYLTGACAVFHQDQKHHSAEKPLESDMDKASFVQCCLFHESGMPFTSSEVGKDFLAPLGILQPQAIANYEKPNKISKCEEAFHVGISHYKWSQCRRESSHKHTFFHPRVCTGKRLYESSKCGKACCCECSLVQLQRVHPGERPYECSECGKSFSQTSHLNDHRRIHTGERPYVCGQCGKSFSQRATLIKHHRVHTGERPYECGECGKSFSQSSNLIEHCRIHTGERPYECDECGKAFGSKSTLVRHQRTHTGEKPYECGECGKLFRQSFSLVVHQRIHTTARPYECGQCGKSFSLKCGLIQHQLIHSGARPFECDECGKSFSQRTTLNKHHKVHTAERPYVCGECGKAFMFKSKLVRHQRTHTGERPFECSECGKFFRQSYTLVEHQKIHTGLRPYDCGQCGKSFIQKSSLIQHQVVHTGERPYECGKCGKSFTQHSGLILHRKSHTVERPRDSSKCGKPYSPRSNIV

SEQ ID NO: 3607 - protein, 80 aa, Homo sapiens
AMAGPGPGPGDPDEQYDFLFKLVLVGDASVGKTCVVQRFKTGAFSERQGSTIGVDFTMKTLEIQGKRVKLQIWDTAGQER

SEQ ID NO: 3608 - protein, 55 aa, Homo sapiens
AIKGYIHLSAPRNRYMHTTASNGRMLFMKVTMYMRRGVQIMGWSVRMAFMACFTQ

SEQ ID NO: 3609 - protein, 252 aa, Homo sapiens
VWMAWQVSLLELEDRLQCPICLEVFKESLMLQCGHSYCKGCLVSLSYHLDTKVRCPMCWQVVDGSSSLPNVSLAWVIEALRLPGDPEPKVCVHHRNPLSLFCEKDQELICGLCGLLGSHQHHPVTPVSTVCSRMKEELAALFSELKQEQKKVDELIAKLVKNRTRIVNESDVFSWVIRREFQELRHPVDEEKARCLEGIGGHTRGLVASLDMQLEQAQGTRERLAQAECVLEQFGNEDHHEFIWKFHSMASR

SEQ ID NO: 3610 - protein, 328 aa, Homo sapiens
DPRVRPPLLQPPPPLLPRLVILKMAPLDLDKYVEIARLCKYLPENDLKRLCDYVCDLLLEESNVQPVSTPVTVCGDIHGQFYDLCELFRTGGQVPDTNYIFMGDFVDRGYYSLETFTYLLALKAKWPDRITLLRGNHESRQITQVYGFYDECQTKYGNANAWRYCTKVFDMLTVAALIDEQILCVHGGLSPDIKTLDQIRTIERNQEIPHKGAFCDLVWSDPEDVDTWAISPRGAGWLFGAKVTNEFVHINNLKLICRAHQLVHEGYKFMFDEKLVTVWSAPNYCYRCGNIASIMVFKDVNTREPKLFRAVPDSERVIPPRTTTPYFL

SEQ ID NO: 3611 - protein, 530 aa, Homo sapiens
AEKMTAELREAMALAPWGPVKVKKEEEEEENFPGQASSQQVHSENIKVWAPVQGLQTGLDGSEEEEKGQNISWDMAVVLKATQEAPAASTLGSYSLPGTLAKSEILETHGTMNFLGAETKNLQLLVPKTEICEEAEKPLIISERIQKADPQGPELGEACEKGNMLKRQRIKREKKDFRQVIVNDCHLPESFKEEENQKCKKSGGKYSLNSGAVKNPKTQLGQKPFTCSVCGKGFSQSANLVVHQRIHTGEKPFECHECGKAFIQSANLVVHQRIHTGQKPYVCSKCGKAFTQSSNLTVHQKIHSLEKTFKCNECEKAFSYSSQLARHQKVHITEKCYECNECGKTFTRSSNLIVHQRIHTGEKPFACNDCGKAFTQSANLIVHQRSHTGEKPYECKECGKAFSCFSHLIVHQRIHTAEKPYDCSECGKAFSQLSCLIVHQRIHSGDLPYVCNECGKAFTCSSYLLIHQRIHNGEKPYTCNECGKAFRQRSSLTVHQRTHTGEKPYECEKCGAAFISNSHLMRHHRTHLVE

SEQ ID NO: 3612 - protein, 642 aa, Homo sapiens
SPMAEAALVNTPQIPMVTEEFVKPSQGHVTFEDIAVYFSQEEWGLLDEAQRCLYHDVMLENFSLMASVGCLHGIEAEEAPSEQTLSAQGVSQARTPKLGPSIPNAHSCEMCILVMKDILYLSEHQGTLPWQKPYTSVASGKWFSFGSNLQQHQNQDSGEKHIRKEESSALLLNSCKIPLSDNLFPCKDVEKDFPTILGLLQHQTTHSRQEYAHRSRETFQQRRYKCEQVFNEKVHVTEHQRVHTGEKAYKRREYGKSLNSKYLFVEHQRTHNAEKPYVCNICGKSFLHKQTLVGHQQRIHTRERSYVCIECGKSLSSKYSLVEHQRTHNGEKPYVCNVCGKSFRHKQTFVGHQQRIHTGERPYVCMECGKSFIHSYDRIRHQRVHTGEGAYQCSECGKSFIYKQSLLDHHRIHTGERPYECKECGKAFIHKKRLLEHQRIHTGEKPYVCIICGKSFIRSSDYMRHQRIHTGERAYECSDCGKAFISKQTLLKHHKIHTRERPYECSECGKGFYLEVKLLQHQRIHTREQLCECNECGKVFSHQKRLLEHQKVHTGEKPCECSECGKCFRHRTSLIQHQKVHSGERPYNCTACEKAFIYKNKLVEHQRIHTGEKPYECGKCGKAFNKRYSLVRHQKVHITEEP

SEQ ID NO: 3613 - protein, 843 aa, Homo sapiens
NQSHPDSETVTVEGGRRKMKSNQERSNECLPPKKREIPATSRSSEEKAPTLPSDNHRVEGTAWLPGNPGGRGHGGGRHGPAGTSVELGLQQGIGLHKALSTGLDYSPPSAPRSVPVATTLPAAYATPQPGTPVSPVQYAHLPHTFQFIGSSQYSGTYASFIPSQLIPPTANPVTSAVASAAGATTPSQRSQLEAYSTLLANMGSLSQTPGHKAEQQQQQQQQQQQQQQQQQQQQQQQQHQQQQQQQQQQQQQQHLSRAPGLITPGSPPPAQQNQYVHISSSPQNTGRTASPPAIPVHLHPHQTMIPHTLTLGPPSQVVMQYADSGSHFVPREATKKAESSRLQQAIQAKEVLNGEMEKSRRYGAPSSADLGLGKAGGKSVPHPYESRHVVVHPSPSDYSSRDPSGVRASVMVLPNSNTPAADLEVQQATHREASPSTLNDKSGLHLGKPGHRSYALSPHTVIQTTHSASEPLPVGLPATAFYAGTQPPVIGYLSGQQQAITYAGSLPQHLVIPGTQPLLIPVGSTDMEASGAAPAIVTSSPQFAAVPHTFVTTALPKSENFNPEALVTQAAYPAMVQAQIHLPVVQSVASPAAAPPTLPPYFMKGSIIQLANGELKKVEDLKTEDFIQSAEISNDLKIDSSTVERIEDSHSPGVAVIQFAVGEHRAQVSVEVLVEYPFFVFGQGWSSCCPERTSQLFDLPCSKLSVGDVCISLTLKNLKNGSVKKGQPVDPASVLLKHSKADGLAGSRHRYAEQENGINQGSAQMLSENGELKFPEKMGLSAAPFLTKIEPSKPAATRKRRWSAPESRKLEKSEDEPPLTLPKPSLIPQEVKICIEGRSNVGK

SEQ ID NO: 3614 - protein, 36 aa, Homo sapiens
FFESRLRCKCCEPRGSWARFGCWRLQPEFKPKQLEG

SEQ ID NO: 3615 - protein, 533 aa, Homo sapiens
DAWALTNQFSDSKQHIEVLKESLTAKEQRAAILQTEVDALRLRLEEKETMLNKKTKQIQDMAEEKGTQAGEIHDLKDMLDVKERKVNVLQKKIENLQEQLRDKEKQMSSLKERVKSLQADTTNTDTALTTLEEALAEKERTIERLKEQRDRDEREKQEEIDNYKKDLKDLKEKVSLLQGDLSEKEASLLDLKEHASSLASSGLKKDSRLKTLEIALEQKKEECLKMESQLKKAHEAALEARASPEMSDRIQHLEREITRYKDESSKAQAEVDRLLEILKEVENEKNDKDKKIAELESLTSRQVKDQNKKVANLKHKEQVEKKKSAQMLEEARRREDNLNDSSQQLQDSLRKKDDRIEELEEALRESVQITAEREMVLAQEESARTNAEKQVEELLMAMEKVKQELESMKAKLSSTQQSLAEKETHLTNLRAERRKHLEEVLEMKQEALLAAISEKDANIALLELSSSKKKTQEEVAALKREKDRLVQQLKQQTQNRMKLMADNYEDDHFKSSHSNQTNHKPSPDQDEEEGIWA

SEQ ID NO: 3616 - protein, 392 aa, Homo sapiens
RRRWRARGGLVPTLAWAEATGAYVPGRDKPDLPTWKRNFRSALNRKEGLRLAEDRSKDPHDPHKIYEFVNSGVGDFSQPDTSPDTNGGGSTSDTQEDILDELLGNMVLAPLPDPGPPSLAVAPEPCPQPLRSPSLDNPTPFPNLGPSENPLKRLLVPGEEWEFEVTAFYRGRQVFQQTISCPEGLRLVGSEVGDRTLPGWPVTLPDPGMSLTDRGVMSYVRHVLSCLGGGLALWRAGQWLWAQRLGHCHTYWAVSEELLPNSGHGPDGEVPKDKEGGVFDLGPFIVGSLGPPDLITFTEGSGRSPRYALWFCVGESWPQDQPWTKRLVMVKVVPTCLRALVEMARVGGASSLENTVDLHISNSHPLSLTSDQYKAYLQDLVEGMDFQGPGES

SEQ ID NO: 3617 - protein, 183 aa, Homo sapiens
RGGLLSKMARVLKAAAANAVGLFSRLQAPIPTVRASSTSQPLDQVTGSVWNLGRLNHVAIAVPDLEKAAAFYKNILGAQVSEAVPLPEHGVSVVFVNLGNTKMELLHPLGRDSPIAGFLQKNKAGGMHHICIEVDNINAAVMDLKKKKIRSLSEEVKIGAHGKPVIFLHPKDCGGVLVELEQA

SEQ ID NO: 3618 - protein, 1996 aa, Homo sapiens
DNIDETYGVNVQFESDEEEGDEDVYGEVREEASDDDMEGDEAVVRCTLSANMYVDEILVWCASELNIPEFFPLESPHKKVGYGLSSRTWLQGGGKVIEAGRDLLVASGELMSSKKKDLHPRDIDAFWLQRQLSRFYDDAIVSQKKADEVLEILKTASDDRECENQLVLLLGFNTFDFIKVLRQHRMMILYCTLLASAQSEAEKERIMGKMEADPELSKFLYQLHETEKEDLIREERSRRERVRQSRMDTDLETMDLDQGGEALAPRQVLDLEDLVFTQGSHFMANKRCQLPDGSFRRQRKGYEEVHVPALKPKPFGSEEQLLPVEKLPKYAQAGFEGFKTLNRIQSKLYRAALETDENLLLCAPTGAGKTNVALMCMLREIGKHINMDGTINVDDFKIIYIAPMRSLVQEMVGSFGKRLATYGITVAELTGDHQLCKEEISATQIIVCTPEKWDIITRKGGERTYTQLVRLIILDEIHLLHDDRGPVLEALVARAIRNIEMTQEDVRLIGLSATLPNYEDVATFLRVDPAKGLFYFDNSFRPVPLEQTYVGITEKKAIKRFQIMNEIVYEKIMEHAGKNQVLVFVHSRKETGKTARAIRDMCLEKDTLGLFLREGSASTEVLRTEAEQCKNLELKDLLPYGFAIHHAGMTRVDRTLVEDLFGDKHIQVLVSTATLAWGVNLPAHTVIIKGTQVYSPEKGRWTELGALDILQMLGRAGRPQYDTKGEGILITSHGELQYYLSLLNQQLPIESQMVSKLPDMLNAEIVLGNVQNAKDAVNWLGYAYLYIRMLRSPTLYGISHDDLKGDPLLDQRRLDLVHTAALMLDKNNLVKYDKKTGNFQVTELGRIASHYYITNDTVQTYNQLLKPTLSEIELFRVFSLSSEFKNITVREEEKLELQKLLERVPIPVKESIEEPSAKINVLLQAFISQLKLEGFALMADMVYVTQSAGRLMRAIFEIVLNRGWAQLTDKTLNLCKMIDKRMWQSMCPLRQFRKLPEEVVKKIEKKNFPFERLYDLNHNEIGELIRMPKMGKTIHKYVHLFPKLELSVHLQPITRSTLKVELTITPDFQWDEKVHGSSEAFWILVEDVDSEVILHHEYFLLKAKYAQDEHLITFFVPVFEPLPPQYFIRVVSDRWLSCETQLPVSFRHLILPEKYPPPTELLDLQPLPVSALRNSAFESLYQDKFPFFNPIQTQVFNTVYNSDDNVFVGAPTGSGKTICAEFAILRMLLQNSEGRCVYITPMRLWQEQVYMDWYEKFQDRLNKKVVLLTGETSTDLKLLGKGNIIISTPEKWDILSRRWKQRKNVQNINLFVVDEVHLIGGENGPVLEVICSRMRYISSQIERPIRIVALSSSLSNAKDVAHWLGCSATSTFNFHPNVRPVPLELHIQGFNISHTQTRLLSMAKPVFHAITKHSPKKPVIVFVPSRKQTRLTAIDILTTCAADIQRQRFLHCTEKDLIPYLEKLSDSTLKETLLNGVGYLHEGLSPMERRLVEQLFSSGAIQVVVASRSLCWGMNVAAHLVIIMDTLYYNGKIHAYVDYPIYDVLQMVGHANRPLQDDEGRCVIMCQGSKKDFFKKFLYEPLPVESHLDHCMHDHFNAEIVTKTIENKQDAVDYLTWTFLYRRMTQNPNYYNLQGISHRHLSDHLSELVEQTLSDLEQSKCISIEDEMDVAPLNLGMIAAYYYINYTTIELFSMSLNAKTKVRGLIEIISNAAEYENIPIRHHEDNLLRQLAQKVPHKLNNPKFNDPHVKTNLLLQAHLSRMQLSAELQSDTEEILSKAIRLIQACVDVLSSNGWLSPALAAMELAQMVTQAMWSEDSYLRRLPPFPSGLFKRCTDKGVESVFDIMEMEDEERNALLQLTDSQIADVARFCNRYPNIELSYEVVDKDSIRSGGPVVVLVQLEREEEVTGPVIAPLFPQKREEGWWVVIGDAKSNSLISIKRLTLQQKAKVKLDFVAPATGGRHNTLYFMSDAYMGCDQEYKFSVDVKEAETDSDSD

SEQ ID NO: 3619 - protein, 1996 aa, Homo sapiens; identical to SEQ ID NO: 3618

SEQ ID NO: 3620 - protein, 294 aa, Homo sapiens
VIKMALAARLLPQFLHSRSLPCGAVRLRTPAVAEVRLPSATLCYFCRCRLGLGAALFPRSARALAASALPAQGSRWPVLSSPGLPAAFASFPACPQRSYSTEEKPQQHQKTKMIVLGFSNPINWVRTRIKAFLIWAYFDKEFSITEFSEGAKQAFAHVSKLLSQCKFDLLEELVAKEVLHALKEKVTSLPDNHKNALAANIDEIVFTSTGDISIYYDEKGRKFVNILMCFWYLTSANIPSETLRGASVFQVKLGNQNVETKQLLSASYEFQREFTQGVKPDWTIARIEHSKLLE

SEQ ID NO: 3621 - protein, 1106 aa, Homo sapiens
SSSRSRHSSISPVRLPLNSSLGAELSRKKKERAAAAAAAKMDGKESSYERSGSYSGRSPSPYGRRRSSSPFLSKRSLSRSPLPSRKSMKSRSRSPAYSRHSSSHSKKKRSSSRSRHSSISPVRLPLNSSLGAELSRKKKERAAAAAAAKMDGKESSYERSGSYSGRSPSPYGRRRSSSPFLSKRSLSRSPLPSRKSMKSRSRSPAYSRHSSSHSKKKRSSSRSRHSSISPVRLPLNSSLGAELSRKKKERAAAAAAAKMDGKESKGSPVFLPRKENSSVEAKDSGLESKKLPRSVKLEKSAPDTELVNVTHLNTEVKNSSDTGKVKLDENSEKHLVKDLKAQGTRDSKPIALKEEIVTPKETETSEKETPPPLPTIASPPPPLPTTTPPPQTPPLPPLPPIPALPQQPPLPPSQPAFSQVPASSTSTLPPSTHSKTSAVSSQANSQPPVQVSVKTQVSVTAAIPHLKTSTLPPLPLPPLLPGDDDMDSPKETLPSKPVKKEKEQRTRHLLTDLPLPPELPGGDLSPPDSPEPKAITPPQQPYKKRPKICCPRYGERRQTESDWGKRCVDKFDIIGIIGEGTYGQVYKAKDKDTGELVALKKVRLDNEKEGFPITAIREIKILRQLIHRSVVNMKEIVTDKQDALDFKKDKGAFYLVFEYMDHDLMGLLESGLVHFSEDHIKSFMKQLMEGLEYCHKKNFLHRDIKCSNILLNNSGQIKLADFGLARLYNSEESRPYTNKVITLWYRPPKLLLGEERYTPAIDVWSCGCILGELFTKKPIFQANLELAQLELISRLCGSPCPAVWPDVIKLPYFNTMKPKKQYRRRLREEFSFIPSAALDLLDHMLTLDPSKRCTAEQTLQSDFLKDVELSKMAPPDLPHWQDCHELWSKKRRRQRQSGVVVEEPPPSKTSRKETTSGTSTEPVKNSSPAPPQPAPGKVESGAGDAIGLADITQQLNQSELAVLLNLLQSQTDLSIPQMAQLLNIHSNPEMQQQLEALNQSISALTEATSQQQDSETMAPEESLKEAPSAPVILPSAEQTTLEASSTPADMQNILAVLLSQLMKTQEPAGSLEENNSDKNSGPQGPRRTPTMPQEEAAGRSNGGNAL

SEQ ID NO: 3622 - protein, 125 aa, Homo sapiens
TPERGSAYPETAAVRRPAGECPITMSDLEAKLSTEHLGDKIKDEDIKLRVIGQDSSEIHFKVKMTTPLKKLKKSYCQRQGVPVNSLRFLFEGQRIADNHTPEELGMEEEDVIEVYQEQIGGHSTV

SEQ ID NO: 3623 - protein, 514 aa, Homo sapiens
PPPAPGPDGLNEGCLHRLSMPHQRPRTCAMNPELTMESLGTLHGARGGGSGGGGGGGGGGGGGGPGHEQELLASPSPHHARRGPRGSLRGPPPPPTAHQELGTAAAAAAAASRSAMVTSMASILDGGDYRPELSIPLHHAMSMSCDSSPPGMGMSNTYTTLTPLQPLPPISTVSDKFHHPHPHHHPHHHHHHHHQRLSGNVSGSFTLMRDERGLPAMNNLYSPYKEMPGMSQSLSPLAATPLGNGLGGLHNAQQSLPNYGPPGHDKMLSPNFDAHHTAMLTRGEQHLSRGLGTPPAAMMSHLNGLHHPGHTQSHGPVLAPSRERPPSSSSGSQVATSGQLEEINTKEVAQRITAELKRYSIPQAIFAQRVLCRSQGTLSDLLRNPKPWSKLKSGRETFRRMWKWLQEPEFQRMSALRLAACKRKEQEPNKDRNNSQKKSRLVFTDLQRRTLFAIFKENKRPSKEMQITISQQLGLELTTVSNFFMNARRRSLEKWQDDLSTGGSSSTSSTCTKA

SEQ ID NO: 3624 - protein, 708 aa, Homo sapiens
SARKAEAATSGTAARDGSVGRNLVPPPSASAPKAEVESNEKDNRPEEEEQVIHEDDERPSEKNEFSRRKRSKSEDMDNVQSKRRRYMEEEYEAEFQVKITAKGDINQKLQKVIQWLLEEKLCALQCAVFDKTLAELKTRVEKIECNKRHKTVLTELQAKIARLTKRFEAAKEDLKKRHEHPPNPPVSPGKTVNDVNSNNNMSYRNAGTVRQMLESKRNVSESAPPSFQTPVNTVSSTNLVTPPAVVSSQPKLQTPVTSGSLTATSVLPAPNTATVVATTQVPSGNPQPTISLQPLPVILHVPVAVSSQPQLLQSHPGTLVTNQPSGNVEFISVQSPPTVSGLTKNPVSLPSLPNPTKPNNVPSVPSPSIQRNPTASAAPLGTTLAVQAVPTAHSIVQATRTSLPTVGPSGLYSPSTNRGPIQMKIPISAFSTSSAAEQNSNTTPRIENQTNKTIDASVSKKAADSTSQCGKATGSDSSGVIDLTMDDEESGASQDPKKLNHTPVSTMSSSQPVSRPLQPIQPAPPLQPSGVPTSGPSQTTIHLLPTAPTTVNVTHRPVTQVTTRLPVPRAPANHQVVYTTLPAPPAQAPLRGTVMQAPAVRQVNPQNSVTVRVPQTTTYVVNNGLTLGSTGPQLTVHHRPPQVHTEPPRPVHPAPLPEAPQPQRLPPEAGSTSRPSEATLEVSHAFRVKMAIVLVMECPGGGSKLCHC

SEQ ID NO: 3625 - protein, 301 aa, Homo sapiens
ASPFLRPQGHDSGEREPFSQTPGLMQPFSIPVQITLQGSRRRQGRTAFPASGKKRETDYSDGDPLDVHKRLPSSTGEDRAVMLGFAMMGFSVLMFFLLGTTILKPFMLSIQREESTCTAIHTDIMDDWLDCAFTCGVHCHGQGKYPCLQVFVNLSHPGQKALLHYNEEAVQINPKCFYTPKCHQDRNDLLNSALDIKEFFDHKNGTPFSCFYSPASQSEDVILIKKYDQMAIFHCLFWPSLTLLGGALIVGMVRLTQHLSLLCEKYSTVVRDEVGGKVPYIEQHQFKLCIMRRSKGRAEKS

SEQ ID NO: 3626 - protein, 303 aa, Homo sapiens
SSVVEFSALSVSMACLSPSQLQKFQQDGFLVLEGFLSAEECVAMQQRIGEIVAEMDVPLHCRTEFSTQEEEQLRAQGSTDYFLSSGDKIRFFFEKGVFDEKGNFLVPPEKSINKIGHALHAHDPVFKSITHSFKVQTLARSLGLQMPVVVQSMYIFKQPHFGGEVSPHQDASFLYTEPLGRVLGVWIAVEDATLENGCLWFIPGSHTSGVSRRMVRAPVGSAPGTSFLGSEPARDNSLFVPTPVQRGALVLIHGEVVHKSKQNLSDRSRQAYTFHLMEASGTTWSPENWLQPTAELPFPQLYT

SEQ ID NO: 3627 - protein, 137 aa, Homo sapiens
INSSPRTGRDHQELNLHTERDSRSQRAVLKIPRQNPGIFYWIFLPSRSHSASHGSRQRQVSCQGTQDEILKMRNTFAELKNSLEALSSRMDQAEERIGTQAGVQWRDHGSLQPQPPEFKQCFHLSLPSSWDYRACLS

SEQ ID NO: 3628 - protein, 269 aa, Homo sapiens
GCKHLLQNSWYDPRVREADRVGQRARRPRAAMDWLMGKSKAKPNGKKPAAEERKAYLEPEHTKARITDFQFKELVVLPREIDLNEWLASNTTTFFHHINLQYSTISEFCTGETCQTMAVCNTQYYWYDERGKKVKCTAPQYVDFVMSSVQKLVTDEDVFPTKYGREFPSSFESLVRKICRHLFHVLAHIYWAHFKETLALELHGHLNTLYVHFILFAREFNLLDPKETAIMDDLTEVLCSGGRRGSTVGAVGMGPAAGAPGAQNHVKER

SEQ ID NO: 3629 - protein, 301 aa, Homo sapiens
CSHGSSAVSAWSPLFQASEVERQLSMQVHALREDFREKNSSTNQHIIRLESLQAEIKMLSDRKRELEHRLSATLEENDLLQGTVEELQDRVLILERQGHDKDLQLHQSQLELQEVRLSCRQLQVKVEELTEERSLQSSAATSTSLLSEIEQSMEAEELEQEREQLTLLSVEMTALKEERDRLRVTSEDKEPKEQLQKAIRDRDEAIAKKNAVELELAKCRMDMMSLNSQLLDAIQQKLNLSQQLEAWQDDMHRVIDRQLMDTHLKERSQPAAALCRGHSAGRGDEPSIAEGKRLFSFFRKI

SEQ ID NO: 3630 - protein, 141 aa, Homo sapiens
PAKVLTLDIYLSKTEGAQVDEPVVITPRAEDCGDWDDMEKRSSGRRSGRRRGSQKSTDSPGADAELPESAARDDAVFDDEVAPNAASDNASAEKKVKSPRAALDGGVASAASPESKPSPGTKGQLRGESDRSKQPPPASSP

SEQ ID NO: 3631 - protein, 469 aa, Homo sapiens
WSGFWQLPGVRGVGSAPGGDGAEFTSRRGSSRRPGAACPGCRGAGSERAPGGMGRRRAPELYRAPFPLYALQVDPSTGLLIAAGGGGAAKTGIKNGVHFLQLELINGRLSASLLHSHDTETRATMNLALAGDILAAGQDAHCQLLRFQAHQQQGNKAEKAGSKEQGPRQRKGAAPAEKKCGAETQHEGLELRVENLQAVQTDFSSDPLQKVVCFNHDNTLLATGGTDGYVRVWKVPSLEKVLEFKAHEGEIEDLALGPDGKLVTVGRDLKASVWQKDQLVTQLHWQENGPTFSSTPYRYQACRFGQVPDQPAGLRLFTVQIPHKRLRQPPPCYLTAWDGSNFLPLRTKSCGHEVVSCLDVSESGTFLGLGTVTGSVAIYIAFSLQCLYYVREAHGIVVTDVAFLPEKGRGPELLGSHETALFSVAVDSRCQLHLLPSRRSVPVWLLLLLCVGLIIVTILLLQSAFPGFL

SEQ ID NO: 3632 - protein, 301 aa, Homo sapiens
PWCQRVEVRSCGSSKRSCSRWSGSSWDGSRSLGRGLNHTSLNRSPPFTPDTMTHCCSPCCQPTCCRTTCCRTTCWKPTTVTTCSSTPCCQPSCCVPSCCQPCCHPTCCQNTCCRTTCCQPTCVASCCQPSCCSTPCCQPTCCGSSCCGQTSCGSSCCQPICGSSCCQPCCHPTCYQTICFRTTCCQPTCCQPTCCRNTSCQPTCCGSSCCQPCCHPTCCQTICRSTCCQPSCVTRCCSTPCCQPTCGGSSCCSQTCNESSYCLPCCRPTCCQTTCYRTTCCRPSCCCSPCCVSSCCQPSCC

SEQ ID NO: 3633 - protein, 799 aa, Homo sapiens
GPEGYRGRRARHPSLGSTTGHCGGGRGAEGTGTDPAAPAARLNVDGLLVYFPYDYIYPEQFSYMRELKRTLDAKGHGVLEMPSGTGKTVSLLALIMAYQRAYPLEVTKLIYCSRTVPEIEKVIEELRKLLNFYEKQEGEKLPFLGLALSSRKNLCIHPEVTPLRFGKDVDGKCHSLTASYVRAQYQHDTSLPHCRFYEEFDAHGREVPLPAGIYNLDDLKALGRRQGWCPYFLARYSILHANVVVYSYHYLLDPKIADLVSKELARKAVVVFDEAHNIDNVCIDSMSVNLTRRTLDRCQGNLETLQKTVLRIKETDEQRLRDEYRRLVEGLREASAARETDAHLANPVLPDEVLQEAVPGSIRTAEHFLGFLRRLLEYVKWRLRVQHVVQESPPAFLSGLAQRVCIQRKPLRFCAERLRSLLHTLEITDLADFSPLTLLANFATLVSTYAKGFTIIIEPFDDRTPTIANPILHFSCMDASLAIKPVFERFQSVIITSGTLSPLDIYPKILDFHPVTMATFTMTLARVCLCPMIIGRGNDQVAISSKFETREDIAVIRNYGNLLLEMSAVVPDGIVAFFTSYQYMESTVASWYEQGILENIQRNKLLFIETQDGAETSVALEKYQEACENGRGAILLSVARGKVSEGIDFVHHYGRAVIMFGVPYVYTQSRILKARLEYLRDQFQIRENDFLTFDAMRHAAQCVGRAIRGKTDYGLMVFADKRFARGDKRGKLPRWIQEHLTDANLNLTVDEGVQVAKYFLRQMAQPFHREDQLGLSLLSLEQLESEETLKRIEQIAQQL

SEQ ID NO: 3634 - protein, 74 aa, Homo sapiens
LKMSSKTASTNNIAQARRTVQQLRLEASIERIKVSKASADLMSYCEEHARSDPLLIGIPTSENPFKDKKTCIIL

SEQ ID NO: 3635 - protein, 134 aa, Homo sapiens
TELSQLEKAHPPADMGRRKSKRKPPPKKKMTGTLETQFTCPFCNHEKSCDVKMDRARNTGVISCTVCLEEFQTPITCILGNLGFFQRVGRGLESGPCSSGPLCALVQGQSRPEEQVPPSDFCGVRRCRAGFQCQ

SEQ ID NO: 3636 - protein, 77 aa, Homo sapiens
DHLKSCYQDSHEDPTKMKRFLFLLLTISLLVMVQIQTGLSGQNDTSQTSSPSASSSMSGGIFLFFVANAIIHLFCFS

SEQ ID NO: 3637 - protein, 416 aa, Homo sapiens
ARAGSVVGSAAARGPPAGCRCERAARLPSSPARRRRCDWVEDGAGRMEILMTVSKFASICTMGANASALEKEIGPEQFPVNEHYFGLVNFGNTCYCNSVLQALYFCRPFREKGLAYKSQPRKKESLLTCLADLFHSIATQKKKVGVIPPKKFITRLRKENELFDNYMQQDAHEFLNYLLNTIADILQEERKQEKQNGRLPNGNIDNENNNSTPDPTWVHEIFQGTLTNETRCLTCETISSKDEDFLDLSVDVEQNTSITHCLRGFSNTETLCSEYKYYCEECRSKQEAHKRMKVKKLPMILALHLKRFKYMDQLHRYTKLSYRVVFPLELRLFNTSGDATNPDRMYDLVAVVVHCGSGPNRGHYIAIVKSHDFWLLFDDDIVEKIDAQAIEEFYGLTSDISKNSESGYILFYQSRD

SEQ ID NO: 3638 - protein, 206 aa, Homo sapiens
PAGIPVSTISSDRRASTDLTRKMKPDETPMFDPNLLKEVDWSQNTATFSPAISPTHPGEGLVLRPLCTADLNRGFFKVLGQLTETGVVSPEQFMKSFEHMKKSGDYYVTVVEDVTLGQIVATATLIIEHKFIHSCAKRGRVEDVVVSDECRGKQLGNLLLSTLTLLSKKLNCYKITLECLPQNVGFYKKFGYTVSEENYMCRRFLK

SEQ ID NO: 3639 - protein, 399 aa, Homo sapiens
PRVRLLRPSRSRSCRGLLSTRAPGPSPFRSLHSSPLLPHAMKSPFYRCQNTTSVEKGNSAVMGGVLFSTGLLGNLLALGLLARSGLGWCSRRPLRPLPSVFYMLVCGLTVTDLLGKCLLSPVVLAAYAQNRSLRVLAPALDNSLCQAFAFFMSFFGLSSTLQLLAMALECWLSLGHPFFYRRHITLRLGALVAPVVSAFSLAFCALPFMGFGKFVQYCPGTWCFIQMVHEEGSLSVLGYSVLYSSLMALLVLATVLCNLGAMRNLYAMHRRLQRHPRSCTRDCAEPRADGREASPQPLEELDHLLLLALMTVLFTMCSLPVIYRAYYGAFKDVKEKNRTSEEAEDLRALRFLSVISIVDPWIFIIFRSPVFRIFFHKIFIRPLRYRSRCSNSTNMESSL

SEQ ID NO: 3640 - protein, 249 aa, Homo sapiens
PLPPPTLAMFLTRSEYDRGVNTFSPEGRLFQVEYAIEAIKLGSTAIGIQTSEGVCLAVEKRITSPLMEPSSIEKIVEIDAHIGCAMSGLIADAKTLIDKARVETQNHWFTYNETMTVESVTQAVSNLALQFGEEDADPGAMSRPFGVALLFGGVDEKGPQLFHMDPSGTFVQCDARAIGSASEGAQSSLQEVYHKSMTLKEAIKSSLIILKQVMEEKLNATNIELATVQPGQNFHMFTKEELEEVIKDI

SEQ ID NO: 3641 - protein, 417 aa, Homo sapiens
PTGQGGRRAEARSCLLSKAMLGRSGYRALPLGDFDRFQQSSFGFLGSQKGCLSPERGGVGTGADVPQSWPSCLCHGLISFLGFLLLLVTFPISGWFALKIVPTYERMIVFRLGRIRTPQGPGMVLLLPFIDSFQRVDLRTRAFNVPPCKLASKDGAVLSVGADVQFRIWDPVLSVMTVKDLNTATRMTAQNAMTKALLKRPLREIQMEKLKISDQLLLEINDVTRAWGLEVDRVELAVEAVLQPPQDSPAGPNLDSTLQQLALHFLGGSMNSMAGGAPSPGPADTVEMVSEVEPPAPQVGARSSPKQPLAEGLLTALQPFLSEALVSQVGACYQFNVVLPSGTQSAYFLDLTTGRGRVGHGVPDGIPDVVVEMAEADLRALLCRELRPLGAYMSGRLKVKGDLAMAMKLEAVLRALK

SEQ ID NO: 3642 - protein, 79 aa, Homo sapiens
RRGEIDMATEGDVELELETETSGPERPPEKPRKHDSGAADLERVTDYAEEKEIQSSNLETAMSVIGDRRSREQKAKQER

SEQ ID NO: 3643 - protein, 149 aa, Homo sapiens
RKERRRRRRRMEAVVFVFSLLDCCALIFLSVYFIITLSDLECDYINARSCCSKLNKWVIPELIGHTIVTVLLLMSLHWFIFLLNLPVATWNIYRYIMVPSGNMGVFDPTEIHNRGQLKSHMKEAMIKLGFHLLCFFMYLYSMILALIND

SEQ ID NO: 3644 - protein, 904 aa, Homo sapiens
TSCRHFPITSEDPLNYLLILTVERIYAYQALPLGFLFCSRDPVPEYLNHCGVKYVLISDRASFCALHIFFSPFRNVFRPAAGGGIAPPPRLWFQPSLSDAEMEIPKLLPARGTLQGGGGGGIPAGGGRVHRGPDSPAGQVPTRRLLLPRGPQDGGPGRRREEASTASRGPGPSLFAPRPHQPSGGGGGGGDDFFLVLLDPVGGDVETAGSGQAAGPVLREEAEEGPGLQGGESGANPAGPTALGPRCLSAVPTPAPISAPGPAAAFAGTVTIHNQDLLLRFENGVLTLATPPPHAWEPGAAPAQQPGCLIAPQAGFPHAAHPGDCPELPPDLLLAEPAEPAPAPAPEEEAEGPAAALGPRGPLGSGPGVVLYLCPEALCGQTFAKKHQLKMHLLTHSSSQGQRPFKCPLGGCGWTFTTSYKLKRHLQSHDKLRPFGCPAEGCGKSFTTVYNLKAHMKGHEQENSFKCEVCEESFPTQAKLGAHQRSHFEPERPYQCAFSGCKKTFITVSALFSHNRAHFREQELFSCSFPGCSKQYDKACRLKIHLRSHTGERPFLCDFDGCGWNFTSMSKLLRHKRKHDDDRRFMCPVEGCGKSFTRAEHLKGHSITHLSTKPFVCPVAGCCARFSARSSLYIHSKKHLQDVDTWKSRCPISSCNKLFTSKHSMKTHMVKRHKVGQDLLAQLEAANSLTPSSELTSQRQNDLSDAEIVSLFSDVPDSTSAALLDTALVNSGILTIDVASVSSTLAGHLPANNNNSVGQAVDPPSLMATSDPPQSLDTSLFFGTAATGFQQSSLNMDEVSSVSVGPLGSLDSLAMKNSSPEPQALTPSSKLTVDTDTLTPSSTLCENSVSELLTPAKAEWSVHPNSDFFGQEGETQFGFPNAAGNHGSQKERNLITVTGSSFLV

SEQ ID NO: 3645 - protein, 162 aa, Homo sapiens
TVSFHKTMASLKCSTVVCVICLEKPKYRCPACRVPYCSVVCFRKHKEQCNPETRPVEKKIRSALPTKTVKPVENKDDDDSIADFLNSDEEEDRVSLQNLKNLGESATLRSLLLNPHLRQLMVNLDQGEDKAKLMRAYMQEPLFVEFADCCLGIVEPSQNEES

SEQ ID NO: 3646 - protein, 621 aa, Homo sapiens
ERGGGKAAAAAAAAAAARALAASGQDPRPHPRAPPWDDSGDDDEATTPADKSELHHTLKNLSLKLDDLSTCNDLIAKHGAALQRSLTELDGLKIPSESGEKLKVVNERATLFRITSNAMINACRDFLELAEIHSRKWQRALQYEQEQRVHLEETIEQLAKQHNSLERAFHSAPGRPANPSKSFIEGSLLTPKGEDSEEDEDTEYFDAMEDSTSFITVITEAKEDSRKAEGSTGTSSADWSSADNVLDGASLVPKGSSKVKRRVRIPNKPNYSLNLWSIMKNCIGRELSRIPMPVNFNEPLSMLQRLTEDLEYHHLLDKAVHCTSSVEQMCLVAAFSVSSYSTTVHRIAKPFNPMLGETFELDRLDDMGLRSLCEQVSHHPPSAAHYVFSKHGWSLWQEITISSKFRGKYISIMPLGAIHLEFQASGNHYVWRKSTSTVHNIIVGKLWIDQSGDIEIVNHKTNDRCQLKFLPYSYFSKEAARKVTGVVSDSQGKAHYVLSGSWDEQMECSKVMHSSPSSPSSDGKQKTVYQTLSAKLLWKKYPLPENAENMYYFSELALTLNEHEEGVAPTDSRLRPDQRLMEKGRWDEANTEKQRLEEKQRLSRRRRLEACGPGSSCSSEE

SEQ ID NO: 3647 - protein, 1654 aa, Homo sapiens
PTGDACVSTSCELASALSHLDASHLTENLPKAASELGQQPMTELDSSSDLISSPGKKGAAHPDPSKTSVDTGQVSRPENPSQPASPRVTKCKARSPVRLPHEGSPSPGEKAAAPPDYSKTRSASETSTPHNTRRVAALRGAGPGAEGMTPAGAVLPGDPLTSQEQRQGAPGNHSKALEMTGIHAPESSQEPSLLEGADSVSSRAPQASLSMLPSTDNTKEACGHVSGHCCPGGSRESPVTDIDSFIKELDASAARSPSSQTGDSGSQEGSAQGHPPAGAGGGSSCRAEPVPGGQTSSPRRAWAAGAPAYPQWASQPSVLDSINPDKHFTVNKNFLSNYSRNFSSFHEDSTSLSGLGDSTEPSLSSMYGDAEDSSSDPESLTEAPRASARDGWSPPRSRVSLHKEDPSESEEEQIEICSTRGCPNPPSSPAHLPTQAAICPASAKVLSLKYSTPRESVASPREKVACLPGSYTSGPDSSQPSSLLEMSSQEHETHADISTSQNHRPSCAEETTEVTSASSAMENSPLSKVARHFHSPPIILSSPNMVNGLEHDLLDDETLNQYETSINAAASLSSFSVDVPKNGESVLENLHISESQDLDDLLQKPKMIARRPIMAWFKEINKHNQGTHLRSKTEKEQPLMPARSPDSKIQMVSSSQKKGVTVPHSPPQPKTNLENKDLSKKSPAEMLLTNGQKAKCGPKLKRLSLKGKAKVNSEAPAANAVKAGGTDHRKPLISPQTSHKTLSKAVSQRLHVADHEDPDRNTTAAPRSPQCVLESKPPLATSGPLKPSVSDTSIRTFVSPLTSPKPVPEQGMWSRFHMAVLSEPDRGCPTTPKSPKCRAEGRAPRADSGPVSPAASRNGMSVAGNRQSEPRLASHVAADTAQPRPTGEKGGNIMASDRLERTNQLKIVEISAEAVSETVCGNKPAESDRRGGCLAQGNCQEKSEIRLYRQVAESSTSHPSSLPSHASQAEQEMSRSFSMAKLASSSSSLQTAIRKAEYSQGKSSLMSDSRGVPRNSIPGGPSGEDHLYFTPRPATRTYSMPAQFSSHFGREGHPPHSLGRSRDSQVPVTSSVVPEAKASRGGLPSLANGQGIYSVKPLLDTSRNLPATDEGDIISVQETSCLVTDKIKVTRRHYCYEQNWPHESTSFFSVKQRIKSFENLANADRPVAKSGASPFLSVSSKPPIGRRSSGSIVSGSLGHPGDAAARLLRRSLSSCSENQSEAGTLLPQMAKSPSIMTLTISRQNPPETSSKGSDSELKKSLGPLGIPTPTMTLASPVKRNKSSVRHTQPSPVSRSKLQELRALSMPDLDKLCSEDYSAGPSAVLFKTELEITPRRSPGPPAGGVSCPEKGGNRACPGGSGPKTSAAETPSSASDTGEAAQDLPFRRSWSVNLDQLLVSAGDQQRLQSVLSSVGSKSTILTLIQEAKAQSENEEDVCFIVLNRKEGSGLGFSVAGGTDVEPKSITVHRVFSQGAASQEGTMNRGDFLLSVNGASLAGLAHGNVLKVLHQAQLHKDALVVIKKGMDQPRPSARQEPPTANGKGLLSRKTIPLEPGIGRSVAVHDALCVEVLKTSAGLGLSLDGGKSSVTGDGPLVIKRVYKGGAAEQAGIIEAGDEILAINGKPLVGLMHFDAWNIMKSVPEGPVQLLIRKHRNSS

SEQ ID NO: 3648 - protein, 409 aa, Homo sapiens
KSRLSVTLMPVQLSEHPEWNESMHSLRISVGGLPVLASMTKAADPRFRPRWKVVLTFFVGAAILWLLCSHRPAPGRPPTHNAHNWRLGQAPANWYNDTYPLSPPQRTPAGIRYRIAVIADLDTESRAQEENTWFTYLKKGYLTFSDSGDKVAVEWDKDHGVLESHLAEKGRGMELSDLIVFNGKLYSVDDRTGVVYQIEGSKAVPWVILSDGDGTVEKGFKAEWLAVKDERLYVGGLGKEWTTTTGDVVNENPEWVKVVGYKGSVDHENWVSNYNALRAAAGIQPPGYLIHESACWSDTLQRWFFLPRRASQERYSEKDDERKGANLLLSASPDFGDIAVSHVGAVVPTHGFSSFKFIPNTDDQIIVALKSEEDSGRVASYIMAFTLDGRFLLPETKIGSVKYEGIEFI

SEQ ID NO: 3649 - protein, 258 aa, Homo sapiens
PTRPGSGSAGGARVGSGEFGVEMAALAPLPPLPAQFKSIQHHLRTAQEHDKRDPVVAYYCRLYAMQTGMKIDSKTPECRKFLSKLMDQLEALKKQLGDNEAITQEIVGCAHLENYALKMFLYADNEDRAGRFHKNMIKSFYTASLLIDVITVFGELTDENVKHRKYARWKATYIHNCLKNGETPQAGPVGIEEDNDIEENEDAGAASLPTQPTQPSSSSTYDPSNMPSGNYTGIQIPPGAHAPANTPAEVPHSTGVAK

SEQ ID NO: 3650 - protein, 314 aa, Homo sapiens
KMAATLGPLGSWQQWRRCLSARDGSRRLLLLLLLGSGQGPQQVGAGQTFEYLKREHSLSKPYQGEAPRPCFLRDWELQVHFKIHGQGKKNLHGDGLAIWYTKDRMQPGPVFGNMDKFVGLGVFVDTYPNEEKQQERVFPYISAMVNNGSLSYDHERDGRPTELGGCTAIVRNLHYDTFLVIRYVKRHLTIMMDIDGKHEWRDCIEVPGVRLPRGYYFGTSSITGDLSDNHDVISLKLFELTVERTPEEEKLHRDVFLPSVDNMKLPEMTAPLPPLSGLALFLIVFFSLVFSVFAIVIGIILYNKWQEQSRKRFY

SEQ ID NO: 3651 - protein, 406 aa, Homo sapiens
RSWAYVKKCKNNMCPNRGLHDGPEPCWLHHAAGTVSAVQARGLQPSQSRSRPRVPGLATALAYGPAHTPPLSRIGWAMQPPPPGPLGDCLRDWEDLQQDFQNIQVSAAADAGSPPSRVSLAQGQGSGSPGCKPSLPAEAEGAAQELENQMKERQGLFFDMEAYLPKKNGLYLSLVLGNVNVTLLSKQAKFAYKDEYEKFKLYLTIILILISFTCRFLLNSRVTDAAFNFLLVWYYCTLTIRESILINNGSRIKGWWVFHHYVSTFLSGVMLTWPDGLMYQKFRNQFLSFSMYQSFVQFLQYYYQSGCLYRLRALGERHTMDLTVEGFQSWMWRVLTFLLPFLFFGHFWQLFNALTLFNLAQDPQCKEWQVLMCGFPFLLLFLGNFFTTLRVVHHKFHSQRHGSKKD

SEQ ID NO: 3652 - protein, 158 aa, Homo sapiens
VTTSCIIPFAFGLGVRASERLAEIDMPYLLKYQPMMQTIGQKYCMDPAVIAGVLSRKSPGDKILVNMGDRTSMVQDPGSQAPTSWISESQVFQTTEVLTTRITELQRRFPTWTPDQYLRGGLCAYSGGAGYVRSSQDLSCDFCNDVLARAKYLKRHGF

SEQ ID NO: 3653 - protein, 302 aa, Homo sapiens
IVRRDWQEVSDIHLAMANCKMTKSIRFPALEHCYTGGEVVLPKDQEEWKRRTGLLLYENYGQSETGLICATYWGMKIKPGFMGKATPPYDVQFHMEASVENCIIVSMNTADPGSQGITHSLLLQVIDDKGSILPPNTEGNIGIRIKPVRPVSLFMCYEGDPEKTAKVECGDFYNTGDRGKMDEEGYICFLGRSDDIINASGYRIGPAEVESALVEHPAVAESAVVGSPDPIRGEVVKAFIVLTPQFLSHDKDQLTKELQQHVKSVTAPYKYPRKVEFVSELPKTITGKIERKELRKKETGQM

SEQ ID NO: 3654 - protein, 302 aa, Homo sapiens; identical to SEQ ID NO: 3653

SEQ ID NO: 3655 - protein, 787 aa, Homo sapiens
SPGPSLPESAESLDGSQEDKPRGSCAEPTFTDTGMVAHINNSRLKAKGVGQHDNAQNFGNQSFEELRAACLRKGELFEDPLFPAEPSSLGFKDLGPNSKNVQNISWQRPKDIINNPLFIMDGISPTDICQGILGDCWLLAAIGSLTTCPKLLYRVVPRGQSFKKNYAGIFHFQIWQFGQWVNVVVDDRLPTKNDKLVFVHSTERSEFWSALLEKAYAKLSGSYEALSGGSTMEGLEDFTGGVAQSFQLQRPPQNLLRLLRKAVERSSLMGCSIEVTSDSELESMTDKMLVRGHAYSVTGLQDVHYRGKMETLIRVRNPWGRIEWNGAWSDSAREWEEVASDIQMQLLHKTEDGEFWMSYQDFLNNFTLLEICNLTPDTLSGDYKSYWHTTFYEGSWRTGSSAGGCRNHPGTFWTNPQFKISLPEGDDPEDDAEGNVVVCTCLVALMQKNWRHARQQGAQLQTIGFVLYAVPKEFQNIQDVHLKKEFFTKYQDHGFSEIFTNSREVSSQLRLPPGEYIIIPSTFEPHRDADFLLRVFTEKHSESWELDEVNYAEQLQEEKVSEDDMDQDFLHLFKIVAGEGKEIGVYELQRLLNRMAIKFKSFKTKGFGLDACRCMINLMDKDGSGKLGLLEFKILWKKLKKWMDIFRECDQDHSGTLNSYEMRLVIEKAGIKLNNKVMQVLVARYADDDLIIDFDSFISCFLRLKTMFTFFLTMDPKNTGHICLSLEQVLGEGWEGICRIAPACPSTPPPPSSDVPGPASCPRLFPPWDLLPVSTVAADDHVGIEAL

SEQ ID NO: 3656 - protein, 56 aa, Homo sapiens
PLCTHYLLPELPEKSSRTSPRSRPGNMLSGDPHLPQPLCHCLDHCPCCFSGKRLVA

SEQ ID NO: 3657 - protein, 148 aa, Homo sapiens
DTRSTYHNAHSLPTYVKSPAPCQMTYIKSPAPCQTQTCYVQGASPCQSYYVQAPASGSTSQYCVTDPCSAPCSTSYCCLAPRTFGVSPLRRWIQRPQNCNTGSSGCCENSGSSGCCGSGGCGCSCGCGSSGCCCLGIIPMKSRSPALL

SEQ ID NO: 3658 - protein, 482 aa, Homo sapiens
SEAPVQPQPYTMTSFYSTSSCPLGCTMAPGARNVFVSPIDVGCQPVAEANAASMCLLANVAHANRVRVGSTPLGRPSLCLPPTSHTACPLPGTCHIPGNIGICGAYGKNTLNGHEKETMKFLNDRLANYLEKVRQLEQENAELETTLLERSKCHESTVCPDYQSYFRTIEELQQKILCSKAENARLIVQIDNAKLAADDFRIKLESERSLHQLVEADKCGTQKLLDDATLAKADLEAQQESLKEEQLSLKSNHEQEVKILRSQLGEKFRIELDIEPTIDLNRVLGEMRAQYEAMVETNHQDVEQWFQAQSEGISLQAMSCSEELQCCQSEILELRCTVNALEVERQAQHTLKDCLQNSLCEAEDRYGTELAQMQSLISNLEEQLSEIRADLERQNQEYQVLLDVKARLENEIATYRNLTPLQSLFHACLLYFLSKLWPCHRWVSLWPWSQHGEMILKARVRRLRLVALGSGVPSPCPVFLQD

SEQ ID NO: 3659 - protein, 133 aa, Homo sapiens
DLLQCLNQLYSASTEMSCQQSQQQCQPPPKCTPKCPPKCTPKCPPKCPPKCPPQYSAPCPPPVSSCCGSSSGGCCSSEGGGCCLSHHRPRQSLRRRPQSSSCCGSGSGQQSGGSSCCHSSGGSGCCHSSGGCC

SEQ ID NO: 3660 - protein, 228 aa, Homo sapiens
CSAVEVKMAARTAFGAVCRRLWQGLGNFSVNTSKGNTAKNGGLLLSTNMKWVQFSNLHVDVPKDLTKPVVTISDEPDILYKRLSVLVKGHDKAVLDSYEYFAVLAAKELGISIKVHEPPRKIERFTLLQSVHIYKKHRVQYEMRTLYRCLELEHLTGSTADVYLEYIQRNLPEGVAMEVTKFCFFIFLDTIRTVTRTHQGANLGNTIRRKRRKQVIKPQGGHFCLNLK

SEQ ID NO: 3661 - protein, 122 aa, Homo sapiens
DVSVAASEPTVYRNPTKMSCQQNQQQCQPPPKCPIPKYPPKCPSKCASSCPPPISSCCGSSSGGCCSSGGCGCCSSEGGGCCLSHHRHHRSHCHRPKSSNCYGSGSGQQSGGSGCCSGGGCC

SEQ ID NO: 3662 - protein, 357 aa, Homo sapiens
RKSLPHPNPQKMLKKPLSAVTWLCIFIVAFVSHPAWLQKLSKHKTPAQPQLKAANCCEEVKELKAQVANLSSLLSELNKKQERDWVSVVMQVMELESNSKRMESRLTDAESKYSEMNNQIDIMQLQAAQTVTQTSAGKETSPLRERGVPPHLQHCFYIPPDDFLGSPELEVFCDMETSGGGWTIIQRRKSGLVSFYRDWKQYKQGFGSIRGDFWLGNEHIHRLSRQPTRLRVEMEDWEGNLRYAEYSHFVLGNELNSYRLFLGNYTGNVGNDALQYHNNTAFSTKDKDNDNCLDKCAQLRKGGYWYNCCTDSNLNGVYYRLGEHNKHLDGITWYGWHGSTYSLKRVEMKIRPEDFKP

SEQ ID NO: 3663 - protein, 464 aa, Homo sapiens
LSSAKETLAQMYNTVWNMEDLDLEYAKTDINCGTDLMFYIEMDPPALPPKPPKPTTVANNGMNNNMSLQDAEWYWGDISREEVNEKLRDTADGTFLVRDASTKMHGDYTLTLRKGGNNKLIKIFHRDGKYGFSDPLTFSSVVELINHYRNESLAQYNPKLDVKLLYPVSKYQQDQVVKEDNIEAVGKKLHEYNTQFQEKSREYDRLYEEYTRTSQEIQMKRTAIEAFNETIKIFEEQCQTQERYSKEYIEKFKREGNEKEIQRIMHNYDKLKSRISEIIDSRRRLEEDLKKQAAEYREIDKRMNSIKPDLIQLRKTRDQYLMWLTQKGVRQKKLNEWLGNENTEDQYSLVEDDEDLPHHDEKTWNVGSSNRNKAENLLRGKRDGTFLVRESSKQGCYACSVVVDGEVKHCVINKTATGYGFAEPYNLYSSLKELVLHYQHTSLVQHNDSLNVTLAYPVYAQQRR

SEQ ID NO: 3664 - protein, 179 aa, Homo sapiens
GATVEDQSCNFGSLRWVVSVPHISARSCPDPLLSRTGRVPGGRGAGLPRHHSPRCCLQVFFNGANVRQVDVPTLTGAFGILAAHVPTLQVLRPGLVVVHAEDGTTSKYFVSSGSIAVNADSSVQLLAEEAVTLDMLDLGAAKANLEKAQAELVGTADEATRAEIQIRIEANEALVKALE

SEQ ID NO: 3665 - protein, 430 aa, Homo sapiens
ASQLAFGGKLTSTPSRDFQGCGRGAVTCCSFHEHRHQSGRCLSTGMAPNLKGRPRKKKPCPQRRDSFSGVKDSNNNSDGKAVAKVKCEARSALTKPKNNHNCKKVSNEEKPKVAIGEECRADEQAFLVALYKYMKERKTPIERIPYLGFKQINLWTMFQAAQKLGGYETITARRQWKHIYDELGGNPGSTSAATCTRRHYERLILPYERFIKGEEDKPLPPIKPRKQENSSQENENKTKVSGTKRIKHEIPKSKKEKENAPKPQDAAEVSSEQEKEQETLISQKSIPEPLPAADMKKKIEGYQEFSAKPLASRVDPEKDNETDQGSNSEKVAEEAGEKGPTPPLPSAPLAPEKDSALVPGASKQPLTSPSALVDSKQESKLCCFTESPESEPQEASFPRLPHHTGHRWQTRMRRRMTNCPPWQITLPTAP

SEQ ID NO: 3666 - protein, 459 aa, Homo sapiens
LLQEMCTKTIPVLWGCFLLWNLYVSSSQTIYPGIKARITQRALDYGVQAGMKMIEQMLKEKKLPDLSGSESLEFLKVDYVNYNFSNIKISAFSFPNTSLAFVPGVGIKALTNHGTANISTDWGFESPLFVLYNSFAEPMEKPILKNLNEMLCPIIASEVKALNANLSTLEVLTKIDNYTLLDYSLISSPEITENYLDLNLKGVFYPLENLTDPPFSPVPFVLPERSNSMLYIGIAEYFFKSASFAHFTAGVFNVTLSTEEISNHFVQNSQGLGNVLSRIAEIYILSQPFMVRIMATEPPIINLQPGNFTLDIPASIMMLTQPKNSTVETIVSMDFVASTSVGLVILGQRLVCSLSLNRFRLALPESNRSNIEVLRFENILSSILHFGVLPLANAKLQQGFPLPNPHKFLFVNSDIEVLEGFLLISTDLKYETSSKQQPSFHVWEGLNLISRQWRGKSAP

SEQ ID NO: 3667 - protein, 60 aa, Homo sapiens
FRGRLGSGRNGGGSMNAPPAFESFLLFEGEKITINKDTKVPNACLFTINKEDHTLGNIIK

SEQ ID NO: 3668 - protein, 73 aa, Homo sapiens
VAGEAVPFFPMMYSEPLKPSYLALVLWYFLLTGYCITKPEVIFKIEQGEEPWILEKGFPSQCHPAKYLWCLHD

SEQ ID NO: 3669 - protein, 199 aa, Homo sapiens
FSGVCFAGIAGSMATLLHDAVMNPAEVVKQRLQMYNSQHRSAISCIRTVWRTEGLGAFYRSYTTQLTMNIPFQSIHFITYEFLQEQVNPHRTYNPQSHIISGGLAGALAAAATTPLDVCKTLLNTQENVALSLANISGRLSGMANAFRTVYQLNGLAGYFKGIQARVIYQMPSTAISWSVYEFFKYFLTKRQLENRAPY

SEQ ID NO: 3670 - protein, 51 aa, Homo sapiens
RNPCPLTFLPSTLMVLLLSLTFFSALTFHSICQLRNTGVEVDIVFQRVSFL

SEQ ID NO: 3671 - protein, 152 aa, Homo sapiens
ILKVAKKERTMSSLPVPYKLPVSLSVGSCVIIKGTPIHSFINDPQLQVDFYTDMDEDSDIAFRFRVHFGNHVVMNRREFGIWMLEETTDYVPFEDGKQFELCIYVHYNEYEIKVNGHTHLRALSHRIPPSFVEDGCKCPRRYLPWTSVCVCN

SEQ ID NO: 3672 - protein, 342 aa, Homo sapiens
HYAKLGTRPRLKFMSSPSLSDLGKREPAAAADERGTQQRRACANATWNSIHNGVIAVFQRKGLPDQELFSLNEGVRQLLKTELGSFFTEYLQNQLLTKGMVILRDKIRFYEGQKLLDSLAETWDFFFSDVLPMLQAIFYPVQGKEPSVRQLALLHFRNAITLSVKLEDALARAHARVPPAIVQMLLVLQGVHESRGVTEDYLRLETLVQKVVSPYLGTYGLHSSEGPFTHSCILEKRLLRRSRSGDVLAKNPVVRSKSYNTPLLNPVQEHEAEGAAAGGTSIRRHSVSEMTSCPEPQGFSDPPGQGPTGTFRSSPAPHSGPCPSRLYPTTQPPEQGLDPTRS

SEQ ID NO: 3673 - protein, 236 aa, Homo sapiens
RPPRVWYPELRELSAAAPRWSHRTAPGIMVFYFTSSSVNSSAYTIYMGKDKYENEDLIKHGWPEDIWFHVDKLSSAHVYLRLHKGENIEDIPKEVLMDCAHLVKANSIQGCKMNNVNVVYTPWSNLKKTADMDVGQIGFHRQKDVKIVTVEKKVNEILNRLEKTKVERFPDLAAEKECRDREERNEKKAQIQEMKKREKEEMKKKREMDELRSYSSLMKVENMSSNQDGNDSDEFM

SEQ ID NO: 3674 - protein, 236 aa, Homo sapiens; identical to SEQ ID NO: 3673

SEQ ID NO: 3675 - protein, 133 aa, Homo sapiens
VTLAKMRVHISSCLKVQEQMANCPKFVPVVPTSQPIPSNIPNRSTFACPYCGARNLDQQELVKHCVESHRSDPNRVVCPICSAMPWGDPSYKSANFLQHLLHRHKFSYDTFVDYSIDEEAAFQAALALSLSEN

SEQ ID NO: 3676 - protein, 617 aa, Homo sapiens
TLGRWLLGVYETVAPTLACLPRPRLRRRRRRRRRRMISRYTRKAVPQSLELKGITKHALNHHPPPEKLEEISPTSDSHEKDTSSQSKSDITRESSFTSADTGNSLSAFPSYTGAGISTEGSSDFSWGYGELDQNATEKVQTMFTAIDELLYEQKLSVHTKSLQEECQQWTASFPHLRILGRQIITPSEGYRLYPRSPSAVSASYETTLSQERDSTIFGIRGKKLHFSSSYAHKASSIAKSSSFCSMERDEEDSIIVSEGIIEEYLAFDHIDIEEGFHGKKSEAATEKQKLGYPPIAPFYCMKEDVLAYVFDSVWCKVVSCMEQLTRSHWEGFASDDESNVAVTRPDSESSCVLSELHPLVLPRVPQSKVLYITSNPMSLCQASRHQPNVNDLLVHGMPLQPRNLSLMDKLLDLDDKLLMRPGSSTILSTRNWPNRAVEFSTSSLSYTVQSTRRRNPPPRTLHPISTSHSCAETPRSVEEILRGARVPVAPDSLSSPSPTPLSRNNLLPPIGTAEVEHVSTVGPQRQMKPHGDSSRAQSAVVDEPNYQQPQERLLLPDFFPRPNTTQSFLLDTQYRRSCAVEYPHQARPGRGSAGPQLHGSTKSQSGGRPVSRTRQGP

SEQ ID NO: 3677 - protein, 170 aa, Homo sapiens; identical to SEQ ID NO: 1709

SEQ ID NO: 3678 - protein, 496 aa, Homo sapiens
RGKAEFFLAMAGTNALLMLENFIDGKFLPCSSYIDSYDPSTGEVYCRVPNSGKDEIEAAVKAAREAFPSWSSRSPQERSRVLNQVADLLEQSLEEFAQAESKDQGKTLALARTMDIPRSVQNFRFFASSSLHHTSECTQMDHLGCMHYTVRAPVGVAGLISPWNLPLYLLTWKIAPAMAAGNTVIAKPSELTSVTAWMLCKLLDKAGVPPGVVNIVFGTGPRVGEALVSHPEVPLISFTGSQPTAERITQLSAPHCKKLSLELGGKNPAIIFEDANLDECIPATVRSSFANQGEICLCTSRIFVQKSIYSEFLKRFVEATRKWKVGIPSDPLVSIGALISKAHLEKVRSYVKRALAEGAQIWCGEGVDKLSLPARNQAGYFMLPTVITDIKDESCCMTEEIFGPVTCVVPFDSEEEVIERANNVKYGLAATVWSSNVGRVHRVAKKLQSGLVWTNCWLIRELNLPFGGMKSSGIGREGAKDSYDFFTEIKTITVKH

SEQ ID NO: 3679 - protein, 453 aa, Homo sapiens
MAGTKPYMEIQTTIREYYEHLYANKLENLEEMDKFLDTYTLPRLNQEEVESLNRPITGSEIEAIINSLPTKKIPGPDRFTAKFYQRYKEELSNLIHYLGLSHHLLALNFIIVSFGKKSAWSSAQVKVTDTDFDGVEVRVFEGPPKPEEPLKRSVVYIHGGGWALASAKIRYYDELCTAMAEELNAVIVSIEYRLVPKVYFPEQIHDVVRATKYFLKPEVLQKYMVDPGRICISGDSAGGNLAAALGQQFTQDASLKNKLKLQALIYPVLQALDFNTPSYQQNVNTPILPRYVMVKYWVDYFKGNYDFVQAMIVNNHTSLDVEEAAAVRARLNWTSLLPASFTKNYKPVVQTTGNARIVQELPQLLDARSAPLIADQAVLQLLPKTYILTCEHDVLRDDGIMYAKRLESAGVEVTLDHFEDGFHGCMIFTSWPTNFSVGIRTRNSYIKWLDQNL

SEQ ID NO: 3680 - protein, 632 aa, Homo sapiens
RSWGAPWFWRMRLLRRRHMPLRLAMVGCAFVLFLFLLHRDVSSREEATEKPWLKSLVSRKDHVLDLMLEAMNNLRDSMPKLQIRAPEAQQTLFSINQSCLPGFYTPAELKPFWERPPQDPNAPGADGKAFQKSKWTPLETQEKEEGYKKHCFNAFASDRISLQRSLGPDTRPPECVDQKFRRCPPLATTSVIIVFHNEAWSTLLRTVYSVLHTTPAILLKEIILVDDASTEEHLKEKLEQYVKQLQVVRVVRQEERKGLITARLLGASVAQAEVLTFLDAHCECFHGWLEPLLARIAEDKTVVVSPDIVTIDLNTFEFAKPVQRGRVHSRGNFDWSLTFGWETLPPHEKQRRKDETYPIKSPTFAGGLFSISKSYFEHIGTYDNQMEIWGGENVEMSFRVWQCGGQLEIIPCSVVGHVFRTKSPHTFPKGTSVIARNQVRLAEVWMDSYKKIFYRRNLQAAKMAQEKSFGDISERLQLREQLHCHNFSWYLHNVYPEMFVPDLTPTFYGAIKNLGTNQCLDVGENNRGGKPLIMYSCHGLGGNQYFEYTTQRDLRHNIAKQLCLHVSKGALGLGSCHFTGKNSQVPKDEEWELAQDQLIRNSGSGTCLTSQDKKPAMAPCNPSDPHQLWLFV

SEQ ID NO: 3681 - protein, 370 aa, Homo sapiens
LKDTLKSQMTQEASDEAEDMKEAMNRMIDELNKQVSELSQLYKEAQAELEDYRKRKSLEDVTAEYIHKAEHEKLMQLTNVSRAKAEDALSEMKSQYSKVLNELTQLKQLVDAQKENSVSITEHLQVITTLRTAAKEMEEKISNLKEHLASKEVEVAKLEKQLLEEKAAMTDAMVPRSSYEKLQSSLESEVSVLASKLKESVKEKEKVHSEVVQIRSEVSQVKREKENIQTLLKSKEQEVNELLQKFQQAQEELAEMKRYSESSSKLEEDKDKKINEMSKEVTKLKEALNSLSQLSYSTSSSKRQSQQLEALQQQVKQLQNQLAECKKQHQEVISVYRMHLLYAVQGQMDEDVQKVLKQILTMCKNQSQKK

SEQ ID NO: 3682 - protein, 192 aa, Homo sapiens
  misc_feature (1)...(192): Xaa = any amino acid or nothing
AQALTAGRQLALAAPFIAPISPISLPRLNPPSQSWNSTPFFKVKLPPQKEVITSDELMAHLGNCLLSIKPQEKSEGLQLNFQQNVDDAMTVLPKLATGLDVNVRFTGVSDFEYTPECSVFDLLGIPLYHGWLVDPQQSPEAVRAVGKLSYNQLVGEDHHLQTLQXHQPRDRKPDCRAVPGDHRGPSDLPRTV

SEQ ID NO: 3683 - protein, 312 aa, Homo sapiens
  misc_feature (1)...(312): Xaa = any amino acid or nothing
LEIKQEEKFVGQCIKEELMHGECVKEEKDFLKKEIVDDTKVKEEPPINHPVGCKRKLAMSRCETCGTEEAKYRCPRCMRYSCSLPCVKKHKAELTCNGVRDKTAYISIQQFTEMNLLSDYRFLEDVARTADHISRDAFLKRPISNKYMYFMKNRARRQGINLKLLPNGFTKRKENSTFFDKKKQQFCWHVKLQFPQSQASTXKKRVPDDKTINEILKPYIDPEKSDPVIRQRLKAYIRSQTGVQILMKIEYMQQNLVRYYELDPYKSLLDNLRNKVIIEYPTLHVVLKGSNNDMKVLHQVKSESTKNVGNEN

SEQ ID NO: 3684 - protein, 472 aa, Homo sapiens
  misc_feature (1)...(472): Xaa = any amino acid or nothing
SLQENVQEKRVRVCPGLGGLLPNGTPSITAAAAPQVLWRHVQPGCSHHLHACVIRAACRAGEGHADRHAGPPETPVTLPSSWPWSSPWERQCPMHLXAPGHAFRPVPTEHRRGWAALGHHRAAAGPLREPASGSQPAPASCXPECHHGCPEQTRQCQDLLREAVVAPEQRGXPCAHLQTXATATTLCPQVPAGRVWQPGHSCHLLPHRHDGSHXHHCAAHRRPVTRRQAAHGVPLPDACYSPHHTLPAAPPPATRPAGHTATHPEXGGDLTPVPDGPHDCPRDVQGIPGAGGGSQLAPCCPPFPAAPVSVQGTQGLGPKNVLHXQWEGIRWQKEPEPGPPPEVELKRGAKCRIGDHGLGAVLGQGEYASXSPSIPWXASSSACPPLHPTPTVYTQSPAAAPGWTRPPSPPPPGLYPGPPASHAPGVRGGISHQLYSLPXLCRECCSCPPPPPAHGGRCPSLLPPEALAKLLL

SEQ ID NO: 3685 - protein, 112 aa, Homo sapiens
  misc_feature (1)...(112): Xaa = any amino acid or nothing
AWVLQCKINTELQTEVVMLKSMVLWLGEQVQSLQLQQQLHCHFNHTHICVTNLEYNKEYPWDLVKAHLQGASTSNITFDIGELQKKILDLNKQTQEFQPSLXAWTEFQQGLE

SEQ ID NO: 3686 - protein, 247 aa, Homo sapiens
  misc_feature (1)...(247): Xaa = any amino acid or nothing
VSDVVKNQLVEVQCRQDGCDAVENVHQMFMFNWFTDCLWTLFLSNYQPSVESSSPGGSATSDDHEFDPSADMLVHDFDDERTLEEEEMMEGETNFSSEIEDLAREGDMPIHELLSLYGYGSTVRLPEEDEEEEEEEEEGEDDEDADNDDNSGCSGENKEENIKDSSGQEDETQSSNDDPSQSVASQDAQEIIRPRRCKYFDTNSEVEEESEEDEDYIPSIISFFQSSDGIXSSSSSEDWKKEIMVGS

SEQ ID NO: 3687 - protein, 391 aa, Homo sapiens
PVLVTSLRMREADTLRPPQLMEVSADIISTVEFNHTGELLATGDKGGRVVIFQREPESKNAPHSQGEYDVYSTFQSHEPEFDYLKSLEIEEKINKIKWLPQQNAAHSLLSTNDKTIKLWKITERDKRPEGYNLKDEEGKLKDLSTVTSLQVPVLKPMDLMVEVSPRRIFANGHTYHINSISVNSDCETYMSADDLRINLWHLAITDRSFTPNIVDIKPANMEDLTEVITASEFHPHHCNLFVYSSSKGSLRLCDMRAAALCDKHSKLFEEPEDPSNRSFFSEIISSVSDVKFSHSDRYMLTRDYLTVKVWDLNMEARPIETYQVHDYLRSKLCSLYENDCIFDKFECAWNGSDRIIMTGAYNNFFRMFDRNTKRDVTLEASRGSSKPRAVL

SEQ ID NO: 3688 - protein, 133 aa, Homo sapiens
KKVPGRLSEMSFSLNFTLPANTTSSPVTDCGPSLGLAAGIPLLVATALLVALLFTLIHRRRSSIEAMEESDRPCEISEIDDNPKISENPRRSPTHEKNTMGAQEAHIYVKTVAGSEEPVHDRYRPTIEMERRR

SEQ ID NO: 3689 - protein, 64 aa, Homo sapiens
GRVLVHCAMGVSRSATLVLAFLMIYENMTLVEAIPDGAGPPQISALTQAFVRQLQVLDNRLGRE

SEQ ID NO: 3690 - protein, 31 aa, Homo sapiens
MGAHLVRRYLGDASVEPDPLQMPTFPPDYGF

SEQ ID NO: 3691 - protein, 31 aa, Homo sapiens; identical to SEQ ID NO: 3690

SEQ ID NO: 3692 - protein, 942 aa, Homo sapiens
PLVRRLLRQTLRRVGGARAVREAVMRAVLTWRDKAEHCINDIAFKPDGTQLILAAGSRLLVYDTSDGTLLQPLKGHKDTVYCVAYAKDGKRFASGSADKSVIIWTSKLEGILKYTHNDAIQCVSYNPITHQLASCSSSDFGLWSPEQKSVSKHKSSSKIICCSWTNDGQYLALGMFNGIISIRNKNGEEKVKIERPGGSLSPIWSICWNPSSRWESFWMNRENEDAEDVIVNRYIQEIPSTLKSAVYSSQGSEAEEEEPEEEDDSPRDDNLEERNDILAVADWGQKVSFYQLSGKQIGKDRALNFDPCCISYFTKGEYILLGGSDKQVSLFTKDGVRLGTVGEQNSWVWTGQAKPDSNYVVGGCQDGTISFYQLIFSTVHGLYKDRYAYRDSMTDVIVQHLITEQKVRIKCKELVKKIAIYRNRLAIQLPEKILIYELYSEDLSDMHYRVKEKIIKKFECNLLVVCANHIILCQEKRLQCLSFSGVKEREWQMESLIRYIKVIGGPPGREGLLVGLKNGQILKIFVDNLFAIVLLKQATAVRCLDMSASRKKLAVVDENDTCLVYDIDTKELLFQEPNANSVAWNTQCEDMLCFSGGGYLNIKASTFPVHRQKLQGFVVGYNGSKIFCLHVFSISAVEVPQSAPMYQYLDRKLFKEAYQIACLGVTDTDWRELAMEALEGLDFETAKKERKKRGETNNDLFLADVFSYQGKFHEAAKLYKRSGHENLALEMYTDLCMFEYAKDFLGSGDPKETKMLITKQADWARNIKEPKAAVEMYISAGEHVKAIEICGDHGWVDMLIDIARKLDKAEREPLLLCATYLKKLDSPGYAAETYLKMGDLKSLVQLHVETQRWDEAFALGEKHPEFKDDIYMPYAQWLAENDRFEEAQKAFHKAGRQREAVQVLEQLTNNAVAESRFNDAAYYYWMLSMQCLDIAQDPAQKD

SEQ ID NO: 3693 - protein, 365 aa, Homo sapiens
SSFPTCMRTVFHSNTSVSSLLHRPGHVTPQLTIHGGWRHHRDHTAIDEWDFNPSKFLIYTCLLLFSVLLPLRLDGIIQWSYWAVFAPIWLWKLLVVAGASVGAGVWARNPRYRTEGEACVEFKAMLIAVGIHLLLLMFEVLVCDRVERGTHFWLLVFMPLFFVSPVSVAACVWGFRHDRSLELEILCSVNILQFIFIALKLDRIIHWPWLVVFVPLWILMSFLCLVVLYYIVWSLLFLRSLDVVAEQRRTHVTMAISWITIVVPLLTFEVLLVHRLDGHNTFSYVSIFVPLWLSLLTLMATTFRRKGGNHWWFAIRRDFCQDQLPQPTGKPPPPPLTDHHGEKALPLQNKDRGSWPASRGSPRLL

SEQ ID NO: 3694 - protein, 93 aa, Homo sapiens
  misc_feature (1)...(93): Xaa = any amino acid or nothing
PRSLIDYKSYMDTKLLVARFLEQSSCTMTPDIHELVENIKSVLKSDEEHMEEAITSASFLEQIMAHSXQHIRAHKLPXETAGLXTSELRXLTP

SEQ ID NO: 3695 - protein, 93 aa, Homo sapiens; identical to SEQ ID NO: 3694
  misc_feature (1)...(93): Xaa = any amino acid or nothing

SEQ ID NO: 3696 - protein, 92 aa, Homo sapiens
LSAALWEEPILSLWSETKELTNRGKMNYPQIGPHRPHVKGLRVRPGPGTLSNAPKSLCPGMSNSDRGIHGGEGQGPGKRAGHLGRGGGMSFL

SEQ ID NO: 3697 - protein, 118 aa, Homo sapiens
  misc_feature (1)...(118): Xaa = any amino acid or nothing
VWLXTLSXHTCALMTVCRSCLVKYLEENNTCPTCRIVIHQSHPLQYIGHDRTMQDIVYKLVPGLQEAEMRKQREFYHKLGMEVPGDIKGETCSAKQHLDSHRNGETKADDSSNKEAAE

SEQ ID NO: 3698 - protein, 190 aa, Homo sapiens
  misc_feature (1)...(190): Xaa = any amino acid or nothing
KQCGIPHEVVRDENSSVYAEVSRLLLATGHWKRLRRDNPRFNLMLGERNRLPFGRLGHEPGLVQLVNYYRGADKLCRKASLVKLIKTSPELAESCTWFPESYVIYPTNLKTPVAPAQNGIQPPISNSRTDEREFFLASYNRKKEDGEGNVWIAKSSAGAKVWVQWXMTDLEEEIDIPSPVGLGLESEWPL

SEQ ID NO: 3699 - protein, 141 aa, Homo sapiens
  misc_feature (1)...(141): Xaa = any amino acid or nothing
LHCKMGALETQTHPCSQNMLRSLQKCCCKVEEHHLQPVQVLQTLLHSATAGTGCRRPARPPPAPPTPTPWRSRQSGKQSERASXLKGRGRYGLGALGGRGGRALGGSRWPPPLPGETLFSGCKHRRRRRGSDAAPGEEAGT

SEQ ID NO: 3700 - protein, 428 aa, Homo sapiens
GYQIGMALASGPARRALAGSGQLGLGGFGAPRRGAYEWGVRSTRKSEPPPLDRVYEIPGLEPITFAGKMHFVPWLARPIFPPWDRGYKDPRFYRSPPLHEHPLYKDQACYIFHHRCRLLEGVKQALWLTKTKLIEGLPEKVLSLVDDPRNHIENQDECVLNVISHARLWQTTEEIPKRETYCPVIVDNLIQLCKSQILKHPSLARRICVQNSTFSATWNRESLLLQVRGSGGARLSTKDPLPTIASREEIEATKNHVLETFYPISPIIDLHECNIYDVKNDTGFQEGYPYPYPHTLYLLDKANLRPHRLQPDQLRAKMILFAFGSALAQARLLYGNDAKVLEQPVVVQSVGTDGRVFHFLVFQLNTTDLDSNEGVKNLAWVDSDQLLYQHFWCLPVIKKRVVVEPVGPVGFKPETFRKFLALYLHGAA

SEQ ID NO: 3701 - protein, 126 aa, Homo sapiens
WTLCGPEAGMVGYDPKPDGRNNTKFQVAVAGSVSGLVTRALISPFDVIKIRFQLQHERLSRSDPSAKYHGILQASRQILQEEGPTAFWKGHVPAQILSIGYGAVQFLSFEMLTELVHRGSVYDARE

SEQ ID NO: 3702 - protein, 216 aa, Homo sapiens
GFWEKTNQSSHSMDPLGAPSQFVDVDTLPSWGDSCQDELNSSDTTAEIFQEDTVRSPFLYNKDVNGKVVLWKGDVALLNCTAIVNTSNESLTDKNPVSESIFMLAGPDLKEDLQKLKGCRTGEAQLTKGFNLAARFIIHTVGPKYKSRYRTAAESSLYSCYRNVLQLAKEQSMSSVGFCVINSAKRGYPLKDATHIALRTVRRFLEIHGETIEKVV

SEQ ID NO: 3703 - protein, 376 aa, Homo sapiens
SLGPSPKSATIPCCGDTMAPEEDAGGEALGGSFWEAGNYRRTVQRVEDGHRLCGDLVSCFQERARIEKAYAQQLADWARKWRGTVEKGPQYGTLEKAWHAFFTAAERLSALHLEVREKLQGQDSERVRAWQRGAFHRPVLGGFRESRAAEDGFRKAQKPWLKRLKEVEASKKSYHAARKDEKTAQTRESHAKADSAVSQEQLRKLQERVERCAKEAEKTKAQYEQTLAELHRYTPRYMEDMEQAFETCQAAERQRLLFFKDMLLTLHQHLDLSSSEKFHELHRDLHQGIEAASDEEDLRWWRSTHGPGMAMNWPQFEEWSLDTQRTISRKEKGGRSPDEVTLTSIVPTRDGTAPPPQSPGSPGTGQDEEWSDEESP

SEQ ID NO: 3704 - protein, 90 aa, Homo sapiens
ARGEDLALATGGGPDTVTHSNMPCPNSLVYDCWLNIKECSVGEHTFEDLGLCPGRNQREKKRSYKDFLREEEKIAAQVRNSSKKKLKDSE

SEQ ID NO: 3705 - protein, 382 aa, Homo sapiens
LNWANLVIMWPREEEKEKVQDYSLGGLSPDLRIDVSRKKKILKAYDEDEDEDLYPDIHPPPSLPLPGQFTCPQCRKSFTRRSFRPNLQLANMVQIIRQMCPTPYRGNRSNDQGMCFKHQEALKLFCEVDKEAICVVCRESRSHKQHSVLPLEEVVQEYKAKLQGHVEPLRKHLEAVQKMKAKEERRVTELKSQMKSELAAVASEFGRLTRFLAEEQAGLERRLREMHEAQLGRAGAAASRLAEQAAQLSRLLAEAQERSQQGGLRLLQDIKETFNRCEEVQLQPPEVWSPDPCQPHSHDFLTDAIVRKMSRMFCQAARVDLTLDPDTAHPALMLSPDRRGVRLAERRQEVADHPKRFSADCCVLGAQGFRSGRHYWEVCMGP

SEQ ID NO: 3706 - protein, 597 aa, Homo sapiens
SRERQTTWMDHNFAPAPPEMQSHGAPGPGTSFSHSHVLGRPIRPSRLPGGGSPLTPVLRKTIHLDTFPQSHIPQTSSRLGLGARTRSVPPQETGIALGASLSPLPTSSLVPRKLSSISLTLHQNSQARSLDRPLSHWEELPTPGKKAAPHEGGRVSSPGSPPVTLVPGGRVHSEGPGNPGLTKSNRMLATEKPLVSSYLALPFQSRLAQSAPVLAEPGSLGQGHLVSVTDHMPTRASPGKGKPRARGIPRPRGRLQRANTTVNLTAMDTRTDAARHLATMATNRPSLAINLATPNTSQLDTGTEFPALDIKLGTARDLSSVGTVKSGKTVNLATAGTIKPGTAMNLTTVGTTKPGMVMDLIASEPDKLGKAMATRSTAKPDMTTEGIAMDSATSDPVKPDTITATVGTSRLETAMALARVNRAKLGTAKNSLALDTSRMGTAVGSVVPVTPDPATGKTTLGSVNNLTISDVATCLLMPSRSTDLALDNTNAAMDRATEPASLDLATEYKGKCRNLVGDGLGCREGEVCELGDGSMKPMSINSNLLGYIGIDTIIEQMRKKTMKTGFDFNIMVVGTEGCGAAAGLVAGSTKDPISFPQ

SEQ ID NO: 3707 - protein, 182 aa, Homo sapiens
SSSISRDFLGQAACASGTMLRWLRDFVLPTAACQDAEQPMRYETLFQALDRNGDGVVDIGELQEGLRNLGIPLGQDAEEKIFTTGDVNKDGKLDFEEFMKYLKDHEKKMKLAFKSLDKNNDGKIEASEIVQSLQTLGLTISEQQAELILQSIDVDGTMTVDWNEWRDYFLFNPVTDIEEIIR

SEQ ID NO: 3708 - protein, 622 aa, Homo sapiens
EFRGAGRANMLAPRGAAVLLLHLVLQRWLAAGAQATPQVFDLLPSSSQRLNPGALLPVLTDPALNDLYVISTFKLQTKSSATIFGLYSSTDNSKYFEFTVMGRLSKAILRYLKNDGKVHLVVFNNLQLADGRRHRILLRLSNLQRGAGSLELYLDCIQVDSVHNLPRAFAGPSQKPETIELRTFQRKPQDFLEELKLVVRGSLFQVASLQDCFLQQSEPLAATGTGDFNRQFLGQMTQLNQLLGEVKDLLRQEVNETSFLRNTITECQACGPLKFQSPTPSTVVPPASPAPPTRPPRRCDSNPCFRGVQCTDSRDGFQCGPCPEGYTGNGITCIDVDECKYHPCYPGEHCINLSPGFRCDACPVGFTGPMVQGVGISFAKSNKQVCTDIDECRNGACVPNSICVNTLGSYRCGPCKPGYTGDQIRGCKAERNCRNPELNPCSVNAQCIEERQGDVTCVCGVGWAGDGYICGKDVDIDSYPDEELPCSARNCKKDNCKYVPNSGQEDADRDGIGDACDEDADGDGILNEQDNCVLIHNVDQRNSDKDIFGDACDNCLSVLNNDQKDTDGDGRGDACDDDMDGDGIKNILDNCPKFPNRDQRDKDGDGVGDACDSCPDVSNPNQ

SEQ ID NO: 3709 - protein, 91 aa, Homo sapiens
TQAMEGLLHYINPAHAISLLSALNEERLKGQLCDVLLIVGDQKFRAHKNVLAASSEYFQSLFTNKENESQTVFQLDFCEPDAFDNVLNYIY

SEQ ID NO: 3710 - protein, 147 aa, Homo sapiens
FGMLKNKGHSSKKDNLAVNAVALQDHILHDLQLRNLSVADHSKTQVQKKENKSLKRDTKAIIDTGLKKTTQCPKLEDSEKEYVLDPKPPPLTLAQKLGLIGPPPPPLSSDEWEKVKQRSLLQGDSVQPCPICKEEFELRPQVFSIRG

SEQ ID NO: 3711 - protein, 256 aa, Homo sapiens
SLEMSSDGEPLSRMDSEDSISSTIMDVDSTISSGRSTPAMMNGQGSTTSSSKNIAYNCCWDQCQACFNSSPDLADHIRSIHVDGQRGGVFVCLWKGCKVYNTPSTSQSWLQRHMLTHSGDKPFKCVVGGCNASFASQGGLARHVPTHFSQQNSSKVSSQPKAKEESPSKAGMNKRRKLKNKRRRSLARPHDFFDAQTLDAIRHRAICFNLSAHIESLGKGHSVVFHSTVSILLFFQIKYKTLQKNISTIISKSLKI

SEQ ID NO: 3712 - protein, 114 aa, Homo sapiens
RATWHNAGKEREAVQLMAGAEKRVKASHSFLRGLFGGNTRIEEACEMYTRAANMFKMAKNWSAAGNAFCQAAKLHMQLQSKHDSATSFVDAGNAYKKADPQGKTARHVACYLCV

SEQ ID NO: 3713 - protein, 318 aa, Homo sapiens
GAAATACSSSSSSSGAPATWAAHGPGKDVASPSSVSLSPRRSRLLVLRCGLRRNPERPSSSPALRRLLLLLLLLLLLLLGFLLSPGPERGVGGGRFGRRLALLWAAALGHVVSGKVMSRRAPGSRLSSGGGGGGTNYSRSWNDWQPRTDSASADPGNLKYSSSRDRGGSSSYGLQPSNSAVVSRQRHDDTRVHADIQNDEKGGYSVNGGSGENTYGRKSLGQELRVNNVTSPEFTSVQHGSRALATKDMRKSQERSMSYCDESRLSYLLRRITRENDRDRRLATVKQLKEFIQQPENKLVLVKQLDILAAVHDVLNER

SEQ ID NO: 3714 - protein, 74 aa, Homo sapiens
IFALKSPSYLLPCCTPEGKMDHKQLCWSHPQKSGQSSRSCCICSNQHGLIWKYSLNMCLQCCHQYVKDIGFIKL

SEQ ID NO: 3715 - protein, 185 aa, Homo sapiens
LCTLSPGISGTAGSCLTTEPGTELGTSFAQNGFYHEAVVLFTQALKLNPQDHRLFGNRSFCHERLGQPAWALADAQVALTLRPGWPRGLFRLGKALMGLQRFREAAAVFQETLRGGSQPDAARELRSCLLHLTLQGQRGGICAPPLSPGALQPLPHAELAPSGLPSLRCPRSTALRSPGLSPLLH

SEQ ID NO: 3716 - protein, 74 aa, Homo sapiens
QGLPSTMVKLGCSFSGKPGKDPGDQDGAAMDSVPLISPLDISQLQPPLPDQVVIKTQTEYQLSSPDQQNYTKSR

SEQ ID NO: 3717 - protein, 187 aa, Homo sapiens
GAGCTSPGLWARKAAARCLPTYPSRAQPSNVGRRRRRRPGLGALAAGVPAMAESVERLQQRVQELERELAQERSLQVPRSGDGGGGRVRIEKMSSEVVDSNPYSRLMALKRMGIVSDYEKIRTFAVAIVGVGGVGSVTAEMLTRCGIGKLLLFDYDKVELANMNRLFFQPHQAGLSKVQAAGHTPEE

SEQ ID NO: 3718 - protein, 197 aa, Homo sapiens
RGAGGRAGGRADGQPNMADQRQRSLSTSGESLYHVLGLDKNATSDDIKKSYRKLALKYHPDKNPDNPEAADKFKEINNAHAILTDATKRNIYDKYGSLGLYVAEQFGEENVNTYFVLSSWWAKALFVFCGLLTCCYCCCCLCCCFNCCCGKCKPKAPEGEETEFYVSPEDLEAQLQSDEREATDTPIVIQPASATEP

SEQ ID NO: 3719 - protein, 723 aa, Homo sapiens
  misc_feature (1)...(723): Xaa = any amino acid or nothing
SGGVRMGSRADGPRTSGHVTGKMAVFPWHSRNRNYKAEFASCRLEAVPLEFGDYHPLKPITVTESKTKKVNRKGSTSSTSSSSSSSVVDPLSSVLDGTDPLSMFAATADPAALAAAMDSSRRKRDRDDNSVVGSDFEPWTNKRGEILARYTTTEKLSINLFMGSEKGKAGTATLAMSEKVRTRLEELDDFEEGSQKELLNLTQQDYVNRIEELNQSLKDAWASDQKVKAPKNVHPGKLVYERIFSMCVDSRSVLPDHFSPENANDTAKETCLNWFFKIASIRELIPRFYVEASILKCNKFLSKTGISECLPRLTCMIRGIGDPLGSVYARAYLSRVGMEVAPHLKETLNKNFFDFLLTFKQIHGDTVQNQLVVQGVELPSYLPLYPPAMDWIFQCISYHAPEALLTEMMERCKKLGNNALLLNSVMSAFRAEFIATRSMDFIGMIKECDESGFPKHLLFRSLGLNLALADPPESDRLQILNEAWKVITKLKNPQDYINCAEVWVEYTCKHFTKREVNTVLADVIKHMTPDRAFEDSYPQLQLIIKKVIAHFHDFSVLFSVEKFLPFLDMFQKESVRVEVCKCIRTPLSSINKSPPRTRSSXMPFCMFARPCMTLCNALTLEDEKRMLSYLINGFIKMVSFGRDFEQQLSFYVESRSMFCNLEPVLVQLIHSVNRLAMETRKVMKGNHSRKTAAFVRSWGAYWFITIPSLAGIFTRLNLYLHSG

SEQ ID NO: 3720 - protein, 91 aa, Homo sapiens
ENLFRAGFAFSLLRSSFYISKTYCSWFSNLISGSLADFNSKGTRDYSPRQMAVREKVFDVIIRCFKRHGAEVIDTPVFELKVRNGQEETTW

SEQ ID NO: 3721 - protein, 103 aa, Homo sapiens
PSCLTCVGHCSIGGSCTMIGIMMPECHCSLHMTGPRCEEHVFILQQPGHIASILIPLLVLLLLALVAGVVFWHKRRVQGAKGFQHQRMTNGAMNVEIGNPTYK

SEQ ID NO: 3722 - protein, 216 aa, Homo sapiens
MELVAGCYEQVLFGFAVHPEPEACGDHEQWTLVADFTHHAHTASLSAVAVNSRFVVTGSKDETIHIYDMKKKIEHGALVHHSGTITCLKFYGNRHLISGAEDGLICIWDAKKWECLKSIKAHKGQVTFLSIHPSGKLALSVGTDKTLRTWNLVEGRSAFIKNIKQNAHIVEWSPRGEQYVVIIQNKIDIYQLDTASISGTITNEKRISSVKFLSES

SEQ ID NO: 3723 - protein, 68 aa, Homo sapiens
MELSDNRRSGGLEGLAEKCPNLTYLNLSGNKIKDLSTVEALVSGTVLSLDLLFLVKFSEICLCLLISI

SEQ ID NO: 3724 - protein, 134 aa, Homo sapiens
VDRGTEAWQRDPAFSGLQRVGGVDVSFVKGDSVRACASLGVLSFPELEVVYEESRMVSLTAPYVSGFLAFREVPFLLELVQQLREKEPGLMPQVLLVDGNGVLHHRGFGVACHLGVLTDLPCVGVAKKLLQVDG

SEQ ID NO: 3725 - protein, 134 aa, Homo sapiens; identical to SEQ ID NO: 3724

SEQ ID NO: 3726 - protein, 144 aa, Homo sapiens
SSDDRSLFRRLKLNYAIFDEGHMLKNMGSIRYQHLMTINANNRLLLTGTPVQNNLLELMSLLNFVMPHMFSSSTSEIRRMFSSKTKSADEQSIYEKERIAHAKQIIKPFILRRVKEEVLKQLPPKKDRIELCAMSEKQEQLYLG

SEQ ID NO: 3727 - protein, 126 aa, Homo sapiens
  misc_feature (1)...(126): Xaa = any amino acid or nothing
RIPRGKACXTVLGRSTGELEGFASSRLPPQPCGWGQSSDLLSRIDLDELMKKDEPPLDFPDTLEGFEYAFNEKGQLRHIKTGEPFVFNYREHLHRWNQKRYEALGEIITKYVYELLEKDCNSKKVS

SEQ ID NO: 3728 - protein, 815 aa, Homo sapiens
  misc_feature (1)...(815): Xaa = any amino acid or nothing
EIAGAAAENMLGSLLCLPGSGSVLLDPCTGSTISETTSEAWSVEVLPSDSEAPDLKQEERLQELESCSGLGSTSDDTDVREVSSRPSTPGLSVVSGISATSEDIPNKIEDLRSECSSDFGGKDSVTSPDMDEITHDFLYILQPKQHFQHIEAEADMRIQLSSSAHQLTSPPSQSESLLAMFDPLSSHEGASAVVRPKVHYARPSHPPPDPPILEGAVGGNEARLPNFGSPMFXLPAEMEAFKQRHSYTPERLVRSRSSDIVSSVRRPMSDPSWNRRPGNEERELPPAAAIGATSLVAAPHSSSSSPSKDSSRGETEERKDSDDEKSDRNRPWWRKRFVSAMPKAPIPFRKKEKQEKDKDDLGPDRFSTLTDDPSPRLSAQAQVAEDILDKYRNAIKRTSPSDGAMANYESTEVMGDGESAHDSPRDEALQNISADDLPDSASQAAHPQDSAFSYRDAKKKLRLALCSADSVAFPVLTHSTRNGLPDHTDPEDNEIVCFLKVQIAEAINLQDKNLMAQLQETMRCVCRFDNRTCRKLLASIAEDYRKRAPYIAYLTRCRQGLQTTQAHLERLLQRVLRDKEVANRYFTTVCVRLLLESKEKKIREFIQDFQKLTAADDKTAQVEDFLQFLYGAMAQDVIWQNASEEQLQDAQLAIERSVMNRIFKLAFYPNQDGDILRDQVLHEHIQRLSKVVTANHRALQIPEVYLREAPWPSAQSEIRTISAYKTPRDKVQCILRMCSTIMNLLSLANEDSVPGADDFVPVLVFVLIKANPPCLLSTVQYISSFYASCLSGEESYWWMQFTAAVEFIKTIDDRK

SEQ ID NO: 3729 - protein, 815 aa, Homo sapiens; identical to SEQ ID NO: 3728
  misc_feature (1)...(815): Xaa = any amino acid or nothing

SEQ ID NO: 3730 - protein, 815 aa, Homo sapiens; identical to SEQ ID NO: 3728
  misc_feature (1)...(815): Xaa = any amino acid or nothing

SEQ ID NO: 3731 - protein, 434 aa, Homo sapiens
  misc_feature (1)...(434): Xaa = any amino acid or nothing
VNTAMHEAKLMEECDELVEIIQQRKQMIAVKIKETKVMKLRKLAQQVANCRQCLERSTVLINQAEHILKENDQARFLQSAKNIAERVAMATASSQVLIPDINFNDAFENFALDFSREKKLLEGLDYLTAPNPPSIREELCTASHDTITVHWISDDEFSISSYELQYTIFTGQANFISLYNSVDSWMIVPNIKQNHYTVHGLQSGTRYIFIVKAINQAGSRNSEPTRLKTNSQPFKLDPKMTHKKLKISNDGLQMEKDESSLKKSHTPERFSGTGCYVYGVLHNSDNSXMFISLSFPLSHRYAIGIAYKSAPKNEWIGKNASSWVFSRCNSNFVVRHNNKEMLVDVPPHLKRLGVLLDYDNYNMLSFYDPANSLHLHTFDVTFILPVCPTFTIWNKSLMILSGLPAPDFIDYPERQECNCRPQESPYVSGMKTCH

SEQ ID NO: 3732 - protein, 901 aa, Homo sapiens
  misc_feature (1)...(901): Xaa = any amino acid or nothing
LGQRLSLVPRPSLKRRLGKRLSLGLRERMMSLWWSGPKVRTQATTGARPKTETKSVPAARPKTEAQAMSGARPKTEVQVMGGARPKTEAQGITGARPKTDARAVGGARSKTDAKAIPGARPKDEAQAWAQSEFGTEAVSQAEGVSQTNAVAWPLATAESGSVTKSKACLWIENXSMWMPETFPGTQGQKGIQPWFGPGEETNMGSWCYSRPRAREEASNESGFWSADETSTASSFWTGEETSVRSWPREESNTRSRHRAKHQTNPRSRPRSKQEAYVDSWSGSEDEASNPFSFWVGENTNNLFRPRVREEANIRSKLRTNREDCFESESEDEFYKQSWVLPGEEANIDSGTETKKILILPWKLRAQKDVDSDRVKQEPRFEEEVIIGSWFWAEKEASLEGGASAICESEPGTEEGAIGGSAYWAEEKSSLGAVAREEAKPESEEEAIFGSWFWDRDEACFDLNPCPVYKVSDRFRDAAEELNASSRPQTWDEVTVEFKPGLFHGVGFRSTSPFGIPEEASEMLEAKPKNLELSPEGEEQESLLQPDQPSPEFTFQYDPSYRSVREIREHLRARESAESESWSCSCIQCELKIGSEEFEEFLLLMDKIRDPFIHEISKIAMGMRSASQFTRDFIRDSGVVSLIETLLNYPSSRVRTSFLENMIHMAPPYPNLNMIETFICQVCEETLAHSVDSLEQLTGNKGCFRHLTMTIDYHTLIANXYGPGFPLLFXPQAQCGETKFHVLKMLLNLSENPAVAKKLFSAKALSIFVGLFNIEETNDNIQIVIKMFQNISNIIKSGKMSLIDDDFSLEPLISAFREFEELAKQLQAQIDNQNDPEATGTTAFVGKGNNPSANRERLSPSVFCPGAQEAESLPARRVRGEEQRLLLEEVGARTADGIPEGW

SEQ ID NO: 3733 - protein, 1090 aa, Homo sapiens
  misc_feature (1)...(1090): Xaa = any amino acid or nothing
DVPLIRIEEDTGEIFTTGARIDREKLCAGIPRDEHCFYEVEVAILPDEIFRLVKIRFLIEDINDNAPLFPATVINISIPENSAINSKYTLPAAVDPDVGINGVQNYELIKSQNIFGLDVIETPGGDKMPQLIVQKELDREEKDTYVMKVKVEDGGFPQRSSTAILQVSVTDTNDNHPVFKETEIEVSIPENAPVGTSVTQLHATDADIGENAKIHFSFSNLVSNIARRLFHLNATTGLITIKEPLDREETPNHKLLVLASDGGLMPARAMVLVNVTDVNDNVPSIDIRYIVNPVNDTVVLSENIPLNTKIALITVTDKDADHNGRVTCFTDHEIPFRLRPVFSNQFLLETAAYLDYESTKEYAIKLLAADAGKPPLNQSAMLFIKVKDENDNAPVFTQSFVTVSIPENNSPGIQLTKVSAMDADSGPNAKINYLLGPDAPPEFSLDCRTGMLTVVKKLDREKEDKYLFTILAKDNGVPPLTSNVTVFVSIIDQNDNSPVFTHNEYNFYVPENLPRHGTVGLITVTDPDYGDNSAVTLSILDENDDFTIDSQTGVIRPNISFDREKQESYTFYVKAEDGGRVSRSSSAKVTINVVDVNDNKPVFIVPPSNCSYELVLPSTNPGTVVFQVIAVDNDTGMNAEVRYSIVGGNTRDLFAIDQETGNITLMEKCDVTDLGLHRVLVKANDLGQPDSLFSVVIVNLFVNESVTNATLINELVPQKHLKHQXPQILEIADVSSPTSDYVKILVAAVAGTITVVVVIFITAVVRCRQAPHLKAAQKNMQNSEWATPNPENRQMIMMKKKKKKKKHSPKNLLLNVVTIEETKADDVDSDGNRVTLDLPIDLEEQTMGKYNWVTTPTTFKPDSPDLARHYKSASPQPAFQIQPETPLNLKHHIIQELPLDNTFVACDSISNCSSSSSDPYSVSDCGYPVTTFEVPVSVHTRPPVDLEVGGAQSGQVAILTSSLMELLLCLMVAAFLPLELRPLGQQNVMSWEQEAKILLVGYWGDGEWCHFHFHHLIPGPVNPGYERKQYHILDSDSEDTQPSGELCPIPVRPFTILSIQLLQDDGEHCGTKQGFQPAVQLGLLPHKTLK

SEQ ID NO: 3734 - protein, 280 aa, Homo sapiens
  misc_feature (1)...(280): Xaa = any amino acid or nothing
GTRPGHLPAPSDGFCVHLXSIPSWGSFXGESLEMQLITSLGLQEFDIARNVLELIYAQTLVWIGIFFCPLLPFIQMIMLFIMFYSKNISLMMNFQPPSKAWRASQMMTFFIFLLFFPSFTGVLCTLAITIWRLKPSADCGPFRGLPLFIHSIYSWIDTLSTRPGYLWVVWIYRNLIGSVHFFFILTLIVLIITYLYWQITEGRKIMIRLLHEQIINEGKDKMFLIEKLIKLQDMEKKANPSSLVLERREVEQQGFLHLGEHDGSLDLRSRRSVQEGNPRA

SEQ ID NO: 3735 - protein, 144 aa, Homo sapiens
VEVCRRYLWKMTVDASQNVQCCVIFSHFPFIFNNLSKIKLLHTDTLLKIESKKHKAYLRSAAIEEERESEFALRPTFDLTVRRNHLIEDVLNQLSQFENEDLRKELWVSFSGEIGYDLGGSVKKEIFYCLFAEMIQPEYGMFMY

SEQ ID NO: 3736 - protein, 399 aa, Homo sapiens
  misc_feature (1)...(399): Xaa = any amino acid or nothing
KGAPSFVRLYQYPNFAGPHAALANKSFFKADKVTMLWNKKATAVLVIASTDVDKTGASYYGEQTLHYIATNGESAVVQLPKNGPIYDVVWNSSSTEFCAVYGFMPAKATIFNLKCDPVFDFGTGPRNAAYYSPHGHILVLAGFGNLILQIXADIMKVWNVKNYKLISKPVASDSTYFAWCPDGEHILTATCAPRLRVNNGYKIWHYTGSILHKYDVPSNAELWQVSWQPFLDGIFPAKTITYQAVPSEVPNEEPKVATAYRPPALRNKPITNSKLHEEEPPQNMKPQSGNDKPLSKTALKNQRKHEAKKAAKQEARSDKSPDLAPTPAPQSTPRNTVSQSISGDPEIDKKIKNLKKKLKAIEQLKEQAATGKQLEKNQLEKIQKETALLQELEDLELGI

SEQ ID NO: 3737 - protein, 842 aa, Homo sapiens
VAMGTPRAQHPPPPQLLFLILLSCPWIQGLPLKEEEILPEPGSETPTVASEALAELLHGALLRRGPEMGYLPGPPLGPEGGEEETTTTIITTTTVTTTVTSPVLCNNNISEGEGYVESPDLGSPVSRTLGLLDCTYSIHVYPGYGIEIQVQTLNLSQEEELLVLAGGGSPGLAPRLLANSSMLGEGQVLRSPTNRLLLHFQSPRVPRGGGFRIHYQAYLLSCGFPPRPAHGDVSVTDLHPGGTATFHCDSGYQLQGEETLICLNGTRPSWNGETPSCMASCGGTIHNATLGRIVSPEPGGAVGPNLTCRWVIEAAEGRRLHLHFERVSLDEDNDRLMVRSGGSPLSPVIYDSDMDDVPERGLISDAQSLYVELLSETPANPLLLSLRFEAFEEDRCFAPFLAHGNVTTTDPEYRPGALATFSCLPGYALEPPGPPNAIECVDPTEPHWNDTEPACKAMCGGELSEPAGVVLSPDWPQSYSPGQDCVWGVHVQEEKRILLQVEILNVREGDMLTLFDGDGPSARVLAQLRGPQPRRRLLSSGPDLTLQFQAPPGPPNPGLGQGFVLHFKEVPRNDTCPELPPPEWGWRTASHGDLIRGTVLTYQCEPGYELLGSDILTCQWDLSWSAAPPACQKIMTCADPGEIANGHRTASDAGFPVGSHVQYRCLPGYSLEGAAMLTCYSRDTGTPKWSDRVPKCALKYEPCLNPGVPENGYQTLYKHHYQAGESLRFFCYEGFELIGEVTITCVPGHPSQWTSQPPLCKVTQTTDPSRQLEGGNLALAILLPLGLVIVLGSGVYIYYTKLQGKSLFGFSGSHSYSPITVESDFSNPLYEAGDTREYEVSI

SEQ ID NO: 3738 - protein, 842 aa, Homo sapiens; identical to SEQ ID NO: 3737

SEQ ID NO: 3739 - protein, 96 aa, Homo sapiens
  misc_feature (1)...(96): Xaa = any amino acid or nothing
LLEPEPAEEYTEQSEVESTEGMILIXCCLYFAAFQTNVSNIYFALQYVNRQFMAETQFTSGEKEQVDEWTVETVEVRVLCIAKLLSLSSVSNFYLY

SEQ ID NO: 3740 - protein, 526 aa, Homo sapiens
  misc_feature (1)...(526): Xaa = any amino acid or nothing
MAHYITFLCMVLVLLLQNSVLAEDGEVRSSCRTAPTDLVFILDGSYSVGPENFEIVKKWLVNITKNFDIGPKFIQVGVVQYSDYPVLEIPLGSYDSGEHLTAAVESILYLGGNTKTGKAIQFALDYLFAKSSRFLTKIAVVLTDGKSQDDVKDAAQAARDSKITLFAIGVGSETEDAELRAIANKPSSTYVFYVEDYIAISKIREVMKQKLCEESVCPTRIPVAARDERGFDILLGLDVNKKVKKRIQLSPKKIKGYEVTSKVDLSELTSNVFPEGLPPSYVFVSTQRFKVKKIWDLWRILTIDGXPQIAVTLNGVDKILLFTTTSVINGSQVVTFANPQVKTLFDEGWHQIRLLVTEQDVTLYIDDQQIENKPLHPVLGILINGQTQIGKYSGKEETVQFDVQKLRIYCDPEQNNRETACEIPGFCLNGPSDVGSTPAPCICPPGKPGLQGPKGDPGLPGNPGYPGQPGQDGKPVSTESLVISGISGITGYQGIAGTPGVPGSPGIQGARGLPGYKGEPGRDGDK

SEQ ID NO: 3741 - protein, 1270 aa, Homo sapiens
  misc_feature (1)...(1270): Xaa = any amino acid or nothing
MSAPAGSSHPAASARIPPKFGGSAVSGAAAPAGPGAGPAPHQQNGPAQNQMQVPSGYGLHHQNYIAPSGHYSQGPGKMTSLPLDTQCGDYYSALYTVPTQNVTPNTVNQQPGAQQLYSRGPPAPHIVGSTLGSFQGAASSASHLHTSASQPYSSFVNHYNSPAMYSASSSVASQGFPSTCGHYAMSTVSNAAYPSVSYPSLPAGDTYGQMFTSQNAPTVRPVKDNSFSGQNTAISHPSPLPPLPSQQHHQQQSLSGYSTLTWSSPGLPSTQDNLIRNHTGSLAVANNNPTITVADSLSCPVMQNVQPPKSSPVVSTVLSGSSGSSSTRTPPTANHPVEPVTSVTQPSELLQQKGVQYGEYVNNQASSAPTPLSSTSDDEEEEEEDEEAGVDSSSTTSSASPMPNSYDALEGGSYPDMLSSSASSPAPDPAPEPDPASAPAPASAPAPVVPQPSKMAKPLAMAIQHFSLVIRMLQHHLFLEYSPSNPVYSGFQQYPQQYPGVNQLSSSIGGLSLQSSPQPESLRPVNLTQERNILPMTPVWAPVPNLNADLKKLNCSPDSFRCTLTNIPQTQALLNKAKLPLGLLLHPFRDLTQLPVITSNTIVRCRSCRTYINPFVSFIDQRRXKCNLCYRVNDVPEEFMYNPLTRSYGEPHKRPEVQNSTVEFIASSDYMLRPPQPAVYLFVLDVSHNAVEAGYLTILWCQSLLENLDKLPGDSRTRIGFMTFDSTYSFLQFTQEGLSQPQMLIVSDIDDVFLPTPDSLLVNLYESKELIKDLLNALPNMFTNTRETHSALGPALQAAFKLMSPTGGRVSVFQTQLPSLGAGLLQSREDPNQRSSTKVVQHLGPATDFYKKLALDCSGQQTAVDLFLLSSQYSDLASLACMSKYSAGCIYYYPSFHYTHNPSQAEKLQKDLKRYLTRKIGFEAVMRIRCTKGLSMHTFHGNFFVRSTDLLSLANINPDAGFAVQLSIEESLTDTSLVCFQTALLYTSSKGERRIRVHTLCLPVVSSLSDVYAGVDVQAAICLLANMAVDRSVSSSLSDARDALVNAVVDSLSAYGSTVSNLQHSALMAPSSLKLFPLYVLALLKQKAFRTGTSTRLDDRVYAMCQIKSQPLVHLMKMIHPNLYRIDRLTDEGAVHVNDRIVPQPPLQKLSAEKLTREGAFLMDCGSVFYIWVGKGCDNNFIEDVLGYTNFASIPQKMTHLPELDTLSSERARSFITWLRDSRPLSPILHIVKDESPAKAEFFQHLIEDRTEAAFSYYEFLLHVQQQICK

SEQ ID NO: 3742 - protein, 286 aa, Homo sapiens
  misc_feature (1)...(286): Xaa = any amino acid or nothing
SMLASQGVLLHPYGVPMIVPAAPYLPGLIQGNQEAAAAPDTMAQPYASAQFAPPQNGIPAEYTAPHPHPAPEYTGQTTVPEHTLNLYPPAQTHSEQSPADTSAQTVSGTRNKQDXRSTDGWPSPKTQTSXKHGKQVSSPSGLHVSNIPFRFRDPDLRQMFGQFGKILDVEIIFNERGSKGFGFVTFENSADADRAREKLHGTVVEGRKIEVNNATARVMTNKKTVNPYTNGWKLNPVVGAVYSPEFYAGTVLLCQANQEGSSMYSAPSTDFRGAKLHTSRPLLSGS

SEQ ID NO: 3743 - protein, 484 aa, Homo sapiens
QFQQAWMQNKVPIPAPNEVLNDRKEDIKLEEKKKTQAEIEQEMATLQYTNPQLLEQLKIERLAQKQVEQIQPPPSSGTPLLGPQPFPGQGPMSQIPQGFPTAPSISADANEHGSKGPPGPQGQFRPPGPQGQMGPQGPPLHQGGGGPQGFMGPQGPQGPPQGLPRPQDMHGPQGMQRHPGPHGPLGPQGPPGPQGSSGPQGHMGPQGPPGPQGHIGPQGPPGPQGHLGPQGPPGTQGMQGPPGPRGMQGPPHPHGIQGGPGSQGIQGPVSQGPLMGLNPKGMQGPPGPRENQGPAPQGMIMGHPPQEMRGPHPPGGLLGHGPQEMRGPQEIRGMQGPPPQGSMLGPPQELRGPPGSQSQQGPPQGSLGPPPQGGMQGPPGPQGQQNPARGPHPSQGPIPFQQQKTPLLGDGPRAPFNQEGQSTGPPPLIPGLGQQGAQGRIPPLNPGQGPGPNKVSERGAPPRHEGRAPPRGRDGFPGPMKTLV

SEQ ID NO: 3744 - protein, 305 aa, Homo sapiens
PLTGRKCPGWTHSGSRRSPRIAEEVPGFPKRAEASRQFSETADRLELLRRAVMAAARATTPADGEEPAPEAEALAAARERSSRFLSGLELVKQGAEARVFRGRFQGRAAVIKHRFPKGYRHPALEARLGRRRTVQEARALLRCRRAGISAPVVFFVDYASNCLYMEEIEGSVTVRDIFSPLWRLKKTPQGLSNLAKTIGQVLARMHDEDLIHGDLTTSNMLLKPPLEQLNIVLIDFGLSFISALPEDKGVDLYVLEKAFLSTHPNTETVFEAFLKSYSTSSKKARPVLKKLDEVRLRGKKRSMVG

SEQ ID NO: 3745 - protein, 435 aa, Homo sapiens
  misc_feature (1)...(435): Xaa = any amino acid or nothing
GSHRFSLASPLDPEVGPYCDTPTMRTLFNLLWLALACSPVHTTLSKSDAKKAASKTLLEKSQFSDKPVQDRGLVVTDLKAESVVLEHRSYCSAKARDRHFAGDVLGYVTPWNSHGYDVTKVFGSKFTQISPVWLQLKRRGREMFEVTGLHDVDQGWMRAVRKHAKGLPXCLGSCLRTGLTMISGYVLDSEDEIEELSKTVVQVAKNQHFDGFVVEVWNQLLSQKRVGLIHMLTHLAEALHQARLLALLVIPPAITPGTDQLGMFTHKEFEQLAPVLDGFSLMTYDYSTAHQPGPNAPLSWVRACVQVLDPKSKWRSKILLGLNFYGMDYATSKDAREPVVGARYIQTLKDHRPRMVWDSQVSEHFFEYKKSRSGRHVVFYPTLKSLQVRLELARELGVGVSIWELGQGLDYFYDLLXVGIAASAVDVFFSKPWSE

SEQ ID NO: 3746 - protein, 299 aa, Homo sapiens
  misc_feature (1)...(299): Xaa = any amino acid or nothing
IDRAAECRTKPLPMAVSIRGNADSIVACLVLMVLYLIKKRLVACAAVFYGFAVHMKIYPETYILPITLHLLPDRDNDKSLRQFRYTFQACLXELLKRLCNRTALMFVAVAGLTFFALSFGFYYEYGWEFLEHTYFYHLTRRDIRHNFSPYFYMLYLTAESKWSFSLGIAAFLPQLILLSAVSFAYYRDLVFCWFLHTSIFVTFNKVCTSQYFLWYLCLLPLVMPLVRMPWKRAVVLLMLWFIGQAMWLAPAYVLEFQGKNTFLFIWLAGLFFLLINCSILIQIISHYKEEPLTERIKYD

SEQ ID NO: 3747 - protein, 774 aa, Homo sapiens
MVISFQGLVTFGDVAVDFSQEEWEWLNPIQRNLYRKVMLENYRNLASLGLCVSKPDVISSLEQGKEPWTVKRKMTRAWCPDLKAVWKIKELPLKKDFCEGKLSQAVITERLTSYNLEYSLLGEHWDYDALFETQPGLVTIKNLAVDFRQQLHPAQKNFCKNGIWENNSDLGSAGHCVAKPDLVSLLEQEKEPWMVKRELTGSLFSGQRSVHETQELFPKQDSYAEGVTDRTSNTKLDCSSFRENWDSDYVFGRKLAVGQETQFRQEPITHNKTLSKERERTYNKSGRWFYLDDSEEKVHNRDSIKNFQKSSVVIKQTGIYAGKKLFKCNECKKTFTQSSSLTVHQRIHTGEKPYKCNECGKAFSDGSSFARHQRCHTGKKPYECIECGKAFIQNTSLIRHWRYYHTGEKPFDCIDCGKAFSDHIGLNQHRRIHTGEKPYKCDVCHKSFRYGSSLTVHQRIHTGEKPYECDVCRKAFSHHASLTQHQRVHSGEKPFKCKECGKAFRQNIHLASHLRIHTGEKPFECAECGKSFSISSQLATHQRIHTGEKPYECKVCSKAFTQKAHLAQHQKTHTGEKPYECKECGKAFSQTTHLIQHQRVHTGEKPYKCMECGKAFGDNSSCTQHQRLHTGQRPYECIECGKAFKTKSSLICHRRSHTGEKPYECSVCGKAFSHRQSLSVHQRIHSGKKPYECKECRKTFIQIGHLNQHKRVHTGERSYNYKKSRKVFRQTAHLAHHQRIHTGESSTCPSLPSTSNPVDLFPKFLWNPSSLPSP

SEQ ID NO: 3748 - protein, 272 aa, Homo sapiens
  misc_feature (1)...(272): Xaa = any amino acid or nothing
GGYTKSGYDSACKDFVPHDLEVQIPGRVFLVTGGNSGIGKATALEIAKRGGTVHLVCRDQAPAEDARGEIIRESGNQNIFLHIVDLSDPKKIWKFVENFKQEHKLHVLVNNAGCMVNKREAHKKMDFEKNFGCQYSGVCTFLTTRPDPLCWRKNTDPRVITVSSGGMLVQKLNNQXSPVRKNTIWMGTMVYAQNKVSERQQVVLTERWGPRAPGIHFSSMHPGWADTPGVRQAMPGFHVQASGYRLRSEAQGADTMLWLALSSARSRTAQRP

SEQ ID NO: 3749 - protein, 405 aa, Homo sapiens
GFLRLSQATRQRLSIPVMVLTLDPTRDQCFGDRFSRLLLDEFLGYDDILMSSVKGLAENEENKGFLRNVVSGEHYRFVSMWMARTSYLAAFANHGQSFTLSVSHACCGYSHHQIFVFIVDLLQMLEMNMAIAFPAAPLLTVILALVGMEAIMSEFFNDTTTAFYIILIVWLADQYDAICCHTSTSKRHWLRFFYLYHFAFYAYHYRFNGQYSSLALVTSWLFIQHSMIYFFHHYELPAILQHVRIQEMLLQAPTLGPGTPTALPDDMNNNSGAPATAPDSAGQPPALGPVSPGASGSPGPVAAAPSSLVAAAASVAAAAGGDLGWMAETAAIITDASFLSGLSASLLERRPASPLGPAGGLPHAPQDSVPPSDSAASDTTPLGAAVGGPSPASMAPTEAPSEVGS

SEQ ID NO: 3750 - protein, 280 aa, Homo sapiens
GLLEPFSKLLSFVIQNAVFTLAYLVELCGLCYRAFTKERDKFYLSRSVVLELLQALKLKSPLPDTNLLLLVQFICADAGTKLAESTILSKQMIASVPGCGTAAMECVRQYINEVLDFMADMHTLTKLKSHMKTCSQPLHEDTFGGHLKVGLAQIAAMDISRGNHRDNKAVIRYLPWLYHPPSAMQQGPKEFIECVSHIRLLSWLLLGSLTHNAVCLKWPPLPGLPIPLDAGSHVADHLIVILIGFPEQSKTSVLHMCSLFHAFSLAQLWDSLLARQSGRW

SEQ ID NO: 3751 - protein, 142 aa, Homo sapiens
  misc_feature (1)...(142): Xaa = any amino acid or nothing
AFTRKCEETAFIVPQCEIIPTEWVCRRIPTGSSLERNPGVKEGCEFCPPKVEMFFKDDANHDPQWSRQQLIAAKFGFAALGIQTEVDIMSHATXAVFEIPEKSRLPQNCTPVDMKIEFGVHVTSKEILTDVIDNDSXRHSPS

SEQ ID NO: 3752 - protein, 382 aa, Homo sapiens
AWSGSGLLVLCINTASMPMISVLGKMFLWQREGPGGRWTCQTSRRVSSDPAWAVEWIELPRGLSLSSLGSARTLRGWSRSSRPSSVDSQDLPEVNVGDTVAMLPKSRRALTIQEIAALARSSLHGISQVVKDHVTKPTAMAQGRVAHLIEWKGWSKPSDSPAALESAFSSYSDLSEGEQEARFAAGVAEQFAIAEAKLRAWSSVDGEDSTDDSYDEDFAGGMDTDMAGQLPLGPHLQDLFTGHRFSRPVRQGSVEPESDCSQTVSPDTLCSSLCSLEDGLLGSPARLAPSCWAMSCFSPNCPPAGKVPSAAWAPLEAQDSLYNSPLTESCLSPAEEEPAPCKDCQPLCPPLTGSWERQRQASDLASSGVVSLDEDEAEPEEQ

SEQ ID NO: 3753 - protein, 378 aa, Homo sapiens
YYSSVRQRVTCEEPRFRECAAALIEGSATEVYAGEWRADRRSGFGVSQRSNGLRYEGEWLGNRRHGYGRTTRPDGSREEGKYKRNRLVHGGRVRSLLPLALRRGKVKEKVDRAVEGARRAVSAARQRQEIAAARAADALLKAVAASSVAEKAVEAARMAKLIAQDLQPMLEAPGRRPRQDSEGSDTEPLDEDSPGVYENGLTPSEGSPELPSSPASSRQPWRPPACRSPLPPGGDQGPFSSPKAWPEEWGGAGAQAEELAGYEAEDEAGMQGPGPRDGSPLLGGCSDSSGSLREEEGEDEEPLPPLRAPAGTEPEPIAMLVLRGSSSRGPDAGCLTEELGEPAATERPAQPGAANPLVVGAVALLDLSLAFLFSQLLT

SEQ ID NO: 3754 - protein, 1111 aa, Homo sapiens
SSLLEKMTSSDKDFRFMATSDLMSELQKDSIQLDEDSERKVVKMLLRLLEDKNGEVQNLAVKWLGVPLGAFHASLLHCLLPQLSSPRLAVRKRAVGALGHLATACSTDLFVELADHLLDRLPGPRVPTSPTAIRTLIQCLGSVGRQAGHRLGAHLDRLVPLVEDFCNLDDDELRESCLQAFEAFLRKCPKEMGPHVPNVTSLCLQYIKHDPNYNYDSDEDEEQMETEDSEFSEQESEDEYSDDDDMSWKVRRAAAKCIAALISSRPDLLPDFHCTLAPVLIRRFKEREENVKADVFTAYIVLLRQTRPPKGWLEAMEEPTQTGSNLHMLRGQVPLVVKALQRQLKDRSVRARQGCFSLLTELAGVLPGSLAEHMPVLVSGIIFSLADRSSSSTIRMDALAFLQGLLGTEPAEAFHPHLPILLPPVMACVADSFYKIAAEALVVLQELVRALWPLHRPRMLDPEPYVGEMSAVTLARLRATDLDQEVKERAISCMGHLVGHLGDRLGDDLEPTLLLLLDRLRNEITRLPAIKALTLVAVSPLQLDLQPILAEALHILASFLRKNQRALRLATLAALDALAQSQGLSLPPSAVQAVLAELPALVNESDMHVAQLAVDFLATVTQAQPASLVEVSGPVLSELLRLLRSPLLPAGVLAAAEGFLQALVGTRPPCVDYAKLISLLTAPVYEQAVDGGPGLHKQVFHSLARCVAALSAACPQEAESTASRLVCDARSPHSSTGVKVLAFLSLAEVGQVAGPGHERELKAVLLEALGSPSEDVRAAASYALGRVGAGSLPDFLPFLLEQIEAEPRRQYLLLHSLKEALGAAQPDSLKPYAEDIWALLFQRCEGAEEGTRGVVAECIGKLVLVNPSFLLPRLRKQLAAGRPHTRSTVITAVKFLISDQPHPIDPLLKSFIAVHNKPSLVRDLLDDILPLLYQETKIRRDLIREVEMGPFKHTVDDGLDVRKAAFECMYSLLESCLGQLDICEFLNHVEDGLKDHYDIRMLTFIMVARLATLCPAPVLQRVDRLIEPLRATCTAKVKAGSVKQEFEKQDELKRSAMRAVAALLTIPEVGKSPIMADFSSQIRSNPELAALFESIQKDSTSAPSTDSMELS

SEQ ID NO: 3755 - protein, 1111 aa, Homo sapiens; identical to SEQ ID NO: 3754

SEQ ID NO: 3756 - protein, 416 aa, Homo sapiens
SLEEQQGRHPSFAPKCASQILGRIMITLITEQLQKQTLDELKCTRFSISLPLPDHADISNCGNSFQLVSEGASWRGLPHCSCAEFQDQPQLQLPSLRPEPAPQTTHRGNSPKEQPFSQVLRPEPPDPEKLPVPPAPPSKRHCRSLSVPVDLSRWQPVWRPAPSKLWTPIKHRGSGGGGGPQVPHQSPPKRVSSLSVPPSSQCLFSMCPSSHTLQPSFLQPGPGPDSSRPCAASPQSGSWESDAESLSPCPPQRRFSLSPSLGPQASRFLPSARSSPASSPELPWRPRGLRNLPRSRSQPCDLDARKTGVKRRHEEDPRRLRPSLDFDKMNQKPYSGGLCLQETAREGSSISPPWFMACSPPPLSASCSPTGGSSQVLSESEEEEEGAVRWGRQALSKRTLCQRDFGDLDLNLIEEN

SEQ ID NO: 3757 - protein, 138 aa, Homo sapiens
  misc_feature (1)...(138): Xaa = any amino acid or nothing
PKPMLQQDFTSLPDQGLDHIAENSYFDARSLCAAELVCKEWQQVTSEXMLWKKLIERMVHAYPLWKGLSEKVWDQHLFKNRPTDGPPNSFHRSLYPKIIQVIETIESNWQCGXHTLQRIQCHSEKSKGVYCLQYDDEK

SEQ ID NO: 3758 - protein, 204 aa, Homo sapiens
FVSGSPWRMDGSTERLEARRPAGRLPWSSRQEMTRRPSLMAGRQHGWSAQQSATVANPVPGANPDLLPHFLGEPEDVYIVKNKPVLLVCKAVPATQIFFKCNGEWVRQVDHVIERSTDGSSGLPTMEVRINVSRQQVEKVFGLEEYWCQCVAWSSSGTTKSQKAYIRIAYLRKNFEQEPLAKEVSLEQGIVLPCRPPEGIPPAE

SEQ ID NO: 3759 - protein, 187 aa, Homo sapiens
  misc_feature (1)...(187): Xaa = any amino acid or nothing
ADDTLHLWNLRQKRPAILHSLKFCRERVTFCHLPFQSKWLYVGTERGNIHIVNVESFTLSGYVIMWNKAIELSSKSHPGPVVHISDNPMDEGKLLIGFESGTVVLWDLKSKKADYRYTYDEAIHSVAWHHEGKQFICSHSDGTLTIWNVRSPAKPVQTITPHGKQLKDGKKPEPCKPILKVEFXTTR

SEQ ID NO: 3760 - protein, 274 aa, Homo sapiens
  misc_feature (1)...(274): Xaa = any amino acid or nothing
LPACRCGCVAGCPSNHGICRCLRASERQVCVMHLKHLRTLLSPQDGAAKVTCMAWSQNNAKFAVCTVDRVVLLYDEHGERRDKFSTKPADMKYGRKSYMVKGMAFSPDSTKIAIGQTDNIIYVYKIGEDWGDKKVICNKFIQTVKFRPVPGTLGXTNIYQYIYLXIQPGVAFLTSECDFSYCKDGASWLFMVICCLPXSPAVSFPIGDXSAVTCLQWPAEYIIVFGLAEGKVRLSNTKTNKSSTIYGTESYVVSLTTNCSGKGILSGHADGYQR

SEQ ID NO: 3761 - protein, 641 aa, Homo sapiens
  misc_feature (1)...(641): Xaa = any amino acid or nothing
PVIQRCSQPYGFSLLISFFLKCVSETSQQPPSRKVFQLLPSFPTLTRSKSHESQLGNRIDDVSSMRFDLSHGSPQMVRRDIGLSVTHRFSTKSWLSQVCHVCQKSMIFGVKCKHCRLKCHNKCTKEAPACRISFLPLTRLRRTESVPSDINNPVDRAAEPHFGTLPKALTKKEHPPAMNHLDSSSNPSSTTFSTPSSPAPFPTSSNPSSATTPPNPSPGQRDSRFNFPSCAYFIHHRQQFIFPDISAFAHAAPLPEAADGTRLDDQPKADVLEAHEAEAEEPEAGKSEAEDDEDEVDDLPSSRRPWRGPISRKASQTSVYLQEWDIPFEQVELGEPIGQGRWGRVHRGRWHGEVAIRLLEMDGHNQDHLKLFKKEVMNYRQTRHENVVLFMGACMNPPHLAIITSFCKGRTLHSFVRDPKTSLDINKTRQIAQEIIKGMGYLHAKGIVHKDLKSRNVFYDNGKVVITDFGLFGISGVVPEGRRENQLKLSHDWLCYLAPEIVREMTPGKDEDQLPFSKAADVYAFGTVWYELQARDWPLKNQAAEASIWQIGSGEGMKRVLTSVSLGKEVSENLSACWAFDLQERPSFSLLMDMLEKLPKLNRRLSHPGHFXKSADINSSKVVPRFERFGLGVLESSNPKM

SEQ ID NO: 3762 - protein, 526 aa, Homo sapiens; identical to SEQ ID NO: 3740
  misc_feature (1)...(526): Xaa = any amino acid or nothing

SEQ ID NO: 3763 - protein, 420 aa, Homo sapiens
  misc_feature (1)...(420): Xaa = any amino acid or nothing
CKVWRNPLNLFRGAEYNRYTWVTGREPLTYYDMNLSAQDHQTFFTCDSDHLRPADAIMQKAWRERNPQARISAAHEALEINECATAYILLAEEEATTIAEAEKLFKQALKAGDGCYRRSQQLQHHGSQYEAQHSVLYLPLQTRHQCLGVHQKKASNVCQKTREDQGSSENDERFNEGVPPSEYVQYPXKPFKALLELQAYADVQAVLAKYDDISLPKSATICYTAALLKARAVSDKFSPEAASRRGLSTAEMNAVEAIHRAVEFNPHVPKYLLEMKSLILPPEHILKRGDSEAIAYAFFHLAHWKRVEGALNLLHCTWEGTFRMIPYPLEKGHLFYPYPICTETADRELLPSFHEVSVYPKKELPFFILFTAGLCSFTAMLALLTHQFPELMGVFAKAVSVCLEGGLGEWMGKAKGIKAA

SEQ ID NO: 3764 - protein, 335 aa, Homo sapiens
RSADGLCGNKDRERGNEFTRNQQAAQEVVNPKKKMKKKKYVNSGTVTLLSFAVESECTFLDYIKGGTQINFTVAIDFTASNGNPSQSTSLHYMSPYQLNAYALALTAVGEIIQHYDSDKMFPALGFGAKLPPDGRVSHEFPLNGNQENPSCCGIDGILEAYHRSLRTVQLYGPTNFAPVVTHVARNAAAVQDGSQYSVLLIITDGVISDMAQTKEAIVNGSKLPMSIIIVGVGQAEFNAMVELDGDDVRISSRGKLAERDIVQFVPFRDYVDRTGNHVLSMARLARDVLAEIPDQLVSYMKAQGIRPRSPPAAPTHSPSQSPARTPPACPLHTHI

SEQ ID NO: 3765 - protein, 1094 aa, Homo sapiens
LGMMDSPKIGNGLPVIGPGTDIGISSLHMVGYLGKNFDSAKVPSDEYCPACKEKGKLKALKTYRISFQESIFLCEDLQCIYPLGSKSLNNLISPDLEECHTPHKPQKRKSLESSYKDSLLLANSKKTRNYIAIDGGKVLNSKHNGEVYDETSSNLPDSSGQQNPIRTADSLERNEILEADTVDMATTKDPATVDVSGTGRPSPQNEGCTSKLEMPLESKCTSFPQALCVQWKNAYALCWLDCILSALVHSEELKNTVTGLCSKEESIFWRLLTKYNQANTLLYTSQLSGVKDGDCKKLTSEIFAEIETCLNEVRDEIFISLQPQLRCTLGDMESPVFAFPLLLKLETHIEKLFLYSFSWDFECSQCGHQYQNRHMKSLVTFTNVIPEWHPLNAAHFGPCNNCNSKSQIRKMVLEKVSPIFMLHFVEGLPQNDLQHYAFHFEGCLYQITSVIQYRANNHFITWILDADGSWLECDDLKGPCSERHKKFEVPASEIHIVIWERKISQVTDKEAACLPLKKTNDQHALSNEKPVSLTSCSVGDAASAETASVTHPKDISVAPRTLSQDTAVTHGDHLLSGPKGLVDNILPLTLEETIQKTASVSQLNSEAFLLENKPVAENTGILKTNTLLSQESLMASSVSAPCNEKLIQDQFVDISFPSQVVNTNMQSVQLNTEDTVNTKSVNNTDATGLIQGVKSVEIEKDAQLKQFLTPKTEQLKPERVTSQVSNLKKKETTADSQTTTSKSLQNQSLKENQKKPFVGSWVKGLISRGASFMPLCVSAHNRNTITDLQPSVKGVNNFGGFKTKGINQKASHVSKKARKSASKPPPISKPPAGPPSSNGTAAHPHAHAASEVLEKSGSTSCGAQLNHSSYGNGISSANHEDLVEGQIHKLRLKLRKKLKAEKKKLAALMSSPQSRTVRSENLEQVPQDGSPNDCESIEDLLNELPYPIDIANESACTTVPGVSLYSSQTHEEILAELLSPTPVSTELSENGEGDFRYLGMGDSHIPPPVPSEFNDVSQNTHLRQDHNYCSPTKKNPCEVQPDSLTNNACVRTLNLESPMKTDIFDEFFSSSALNALANDTLDLPHFDEYLFENY

SEQ ID NO: 3766 - protein, 540 aa, Homo sapiens
AQQIVYRNVMLENYKNLVSLGYQLTKPDVILRLEKGEEPWLVEREIHQETHPDSETAFEIKSSVSSRSIFKDKQSCDIKMEGMARNDLWYLSLEEVWKCRDQLDKYQENPERHLRQVAFTQKKVLTQERVSESGKYGGNCLLPAQLVLREYFHKRDSHTKSLKHDLVLNGHQDSCASNSNECGQTFCQNIHLIQFARTHTGDKSYKCPDNDNSLTHGSSLGISKGIHREKPYECKECGKFFSWRSNLTRHQLIHTGEKPYECKECGKSFSRSSHLIGHQKTHTGEEPYECKECGKSFSWFSHLVTHQRTHTGDKLYTCNQCGKSFVHSSRLIRHQRTHTGEKPYECPECGKSFRQSTHLILHQRTHVRVRPYECNECGKSYSQRSHLVVHHRIHTGLKPFECKDCGKCFSRSSHLYSHQRTHTGEKPYECHDCGKSFSQSSALIVHQRIHTGEKPYECCQCGKAFIRKNDLIKHQRIHVGEETYKCNQCGIIFSQNSPFIVHQIAHTGEQFLTCNQCGTALVNTSNLIGYQTNHIRENAY

SEQ ID NO: 3767 - protein, 540 aa, Homo sapiens; identical to SEQ ID NO: 3766

SEQ ID NO: 3768 - protein, 690 aa, Homo sapiens
SIIIKMSRKISKESKKVNISSSLESEDISLETTVPTDDISSSEEREGKVRITRQLIERKELLHNIQLLKIELSQKTMMIDNLKVDYLTKIEELEEKLNDALHQKQLLTLRLDNQLAFQQKDASKYQELMKQEMETILLRQKQLEETNLQLREKAGDVRRSLRDFELTEEQYIKLKAFPEDQLSIPEYVSVRFYELVNPLRKEICELQVKKNILAEELSTNKNQLKQLTETYEEDRKNYSEVQIRCQRLALELADTKQLIQQGDYRQENYDKVKSERDALEQEVIELRRKHEILEASHMIQTKERSELSKEVVTLEQTVTLLQKDKEYLNRQNMELSVRCAHEEDRLERLQAQLEESKKAREEMYEKYVASRDHYKTEYENKLHDELEQIRLKTNQEIDQLRNASREMYERENRNLREARDNAVAEKERAVMAEKDALEKHDQLLDRYRELQLSTESKVTEFLHQSKLKSFESERVQLLQEETARNLTQCQLECEKYQKKLEVLTKEFYSLQASSEKRITELQAQNSEHQARLDIYEKLEKELDEIIMQTAEIENEDEAERVLFSYGYGANVPTTAKRRLKQSVHLARRVLQLEKQNSLILKRSGTSKGPSNTAFTRSLTEANSLLNQTQQPYRYLIESVRQRDSKIDSLTESIAQLERKDVSNLNKEKSALLQTNGIKMALDLDQLLNHP

SEQ ID NO: 3769 - protein, 764 aa, Homo sapiens
DAAEFRVVADAMKVIGFKPEEIQTVYKILAAILHLGNLKFVVDGDTPLIENGKVVSIIAELLSTKTDMVEKALLYRTVATGRDIIDKQHTEQEASYGRDAFAKAIYERLFCWIVTRINDIIEVKNYDTTIHGKNTVIGVLDIYGFEIFDNNSFEQFCINYCNEKLQQLFIQLVLKQEQEEYQREGIPWKHIDYFNNQIIVDLVEQQHKGIIAILDDACMNVGKVTDEMFLEALNSKLGKHAHFSSRKLCASDKILEFDRDFRIRHYAGDVVYSVIGFIDKNKDTLFQDFKRLMYNSSNPVLKNMWPEGKLSITEVTKRPLTAATLFKNSMIALVDNLASKEPYYVRCIKPNDKKSPQIFDDERCRHQVEYLGLLENVRVRRAGFAFRQTYEKFLHRYKMISEFTWPNHDLPSDKEAVKKLIERCGFQDDVAYGKTKIFIRTPRTLFTLEELRAQMLIRIVLFLQKVWRGTLARMRYKRTKAALTIIRYYRRYKVKSYIHEVARRFHGVKTMRDYGKHVKWPSPPKVLRRFEEALQTIFNRWRASQLIKSIPASDLPQVRAKVAAVEMLKGQRADLGLQRAWEGNYLASKPDTPQTSGTFVPVANELKRKDKYMNVLFSCHVRKVNRFSKVEDRAIFVTDRHLYKMDPTKQYKVMKTIPLYNLTGLSVSNGKDQLVVFHTKDNKDLIVCLFSKQPTHESRIGELVGVLVNHFKSEKRHLQVNVTNPVQCSLHGKKCTVSVETRLNQPQPDFTKNRSGFILSVPGN

SEQ ID NO: 3770 - protein, 2088 aa, Homo sapiens
HKVAAPDVVVPTLDTVRHEALLYTWLAEHKPLVLCGPPGSGKTMTLFSALRALPDMEVVGLNFSSATTPELLLKTFDHYCEYRRTPNGVVLAPVQLGKWLVLFCDEINLPDMDKYGTQRVISFIRQMVEHGGFYRTSDQTWVKLERIQFVGACNPPTDPGRKPLSHRFLRHVPVVYVDYPGPASLTQIYGTFNRAMLRLIPSLRTYAEPLTAAMVEFYTMSQERFTQDTQPHYIYSPREMTRWVRGIFEALRPLETLPVEGLIRIWAHEALRLFQDRLVEDEERRWTDENIDTVALKHFPNIDREKAMSRPILYSNWLSKDYIPVDQEELRDYVKARLKVFYEEELDVPLVLFNEVLDHVLRIDRIFRQPQGHLLLIGVSGAGKTTLSRFVAWMNGLSVYQIKVHRKYTGEDFDEDLRTVLRRSGCKNEKIAFIMDESNVLDSGFLERMNTLLANGEVPGLFEGDEYATLMTQCKEGAQKEGLMLDSHEELYKWFTSQVIRNLHVVFTMNPSSEGLKDRAATSPALFNRCVLNWFGDWSTEALYQVGKEFTSKMDLEKPNYIVPDYMPVVYDKLPQPPSHREAIVNSCVFVHQTLHQANARLAKRGGRTMAITPRHYLDFINHYANLFHEKRSELEEQQMHLNVGLRKIKETVDQVEELRRDLRIKSQELEVKNAAANDKLKKMVKDQQEAEKKKVMSQEIQEQLHKQQEVIADKQMSVKEDLDKVEPAVIEAQNAVKSIKKQHLVEVRSMANPPAAVKLALESICLLLGESTTDWKQIRSIIMRENFIPTIVNFSAEEISDAIREKMKKNYMSNPSYNYEIVNRASLACGPMVKWAIAQLNYADMLKRVEPLRNELQKLEDDAKDNQQKANEVEQMIRDLEASIARYKEEYAVLISEAQAIKADLAAVEAKVNRSTALLKSLSAERERWEKTSETFKNQMSTIAGDCLLSAAFIAYAGYFDQQMRQNLFTTWSHHLQQANIQFRTDIARTEYLSNADERLRWQASSLPADDLCTENAIMLKRFNRYPLIIDPSGQATEFIMNEYKDRKITRTSFLDDAFRKNLESALRFGNPLLVQDVESYDPVLNPVLNREVRRTGGRVLITLGDQDIDLSPSFVIFLSTRDPTVEFPPDLCSRVTFVNFTVTRSSLQSQCLNEVLKAERPDVDEKRSDLLKLQGEFQLRLRQLEKSLLQALNEVKGRILDDDTIITTLENLKREAAEVTRKVEETDIVMQEVETVSQQYLPLSTACSSIYFTMESLKQIHFLYQYSLQFFLDIYHNVLYENPNLKGVTDHTQRLSIITKDLFQVAFNRVARGMLHQDHITFAMLLARIKLKGTVGEPTYDAEFQHFLRGNEIVLSAGSTPRIQGLTVEQAEAVVRLSCLPAFKDLIAKVQADEQFGIWLDSSSPEQTVPYLWSEETPATPIGQAIHRLLLIQAFRPDRLLAMAHMFVSTNLGESFMSIMEQPLDLTQIVGTEVKPNTPVLMCSVPGYDASGHVEDLAAEQNTQITSIAIGSAEGFNQADKAINTAVKSGRWVMLKNVHLAPGWLMQLEKKLHSLQPHACFRLFLTMEINPKVPVNLLRAGRIFVFEPPPGVKANMLRTFSSIPVSRICKSPNERARLYFLLAWFHAIIQERLRYAPLGWSKKYEFGESDLRSACDTVDTWLDDTAKGRQNISPDKIPWSALKTLMAQSIYGGRVDNEFDQRLLNTFLERLFTTRSFDSEFKLACKVDGHKDIQMPDGIRREEFVQWVELLPDTQTPSWLGLPNNAERVLLTTQGVDMISKMLKMQMLEDEDDLAYAETEKKTRTDSTSDGRPAWMRTLHTTASNWLHLIPQTLSHLKRTVENIKDPLFRFFEREVKMGAKLLQDVRQDLADVVQVCEGKKKQTNYLRTLINELVKGILPRSWSHYTVPAGMTVIQWGVPISARRIKQLQNISLAAASGGAKELKNIHVCLGGLFVPEAYITATRQYVAQANSWSLEELCLEVNVTTSQGATLDACSFGVTGLKLQGATCNNNKLSLSNAISTALPLTQLRWVKQTNTEKKASVVTLPVYLNFTRADLIFTVDFEIATKEDPRSFYERGVAVLCTE

SEQ ID NO: 3771 - protein, 679 aa, Homo sapiens
LPLLHAGFNRRFMENSSIIACYNELIQIEHGEVRSQFKLRACNSVFTALDHCHEAIEITSDDHVIQYVNPAFERMMGYHKGELLGKELADLPKSDKNRADLLDTINTCIKKGKEWQGVYYARRKSGDSIQQHVKITPVIGQGGKIRHFVSLKKLCCTTDNNKQIHKIHRDSGDNSQTEPHSFRYKNRRKESIDVKSISSRGSDAPSLQNRRYPSMARIHSMTIEAPITKVINIINAAQENSPVTVAEALDRVLEILRTTELYSPQLGTKDEDPHTSDLVGGLMTDGLRRLSGNEYVFTKNVHQSHSHLAMPITINDVPPCISQLLDNEESWDFNIFELEAITHKRPLVYLGLKVFSRFGVCEFLNCSETTLRAWFQVIEANYHSSNAYHNSTHAADVLHATAFFLGKERVKGSLDQLDEVAALIAATVHDVDHPGRTNSFLCNAGSELAVLYNDTAVLESHHTALAFQLTVKDTKCNIFKNIDRGNHYRTLRQAIIDMVLATEMTKHFEHVNKFVNSINKPMAAEIEGSDCECNPAGKNFPENQILIKRMMIKCADVANPCRPLDLCIEWAGRISEEYFAQTDEEKRQGLPVVMPVFDRNTCSIPKSQISFIDYFITDMFDAWDAFAHLPALMQHLADNYKHWKTLDDLKCKSLRLPSDRLKPSHRGGLLTDKGHCESQ

SEQ ID NO: 3772 - protein, 320 aa, Homo sapiens
TLVHADGFPSLHITETCLAYREKRIGIDLVHDTVEHELIKEAEIIQGIMALLTRTLEEASEQIRMNRSAKYNLEKDLKDKFVALTIDDICFSLNNNSPNIRYSENAVRIEPNSVSLEDWLDFSSTNVEKADKQRNNSLMLKALVDRILSQTANYLRKQCDVVHTAFKNGLKDTKDARDQLADHLAKVMEEIASQEKNITALEKAILDQEGPAKVAHTRLETRTHRPNVELCRDVAQYRLMKEVQEITHNVARLKETLAQAQAELKGLHRRQLALQEEIQVKENTIYIDEVLCMQMRKSIPLRDGEDHGVWAGGLRPDAVC

SEQ ID NO: 3773 - protein, 317 aa, Homo sapiens
AAARESERQLRLRLCVLNEILGTERDYVGTLRFLQSAFLHRIRQNVADSVEKGLTEENVKVLFSNIEDILEVHKDFLAALEYCLHPEPQSQHELGNVFLKFKDKFCVYEEYCSNHEKALRLLVELNKIPTVRAFLLSCMLLGGRKTTDIPLEGYLLSPIQRICKYPLLLKELAKRTPGKHPDHPAVQSALQAMKTVCSNINETKRQMEKLEALEAAAQSHIEGWEGSNLTDICTQLLLQGTLLKISAGNIQERAFFLFDNLLVYCKRKSRVTGSKKSTKRTKSINGSLYIFRGRINTEVMEVENVEDGTGSPSPSLA

SEQ ID NO: 3774 - protein, 731 aa, Homo sapiens
ELQGDFSVPDVPKSMAWCENSICVGFKRDYYLIRVDGKGSIKELFPTGKQLEPLVAPLADGKVAVGQDDLTVVLNEEGICTQKCALNWTDIPVAMEHQPPYIIAVLPRYVEIRTFEPRLLVQSIELQRPRFITSGGSNIIYVASNHFVWRLIPVPMATQIQQLLQDKQFELALQLAEMKDDSDSEKQQQIHHIKNLYAFNLFCQKRFDESMQVFAKLGTDPTHVMGLYPDLLPTDYRKQLQYPNPLPVLSGAELEKAHLALIDYLTQKRSQLVKKLNDSDHQSSTSPLMEGTPTIKSKKKLLQIIDTTLLKCYLHTNVALVAPLLRLENNHCHIEESEHVLKKAHKYSELIILYEKKGLHEKALQVLVDQSKKANSPLKGHERTVQYLQHLGTENLHLIFSYSVWVLRDFPEDGLKIFTEDLPEVESLPRDRVLGFLIENFKGLAIPYLEHIIHVWEETGSRFHNCLIQLYCEKVQGLMKEYLLSFPAGKTPVPAGEEEGELGEYRQKLLMFLEISSYYDPGRLICDFPFDGLLEERALLLGRMGKHEQALFIYVHILKDTRMAEEYCHKHYDRNKDGNKDVYLSLLRMYLSPPSIHCLGPIKLELLEPKANLQAALQVLELHHSKLDTTKALNLLPANTQINDIRIFLEKVLEENAQKKRFNQVLKNLLHAEFLRVQEERILHQQVKCIITEEKVCMVCKKKIGNSAFARYPNGVVVHYFCSKEVNPADT

SEQ ID NO: 3775 - protein, 331 aa, Homo sapiens [sequence omitted]

SEQ ID NO: 3776 - protein, 264 aa, Homo sapiens
PRAKLGTRARNMAGQDAGCGRGGDDYSEDEGDSSVSRAAVEVFGKLKDLNCPFLEGLYITEPKTIQELLCSPSEYRLEILEWMCTRVWPSLQDRFSSLKGVPTEVKIQEMTKLGHELMLCAPDDQELLKGCACAQKQLHFMDQLLDTIRSLTIGCSSCSSLMEHFEDTREKNEALLGELFSSPHLQMLLNPECDPWPLDMQPLLNKQSDDWQWASASAKSEEEEKLAELARQLQESAAKLHALRTEYFAQHEQGAAAGAATSAP

SEQ ID NO: 3777 - protein, 137 aa, Homo sapiens
SEEDVIEGKTAVIEKRRKKRSSAGVVEDIGGEVQNMLEGVGVDINKALLAKRKRLEMYTKASLRTSNQKIEHVWKTQQDQRQKLNQEYSQQFLTLFQQWDLDMQKAEEQEEKILVGIMIRFIINQVSSRNGQPSLLL

SEQ ID NO: 3778 - protein, 218 aa, Homo sapiens
SRLPPPPPHLADGRAGARVPRSARLSRWWVQDWTHGPIVRPPAAARTMWVNPEEVLLANALWITERANPYFILQRRKGHAGDGGGGGGLAGLLVGTLDVVLDSSARVAPYRILYQTPDSLVYWTIACGGSRKEITEHWEWLEQNLLQTLSIFENENDITTFVRGKIQGIIAEYNKINDVKEDDDTEKFKEAIVKFHRLFGMPEEEKLVNYYSCSYWKG

SEQ ID NO: 3779 - protein, 309 aa, Homo sapiens
CKSCTLFPQNPNLPPPSTRERPPGCKTVFVGGLPENATEEIIQEVFEQCGDITAIRKSKKNFCHIRFAEEFMVDKAIYLSGYRMRLGSSTDKKDSGRLHVDFAQARDDFYEWECKQRMRAREERHRRKLEEDRLRPPSPPAIMHYSEHEAALLAEKLKDDSKFSEAMQVLLSWIERGEVNRRSANQFYSMVQSANSHVRRLMNEKATHEQEMEEAKENFKNALTGILTQFEQIVAVFNASTRQKAWDHFSKAQRKNIDIWAKHSEELRNAQSEQLMGIRREEEMEMSDDENCDSPTKKMRVDESALGAP

SEQ ID NO: 3780 - protein, 845 aa, Homo sapiens
AAQAEREELAAGRMPGGGPQGAPAAAGGGGVSHRAGSRDCLPPAACFRRRRLARRPGYMRSSTGPGIGFLSPAVGTLFRFPGGVSGEESHHSESRARQCGLDSRGLLVRSPVSKSAAAPTVTSVRGTSAHFGIQLRGGTRLPDRLSWPCGPGSAGWQQEFAAMDSSETLDASWEAACSDGARRVRAAGSLPSAELSSNSCSPGCGPEVPPTPPGSHSAFTSSFSFIRLSLGSAGERGEAEGCPPSREAESHCQSPQEMGAKAASLDGPHEDPRCLSQPFSLLATRVSADLAQAARNSSRPERDMHSLPDMDPGSSSSLDPSLAGCGGDGSSGSGDAHSWDTLLRKWEPVLRDCLLRNRRQMEVISLRLKLQKLQEDAVENDDYDKAETLQQRLEDLEQEKISLHFQLPSRQPALSSFLGHLAAQVQAALRRGATQQASGDDTHTPLRMEPRLLEPTAQDSLHVSITRRDWLLQEKQQLQKEIEALQARMFVLEAKDQQLRREIEEQEQQLQWQGCDLTPLVGQLSLGQLQEVSKALQDTLASAGQIPFHAEPPETIRSLQERIKSLNLSLKEITTKVCMSEKFCSTLRKKVNDIETQLPALLEAKMHAISGNHFWTAKDLTEEIRSLTSDREGLEGLLSKLLVLSSRNVKKLGSVKEDYNRLRREVEHQETAYETSVKENTMKYMETLKNKLCSCKCPLLGKVWEADLEACRLLIQCLQLQEARGSLSVEDERQMDDLEGAAPPIPPRLHSEDKRKTPLKESYILSAELGEKCEDIGKKLLYLEDQLHTAIHSHDEDLIQSLRRELQMVKETLQAMILQLQPAKEAGEREAAASCMTAGVHEAQA

SEQ ID NO: 3781 - protein, 330 aa, Homo sapiens
GRRRAGPAHSARMYNMMETELKPPGPQQTSGGGGGNSTAAAAGGNQKNSPDRVKRPMNAFMVWSRGQRRKMAQENPKMHNSEISKRLGAEWKLLSETEKRPFIDEAKRLRALHMKEHPDYKYRPRRKTKTLMKKDKYTLPGGLLAPGGNSMASGVGVGAGLGAGVNQRMDSYAHMNGWSNGSYSMMQDQLGYPQHPGLNAHGAAQMQPMHRYDVSALQYNSMTSSQTYMNGSRPTYSMSYSQQGTPGMAPGSMGSVVKSEASSSPPVVTSSSHSRAPCQAGDLRDMISMYLPGAEVPEPAAPSRLHMSQHYQSGPVPGTAINGTLPLSHM

SEQ ID NO: 3782 - protein, 883 aa, Homo sapiens
FRVPDSCPVVLHSFTQLDPDLPRPESSTQEIGEELINGVIYSISLRKVQLHHGGNKGQRWLGYENESALNLYETCKVRTVKAGTLEKLVEHLVPAFQGSDLSYVTIFLCTYRAFTTTQQVLDLLFKRYGRCDALTASSRYGCILPYSDEDGGPQDQLKNAISSILGTWLDQYSEDFCQPPDFPCLKQLVAYVQLNMPGSDLERRAHLLLAQLEHSEPIEAEPEGEEDWALSPVPALKPTPELELALTPARAPSPVPAPAPEPEPAPTPAPGSELEVAPAPAPELQQAPEPAVGLESAPAPALELEPAPEQDPAPSQTLELEPAPAPVPSLQPSWPSPVVAENGLSEEKPHLLVFPPDLVAEQFTLMDAELFKKVVPYHCLGSIWSQRDKKGKEHLAPTIRATVTQFNSVANCVITTCLGNRSTKAPDRARVVEHWIEVARECRILKNFSSLYAILSALQSNSIHRLKKTWEDVSRDSFRIFQKLSEIFSDENNYSLSRELLIKEGTSKFATLEMNPKRAQKRPKETGIIQGTVPYLGTFLTDLVMLDTAMKDYLYGRLINFEKRRKEFEVIAQIKLLQSACNNYSIAPDEQFGAWFRAVERLSETESYNLSCELEPPSESASNTLRTKKNTAIVKRWSDRQAPSTELSTSGSSHSKSCDQLRCGPYLSSGDIADALSVHSAGSSSSDVEEINISFVPESPDGQEKKFWESASQSSPETSGISSASSSTSSSSASTTPVAATRTHKRSVSGLCNSSSALPLYNQQVGDCCIIRVSLDVDNGNMYKSILVTSQDKAPAVIRKAMDKHNLEEEEPEDYELLQILSDDRKLKIPENANVFYAMNSTANYDFVLKKRTFTKGVKVKHGASSTLPRMKQKGLKIAKGIF

SEQ ID NO: 3783 - protein, 288 aa, Homo sapiens
RSGQGKVYGLIGRRRFQQMDVLEGLNLLITISGKRNKLRVYYLSWLRNKILHNDPEVEKKQGWTTVGDMEGCGHYRVVKYERIKFLVIALKSSVEVYAWAPKPYHKFMAFKSFADLPHRPLLVDLTVEEGQRLKVIYGSSAGFHAVDVDSGNSYDIYIPVHIQSQITPHAIIFLPNTDGMEMLLCYEDEGVYVNTYGRIIKDVVLQWGEMPTSVAYICSNQIMGWGEKAIEIRSVETGHLDGVFMHKRAQRLKFLCERNDKVFFASVRSGGSSQVYFMTLNRNCIMNW

SEQ ID NO: 3784 - protein, 250 aa, Homo sapiens
LSPRQVDGLAGLQKGLSLSLLYQFLMNGIRLGTYGLAEAGGYLHTAEGTHSPARSAAAGAMAGVMGAYLGSPIYMVKTHLQAQAASEIAVGHQYKHQGMFQALTEIGQKHGLVGLWRGALGGLPRVIVGSSTQLCTFSSTKDLLSQWEIFPPQSWKLALVAAMMSGIAVVLAMAPFDVACTRLYNQPHRCTGQGPLYRGILDALLQTARTEGIFGMYKGIGASYFRLGPHTILSLFFWDQLRSLYYTDTK

SEQ ID NO: 3785 - protein, 206 aa, Homo sapiens
RRRGRHSLCGGKMLAYCVQDATVVDVEKRRNPSKHYVYIINVTWSDSTSQTIYRRYSKFFDLQMQLLDKFPIESGQKDPKQRIIPFLPGKILFRRSHIRDVAVKRLKPIDEYCRALVRLPPHISQCDEVFRFFEARPEDVNPPKEQGPSPPDAVLPYGVNKGKQELKAGPNWPGRTHHVVNCVTQKCLFVFHFKFSSSGNKESKSL

SEQ ID NO: 3786 - protein, 718 aa, Homo sapiens
EFVGRAASTTVVTRIAWRMADAGIRRVVPSDLYPLVLGFLRDNQLSEVANKFAKATGATQQDANASSLLDIYSFWLNRSAKVPERKLQANGPVAKKAKKKASSSDSEDSSEEEEEVQGPPAKKAAVPAKRVGLPPGKAAAKASESSSSEESSDDDDEEDQKKQPVQKGVKPQAKAGQAPPKKAKSSDSDSDSSSEDEPPKNQKPKITPVTVKAQTKAPPKPARAAPKIANGKAASSSSSSSSSSSSDDSEEEKAAATPKKTVPKKQVVAKAPVKAATTPTRKSSSSEDSSSDEEEEQKKPMKNKPGPYSSVPPPSAPPPKKSLGTQPPKKAVEKQQPVESSEDSSDESDSSSEEEKKPPTKAVVSKATTKPPPAKKAAESSSDSSDSDSSEDDEAPSKPAGTTKNSSNKPAVTTKSPAVKPAAAPKQPVGGGQKLLTRKADSSSSEEESSSSEEEKTKKMVATTKPKATAKAALSLPAKQAPQGSRDSSSDSDSSSSEEEEEKTSKSAVKKKPQKVAGGAAPSKPASAKKGKAESSNSSSSDDSSEEEEEKLKGKGSPRPQAPKANGTSALTAQNGKAAKNSEEEEEEKKKAAVVVSKSGSLKKRKQNEAAKEAETPQAKKIKLQTPNTFPKRKKGEKRASSPFRRVREEEIEVDSRVADNSFDAKRGAAGDWGERANQVLKFTKGKSFRHEKTKKKRGSYRGGSISVQVNSIKFDSE

SEQ ID NO: 3787 - protein, 1693 aa, Homo sapiens
IPEGRALSAEHTSSLVPSLHITTLGQEQAILSGAVPASPSTGTADFPSILTFLQPTENHASPSPVPEMPTLPAEGSDGSPPATRDLLLSSKVPNLLSTSWTFPRWKKDSVTAILGKNEEANVTIPLQAFPRKEVLSLHTVNGFVSDFSTGSVSSPIITAPRTNPLPSGPPLPSILSIQATQTVFPSLLAFSSTKPEVYAAAVDHSGLPASAPKQVRASPSSMDVYDSLTIGDMKKPATTDVFWSSLSAETGSLSTESIISGLQQQTNYDLNGHTISTTSWETHLAPTAPPNGLTSAADAIKSQDFKDTAGHSVTAEGFSIQDLVLGTSIEQPVQQSDMTMVGSHIDLWPTSNNNHSRDFQTAEVAYYSPTTRHSVSHPQLQLPNQPAHPLLLTSPGPTSTGSLQEMLSDGTDTGSEISSDINSSPERNASTPFQNILGYHSAAESSISTSVFPRTSSRVLRASQHPKKWTADTVSSKVQPTAAAAVTLFLRKSSPPALSAALVAKGTSSSPLAVASGPAKSSSMTTLAKNVTNKAASGPKRTPGAVHTAFPFTPTYMYARTGHTTSTHTAIARKHGHCLWPVVYNLPPPGKPQAMHTGLPNPTNLEMPRASTPRPLTVTAALTSITASVKATRLPPLRAENTDAVLPAASAAVVTTGKMASNLECQMSSKLLVKTVLFLTQRRVQISESLKFSIAKGLTQALRKAFHQNDVSAHVDILEYSHNVTVGYYATKGKLVYLPAVVIEMLGVYGVSNVTADLKQHTPHLQSVAVLASPWNPQPAGYFQLKTVLQFVSQADNIQSCKFAQTMEQRLQKAFQDAERKVLNTKSNLTIQIVSTSNASQAVTLVYVVGNQSTFLNGTVASSLLSQLSAELVGFYLTYPPLTIAEPLEYPNLDISETTRDYWVITVLQGVDNSLVGLHNQSFARVMEQRLAQLFMMSQQQGRRFKRATTLGSYTVQMVKMQRVPGPKDPAELTYYTLYNGKPLLGTAAAKILSTIDSQRMALTLHHVVLLQADPVVKNPPNNLWIIAAVLAPIAVVTVIIIIITAVLCRKNKNDFKPDTMINLPQRAKPVQGFDYAKQHLGQQGADEEVIPVTQETVVLPLPIRDAPQERDVAQDGSTIKTAKSTETRKSRSPSENGSVISNESGKPSSGRRSPQNVMAQQKVTKEEARKRNVPASDEEEGAVLFDNSSKVAAEPFDTSSGSVQLIAIKPTALPMVPPTSDRSQESSAVLNGEVNKALKQKSDIEHYRNKLRLKAKRKGYYDFPAVETSKGLTERKKMYEKAPKEMEHVLDPDSELCAPFTESKNRQQMKNSVYRSRQSLNSPSPGETEMDLLVTRERPRRGIRNSGYDTEPEIIEETNIDRVPEPRGYSRSRQVKGHSETSTLSSQPSIDEVRQQMHMLLEEAFSLASAGHAGQSRHQEAYGSAQHLPYSEVVTSAPGTMTRPRAGVQWVPTYRPEMYQYSLPRPAYRFSQLPEMVMGSPPPPVPPRTGPVAVASLRRSTSDIGSKTRMAESTGPEPAQLHDSASFTQMSRGPVSVTQLDQSALNYSGNTVPAVFAIPAANRPGFTGYFIPTPPSSYRNQAWMSYAGENELPSQWADSVPLPGYIEAYPRSRYPQSSPSRLPRQYSQPANLHPSLEQAPAPSTAASQQSLAENDPSDAPLTNISTAALVKAIREEVAKLAKKQTDMFEFQV

SEQ ID NO: 3788 - protein, 577 aa, Homo sapiens
MKGLYTDAEMKSDNVKDKDAKISFLQKAIDVVVMVSGEPLLAKPARIVAGHEPERTNELLQIIGKCCLNKLSSDDAVRRVLAGEKGEVKGRASLTSRSQELDNKNVREEESRVHKNTEDRGDAEIKERSTSRDRKQKEELKEDRMPREKDKDKEKAKENGGNRHREGERERAKARARPDNERQKDRGNRERDRDSERKKETERKSEGGKEKERLRDRDRERDRDKGKDRDRRRVKNGEHSWDLDRENNREHDKPEKKSASSGEMSKKLSDGTFKDSKAETETEISTRASKSLTTKTSKRRSKNSVEGDSTSDAEGDAGPAGQDKSEVPETPEIPNELSSNIRRIPRPGSARPAPPRVKRQDSMEALQMDRSGSGKTVSNVITESHNSDNEEDDQFVVEAAPQLSEMSEIEMVTAVELEEEEKHGGLVKKILETKKDYEKLQQSPKPGEKERSLFESAWKKEKDIVSKEIEKLRTSIQTLCKSALPLGKIMDYIQEDVDAMQNELQMYHSENRQHAEALQQEQRITDCAVEPLKAELAELEQLIKDQQDKICAVKANILKNEEKIQKMVYSINLTSRR

SEQ ID NO: 3789 - protein, 1455 aa, Homo sapiens
MRTLGTCLATLAGLLLTAAGETFSGGCLFDEPYSTCGYSQSEGDDFNWEQVNTLTKPTSDPWMPSGSFMLVNASGRPEGQRAHLLLPQLKENDTHCIDFHYFVSSKSNSPPGLLNVYVKVNNGPLGNPIWNISGDPTRTWNRAELAISTFWPNFYQVIFEVITSGHQGYLAIDEVKVLGHPCTRTPHFLRIQNVEVNAGQFATFQCSAIGRTVAGDRLWLQGIDVRDAPLKEIKVTSSRRFIASFNVVNTTKRDAGKYRCMIRTEGGVGISNYAELVVKEPPVPIAPPQLASVGATYLWIQLNANSINGDGPIVAREVEYCTASGSWNDRQPVDSTSYKIGHLDPDTEYEISVLLTRPGEGGTGSPGPALRTRTKCADPMRGPRKLEVVEVKSRQITIRWEPFGYNVTRCHSYNLTVHYCYQVGGQEQVREEVSWDTENSHPQHTITNLSPYTNVSVKLILMNPEGRKESQELIVQTDEDLPGAVPTESIQGSTFEEKIFLQWREPTQTYGVITLYEITYKAVSSFDPEIDLSNQSGRVSKLGNETHFLFFGLYPGTTYSFTIRASTAKGFGPPATNQFTTKISAPSMPAYELETPLNQTDNTVTVMLKPAHSRGAPVSVYQIVVEEERPRRTKKTTEILKCYPVPIHFQNASLLNSQYYFAAEFPADSLQAAQPFTIGDNKTYNGYWNTPLLPYKSYRIYFQAASRANGETKIDCVQVATKGAATPKPVPEPEKQTDHTVKIAGVIAGILLFVIIFLGVVLVMKKRKLAKKRKETMSSTRQEIDLWIGELNGPRSYAEQGTKLATRAFSFMDTHNLNGRSVSSPSSFTMKTNTLSTSVPNSYYPDETHTMASDTSSLVQSHTYKKREPADVPYQTGQLHPAIRVADLLQHITQMKCAEGYGFKEEYESFFEGQSAPWDSAKKDENRMKNRYGNIIAYDHSRVRLQTIEGDTNSDYINGNYIDGYHRPNHYIATQGPMQETIYDFWRMVWHENTASIIMVTNLVEVGRVKCCKYWPDDTEIYKDIKVTLIETELLAEYVIRTFAVEKRGVHEIREIRQFHFTGWPDHGVPYHATGLLGFVRQVKSKSPPSAGPLVVHCSAGAGRTGCFIVIDIMLDMAEREGVVDIYNCVRELRSRRVNMVQTEEQYVFIHDAILEACLCGDTSVPASQVRSLYYDMNKLDPQTNSSQIKEEFRTLNMVTPTLRVEDCSIALLPRNHEKNRCMDILPPDRCLPFLITIDGESSNYINAALMDSYKQPSAFIVTQHPLPNTVKDFWRLVLDYHCTSVVMLNDVDPAQLCPQYWPENGVHRHGPIQVEFVSADLEEDIISRIFRIYNAARPQDGYRMVQQFQFLGWPMYRDTPVSKRSFLKLIRQVDKWQEEYNGGEGRTVVHCLNGGGRSGTFCAISIVCEMLRHQRTVDVFHAVKTLRNNKPNMVDLLDQYKFCYEVALEYLNSG

SEQ ID NO: 3790 - protein, 74 aa, Homo sapiens
EEQTPLHIASRLGKTEIVQLLLQHMAHPDAATTNGYTPLHISAREGQVDVASVLLGRQGAAHSFRLTKVRRMTS

SEQ ID NO: 3791 - protein, 1957 aa, Homo sapiens
LPPVTMSGKYIMEEHDSYSDQVWSIDELPSKQGYYLQGNYLRCVAEVGSFEHNLTTDLLNHLVFVQKVFMKEVNEVIQKVSGGEQPIPLWNEHDGTADGDKPKILLYSLNLQFKGIQVTATTPSMRAVRFETGLIELELSNRLQTKASPGSSSYLKLFGKCQVDLNLALGQIVKHQVYEEAGSDFHQVAYFKTRIGLRNALREEISGSSDREAVLITLNRPIVYAQPVAFDRAVLFWLNYKAAYDNWNEQRMALHKDIHMATKEVVDMLPGIQQTSAQAFGTPFLQLTVNDLGICLPITNTAQSNHTGDLDTGSALVLTIESTLITACSSESLVSKGHFKNFCIRFADGFETSWDDWKPEIHGDLVMNACVVPDGTYEVCSRTTGQAAAESSSAGTWTLNVLWKMCGIDVHMDPNIGKRLNALGNTLTTLTGEEDIDDIADLNSVNIADLSDEDEVDTMSPTIHTEATDYRRQAASASQPGELRGRKIMKRIVDIRELNEQAKVIDDLKKLGASEGTINQEIQRYQQLESVAVNDIRRDVRKKLRRSSMRAASLKDKWGLSYKPSYSRSKSISASGRPPLKRMERASSRVGETEELPEIRVDAASPGPRVTFNIQDTFPEETELDLLSVTIEGPSHYSSNSEGSCSVFSSPKTPGGFSPGIPFQTEEGRRDDSLSSTSEDSEKDEKDEDHERERFYIYRKPSHTSRKKATGFAAVHQLFTERWPTTPVNRSLSGTATERNIDFELDIRVEIDSGKCVLHPTTLLQEHDDISLRRSYDRSSRSLDQDSPSKKKKFQTNYASTTHLMTGKKVPSSLQTKPSDLETTVFYIPGVDVKLHYNSKTLKTESPNASRGSSLPRTLSKESKLYGMKDSATSPPSPPLPSTVQSKTNTLLPPQPPPIPAAKGKGSGGVKTAKLYAWVALQSLPEEMVISPCLLDFLEKALETIPITPVERNYTAVSSQDEDMGHFEIPDPMEESTTSLVSSSTSAYSSFPVDVVVYVRVQPSQIKFSCLPVSRVECMLKLPSLDLVFSSNRGELETLGTTYPAETLSPGGNATQSGTKTSASKTGIPGSSGLGSPLGRSRHSSSQSDLTSSSSSSSGLSFTACMSDFSLYVFHPYGAGKQITAVSGLTPGSGGLGNVDEEPTSVTGRKDSLSINLEFVKVSLSRIRRSGGASFFESQSVSKSASKMDTTLINISAVCDIGSASFKYDMRRLSEILAFPRAWYRRSIARRLFLGDQTINLPTSGPGTPDSIEGVSQHLSPESSRKAYCKTWEQPSQSASFTHMPQSPNVFNEHMTNSTMSPGTVGQSLKSPASIRSRSVSDSSVPRRDSLSKTSTPFNKSNKAASQQGTPWETLVVFAINLKQLNVQMNMSNVMGNTTWTTSGLKSQGRLSVGSNRDREISMSVGLGRSQLDSKGGVVGGTIDVNALEMVAHISEHPNQQPSHKIQITMGSTEARVDYMGSSILMGIFSNADLKLQDEWKVNLYNTLDSSITDKSEIFVHGDLKWDIFQVMISRSTTPDLIKIGMKLQEFFTQQFDTSKRALSTWGPVPYLPPKTMTSNLEKSSQEQLLDAAHHRHWPGVLKVVSGCHISLFQIPLPEDGMQFGGSMSLHGNHMTLACFHGPNFRSKSWALFHLEEPNIAFWTEAQKIWEDGSSDHSTYIVQTLDFHLGHNTMVTKPCGALESPMATITKITRRRHENPPHGVASVKEWFNYVTATRNEELNLLRNVDANNTENSTTVKNSSLLSGFRGGSSYNHETETIFALPRMQLDFKSIHVQEPQEPSLQDASLKPKVECSVVTEFTDHICVTMDAELIMFLHDLVSAYLKEKEKAIFPPRILSTRPGQKSPIIIHDDNSSDKDREDSITYTTVDWRDFMCNTWHLEPTLRLISWTGRKIDPVGVDYILQKLGFHHARTTIPKWLQRGVMDPLDKVLSVLIKKLGTALQDEKEKKGKDKEEH

SEQ ID NO: 3792 - protein, 121 aa, Homo sapiens
QNGSTPLHHAASKNRHEIALMLLEGGANPDGKDHYEATAKHQATAKGNFKMIHILLYYKASTIIQDTEGNTPPHLVCDRVEEAKLLVSQGASIYIENKEEKDPLQVAKGALGLVLKRMVEG

SEQ ID NO: 3793 - protein, 112 aa, Homo sapiens
DIVPNPKMAPLGDEAPTLEKVLTPELSEEEVSTRDDIQFHHFSSEEALQKVKYFVAKEDPSSQEEAHTPEAPPPQPPSSERCLGEMKCTLVRGDSSPRQAELKSGPASRPAL

SEQ ID NO: 3794 - protein, 87 aa, Homo sapiens
  misc_feature (1)...(87): Xaa = any amino acid or nothing
SYWVGEDYTYKFFEVILIDPFHKAIRRNPDTQWISKAVYKHREMCGLTSTGRKSHGLEKDRMFPHAIGGSCRAAXRRRKTLQFPCYH

SEQ ID NO: 3795 - protein, 189 aa, Homo sapiens
GGMDSRVSGTTSNGETKPVYPVMEKKEEDGTLERGHWNNKMEFVLSVAGEIIGLGNVWRFPYLCYKNGGGAFFIPYLVFLFTCGIPVFLLETALGQYTSQGGVTAWRKICPIFEGIGYASQMIVILLNVYYIIVLAWALFYLFSSFTIDLPWGGCYHEWNTEHCMEFQKTNGSLNGTSENATSPVIEFW

SEQ ID NO: 3796 - protein, 196 aa, Homo sapiens
KPASTYSTSQPSMAPLLPIRTLPLILILLALLSPGAADFNISSLSGLLSPALTESLLVALPPCHLTGGNATLMVRRANDSKVVTSSFVVPPCRGRRELVSVVDSGAGFTVTRLSAYQVTNLVPGTKFYISYLVKKGTATESSREIPMFTLPRRNMESIGLGMARTGGMVVITVLLSVAMFLLVLGFIIALALGSRK

SEQ ID NO: 3797 - protein, 518 aa, Homo sapiens
ATRLLRGSGSWGCSRLRFGPPAYRRFSSGGAYPNIPLSSPLPGVPKPVFATVDGQEKFETKVTTLDNGLRVASQNKFGQFCTVGILINSGSRYEAKYLSGIAHFLEKLAFSSTARFDSKDEILLTLEKHGGICDCQTSRDTTMYAVSADSKGLDTVVALLADVVLQPRLTDEEVEMTRMAVQFELEDLNLRPDPEPLLTEMIHEAAYRENTVGLHRFCPTENVAKINREVLHSYLRNYYTPDRMVLAGVGVEHEHLVDCARKYLLGVQPAWGSAEAVDIDRSVAQYTGGIAKLERDMSNVSLGPTPIPELTHIMVGLESCSFLEEDFIPFAVLNMMMGGGGSFSAGGPGKGMFSRLYLNVLNRHHWMYNATSYHHSYEDTGLLCIHASADPRQVREMVEIITKEFILMGGTVDTVELERAKTQLTSMLMMNLESRPVIFEDVGRQVLATRSRKLPHELCTLIRNVKPEDVKRVASKMLRGKPAVAALGDLTDLPTYEHIQTALSSKDGRLPRTYRLFR

SEQ ID NO: 3798 - protein, 229 aa, Homo sapiens
KRLVEAGVPRTFDGIVGEGGAQSRSCWPWGVTAQTPAFSADSLNCLKNCMSITMGSVRPSVEQFHKYLPWFLNDRPNIKCPKGGLAAYSTSVNLTSDGQVLASRFMAYHKPLKNSQDYTEALRAARELAANITADLRKVPGTDPAFEVFPYTITNVFYEQYLTILPEGLFMLSLCLVPTFAVSCLLLGLDLRSGLLNLLSIVMILVDTVGFMALWGISYNAVSLINLVS

SEQ ID NO: 3799 - protein, 229 aa, Homo sapiens; identical to SEQ ID NO: 3798

SEQ ID NO: 3800 - protein, 261 aa, Homo sapiens
GIFRSLRVLFPLFSVGRPQFARSLSAAPQLSDTADTMGFGDLKSPAGLQVLNDYLADKSYIEGYVPSQADVAVFEAVSSPPPADLCHALRWYNHIKSYEKEKASLPGVKKALGKYGPADVEDTTGSGATDSKDDDDIDLFGSDDEEESEEAKRLREERLAQYESKKAKKPALVAKSSILLDVKPWDDETDMAKLEECVRSIQADGLVWGSSKLVPVGYGIKKLQIQCVVEDDKVGTDMLEEQITAFEDYVQSMDVAAFNKI

SEQ ID NO: 3801 - protein, 167 aa, Homo sapiens
SREMELVTFRDVAIEFSPEEWKCLDPAQQNLYRDVMLENYRNLVSLGFVISNPDLVTCLEQIKEPCNLKIHETAAKPPAICSPFSQDLSPVQGIEDSFHKLILKRYEKCGHENLQLRKGCKRVNECKVQKGVNNGVYQCLSTTQSKIFQCNTCVRVFSTSSHSNKHK

SEQ ID NO: 3802 - protein, 476 aa, Homo sapiens
VTVSPETHMDLTKGCVTFEDIAIYFSQDEWGLLDEAQRLLYLEVMLENFALVASLGCGHGTEDEETPSDQNVSVGVSQSKAGSSTQKTQSCEMCVPVLKDILHLADLPGQKPYLVGECTNHHQHQKHHSAKKSLKRDMDRASYVKCCLFCMSLKPFRKWEVGKDLPAMLRLLRSLVFPGGKKPGTITECGEDIRSQKSHYKSGECGKASRHKHTPVYHPRVYTGKKLYECSKCGKAFRGKYSLVQHQRVHTGERPWECNECGKFFSQTSHLNDHRRIHTGERPYECSECGKLFRQNSSLVDHQKIHTGARPYECSQCGKSFSQKATLVKHQRVHTGERPYKCGECGNSFSQSAILNQHRRIHTGAKPYECGQCGKSFSQKATLIKHQRVHTGERPYKCGDCGKSFSQSSILIQHRRIHTGARPYECGQCGKSFSQKSGLIQHQVVHTGERPYECNKCGNSFSQCSSLIHHQKCHNT

SEQ ID NO: 3803 - protein, 141 aa, Homo sapiens
LFPFLGSESKNGEADSSDKEMKHGQKSPTGKQTSQHLKRLKKSGLGHLKWTKAEDIDIETPGSILVNTNLRALINKHTFASLPQHFQQYLLLLLPEVDRQMGSDGILRLSTSALNNEFFAYAAQGWKQRLAEGKFVFSIIM

SEQ ID NO: 3804 - protein, 94 aa, Homo sapiens
SSSRASPPEHPSSQAHCGPLVLSHACPEVTNKWSTGSSSSPNSSWVSSPLQPEGLSGSSRMKGGSATKILLETLLLAAHMTADQGIASSQRCLL

SEQ ID NO: 3805 - protein, 128 aa, Homo sapiens
QSADTLFPGDINFNVSGLFSAVTLQDTVSDRLASEELPSTAVPTPATTPAPAPAPAPATAPALVSAATKERTESEVPPRPASPKVTRSPPETAAPVEDMARRSELAVGGEEGTEGGRGEGTGSPMSSY

SEQ ID NO: 3806 - protein, 328 aa, Homo sapiens
  misc_feature (1)...(328): Xaa = any amino acid or nothing
LQGDTWHLSFLSHFSRLHGGVPGRGLLEGNLLQPQAPGHDMTSIPFPGDRLLQVDGVILCGLTHKQAVQCLKGPGQVARLVLERRVPRSTQQCPSANDSMGDERTAVSLVTALPGRPSSCVSVTDGPKFXSSNXKRIANGLGFSFVQMEKESCSHLKSDLVRIKRLFPGHPAEENGAIAAGDIILGREWEGPRKASSSRCRGSWAMQLSVQAGPSFASYYPAAVEVLHLLRGAPQEVTLLLCRPPPGALPELEQEWQTPELSADKEFTRATCTDSCTSPILGSRGQLGGTVPPQMQGKAWGLRPESSQKAIREGTMGAKTERDLGPVP

SEQ ID NO: 3807 - protein, 194 aa, Homo sapiens
  misc_feature (1)...(194): Xaa = any amino acid or nothing
RCPSLLPPSWPLPTLQTLTRTPGNKAIAGGAGLWAVLWGSERTPPYRXGNXNQRGAVPCLRPHRLRPQDKFLVLASDGLWDMLSNEDVVRLVVGHLAEADWHKTDLAQRPANLGLMQSLLLQRKASGLHEADQNAATRLIRHAIGNNEYGEMEAERLAAMLTLPEDLARMYRDDITVTVVYFNSESIGAYYKGG

SEQ ID NO: 3808 - protein, 723 aa, Homo sapiens
SQYSESVAGRQASPERLLGSYHAMASTVEGGDTALLPEFPRGPLDAYRARASFSWKELALFTEGEGMLRFKKTIFSALENDPLFARSPGADLSLEKYRELNFLRCKRIFEYDFLSVEDMFKSPLKVPALIQCLGMYDSSLAAKYLLHSLVFGSAVYSSGSERHLTYIQKIFRMEIFGCFALTELSHGSNTKAIRTTAHYDPATEEFIIHSPDFEAAKFWVGNMGKTATHAVVFAKLCVPGDQCHGLHPFIVQIRDPKTLLPMPGVMVGDIGKKLGQNGLDNGFAMFHKVRVPRQSLLNRMGDVTPEGTYVSPFKDVRQRFGASLGSLSSGRVSIVSLAILNLKLAVAIALRFSATRRQFGPTEEEEIPVLEYPMQQWRLLPYLAAVYALDHFSKSLFLDLVELQRGLASGDRSARQAELGREIHALASASKPLASWTTQQGIQECREACGGHGYLAMNRLGVLRDDNDPNCTYEGDNNILLQQTSNYLLGLLAHQVHDGACFRSPLKSVDFLDAYPGILDQKFEVSSVADCLDSAVALAAYKWLVCYLLRETYQKLNQEKRSGSSDFEARNKCQVSHGRPLALAFVELTVVQRFHEHVHQPSVPPSLRAVLGRLSALYALWSLSRHAALLYRGGYFSGEQAGEVLESAVLALCSQLKDDAVALVDVIAPPDFVLDSPIGRADGELYKNLWGAVLQESKVLERASWWPEFSVNKPVIGSLKSKL

SEQ ID NO: 3809 - protein, 237 aa, Homo sapiens
CFGIMERVGCTLTTTYAHPRPTPTNFLPAISTMASSYRDRFPHSNLTHSLSLPWRPSTYYKVASNSPSVAPYCTRSQRVSENTMLPFVSNRTTFFTRYTPDDWYRSNLTNYQESNTSRHNSEKLRVDTSRLIQDKYQQTRKTQADTTQNLGERVNDIGFWKSEIIHELDEMIGETNALTDVKKRLERALMETEAPLQVARECLFHREKRMGIDLVHDEVEAQLLTVNVGEMHQSQAA

SEQ ID NO: 3810 - protein, 172 aa, Homo sapiens
VIQELEGGSGADLGEHSCRPASQPRFPRPAEARSHPATRRPASGPAMGKTNSKLAPEVLEDLVQNTEFSEQELKQWYKGFLKDCPSGILNLEEFQQLYIKFFPYGDASKFAQHAFRTFDKNGDGTIDFREFICALSVTSRGSFEQKLNWAFEMYDLDGDGRITRLEMLEIIE

SEQ ID NO: 3811 - protein, 355 aa, Homo sapiens
GCGYGCSGAGGAAIGEPMAKWGEGDPRWIVEERADATNVNNWHWTERDASNWSTDKLKTLFLAVQVQNEEGKCEVTEVSKLDGEASINNRKGKLIFFYEWSVKLNWTGTSKSGVQYKGHVEIPNLSDENSVDEVEISVSLAKDEPDTNLVALMKEEGVKLLREAMGIYISTLKTEFTQGMILPTMNGESVDPVGQPALKTEERKAKPAPSKTQARPVGVKIPTCKITLKETFLTSPEELYRVFTTQELVQAFTHAPATLEADRGGKFHMVDGNVSGEFTDLVPEKHIVMKWRFKSWPEGHFATITLTFIDKNGETELCMEGRGIPAPEEERTRQGWQRYYFEGIKQTFGYGARLF

SEQ ID NO: 3812 - protein, 179 aa, Homo sapiens
PCGTAASTHAYDRRAKCRQQQQQQQNGGQNKVRPAKKKTSPAREVSSESGTSGQFTPPSSTSVPTIASSSAPVSIWSPASISPLSDPLSTSSSCMQRSYPMTYTQASGYSQGYAGSTSYFGGMDCGSYLTPMHHQLPGPGATLSPMGTNAVTSHLNQSPASLSTQGYGASKLWGFNFNH

SEQ ID NO: 3813 - protein, 338 aa, Homo sapiens
  misc_feature (1)...(338): Xaa = any amino acid or nothing
CTEPPRRSTRTPAALASLRPYTDYVVVSDQILQESEDFFTLIESHEGKPLKLMVYNSKSDSCREVTVTPNAAWGGEGSLGCGIGYGYLHRIPTQPPSYHKKPPGTPPPSALPLGAPPPDALPPGPTPEDSPSLETGSRQSDYMEALLQAPGSSMEDPLPGPGSPSHSAPDPDGLPHFMETPLQPPPPVQRVMDPGFLDVSGISLLDNSNASVWPSLPSSTELTTTAVSTSGPEDICSSSSSHERGGEATWSGSEFEVSFLDSPGAQAQADHLPQLTLPDSLTSAASPEDGLSAELLEAQAEEEPASTEGLDTGTEAEGLDSQAQISTTEXHPGLXQGP

SEQ ID NO: 3814 - protein, 294 aa, Homo sapiens
VFWQVRNAGSSPLSAACPLFRTPAPQPCGSWGRCCIPHASTGCRPMAERGELDLTGAKQNTGVWLVKVPKYLSQQWAKASGRGEVGKLRIAKTQGRTEVSFTLNEDLANIHDIGGKPASVSAPREHPFVLQSVGGQTLTVFTESSSDKLSLEGIVVQRAECRPAASENYMRLKRLQIEESSKPVRLSQQLDKVVTTNYKPVANHQYNIEYERKKKEDGKRARADKQHVLDMLFSAFEKHQYYNLKDLVDITKQPVVYLKEILKEIGVQNVKGIHKNTWELKPEYRHYQGEEKSD

SEQ ID NO: 3815 - protein, 131 aa, Homo sapiens
  misc_feature (1)...(131): Xaa = any amino acid or nothing
NIGDWEDIGKSPERIIQYYGPATWAQDGSRGYCTPIYMLNHIIRLQAVLEIIMNERANALDLLAQQTTKMRNANYQNRLALDYLLAHEGGVXGKFSLTNCCLEIDDNGKAIMEITARMRKLAHIPVQTWER

SEQ ID NO: 3816 - protein, 389 aa, Homo sapiens
SHWQRRDRRCVRNMAERGRKRPCGPGEHGQRIEWRKWKQQKKEEKKKWKDLKLMKKLERQRAQEEQAKRLEEEEAAAEKEDRGRPYTLSVALPGSILDNAQSPELRTYLAGQIARACAIFCVDEIVVFDEEGQDAKTVEGEFTGVGKKGQACVQLARILQYLECPQYLRKAFFPKHQDLQFAGLLNPLDSPHHMRQDEESEFREGVVVDRPTRPGHGSFVNCGMKKEVKIDKNLEPGLRVTVRLNQQQHPDCKTYHGKVVSSQDPRTKAGLYWGYTVRLASCLSAVFAEAPFQDGYDLTIGTSERGSDVASAQLPNFRHALVVFGGLQGLEAGADADPNLEVAEPSVLFDLYVNTCPGQGSRTIRTEEAILISLAALQPGLIQAGARHT

SEQ ID NO: 3817 - protein, 316 aa, Homo sapiens
FLSAGMSNFTHYAYLLMIESLMLGKVPPHVPSHHFIFHDDGSARQKGESDYKVIIQQWFSKSGPWTTSSNVTWGLLELQQSISESAVLTIPPGDSGAGSNLITMFLRNRKETDLCSGRSKVNRGWNSGRCKQRGKTEQPGEPLEHVYVTIKHAVALESRHQKGELQCLIKMCIPLSKPLQMFFSPPHWEAWLQRVQQLAKNTRYFRQRLQEMGFIIYGNENASVVPLLLYMPGKVAAFARHMLEKKIGVVVVGFPATPLAEARARFCVSAAHTREMLDTVLEALDEMGDLLQLKYSRHKKSARPELYDETSFELED

SEQ ID NO: 3818 - protein, 191 aa, Homo sapiens
NPQSSSSEGSSEIFQVNGHNRLLVQRSEVTQAPGQYTVDVEGHGCTFIQATLKYNVLLPKKASGFSLSLEIVKNYSSTAFDLTVTLKYTGIRNKSSMVVIDVKMLSGFTPTMSSIEELENKGQVMKTEVKNDHVLFYLENVFGRADSFTFSVEQSNLVFNIQPAPGMVYDYYEKEEYALAFYHINSSSVSE

SEQ ID NO: 3819 - protein, 494 aa, Homo sapiens
RIPDSIISRGVQGLPRDTASLSTTPSESPRAQATSRLSTASCPTPKVQSRCSSKENILRASHSAVDITKVARRHRMSPFPLTSMDKAFITVLEMTPVLGTEIINYRDGMGRVLAQDVYAKDNLPPFPASVKDGYAVRAADGPGDRFIIGESQAGEQPTQTVMPGQVMRVTTGAPIPCGADAVVQVEDTELIRESDDGTEELEVRILVQARPGQDIRPIGHDIKRGECVLAKGTHMGPSEIGLLATVGVTEVEVNKFPVVAVMSTGNELLNPEDDLLPGKIRDSNRSTLLATIQEHGYPTINLGIVGDNPDDLLNALNEGISRADVIITSGGVSMGEKDYLKQVLDIDLHAQIHFGRVFMKPGLPTTFATLDIDGVRKIIFALPGNPVSAVVTCNLFVVPALRKMQGILDPRPTIIKARLSCDVKLDPRPEYHRCILTWHHQEPLPWAQSTGNQMSSRLMSMRSANGLLMLPPKTEQYVELHKGEVVDVMVIGRL

SEQ ID NO: 3820 - protein, 576 aa, Homo sapiens
PQEPALKSEFSQVASNTIPLPLPQPNTCKDNGPCKQVCSTVGGSAICSCFPGYAIMADGVSCEDQDECLMGAHDCSRRQFCVNTLGSFYCVNHTVLCADGYILNAHRKCVDINECVTDLHTCSRGEHCVNTLGSFHCYKALTCEPGYALKDGECEDVDECAMGTHTCQPGFLCQNTKGSFYCQARQRCMDGFLQDPEGNCVDINECTSLSEPCRPGFSCINTVGSYTCQRNPLICARGYHASDDGTKCVDVNECETGVHRCGEGQVCHNLPGSYRCDCKAGFQRDAFGRGCIDVNECWASPGRLCQHTCENTLGSYRCSCASGFLLAADGKRCEDVNECEAQRCSQECANIYGSYQCYCRQGYQLAEDGHTCTDIDECAQGAGILCTFRCLNVPGSYQCACPEQGYTMTANGRSCKDVDECALGTHNCSEAETCHNIQGSFRCLRFECPPNYVQVSKTKCERTTCHDFLECQNSPARITHYQLNFQTGLLVPAHIFRIGPAPAFTGDTIALNIIKGNEEGYFGTRRLNAYTGVVYLQRAVLEPRDFALDVEMKLWRQGSVTTFLAKMHIFFTTFAL

SEQ ID NO: 3821 - protein, 576 aa, Homo sapiens; identical to SEQ ID NO: 3820

SEQ ID NO: 3822 - protein, 321 aa, Homo sapiens
MAAATRGCRPWGSLLGLLGLVSAAAAAWDLASLRCTLGAFCECDFRPDLPGLECDLAQHLAGQHLAKALVVKALKAFVRDPAPTKPLVLSLHGWTGTGKSYVSSLLAHYLFQGGLRSPRVHHFSPVLHFPHPSHIERYKKDLKSWVQGNLTACGRSLFLFDEMDKMPPGLMEVLRPFLGSSWVVYGTNYRKAIFIFISNTGGEQINQVALEAWRSRRDREEILLQELEPVISRAVLDNPHHGFSNSGIMEERLLDAVVPFLPLQRHHVRHCVLNELAQLGLEPRDEVVQAVLDSTTFFPEDEQLFSSNGCKTVASRIAFFL

SEQ ID NO: 3823 - protein, 1058 aa, Homo sapiens
YGCEKTTEGRIPLKNIYRLFSADRKRVETALEACSLPSSRNDSIPQEDFTPEVYRVFLNNLCPRPEIDNIFSEFGAKSKPYLTVDQMMDFINLKQRDPRLNEILYPPLKQEQVQVLIEKYEPNNSLARKGQISVDGFMRYLSGEENGVVSPEKLDLNEDMSQPLSHYFINSSHNTYLTAGQLAGNSSVEMYRQVLLSGCRCVELDCWKGRTAEEEPVITHGFTMTTEISFKEVIEAIAECAFKTSPFPILLSFENHVDSPKQQAKMAEYCRLIFGDALLMEPLEKYPLESGVPLPSPMDLMYKILVKNKKKSHKSSEGSGKKKLSEQASNTYSDSSSMFEPSSPGAGEADTESDDDDDDDDCKKSSMDEGTAGSEAMATEEMSNLVNYIQPVKFESFEISKKRNKSFEMSSFVETKGLEQLTKSPVEFVEYNKMQLSRIYPKGTRVDSSNYMPQLFWNAGCQMVALNFQTMDLAMQINMGMYEYNGKSGYRLKPEFMRRPDKHFDPFTEGIVDGIVANTLSVKIISGQFLSDKKVGTYVEVDMFGLPVDTRRKAFKTKTSQGNAVNPVWEEEPIVFKKVVLPTLACLRIAVYEEGGKFIGHRILPVQAIRPGYHYICLRNERNQPLTLPAVFVYIEVKDYVPDTYADVIEALSNPIRYVNLMEQRAKQLAALTLEDEEEVKKEADPGETPSEAPSEARTTPAENGVNHTTTLTPKPPSQALHSQPAPGSVKAPAKTEDLIQSVLTEVEAQTIEELKQQKSFVKLQKKHYKEMKDLVKRHHKKTTDLIKEHTTKYNEIQNDYLRRRAALEKSAKKDSKKKSEPSSPDHGSSTIEQDLAALDAEMTQKLIDLKDKQQQQLLNLRQEQYYSEKYQKREHIKLLIQKLTDVAEECQNNQLKKLKEICEKEKKELKKKMDKKRQEKITEAKSKDKSQMEEEKTEMIRSYIQEVVQYIKRLEEAQSKRQEKLVEKHKEIRQQILDEKPKLQVELEQEYQDKFKRLPLEILEFVQEAMKGKISEDSNHGSAPLSLSSDPGKVNHKTPSSEELGGDIPGKEFDTPL

SEQ ID NO: 3824 - protein, 142 aa, Homo sapiens
ILHWFVHRWSGRNNREKIGVHVGFEEILNMEPYCCRETLKSLRPECFIYDLSAVVMHHGKGFGSGHYTAYCYNSEGGFWVHCNDSKLSMCTMDEVCKAQAYILFYTQRVTENGHSKLLPPELLLGSQHPNEDADTSSNEILS

SEQ ID NO: 3825 - protein, 120 aa, Homo sapiens
GIRAKFPNKIPVVVERYPRETFLPPLDKTKFLVPQELTMTQFLSIIRSRMVLRATEAFYLLVNNKSLVSMSATMAEIYRDYKDEDGFVYMTYASQETFGCLESAAPRDGSSLEDRPLHPL

SEQ ID NO: 3826 - protein, 412 aa, Homo sapiens
PEKKFERECREAEKAQQSYERLDNDTNATKADVEKAKQQLNLRTHMADENKNEYAAQLQNFNGEQHKHFYVVIPQIYKQLQEMDERRTIKLSECYRGFADSERKVIPIISKCLEGMILAAKSVDERRDSQMVVDSFKSGFEPPGDFPFEDYSQHIYRTISDGTISASKQESGKMDAKTTVGKAKGKLWLFGKKPKGPALEDFSHLPPEQRRKKLQQRIDELNRELQKESDQKDALNKMKDVYEKNPQMGDPGSLQPKLAETMNNIDRLRMEIHKNEAWLSEVEGKTGGRGDRRHSSDINHLVTQGRESPEGSYTDDANQEVRGPPQQHGHHNEFDDEFEDDDPLPAIGHCKAIYPFDGHNEGTLAMKEGEVLYIIEEDKGDGWTRARRQNGEEGYVPTSYIDVTLEKNSKGS

SEQ ID NO: 3827 - protein, 527 aa, Homo sapiens
INPVSSAVNGEAHSSHETRGQNSNALPSVLLELLSQSCLIPAMSSYLRNDSVLDMARHVPLYRALLELLRAIASCAAMVPLLLPLSTENGEEEEEQSECQTSVGTLLAKMKTCVDTYTNRLRSKRENVKTGVKPDASDQEPEGLTLLVPDIQKTAEIVYAATTSLRQANQEKKLGEYSKKAAMKPKPLSVLKSLEEKYVAVMKKLQFDTFEMVSEDEDGKLGFKVNYHYMSQVKNANDANSAARARRLAQEAVTLSTSLPLSSSSSVFVRCDEERLDIMKVLITGPADTPYANGCFEFDVYFPQDYPSSPPLVNLETTGGHSVRFNPNLYNDGKVCLSILNTWHGRPEEKWNPQTSSFLQVLVSVQSLILVAEPYFNEPGYERSRGTPSGTQSSREYDGNIRQATVKWAMLEQIRNPSPCFKEVIHKHFYLKRVEIMAQCEEWIADIQQYSSDKRVGRTMSHHAAALKRHTAQLREELLKLPCPEGLDPDTDDAPEVCRATTGAEETLMHDQVKPSSSKELPSDFQL

SEQ ID NO: 3828 - protein, 190 aa, Homo sapiens
PRVPATLVSLDPWHCFPTAGRLAGSTWVPPACTLQLGPSSEHELDNHRAPLLSLPSQESLSFTPWYLVACKPLFHIFCPLFACFMQEGKVQYLFLHLSHMRLLNYYFFPFLAPESLMQALEDLDYLAALDNDGNLSEFGIIMSEFPLDPQLSKSILASCEFDCVDEVLTIAAMVTGILNDYSFSFFANLH

SEQ ID NO: 3829 - protein, 161 aa, Homo sapiens
VDHTPVLSKPQCFSSVKWGATLSARSQKTSGIGRLMVHVIEATELKACKPNGKSNPYCEISMGSQSYTTRTIQDTLNPKWNFNCQFFIKDLYQDVLCLTLFDRDQFSPDDFLGRTEIPVAKIRTEQESKGPMTRRLLLHEVPTGEVWVRFDLQLFEQKTLL

SEQ ID NO: 3830 - protein, 447 aa, Homo sapiens
RKMMEESGIETTPPGTPPPNPAGLAATAMSSTPVPLAATSSFSSPNVSSMESFPPLAYSTPQPPLPPVRPSAPLPFVPPPAVPSVPPLVTSMPPPVSPSTAAAFGNPPVSHFPPSTSAPNTLLPAPPSGPPISGFSVGSTYDITRGHAGRAPQTPLMPSFSAPSGTGLLPTPITQQASLTSLAQGTGTTSAITFPEEQEDPRITRGQDEASAGGIWGFIKGVAGNPMVKSVLDKTKHSVESMITTLDPGMAPYIKSGGELDIVVTSNKEVKVAAVRDAFQEVFGLAVVVGEAGQSNIAPQPVGYAAGLKGAQERIDSLRRTGVIHEKQTAVSVENFIAELLPDKWFDIGCLVVEDPVHGIHLETFTQATPVPLEFVQQAQSLTPQDYNLRWSGLLVTVGEVLEKSLLNVSRTDWHMAFTGMSRRQMIYSAARAIAGMYKQRLPPRTV

SEQ ID NO: 3831 - protein, 223 aa, Homo sapiens
FWTRSAWHEGLQQMKANDPSLQEVNLYNIKNIPIPTLREFAKALETNTHVKKFSLAATRSNDPVAIAFADMLKVNTTLTSLNIESHFITGTGILALVEALKENDTLTEIKIDNQRQQLGTAVEMEIAQMLEENSRILKFGYQFTKQGPRTRVAAAITKNNDLAWQKDTQEQTSIWQVVSQSIAGFNPQFEVQGQNARSWMEELGKAFHQFVRRELKQTEGKLP

SEQ ID NO: 3832 - protein, 206 aa, Homo sapiens
EPWVPMDVAESPERDPHSPEDEEQPQGLSDDDILRDSGSDQDLDGAGVRASDLEDEESAARGPSQEEEDNHSDEEDRASEPKSQDQDSEVNELSRGPTSSPCEEEGDEGEEDRTSDLRDEASSVTRELDEHELDYDEEVPEEPAPAVQEDEAEKAGAEDDEEKGEGTPREEGKAGVQSVGEKESLEAAKEKKKEDDDGEIDDEEMY

SEQ ID NO: 3833 - protein, 518 aa, Homo sapiens
SQPPHFTQKMNENKDTDSKKSEEYEDDFEKDLEWLINENEKSDASIIEMACEKEENINQDLKENETVMEHTKRHSDPDKSLQDEVSPRRNDIISVPGIQPLDPISDSDSENSFQESKLESQKDLEEEEDEEVRRYIMEKIVQANKLLQNQEPVNDKRERKLKFKDQLVDLEVPPLEDTTTSKNYFENERNMFGKLSQLCISNDFGQEDVLLSLTNGSCEENKDRTILVERDGKFELLNLQDIASQGFLPPINNANSTENDPQQLLPRSSNSSVSGTKKEDSTAKIHAVTHSSTGEPLAYIAQPPLNRKTCPSSAVNSDRSKGNGKSNHRTQSAHISPVTSTYCLSPRQKELQKQLEEKREKLKREEERRKIEEEKEKKRENDIVFKAWLQKKREQVLEMRRIQRAKEIEDMNSRQENRDPQQAFRLWLKKKHEEQMKERQTEELRKQEECLFFLKGTEGRERAFKQWLRRKRMEKMAEQQAVRERTRQLRLEAKRSKQLQHHLYMSEAKPFRFTDHYN

SEQ ID NO: 3834 - protein, 66 aa, Homo sapiens
RSRTEELSNSGILKAMSKDLVTFGDVAVNFSQEEWEWLNPAQRNLYRKVMLENYRSLVSLGKDMSP

SEQ ID NO: 3835 - protein, 32 aa, Homo sapiens
ASDFYLRYYVGHKGKFGHEFLEFEFRPDGVYV

SEQ ID NO: 3836 - protein, 219 aa, Homo sapiens
RPTPGHGDFWMQPLTKDAGMSLSSVTLASALQVRGEALSEEEIWSLLFLAAEQLLEDLRNDSSDYVVCPWSALLSAAGSLSFQGRVSHIEAAPFKAPELLQGQSEDEQPDASQMHVYSLGMTLYWSAGFHVPPHQPLQLCEPLHSILLTMCEDQPHRRCTLQSVLEACRVHEKEVSVYPAPAGLHIRRLVGLVLGTISEVSREPCFSSSSCWSCVAIKI

SEQ ID NO: 3837 - protein, 403 aa, Homo sapiens
SLGCTNSARGKGQDDEVRTLMANGAPFTTDWFSKLRVSCGYIGDNCKNGADVNAKDMLKMTALHWATERHHRDVVELLIKYGADVHAFSKFDKSAFDIALEKNNAEILVILQEAMQNQVNVNPERANPVTDPVSMAAPFIFTSGEVVNLASLISSTNTKTTSGDPHASTVQFSNSTTSVLATLAALAEASVPLSNSHRATANTEEIIEGNSVDSSIQQVMGSGGQRVITIVTDGVPLGNIQTSIPTGGIGHPFIVTVQDGQQVLTVPAGKVAEETVIKEEEEEKLPLTKKPRIGEKTNSVEESKEGNERELLQQQLQEANRRAQEYRHQLLKKEQEAEQYRLKLEAIARQQPNGVDFTMVEEVAEVDAVVVTEGELEERETKVTGSAGATGPPTRVSMATVSS

SEQ ID NO: 3838 - protein, 444 aa, Homo sapiens
MIEDNKENKDHSLERGRASLIFSLKNEVGGLIKALKIFQEKHVNLLHIESRKSKRRNSEFEIFVDCDINREQLNDIFHLLKSHTNVLSVNLPDNFTLKEDGMETVPWFPKKISDLDHCANRVLMYGSELDADHPGFKDNVYRKRRKYFADLAMNYKHGDPIPKVEFTEEEIKTWGTVFQELNKLYPTHACREYLKNLPLLSKYCGYREDNIPQLEDVSNFLKERTGFSIRPVAGYLSPRDFLSGLAFRVFHCTQYVRHSSDPFYTPEPDTCHELLGHVPLLAEPSFAQFSQEIGLASLGASEEAVQKLATCYFFTVEFGLCKQDGQLRVFGAGLLSSISELKHALSGHAKVKPFDPKITCKQECLITTFQDVYFVSESFEDAKEKMREFTKTIKRPFGVKYNPYTRSIQILKDTKSITSAMNELQHDLDVVSDALAKVSRKPSI

SEQ ID NO: 3839 - protein, 858 aa, Homo sapiens; identical to SEQ ID NO: 1871

SEQ ID NO: 3840 - protein, 250 aa, Homo sapiens
SSTRSRDFCCSEAIQGSLTRRERRASGVRTRRSQGSSAMASKILLNVQEEVTCPICLELLTEPLSLDCGHSLCRACITVSNKEAVTSMGGKSSCPVCGISYSFEHLQANQHLANIVERLKEVKLSPDNGKKRDLCDHHGEKLLLFCKEDRKVICWLCERSQEHRGHHTVLTEEVFKECQEKLQAVLKRLKKEEEEAEKLEADIREEKTSWKYQVQTERQRIQTEFDQLRSILNNEEQRELQRLEEEEKKT

SEQ ID NO: 3841 - protein, 134 aa, Homo sapiens
GKAFSCFTYLSQHRRTHMAEKPYECKTCKKAFSHFGNLKVHERIHTGEKPYECKECRKAFSWLTCLLRHERIHTGKKSYECQQCGKAFTRSRFLRGHEKTHTGEKMHECKECGKALSSLSSLHRHKRTHWRDTL

SEQ ID NO: 3842 - protein, 74 aa, Homo sapiens
AVLKNMAPMTALGLLDLHILNLILFLSAGEDFTSVVSEIMMYILLVFLTLWLLIEMIYCYRKVSKAEEAAQENA

SEQ ID NO: 3843 - protein, 390 aa, Homo sapiens
APIRNSRIDDFVRRVESKATSARCGLWGSGPRRRPASGMFRGLSSWLGLQQPVAGGGQPNGDAPPEQPSETVAESAEEELQQAGDQELLHQAKDFGNYLFNFASAATKKITESVAETAQTIKKSVEEGKIDGIIDKTIIGDFQKEQKKFVEEQHTKKSEAAVPPWVDTNDEETIQQQILALSADKRNFLRDPPAGVQFNFDFDQMYPVALVMLQEDELLSKMRFALVPKLVKEEVFWRNYFYRVSLIKQSAQLTALAAQQQAAGKEEKSNGREQDLPLAEAVRPKTPPVVIKSQLKTQEDEEEISTSPGVSEFVSDAFDACNLNQEDLRKEMEQLVLDKKQEETAVLEEDSADWEKELQQELQEYEVVTESEKRDENWDKEIEKMLQEEN

SEQ ID NO: 3844 - protein, 217 aa, Homo sapiens
LPPAQIPEAWLLLANVVVVLILVPLKDRLIDPLLLRCKLLPSALQKMALGMFFGFTSVIVAGVLEMERLHYIHHNETVSQQIGEVLYNAAPLSIWWQIPQYLLIGISEIFASIPGLEFAYSEAPRSMQGAIMGIFFCLSGVGSLLGSSLVALLSLPGGWLHCPKDFGNINNCRMDLYFFLLAGIQAVTALLFVWIAGRYERASQGPASHSRFSRDRG

SEQ ID NO: 3845 - protein, 643 aa, Homo sapiens
PEDSAPQYSRLFPNASQHITPSYNYAPNPDKHWIMRYTGPMKPIHMEFTNMLQRKRLQTLMSVDDSMETIYNMLVETGELDNTYIVYTADHGYHIGQFGLVKGKSMPYEFDIRVPFYVRGPNVEAGCLNPHIVLNIDLAPTILDIAGLDIPADMDGKSILKLLDTERPVNRFHLKKKMRVWRDSFLVERGKLLHKRDNDKVDAQEENFLPKYQRVKDLCQRAEYQTACEQLGQKWQCVEDATGKLKLHKCKGPMRLGGSRALSNLVPKYYGQGSEACTCDSGDYKLSLAGRRKKLFKKKYKASYVRSRSIRSVAIEVDGRVYHVGLGDAAQPRNLTKRHWPGAPEDQDDKDGGDFSGTGGLPDYSAANPIKVTHRCYILENDTVQCDLDLYKSLQAWKDHKLHIDHEIETLQNKIKNLREVRGHLKKKRPEECDCHKISYHTQHKGRLKHRGSSLHPFRKGLQEKDKVWLLREQKRKKKLRKLLKRLQNNDTCSMPGLTCFTHDNQHWQTAPFWTLGPFCACTSANNNTYWCMRTINETHNFLFCEFATGFLEYFDLNTDPYQLMNAVNTLDRDVLNQLHVQLMELRSCKGYKQCNPRTRNMDLGLKDGGSYEQYRQFQRRKWPEMKRPSSKSLGQLWEGWEG

SEQ ID NO: 3846 - protein, 643 aa, Homo sapiens; identical to SEQ ID NO: 3845

SEQ ID NO: 3847 - protein, 419 aa, Homo sapiens
MVFSAVLTAFHTGTSNTTFVVYENTYMNITLPPPFQHPDLSPLLRYSFETMAPTGLSSLTVNSTAVPTTPAAFKSLNLPLQITLSAIMIFILFVSFLGNLVVCLMVYQKAAMRSAINILLASLAFADMLLAVLNMPFALVTILTTRWIFGKFFCRVSAMFFWLFVIEGVAILLIISIDRFLIIVQRQDKLNPYRAKVLIAVSWATSFCVAFPLAVGNPDLQIPSRAPQCVFGYTTNPGYQAYVILISLISFFIPFLVILYSFMGILNTLRHNALRIHSYPEGICLSQASKLGLMGLQRPFQMSIDMGFKTRAFTTILILFAVFIVCWAPFTTYSLVATFSKHFYYQHNFFEISTWLLWLCYLKSALNPLIYYWRIKKFHDACLDMMPKSFKFLPQLPGHTKRRIRPSAVYVCGEHRTVV

SEQ ID NO: 3848 - protein, 941 aa, Homo sapiens
SSAVAARRRRSWASLVLAFLGVCLGITLAVDRSNFKTCEESSFCKRQRSIRPGLSPYRALLDSLQLGPDSLTVHLIHEVTKVLLVLELQGLQKNMTRFRIDELEPRRPRYRVPDVLVADPPIARLSVSGRDENSVELTMAEGPYKIILTARPFRLDLLEDRSLLLSVNARGLLEFEHQRAPRVSQGSKDPAEGDGAQPEETPRDGDKPEETQGKAEKDEPGAWEETFKTHSDSKPYGPMSVGLDFSLPGMEHVYGIPEHADNLRLKVTEGGEPYRLYNLDVFQYELYNPMALYGSVPVLLAHNPHRDLGIFWLNAAETWVDISSNTAGKTLFGKMMDYLQGSGETPQTDVRWMSETGIIDVFLLLGPSISDVFRQYASLTGTQALPPLFSLGYHQSRWNYRDEADVLEVDQGFDDHNLPCDVIWLDIEHADGKRYFTWDPSRFPQPRTMLERLASKRRKLVAIVDPHIKVDSGYRVHEELRNLGLYVKTRDGSDYEGWCWPGSAGYPDFTNPTMRAWWANMFSYDNYEGSAPNLFVWNDMNEPSVFNGPEVTMLKDAQHYGGWEHRDVHNIYGLYVHMATADGLRQRSGGMERPFVLARAFFAGSQRFGAVWTGDNTAEWDHLKISIPMCLSLGLVGLSFCGADVGGFFKNPEPELLVRWYQMGAYQPFFRAHAHLDTGRREPWLLPSQHNDIIRDALGQRYSLLPFWYTLLYQAHREGIPVMRPLWVQYPQDVTTFNIDDQYLLGDALLVHPVSDSGAHGVQVYLPGQGEVWYDIQSYQKHHGPQTLYLPVTLSSIPVFQRGGTIVPRWMRVRRSSECMKDDPITLFVALSPQGTAQGELFLDDGHTFNYQTRQEFLLRRFSFSGNTLVSSSADPEGHFETPIWIERVVIIGAGKPAAVVLQTKGSPESRLSFQHDPETSVLVLRKPGINVASDWSIHLR

SEQ ID NO: 3849 - protein, 774 aa, Homo sapiens
  misc_feature (1)...(774): Xaa = any amino acid or nothing
RARNARGCWGVCRSGFSSAVCGAARMEQVAEGARVTAVPVSAADSTEELAEVEEGVGVVGEDNDAAARGAEAFGDSEEDGEDVFEVEKILDMKTEGGKVLYKVRWKGYTSDDDTWEPEIHLEDCKEVLLEFRKKIAENKAKAVRKDIQRLSLNNDIFEANSDSDQQSETKEDTSPKKKKKKLRQREEKSPDDLKKKKAKAGKLKDKSKPDLESSLESLVFDLRTKKRISEAKEELKESKKPKKDEVKETKELKKVKKGEIRDLKTKTREDPKENRKTKKEKFVESQVESESSVLNDSPFPEDDSEGLHSDSREEKQNTKSARERAGQDMGLEHGFEKPLDSAMSAEEDTDVRGRRKKKTPRKAEDTRENRKLENKNAFLEKKTVPKKQRNQDRSKSAAELEKLMPVSAQTPKGRRLSGEERGLWSTDSAEEDKETKRNESKKPKKDEVKETKELKKVKKGEIRDLKTKTREDPKENRKTKKEKFVESQVESESSVLNDSPFPEDDSEGLHSDSREEKQNTKSARERAGQDMGLEHGFEKPLDSAMSAEEDTDVRGRRKKKTPRKAEDTRENRKLENKNAFLEKKTVPKKQRNQDRSKSAAELEKLMPVSAQTPKGRRLSGEERGLWSTDSAEEDKETKRNESKKPKKDEVKETKELKKVKKGEIRDLKTKTREDPKENRKTKKEKFVESQVESESSVLNDSPFPEDRQXRATFRQQREEKSPDDLKKKKAKAGKLKDKSKPDLESSLESLVFDLRTKKRISEAKEELKESKKPK

SEQ ID NO: 3850 - protein, 953 aa, Homo sapiens
  misc_feature (1)...(953): Xaa = any amino acid or nothing
PAAAAAAAAAAAAAAGRGPSFTPCFSPSLAVEPSRRTRLGSDPAQAMAGNVKKSSGAGGGSGSGGSGSGGLIGLMKDAFQPHHHHHHHLSPHPPGTVDKKMVEKCWKLMDKVVRLCQNPKLALKNSPPYILDLLPDTYQHLRTILSRYEGKMETLGENEYFRVFMENLMKKTKQTISLFKEGKERMYEENSQPRRNLTKLSLIFSHMLAELKGIFPSGLFQGDTFRITKADAAEFWRKAFGEKTIVPWKSFRQALHEVHPISSGLEAMALKSTIDLTCNDYISVFEFDIFTRLFQPWSSLLRNWNSLAVTHPGYMAFLTYDEVKARLQKFIHKPGSYIFRLSCTRLGQWAIGYVTADGNILQTIPHNKPLFQALIDGFREGFYLFPDGRNQNPDLTGLCEPTPQDHIKVTQEQYELYCEMGSTFQLCKICAENDKDVKIEPCGHLMCTSCLTSWQESEGQGCPFCRCEIKGTEPIVVDPFDPRGSGSLLRQGAEGAPSPNYDDDDDERADDTLFMMKELAGAKVERPPSPFSMAPQASLPPVPPRLDLLPQRVCVPSSASALGTASKAASGSLHKDKPLPVPPTLRDLPPPPPPDRPYSVGAESRPQRRPLPCTPGDCPSRDKLPPVPSSRLGDSWLPRPIPKVPVSAPSSSDPWTGRELTNRHSLPFSLPSQMEPRPDVPRLGSTFSLDTSMSMNSSPLVGPECDHPKIKPSSSANAIYSLAARPLPVPKLPPGEQCEGEEDTEYMTPSSRPLRPLDTSQSSRACDCDQQIDSCTYEAMYNIQSQAPSITESSTFGEGNLAAAHANTGPEESENEDDGYDVPKPPVPAVLARRTLSDISNASSSFGLFVLERDPXPQNVTEGSQVPERPPKPFPRRINSERKAGSCQQGSGPAASAATASPQLSSEIENLMSQGYSYQDIQKALVIAQNNIEMAKNILREFVSISSPAHVAT

SEQ ID NO: 3851 - protein, 923 aa, Homo sapiens
  misc_feature (1)...(923): Xaa = any amino acid or nothing
GRVGSMDGAMGPRGLLLCMYLVSLLILQAMPALGSATGRSKSSEKRQAVDTAVDGVFIRSLKVNCKVTSRFAHYVVTSQVVNTANEAREVAFDLEIPKTAFISDFAVTADGNAFIGDIKDKVTAWKQYRKAAISGENAGLVRASGRTMEQFTIHLTVNPQSKVTFQLTYEEVLKRNHMQYEIVIKVKPKQLVHHFEIDVDIFEPQGISKLDAQASFLPKELAAQTIKKSFSGKKGHVLFRPTVSQQQSCPTCSTSLLNGHFKVTYDVSRDKICDLLVANNHFAHFFAPQNLTNMNKNVVFVIDISGSMRGQKVKQTKEALLKILGDMQPGDYFDLVLFGTRVQSWKGSLVQASEANLQAAQDFVRGFSLDEATNLNGGLLRGIEILNQVQESLPELSNHASILIMLTDGDPTEGVTDRSQILKNVRNAIRGRFPLYNLGFGHNVDFNFLEVMSMENNGRAQRIYEDHDATQQLQGFYSQVAKPLLVDVDLQYPQDAVLALTQNHHKQYYEGSEIVVAGRIADNKQSSFKADVQAHGEGQEFSITCLVDEEEMKKLLRERGHMLENHVERLWAYLTIQELLAKRMKVDREVRANLSSQALRMSLDYGFVTPLTSMSIRGMADQDGLKPTIDKPSEDSPPLEMLGPRRTFVLSALQPSPTHSSSNTQRLPDRVTGVDTDPHFIIHVPQKEDTLCFNINEEPGVILSLVQDPNTGFSVNGQLIGNKARSPGQHDGTYFGRLGIANPATDFQLEVTPQNITLNPGFGGPVFSWRDQAVLRQDGVVVTINKKRNLVVSVDDGGTFEVVLHRVWKGSSVHQDFLGLLMCWDKSIGMSSPGRKGCWGQFFHPIRFLKVSXHPPPGSDPQKAQMPTMVVRNPPGLTVTRGLQKDYSKDPWHGAEVSCWFIHNNGAXITDCAYTDYIVPDIF

SEQ ID NO: 3852 - protein, 564 aa, Homo sapiens
  misc_feature (1)...(564): Xaa = any amino acid or nothing
TQVAEAGRGEGVVAGAETGRPQSAGMNLELLESFGQNYPEEADGTLDCISMALTCTFNRWGTLLAVGCNDGRIVIWDFLTRGIAXNKFSAHIHPVCSLCWSRDGHKLVSASTDNIVSQWDVLSGDCDQRFRFPSPILKVQYHPRDQNKVLVCPMKSAPVMLTLSDSKHVVLPVDDDSDLNVVASFDRRGEYIYTGNAKGKILVLKTDSQDLVASFRVTTGTSNTTAIKSIEFARKGSCFLINTADRIIRVYDGREILTCGRDGEPEPMQKLQDLVNRTPWKKCCFSGDGEYIVAGSARQHALYIWEKSIGNLVKILHGTRGELLLDVAWHPVRPIIASISSGVVSIWAQNQVENWSAFAPDFKELDENVEYEERESEFDIEDEDKSEPEQTGADAAEDEEVDVTSVDPIAAFCSSDEELEDSKALLYLPIAPEVEDPEENPYGPPPDAVQTSLMDEGASSEKKRQSSADGSQPPKKKPKTTNIELQGVPNDEVHPLLGVKGDGKSKKKQAGRPKGSKGKEKDSPFKPKLYKGDRGLPLEGSAKGKVQAELSQPLTAGGAISELL

SEQ ID NO: 3853 - protein, 852 aa, Homo sapiens
  misc_feature (1)...(852): Xaa = any amino acid or nothing
PLLFTCGREVRARDPEKEGTIVVAGLKVQVQPRFLWILCFSMEETQGELTSSCGSKTMANVSLAFRDVSIDLSQEEWECLDAVQRDLYKDVMLENYSNLVSLDLEYKYITKNLLSEKNVCKIYLSQLQTGEKSKNTIHEDTIFRNGLQCKHEFERQERHQMGCVSQMLIQKQISHPLHPKIHAREKSYECKECRKAFRQQSYLIQHLRIHTGERPYKCMECGKAFCRVGDLRVHHTIHAGERPYECKECGKAFRLHYHLTEHQRIHSGVKPYECKECGKAFSRVRDLRVHQTIHAGERPYECKECGKAFRLHYQLTEHQRIHTGERPYECKVCGKTFRVQRHISQHQKIHTGVKPYKCNECGKAFSHGSYLVQHQKIHTGEKPYECKECGKSFSFHAELARHRRIHTGEKPYECRECGKAFRLQTELTRHHRTHTGEKPYECKECGKAFICGYQLTLHLRTHTGEIPYECKECGKTFSSRYHLTQHYRIHTGEKPYICNECGKAFRLQGELTRHHRIHTCEKPYECKECGKAFIHSNQFISHQRIHTSESTYICKECGKIFSRRYNLTQHFKIHTGEKPYICNECGKAFRFQTELTQHHRIHTGEKPYKCTECGKAFIRSTHLTQHHRIHTGEKPYECTECGKTFSRHYHLTQHHRGHTGEKPYICNECGNAFICSYRLTLHQRIHTGELPYECKECGKTFSRRYHLTQHFRLHTGEKPYSCKECGNAFRLQAELTRHHIVHTGEKPYKCKECGKAFSVNSELTRHHRIHTGEKPYQCKECGKAFIRSDQLTLHQKIILVRNPMHNVKRIRWPLENALXQRICNLRNFLFVTEHVGIPFTSCSQFIRNYFVC

SEQ ID NO: 3854 - protein, 343 aa, Homo sapiens
  misc_feature (1)...(343): Xaa = any amino acid or nothing
LQSCWVPGIPWPSVGWLSWLKDLPSCEIHSASLSAVLQGPQCSEMLWPKNLTSWDDSSSVSSGISDTIDNLSTDDINTSSSISSYANTPASSRKNLDVQTDAEKHSQVERNSLWSGDDVKKSDGGSDSGIKMEPGSKWRRNPSDVSDESDKSTSGKKNPVISQTGSWRRGMTAQVGITMPRTKASAPAGALKTPGTGKRPGLSGPGAPTPAAPPQLARMAWAFSLSAASTPAVSPSTSPSAVEGSPATILPLASSPPPRTTPXLPLSELTVXRPQELVRGRGCLGPGAPTPAAPPQLARMAWAFSLSAASTPAVSPSTSPSAVEGSPATILPLASSPPPRTTP

SEQ ID NO: 3855 - protein, 255 aa, Homo sapiens
  misc_feature (1)...(255): Xaa = any amino acid or nothing
FRGGDGAPGVLKPGNPLPFPLPPLQYPPPSTLSHSDNLAMTSRSTARPNGQPQASKICQFKLVLLGESAVGKSSLVLRFVKGQFHEYQESTIGAAFLTQSVCLDDTTVKFEIWDTAGQERYHSLAPMYYRGAQAAIVVYDITNQETFARAKTWVKELQRQASPSIVVGLAGNKADLANKRMVEYEEAQAYADDNSLLFMETSAKTAMNVNDLFLAIAXEVAKRVNPQNLGGAAGRSRGVDLHEQSQQNKSQCCSN

SEQ ID NO: 3856 - protein, 817 aa, Homo sapiens
  misc_feature (1)...(817): Xaa = any amino acid or nothing
LGLEAAARPRPGGPAAMQDGNFLLSALQPEAGVCSLALPSDLQLDRRGAEGPEAERLRAARVQEQVRARLLQLGQQPRHNGAAEPEPEAETARGTSRGQYHTLQAGFSSRSQGLSGDKTSGFRPIAKPAYSPASWSSRSAVDLSCSRRLSSAHNGGSAFGAAGYGGAQPTPPMPTRPVSFHERGGVGSRADYDTLSLRSLRLGPGGLDDRYSLVSEQLEPAATSTYRAFAYERQASSSSSRAGGLDWPEATEVSPSRTIRAPAVRTLQRFQSSHRSRGVGGAVPGAVLEPVARAPSVRSLSLSLADSGHLPDVHGFNSYGSHRTLQRLSSGFDDIDLPSAVKYLMASDPNLQVLGAAYIQHKCYSDAAAKKQARSLQAVPRLVKLFNHANQEVQRHATGAMRNLIYDNADNKLALVEENGIFELLRTLREQDDELRKNVTGILWNLSSSDHLKDRLAKKTPLEQLTDLGVXAPLSGAGGPPLIQQNASEAEIFYNATGFPRNLSSASQATRQKMRECHGLVDALVTSINHALDAGKCEDKSVENAVCVLRNLSYRLYDEMPPSALQRLEGRGRRDLAGAPPGEVVGCFTPQSRRLRELPLAADALTFAEVSKDPKGLEWLWSPQIVGLYNRLLQRCELNRHTTEAAAGALQNITGGDPRGPGGLSRLALEQERILNPLLDRVRTADHHQLRSLTGLIRNLSRNARNKDEMSTKVVSHLIEKLPGSVGEKSPPAEVLVNIIAVFNNLGWLASPIALARDLLYFDGLRKLIFIKKKRDSPDSEKSSRAASSLLANLWQYNKLHRDFRAKGYRKEDFLGP

SEQ ID NO: 3857 - protein, 277 aa, Homo sapiens
  misc_feature (1)...(277): Xaa = any amino acid or nothing
VAVTLLSQLPSAIQRTAAWEMRAPLTFRVPLALDLIKPEHCTVNVDNSLSIPVIAAELVVRKPSEKGMQQKKKTKDLGFRAGKESKTEWRKXGLQDMASQMFALPLKXPVTAAFHDSSMPSSLLQIEMEQLFLEARLQPDSKSEARRNQCDSMLLRNQQLCSTCQEMKMVQPRTMKIPDDPKASFENCMSYRMSLHQPKFQTTPEPFHDDIPTENIHLQNLPILGPRTAVFHGLLTEAYKTLKERQRSSLPRKEPIGKTTEAVSGRSSSPPRLPERK

SEQ ID NO: 3858 - protein, 1088 aa, Homo sapiens
SHQEIEQNSAMAPRKRGGRGISFIFCCFRNNDHPEITYRLRNDSNFALQTMEPALPMPPVEELDVMFSELVDELDLTDKHREAMFALPAEKKWQIYCSKKKDQEENKGATSWPEFYIDQLNSMAARKSLLALEKEEEEERSKTIESLKTALRTKPMRFVTRFIDLDGLSCILNFLKTMDYETSESRIHTSLIGCIKALMNNSQGRAHVLAHSESINVIAQSLSTENIKTKVAVLEILGAVCLVPGGHKKVLQAMLHYQKYASERTRFQTLINDLDKSTGRYRDEVSLKTAIMSFINAVLSQGAGVESLDFRLHLRYEFLMLGIHPVMDKLRKHENSTLDRHLDFFEMLRNEDELEFAKRFELVHIDTKSATQMFELTRKRLTHSEAYPHFMSILHHCLQMPYKRSGNTVQYWLLLDRIIQQIVIQNDKGQDPDSTPLENFNIKNVVRMLVNENEVKQWKEQAEKMRKEHNELQQKLEKKERECDAKTQEKEEMMQTLNKMKEKLEKETTEHKQVKQQVADLTAQLHELSRRAVCASIPGGPSPGAPGGPFPSSVPGSLLPPPPPPPLPGGMLPPPPPPLPPGGPPPPPGPPPLGAIMPPPGAPMGLALKKKSIPQPTNALKSFNWSKLPENKLEGTVWTEIDDTKVFKILDLEDLERTFSAYQRQQDFFVNSNSKQKEADAIDDTLSSKLKVKELSVIDGRRAQNCNILLSRLKLSNDEIKRAILTMDEQEDLPKDMLEQLLKFVPEKSDIDLLEEHKHELDRMAKADRFLFEMSRINHYQQRLQSLYFKKKFAERVAEVKPKVEAIRSGSEEVFRSGALKQLLEVVLAFGNYMNKGQRGNAYGFKISSLNKIADTKSSIDKNITLLHYLITIVENKYPSVLNLNEELRDIPQAAKVNMTELDKEISTLRSGLKAVETELEYQKSQPPQPGDKFVSVVSQFITVASFSFSDVEDLLAEAKDLFTKAVKHFGEEAGKIQPDEFFGIFDQFLQAVSEAKQENENMRKKKEEEERRARMEAQLKEQRERERKMRKAKENSEESGEFDDLVSALRSGEVFDKDLSKLKRNRKRITNQMTDSSRERPITKLNF

SEQ ID NO: 3859 - protein, 379 aa, Homo sapiens
RVEHLSEFLVDIKPSLTFDVIPLLDPYGPAGSDPSLEFLVVSEETYRGGMAINRFRLENDLEELALYQIQLLKDLRHTENEEDKVSSSSFRQRMLGNLLRPPYERPELPTCLYVIGLTGISGSGKSSIAQRLKGLGAFVIDSDHLGHRAYAPGGPAYQPVVEAFGTDILHKDGIINRKVLGSRVFGNKKQLKILTDIMWPIIAKLAREEMDRAVAEGKRVCVIDAAVLLEAGWQNLVHEVWTAVIPETEAVRRIVERDGLSEAAAQSRLQSQMSGQQLVEQSHVVLSTCGSRISPNARWRKPGPSCRSAFPRLIRPSTEKFSVGPDWLLELTSDPVVRRNGGLDAHPGSGPEVQAILCRTWPGLVDTGSLPNTLVFGQH

SEQ ID NO: 3860 - protein, 1293 aa, Homo sapiens
MGQKSVGASYVQIPLVPPLSRHPKGLGHEDRWSSYCLSSLAAQNICTSKLHCPAAPEHTDPSEPRGSVSCCSLLRGLSSGWSSPLLPAPVCNPNKAIFTVDAKTTEILVANDKACGLLGYSSQDLIGQKLTQFFLRSDSDVVEALSEEHMEADGHAAVVFGTVVDIISRSGEKIPVSVWMKRMRQERRLCCVVVLEPVERVSTWVAFQSDGTVTSCDSLFAHLHGYVSGEDVAGQHITDLIPSVQLPPSGQHIPKNLKIQRSVGRARDGTTFPLSLKLKSQPSSEEATTGEAAPVSGYRASVWVFCTISGLITLLPDGTIHGINHSFALTLFGYGKTELLGKNITFLIPGFYSYMDLAYNSSLQLPDLASCLDVGNESGCGERTLDPWQGQDPAEGGQDPRINVVLAGGHVVPRDEIRKLMESQDIFTGTQTELIAGGQLLSCLSPQPAPGVDNVPEGSLPVHGEQALPKDQQITALGREEPVAIESPGQDLLGESRSEPVDVKPFASCEDSEAPVPAEDGGSDAGMCGLCQKAQLERMGVSGPSGSDLWAGAAVAKPQAKGQLAGGSLLMHCPCYGSEWGLWWRSQDLAPSPSGMAGLSFGTPTLDEPWLGVENDREELQTCLIKEQLSQLSLAGALDVPHAELVPTECQAVTAPVSSCDLGGRDLCGGCTGSSSACYALATDLPGGLEAVEAQEVDVNSFSWNLKELFFSDQTDQTSSNCSCATSELRETPSSLAVGSDPDVGSLQEQGSCVLDDRELLLLTGTCVDLGQGRRFRESCVGHDPTEPLEVCLVSSEHYAASDRESPGHVPSTLDAGPEDTCPSAEEPRLNVQVTSTPVIVMRGAAGLQREIQEGAYSGSCYHRDGLRLSIQFEVRRVELQGPTPLFCCWLVKDLLHSQRDSAARTRLFLASLPGSTHSTAAELTGPSLVEVLRARPWFEEPPKAVELEGLAACEGEYSQKYSTMSPLGSGAFGFVWTAVDKEKNKEVVVKFIKKEKVLEDCWIEDPKLGKVTLEIAILSRVEHANIIKVLDIFENQGFFQLVMEKHGSGLDLFAFIDRHPRLDEPLASYIFRQVRAGQSRLVSAVGYLRLKDIIHRDIKDENIVIAEDFTIKLIDFGSAAYLERGKLFYTFCGTIEYCAPEVLMGNPYRGPELEMWSLGVTLYTLVFEENPFCELEETVEAAIHPPYLVSKELMSLVSGLLQPVPERRTTLEKLVTDPWVTQPVNLADYTWEEVFRVNKPESGVLSAASLEMGNRSLSDVAQAQELCGGPVPGEAPNGQGCLHPGDPRLLTS

SEQ ID NO: 3861 - protein, 1293 aa, Homo sapiens; identical to SEQ ID NO: 3860

SEQ ID NO: 3862 - protein, 556 aa, Homo sapiens
TMDRSKRNSIAGFPPRVERLEEFEGGGGGEGNVSQVGRVWPSSYRALISAFFRLTRLDDFTCEKIGSGFFSEVFKVRHRASGQVMALKMNTLSSNRANMLKEVQLMNRLSHPNILRYINSGNLEQLLDSNLHLPWTVRVKLAYDIAVGLSYLHFKGIFHRDLTSKNCLIKRDENGYSAVVADFGLAEKIPDVSMGSEKLAVVGSPFWMAPEVLRDEPYNEKADVFSYGIILCEIIARIQADPDYLPRTENFGLDYDAFQHMVGDCPPDFLQLTFNCCNMDPKLRPSFVEIGKTLEEILSRLQEEEQERDRKLQPTARGLLEKAPGVKRLSSLDDKIPHKSPCPRRTIWLSRSQSDIFSRKPPRTVSVLDPYYRPRDGAARTPKVNPFSARQDLMGGKIKFFDLPSKSVISLVFDLDAPGPGTMPLADWQEPLAPPIRRWRSLPGSPEFLHQEACPFVGREESLSDGPPPRLSSLKYRVKEIPPFRASALPAAQAHEAMDCSILQEENGFGSRPQGTSPCPAGASEEMEVEERPAGSTPATFSTSGIGLQTQGKQDG

SEQ ID NO: 3863 - protein, 556 aa, Homo sapiens; identical to SEQ ID NO: 3862

SEQ ID NO: 3864 - protein, 303 aa, Homo sapiens
SWNMDSDSCAAAFHPEEYSPSCKRRRTVEDFNKFCTFVLAYAGYIPYPKEELPLRSSPSPANSTAGTIDSDGWDAGFSDIASSVPLPVSDRCFSHLQPTLLQRAKPSNFLLDRKKTDKLKKKKKRKRRDSDAPGKEGYRGGLLKLEAADPYVETPTSPTLQDIPQAPSDPCSGWDSDTPSSGSCATVSPDQVKEIKTEGKRTIVRQEAQLMARNDGNFSSLLESIFPSDDDSWDLVTCFCMKPFAGRPMIECNECHTWIHLSCAKIRKSNVPEVFVCQKCRDSKFDIRRSNRSRTGSRKLFLD

SEQ ID NO: 3865 - protein, 1191 aa, Homo sapiens
QERLRSRSRPDRAAREAGSARGRQPKRTERVEQFLTIARRRGRRSMPVSLEDSGEPTSCPATDAETASEGSVESASETRSGPQSASTAVKERPASSEKVKGGDDHDDTSDSDSDGLTLKELQNRLRRKREQEPTERPLKGIQSRLRKKRREEGPAETVGSEASDTVEGVLPSKQEPENDQGVVSQAGKDDRESKLEGKAAQDIKDEEPGDLGRPKPECEGYDPNALYCICRQPHNNRFMICCDRCEEWFHGDCVGISEARGRLLERNGEDYICPNCTILQVQDETHSETADQQEAKWRPGDADGTDCTSIGTIEQKSSEDQGIKGRIEKAANPSGKKKLKIFQPGPGPVPTQLPVLWQVLEIAVSRSISAFTLLHCISCKVIEAPGASKCIGPGCCHVAQPDSVYCSNDCILKHAAATMKFLSSGKEQKPKPKEKMKMKPEKPSLPKCGAQAGIKISSVHKRPAPEKKETTVKKAVVVPARSEALGKEAACESSTPSWASDHNYNAVKPEKTAAPSPSLLYKSTKEDRRSEEKAAATAASKKTAPPGSTVGKQPAPRNLVPKKSSFANVAAATPAIKKPPSGFKGTIPKRPWLSATPSSGASAARQAGPAPAAATAASKKFPGSAALVGAVRKPVVPSVPMASPAPGRLGAMSAAPSQPNSQIRQNIRRSLKEILWKRFLFFILFRVNDSDDLIMTENEVGKIALHIEKEMFNLFQVTDNRAYKSKYRSIMFNLKDPKNQGLFHRVLREEISLAKLVRLKPEELVSKELSTWKERPARSVMESRTKLHNESKKTAPRQEAIPDLEDSPPVSDSEEQQESARAVPEKSTAPLLDVFSSMLKDTTSQHRAHLFDLNCKICTGQVPSAEDEPAPKKQKLSASVKKEDLKSKHDSSAPDPAPDSADEVMPEAVPEVASEPGLESASHPNVDRTYFPGPPGDGHPEPSPLEDLSPCPASCGSGVVTTVTVSGRDPRTAPSSSCTAVASAASRPDSTHMVEARQDVPKPVLTSVMVPKSILAKPSSSPDPRYLSVPPSPNISTSESRSPPEGDTTLFLSRLSTIWKGFINMQSVAKFVTKAYPVSGCFDYLSEDLPDTIHIGGRIAPKTVWDYVGKLKSSVSKELCLIRFHPATEEEEVAYISLYSYFSSRGRFGVVANNNRHVKDLYLIPLSAQDPVPSKLLPFEGPGKRRLSGWR

SEQ ID NO: 3866 - protein, 1058 aa, Homo sapiens
AQQPVGRRGGASGAGGGRRGTPRPRAGAGPGFQVSSGGCRLSKMRRFLRPGHDPVRERLKRDLFQFNKTVEHGFPHQPSALGYSPSLRILAIGTRSGAIKLYGAPGVEFMGLHQENNAVTQIHLLPGQCQLVTLLDDNSLHLWSLKVKGGASELQEDESFTLRGPPGAAPSATQITVVLPHSSCELLYLGTESGNVFVVQLPAFRALEDRTISSDAVLQRLPEEARHRRVFEMVEALQEHPRDPNQILIGYSRGLVVIWDLQGSRVLYHFLSSQQLENIWWQRDGRLLVSCHSDGSYCQWPVSSEAQQPEPLRSLVPYGPFPCKAITRILWLTTRQGLPFTIFQGGMPRASYGDRHCISVIHDGQQTAFDFTSRVIGFTVLTEADPAATFDDPYALVVLAEEELVVIDLQTAGWPPVQLPYLASLHCSAITCSHHVSNIPLKLWERIIAAGSRQNAHFSTMEWPIDGGTSLTPAPPQRDLLLTGHEDGTVRFWDASGVCLRLLYKLSTVRVFLTDTDPNENLSAQGEDEWPPLRKVGSFDPYSDDPRLGIQKIFLCKYSGYLAVAGTAGQVLVLELNDEAAEQAVEQVEADLLQDQEGYRWKGHERLAARSGPVRFEPGFQPFVLVQCQPPAVVTSLALHSEWRLVAFGTSHGFGLFDHQQRRQVFVKCTLHPSDQLALEGPLSRVKSLKKSLRQSFRRMRRSRVSSRKRHPAGPPGEAQEGSAKAERPGLQNMELAPVQRKIEARSAEDSFTGFVRTLYFADTYLKDSSRHCPSLWAGTNGGTIYAFSLRVPPAERRMDEPVRAEQAKEIQLMHRAPVVGILVLDGHSVPLPEPLEVAHDLSKSPDMQGSHQLLVVSEEQFKVFTLPKVSAKLKLKLTALEGSRVRRVSVAHFGSRRAEDYGEHHLAVLTNLGDIQVVSLPLLKPQVRYSCIRREDVSGIASCVFTKYGQGFYLISPSEFERFSLSTKGLVEPRCLVDSAETKNHRPGNGAGPKKAPSRARNSGTQSDGEEKQPGLVMERALLSDERAATGVHIEPPWGAASAMAEQSEWLSVQAAR

SEQ ID NO: 3867 - protein, 1058 aa, Homo sapiens; identical to SEQ ID NO: 3866

SEQ ID NO: 3868 - protein, 831 aa, Homo sapiens
GDSGGPLVCEEPSGRFFLAGIVSWGIGCAEARRPGVYARVTRLRDWILEATTKASMPLAPTMAPAPAAPSTAWPTSPESPVVSTPTKSMQALSTVPLDWVTVPKLQECGARPAMEKPTRVVGGFGAASGEVPWQVSLKEGSRHFCGATVVGDRWLLSAAHCFNHTKVEQVRAHLGTASLLGLGGSPVKIGLRRVVLHPLYNPGILDFDLAVLELASPLAFNKYIQPVCLPLAIQKFPVGRKCMISGWGNTQEGNATKPELLQKASVGIIDQKTCSVLYNFSLTDRMICAGFLEGKVDSCQVSGIKALYESELADARRVLDETARERARLQIEIGKLRAELDEVNKSAKKREGELTVAQGRVKDLESLFHRSEVELAAALSDKRGLESDVAELRAQLAKAEDGHAVAKKQLEKETLMRVDLENRCQSLQEELDFRKSVFEEEVRETRRRHERRLVEVDSSRQQEYDFKMAQALEELRSQHDEQVRLYKLELEQTYQAKLDSAKLSSDQNDKAASAAREELKEARMRLESLSYQLSGLQKQASAAEDRIRELEEAMAGERDKFRKMLDAKEQEMTEMRDVMQQQLAEYQELLDVKLALDMEINAYRKLLEGEEERLKLSPSPSSRVTVSRATSSSSGSLSATGRLGRSKRKRWRWRSPWQRPKRPGHGHGWQRWLPPGPAGLGLGQRHIEEIDLEGKFVQLKNNSDKDQSLGNWRIKRQVLEGEEIAYKFTPKYILRAGQMVTVWAAGAGVAHSPPSTLVWKGQSSWGTGESFRTVLVNADGEEVAMRTVKKSSVMRENENGEEEEEEAEFGEEDLFHQQGDPRTTSRGCYVM

SEQ ID NO: 3869 - protein, 645 aa, Homo sapiens
RYRAGIPGDGRKDYIRLTRPGLTLPGRAMFARGSRRRRSGRAPPEAEDPDRGQPCNSCREQCPGFLLHGWRKICQHCKCPREEHAVHAVPVDLERIMCRLISDFQRHSISDDDSGCASEEYAWVPPGLKPEQVYQFFSCLPEDKVPYVNSPGEKYRIKQLLHQLPPHDSEAQYCTALEEEEKKELRAFSQQRKRENLGRLGIVRIFPVTITGAICEECGKQIGGGDIAVFASRASLGLLLGQPSCFVCTTCQELLVDLIYFYHVGKVYCGRHHAECLRPRCQACDEIIFSPECTEAEGRHWHMDHFCCFECEASLGGQRYVMRQSRPHCCACYEARHAEYCDGCGEHIGLDQGQMAYEGQHWHASDRCFCCSRCGRALLGRPFLPRRGLIFCSRACSLGSEPTAPGPSRRSWSAGPVTAPLAASTASFSAVKGASETTTKGTSTELAPATGPEEPSRFLRGAPHRHSMPELGLRSVPEPPPESPGQPNLRPDDSAFGRQSTPRVSFRDPLVSEGGPRRTLSAPPAQRRRPRSPPPRAPSRRRHHHHNHHHHHNRHPSRRRHYQCDAGSGSDSESCSSSPSSSSSESSEDDGFFLGERIPLPPHLCRPMPAQDTAMETFNSPSLSLPRDSRAGMPRQARDKNCIVA

SEQ ID NO: 3870 - protein, 1161 aa, Homo sapiens
FVWRVFYVHASCMPPRARSWEGAHAPVGMHVAEAHACSSQQQQMPPAQFWMLEWLLHLCAFLSTPSFPHWCCCSNPHGSIADKPEEIVPASKPSRAAENMAVEPRVATIKQRPSSRCFPAGSDMNSVYERQGIAVMTPTVPGSPKAPFLGIPRGTMRRQKSIDSRIFLSGITEEERQFLAPPMLKFTRSLSMPDTSEDIPPPPQSVPPSPPPPSPTTYNCPKSPTPRVYGTIKPAFNQNSAAKVSPATRSDTVATMMREKGMYFRRELDRYSLDSEDLYSRNAGPQANFRNKRGQMPENPYSEVGKIASKAVYVPAKPARRKGMLVKQSNVEDSPEKTCSIPIPTIIVKEPSTSSSGKSSQGSSMEIDPQAPEPPSQLRPDESLTVSSPFAAAIAGAVRDREKRLEARRNSPAFLSADLGDEHVGLGPPAPRTRPSMFPEEGDFADEDSAEQLSSPMPSATPREPENHFVGGAEASAPGEAGRPLNSTSKAQGPESSPAVPSASSGTAGPGNYVHPLTGRLLDPSSPLALALSARDRAMKESQQGPKGEAPKADLNKPLYIDTKMRPSLDAGFPTVTRQNTRGPLRRQETENKYETDLGRDRKGDDKKNMLIDIMDTSQQKSAGLLMVHTVDATKLDNALQEEDEKAEVEMKPDSSPSEVPEGVSETEGALQISAAPEPTTVPGRTIVAVGSMEEAVILPFRIPPPPLASVDLDEDFIFTEPLPPPLEFANSFDIPDDRAASVPALSDLVKQKKSDTPQSPSLNSSQPTNSADSKKPASLSNCLPASFLPPPESFDAVADSGIEEVDSRSSSDHHLETTSTISTVSSISTLSSEGGENVDTCTVYADGQAFMVDKPPVPPKPKMKPIIHKSNALYQDALVEEDVDSFVIPPPAPPPPPGSAQPGMAKVLQPRTSKLWGDVTEIKSPILSGPKANVISELNSILQQMNREKLAKPGEGLDSPMGAKSASLAPRSPEIMSTISGTRSTTVTFTVRPGTSQPITLQSRPPDYESRTSGTRRAPSPVVSPTEMNKETLPAPLSAATASPSPALSDVFSLPSQPPSGDLFGLNPAGRSRSPSPSILQQPISNKPFTTKPVHLWTKPDVADWLESLNLGEHKEAFMDNEIDGSHLPNLQKEDLIDLGVTRVGHRMNIERALKQLLDR

SEQ ID NO: 3871 - protein, 378 aa, Homo sapiens
VESRSAWHEGEDQIDRLDFIRNQMNLLTLDVKKKIKEVTEEVANKVSCAMTDEICRLSVLVDEFCSEFHPNPDVLKIYKSELNKHIEDGMGRNLADRCTDEVNALVLQTQQEIIENLKPLLPAGIQDKLHTLIPCKKFDLSYNLNYHKLCSDFQEDIVFRFSLGWSSLVHRFLGPRNAQRVLLGLSEPIFQLPRSLASTPTAPTTPATPDNASQEELMITLVTGLASVTSRTSMGIIIVGGVIWKTIGWKLLSVSLTMYGALYLYERLSWTTHAKERAFKQQFVNYATEKLRMIVSSTSANCSHQVKQQIATTFARLCQQVDITQKQLEEEIARLPKEIDQLEKIQNNSKLLRNKAVQLENELENFTKQFLPSSNEES

SEQ ID NO: 3872 - protein, 378 aa, Homo sapiens; identical to SEQ ID NO: 3871

SEQ ID NO: 3873 - protein, 285 aa, Homo sapiens
PVCTALTPGRMTDDKDVLRDVWFGRIPTCFTLYQDEITEREAEPYYLLLPRVSYLTLVTDKVKKHFQKVMRQEDISEIWFEYEGTPLKWHYPIGLLFDLLASSSALPWNITVHFKSFPEKDLLHCPSKDAIEAHFMSCMKEADALKHKSQVINEMQKKDHKQLWMGLQNDRFDQFWAINRKLMEYPAEENGFRYIPFRIYQTTTERPFIQKLFRPVAADGQLHTLGDLLKEVCPSAIDPEDGEKKNQVMIHGIEPMLETPLQWLSEHLSYPDNFLHISIIPQPTD

SEQ ID NO: 3874 - protein, 136 aa, Homo sapiens
QARGAPSSPMCPLPLAAAAVAAPRAPLRLLNRGLAAAMSTAQSLKSVDYEVFGRVQGVCFRMYTEDEARKIGVVGWVKNTSKGTVTGQVQGPEDKVNSMKSWLSKVGSPSSRIDRTNFSNEKTISKLEYSNFSIRY

SEQ ID NO: 3875 - protein, 299 aa, Homo sapiens
SLSSCQTDPRPMSAPLDAALHALQEEQARLKMRLWDLQQLRKELGDSPKDKVPFSVPKIPLVFRGHTQQDPEVPKSLVSNLRIHCPLLAGSALITFDDPKVAEQVLQQKEHTINMEECRLRVQVQPLELPMVTTIQVMVSSQLSGRRVLVTGFPASLRLSEEELLDKLEIFFGKTRNGGGDVDVRELLPGSVMLGFARDGVAQRLCQIGQFTVPLGGQQVPLRVSPYVNGEIQKAEIRSQPVPRSVLVLNIPDILDGPELHDVLEIHFQKPTRGGGEVEALTVVPQGQQGLAVFTSESG

SEQ ID NO: 3876 - protein, 135 aa, Homo sapiens
RMMKCPQALLAIFWLLLSWVSSEDKVVQSPLSLVVHEGDTVTLNCSYEVTNFRSLLWYKQEKKAPTFLFMLTSSGIEKKSGRLSSILDKKELSSILNITATQTGDSAIYLCAVEAQCSLVTCSLYSNSTAEALQL

SEQ ID NO: 3877 - protein, 429 aa, Homo sapiens
KAFRLLAERGAAAAMLWSGCRRFGARLGCLPGGLRVLVQTGHRSLTSCIDPSMGLNEEQKEFQKVAFDFAAREMAPNMAEWDQKELFPVDVMRKAAQLGFGGVYIQTDVGGSGLSRLDTSVIFEALATGCTSTTAYISIHNMCAWMIDSFGNEEQRHKFCPPLCTMEKFASYCLTEPGSGSDAASLLTSAKKQGDHYILNGSKAFISGAGESDIYVVMCRTGGPGPKGISCIVVEKGTPGLSFGKKEKKVGWNSQPTRAVIFEDCAVPVANRIGSEGQGFLIAVRGLNGGRINIASCSLGAAHASVILTRDHLNVRKQFGEPLASNQYLQFTLADMATRLVAARLMVRNAAVALQEERKDAVALCSMAKLFATDECFAICNQALQMHGGYGYLKDYAVQQYVRDSRVHQILEGSNEVMRILISRSLLQE

SEQ ID NO: 3878 - protein, 335 aa, Homo sapiens
  misc_feature (1)...(335): Xaa = any amino acid or nothing
LPGSTISSSGCQAPGRADSSGGARNSRRGDSRPGSCNRQAVAPPCPSPGPQSRHWIHRGTAPQAGETRTLGRGSSAPNACSASVTPCCPSSPPSXSCLXPTRRSPQNSSSTEVYRGFWQHGLPSTXXPFSSXQWPGQHTQGCSKLLGKQTTHLPCSTWPAXXPSPSCLTRFRXWXPSLMCLWASSCSVCVXSPSGSCRHXLWGTHSTSRTCXARRSSALPTGLCTDDTSWASSSKARPCALQRPSSLSSLSPCLTCXWXLSSSSPMSARSPAGAETGSWATGSPRLTQWKSSRLTSTSHSARSAWKPSATESTPSWPRFSSWTSGEDPASPAPAI

SEQ ID NO: 3879 - protein, 166 aa, Homo sapiens
LLLTGYIQTLQNQQLSGNQQEMQAVDNLTSAPGNTSLCTRDYKITQVLFPLLYTVLFFVGLITNGLAMRIFFQIRSKSNFIIFLKNTVISDLLMILTFPFKILSDAKLGTGPLRTFVCQVTSVIFYFTMYISISFLGLITIDRYQKTTRPFKTSNPKNLLGAKILK

SEQ ID NO: 3880 - protein, 47 aa, Homo sapiens
QPETDTMVHLTPEEKSAVTALWGKVNVDEDAGDDLCQILVDRPRLRI

SEQ ID NO: 3881 - protein, 354 aa, Homo sapiens
TPLFDFWPGFVLSWLQPLSASLRARRAASGPPACRIMPTTVDDVLEHGGEFHFFQKQMFFLLALLSATFAPIYVGIVFLGFTPDHRCRSPGVAELSLRCGWSPAEELNYTVPGPGPAGEASPRQCRRYEVDWNQSTFDCVDPLASLDTNRSRLPLGPCRDGWVYETPGSSIVTEFNLVCANSWMLDLFQSSVNVGFFIGSMSIGYIADRFGRKLCLLTTVLINAAAGVLMAISPTYTWMLIFRLIQGLVSKAGWLIGYILITEFVGRRYRRTVGIFYQVAYTVGLLVLAGVAYALPHWRWLQFTVALPNFFFLLYYWCIPESPRWLISQNKNAEAMRIIKHIAKKNGKSLPASL

SEQ ID NO: 3882 - protein, 349 aa, Homo sapiens
KSKCRFPEGLSEGFGPMRKEALSSGSVQEAEAMLDEPQEQAEGSLTVYVISEHSSLLPQDMMSYIGPKRTAVVRGIMHREAFNIIGRRIVQVAQAMSLTEDVLAAALADHLPEDKWSAEKRRPLKSSLGYEITFSLLNPDPKSHDVYWDIEGAVRRYVQPFLNALGAAGNFSVDSQILYYAMLGVNPRFDSASSSYYLDMHSLPHVINPVESRLGSSAASLYPVLNFLLYVPELAHSPLYIQDKDGAPVATNAFHSPRWGGIMVYNVDSKTYNASVLPVRVEVDMVRVMEVFLAQLRLLFGIAQPQLPPKCLLSGPTSEGLMTWELDRLLWARSVENLATATTTLTSLA

SEQ ID NO: 3883 - protein, 508 aa, Homo sapiens
  misc_feature (1)...(508): Xaa = any amino acid or nothing
RIHREEDFQFILKGIARLLSNPLLQTYLPNSTKKIQFHQELLVLFWKLCDFNKVGQPRGALQGDGEQLPQXPGGRDSVRLRGVGQSCPSLELSPLGPSPHPXKFLFFVLKSSDVLDILVPILFFLNDARADQSRVGLMHIGVFILLLLSGECNFGVRLNKPYSIRVPMDIPVFTGTHADLLIVVFHKIITSGHQRLQPLFDCLLTIVVNVSPYLKSLSMVTANKLLHLLEAFSTTWFLFSAAQNHHLVFFLLEVFNNIIQYQFDGNSNLVYAIIRKRSIFHQLANLPTDPPTIHKALQRRRRTPEPLSRTGSQGGAPPWRAPAPLPLQSQAPSRPVWWLLQALTSXPRSPRCQRMAPCGPWNLSPSRAWRMAARLRGSPARHGGSSGDRPHSSASGQWSPTPEWVLSWKSKLPLQTIMRLLQVLVPQVEKICIDKGLTDESEILRFLQHGTLVGLLPVPHPILIRKYQANSGTAMWFRTYMWGVIYLRNVDPPVWYDTDVKLFEIQRV

SEQ ID NO: 3884 - protein, 267 aa, Homo sapiens
  misc_feature (1)...(267): Xaa = any amino acid or nothing
NGPRAPFSQEGQSTGPPPLIPRLGQHGAQGRIPPLNPGQGPGPNKDDSRGPPNHHMGPMSERRHEQSGGPEHGPERGPLRGGQDCRGPPDRRGPHPDFPDDFSRPDDFHPDKRFGHRLREFEGRGGPLPQEEKWRRGGPGPPFPPDHREFSEGDGRGAARGPPGAWEGRRPGGXTFPPGSRGPTFSSGAEEESFRRGAPPRHEGRAPPRGRDGFPGPEDFGPEENFDASEEAARGRDLRGRGRGTPRGERVTKDTWSGRIGCRIHWL

SEQ ID NO: 3885 - protein, 330 aa, Homo sapiens; identical to SEQ ID NO: 3781

SEQ ID NO: 3886 - protein, 151 aa, Homo sapiens
QCTQKAAEGYTQFYYVDVLDGKLACVNKCTKGTKSQMNCNLGTCQLQRSGPRCLCPNTNTHWYWGETCEFNIAKSLVYGIVGAVMAVLLLALIILIILFSLSQRKRHRPESEGEADFGLENATNNFGPTLETVDSGTELHIQRPEMVASTV

SEQ ID NO: 3887 - protein, 154 aa, Homo sapiens
VDFRVKTLLVDNKCFVLQLWDTAGQERYHSMTRQLLRKADGVVLMYDITSQESFAHVRYWLDCLQDAGSDGVVILLLGNKMDCEEERQVSVEAGQQLAQELGVYFGECSAALGHNILEPVVNLARSLRMQEEGLKDSLVKVAPKRPPKRFGCCS

SEQ ID NO: 3888 - protein, 89 aa, Homo sapiens
QNIDITNFSSSWNDGLAFCALLHTYLPAHIPYQELNSQDKRRNFMLAFQAAESVGIKSTLDINEMVRTERPDWQNVMLYVTAIYKYFET

SEQ ID NO: 3889 - protein, 386 aa, Homo sapiens
LVVTAITAILAFPNEYTRMSTSELISELFNDCGLLDSSKLCDYENRFNTSKGGELPDRPAGVGVYSAMWQLALTLILKIVITIFTFGMKIPSGLFIPSMAVGAIAGRLLGVGMEQLAYYHQEWTVFNSWCSQGADCITPGLYAMVGAAACLGGVTRMTVSLVVIMFELTGGLEYIVPLMAAAMTSKWVADALGREGIYDAHIRLNGYPFLEAKEEFAHKTLAMDVMKPRRNDPLLTVLTQDSMTVEDVETIISETTYSGFPVVVSRESQRLVGFVLRRDLIISIENARKKQDGVVSTSIIYFTEHSPPLPPYTPPTLKLRNILDLSPFTVTDLTPMEIVVDIFRKLGLRQCLVTHNGRLLGIITKKDVLKHIAQMANQDPDSILFN

SEQ ID NO: 3890 - protein, 129 aa, Homo sapiens
SWCWTGIFVLGTTNLRLEGSWYRSLWGPGFNTTTATLGFGAPQAPVGDVALNQPDMCVYRRGRKKRVPYTKLQLKELENEYAINKFINKDKRRRISAATNLSERQVTIWFQNRRVKDKKIVSKLKDTVS

SEQ ID NO: 3891 - protein, 967 aa, Homo sapiens
  misc_feature (1)...(967): Xaa = any amino acid or nothing
RGGGGDHKMADLSLLQEDLQEDADGFGVDDYSSESDVIIIPSALDLASTQDEMVERPLGRLDKYAASENHIXPDKMVAPEFASIPLREVCDDERDCIAVLGKNXPDWADDSEPTVRAAELEQVPHIALFLFKKTRLSITICFFSKFLLPYCGLDTLADQNNQVRKTSQAALLALLEQELIERFDVETKVCPVLIELTAPDSNDDVKTEAVAIMCKMAPMVGKDITERLILPRFCEMCCDCRMFHVRKVCAANFGDICSVVGQQATEEMLLPRFFQLCSDNVWGVRKACAECFMAVSCATCQEIRRTKLSALFINLISDPSRWVRQAAFQSLGPFISTFANPSSSGQYFKEESKSSEEMSVENNKRTRDQEAPEDVQVRPEDTPSDLSVSNSSVILENTMEDHAAEASGKPLGEISVPLDSSLLCTLSSESHQEAASNENDKKPGNYKSMLRPEVGTTSQDSALLDQELYNSFHFWRTPLPEIDLDIELEQNSGGKPSPEGPEEESEGPVPSSPNITMATRKELEEMIENLEPHIDDPDVKAQVEVLSAALRASSLDAHEETISIEKRSDLQDELDINELPNCKINQEDSVPLISDAVENMDSTLHYIHNDSDLSNNSSFSPDEERRTKVQDVVPQALLDQYLSMTDPSRAQTVDTEIAKHCAYSLPGVALTLGRQNWHCLRETYETLASDMQWKVRRTLAFSIHELAVILGDQLTAADLVPIFNGFLKXPSMKSRIGVLKHLHDFLKLLHIDKRREYLYQLQEFLVTDNSRNWRFRAELAEQLILLLELYSPRDVYDYLRPIALNLCADKVSSVRWISYKLVSEMVKKLHAATPPTFGVDLINELVENFGRCPKWSGRQAFVFVCQTVIEDDCLPMDQFAVHLMPHLLTLANDRVPNVRVLLAKTLRQTLLEKDYFLASASCHQEAVEQTIMALQMDRDSDVKYFASIHPASTKISEDAMSTASSTY

SEQ ID NO: 3892 - protein, 676 aa, Homo sapiens
VPLPAPSGLSGGGSRGAGCKKAPPGRAPAPGLAPLRPSEPTMAVPPGHGPFSGFPGPQEHTQVLPDVRLLPRRLPLAFRDATSAPLRKLSVDLIKTYKHINEVYYAKKKRRAQQAPPQDSSNKKEKKVLNHGYDDDNHDYIVRSGERWLERYEIDSLIGKGSFGQVVKAYDHQTQELVAIKIIKNKKAFLNQAQIELRLLELMNQHDTEMKYYIVHLKRHFMFRNHLCLVFELLSYNLYDLLRNTHFRGVSLNLTRKLAQQLCTALLFLATPELSIIHCDLKPENILLCNPKRSAIKIVDFGSSCQLGQRIYQYIQSRFYRSPEVLLGTPYDLAIDMWSLGCILVEMHTGEPLFSGSNEVCPQEGVDQMNRIVEVLGIPPAAMLDQAPKARKYFERLPGGGWTLRRTKELRKDYQGPGTRRLQEVLGVQTGGPGGRRAGEPGHSPADYLRFQDLVLRMLEYEPAARISPLGALQHGFFRRTADEATNTGPAGSSASTSPAPLDTCPSSSTASSISSSGGSSGSSSDNRTYRYSNRYCGGPGPPITDCEMNSPQVPPSQPLRPWAGGDVPHKTHQAPASASSLPGTGAQLPPQPRYLGRPPSPTSPPPPELMDVSLVGGPADCSPPHPAPAPQHPAASALRTRMTGGRPPLPPPDDPATLGPHLGLRGVPQSTAASS

SEQ ID NO: 3893 - protein, 63 aa, Homo sapiens
PEEYYPFSPTLQQLFFFLLDSDMGSRPESMGCRKNTVPRPASPTEAGTDPQTFLHTWVSECRD

SEQ ID NO: 3894 - protein, 328 aa, Homo sapiens
  misc_feature (1)...(328): Xaa = any amino acid or nothing
SLPLAPAPAVAGPVALCPAGLCPAQPGMPAGPAAASGSHPEVGSVLQRSSQPHWPNPWPGAGHLPPPAGPFPYNPPAGPGAAAGLAXSPPRSSPTPCSVGPQSCPANASAPPAQPCLAGAPPAASLPPPGPGSVSAAPAPGGPAPAEPPLGVPPVPAWLLPDSPPLPGTHSGPPPAAVSLPPAAAACPVVVPPPLPHHPPDLESPSAAAPNPGCAGGIRHFPPGSPEASSPLRPAAAPALLPLPRPPSXPVPWKPLHSPVAVAGGSFVAGGSVLPAPDLDQPRPSGPPAASPTPGPGVAQPPPGSAVLPTVPXAPPVSGAAPGRKREW

SEQ ID NO: 3895 - protein, 448 aa, Homo sapiens
  misc_feature (1)...(448): Xaa = any amino acid or nothing
FGAVSYRPGNGSCWVKVTASSDLSDLISCLCPPRSLCSSQACVLPVPGPSLLLPQGLHVGCASAGTRWPLSCSIDFQRLLAHEEETQKRRAKESGMAFTQLTFRDVAIEFSQDEWKCLNSTQRTLYRDVMLENYRNLVSLDLSRNCVIKELAPQQEGNPARSIPHSDIGTTXKTXHXRVLLQGNQEKNTRLXLSVERXXKKLQQSDYGPKRKSYLXERPTRXKRYRKQVYXTSAXLSFLPHPHELQQFQAEGKIYECNHVEKSVNHGSSVSPPQIISSTIKTHVSNKYGTDFICSSLLTQEQKSCIREKPYRYIECDKALNHGSHMTVRQVSHSGEKGYKCDLCGKVFSQKSNLARHWRVHTGEKPYKCNECDRSFSRNSCLALHRRVHTGEKPYKCYECDKVFSRNSCLALHQKTHIGEKPYTCKECGQAFSVRSTLTNHQVIHSDK

SEQ ID NO: 3896 - protein, 99 aa, Homo sapiens
MVQSCSAYGCKNRYDKDKPVSFHKFPLTRPSLCKEWEAAVRRKNFKPTKYSSICSEHFTPDCFKRECNNKLLKENAVPTIFLCTEPHDKKEDLLEPQEQ

SEQ ID NO: 3897 - protein, 126 aa, Homo sapiens
SHGLSRAPHLSAAPAPALASRPCFSSAPCSQGGGGGGPATMIHFILLFSRQGKLRLQKWYITLPDKERKKITREIVQIILSRGHRTSSFVDWKELKLVYKRYASLYFCCAIENQDNELLTLENVHR

SEQ ID NO: 3898 - protein, 138 aa, Homo sapiens
SEQEPLLGDTPGSREWDILETEEHYKSRWRSIRILYLTMFLSSVGFSVVMMSIWPYLQKIDPTADTSFLGWVIASYSLGQMVASPIFGLWSNYRPRKEPLIVSILISVAANCLYAYLHIPASHNKYYMLVARGLLGIG

SEQ ID NO: 3899 - protein, 232 aa, Homo sapiens
FRGRPGIPEREGKGNHSFVEVARVIVVDLHSRLGGAMAERKGTAKVDFLKKIEKEIQQKWDTERVFEVNASNLEKQTSKGKYFVTFPYPYMNGRLHLGHTFSLSKCEFAVGYQRLKGKCCLFPFGLHCTGMPIKACADKLKREIELYGCPPDFPDEEEEEEETSVKTEDIIIKDKAKGKKSKAAAKAGSSKYQWGIMKSLGLSDEEIVKFSEAEHWLDYFNALAIQDLKRMG

SEQ ID NO: 3900 - protein, 119 aa, Homo sapiens
VPATSSNVSPSSSESSEPDLSSRSSSSDAPSSSPSVPSPCSLSLSSPESPLLPTLLSSKSPAGSAGPTCGCPSGPGLRATAPSRLSSSIAAHSSSAPETSRPAAARERSPPLHDRESHE

SEQ ID NO: 3901 - protein, 51 aa, Homo sapiens
GEWAVPPAPGGQGVSIPHGPEPGQGSGVHIAPRQGEGSDRTEPLICPKAAP

SEQ ID NO: 3902 - protein, 67 aa, Homo sapiens
NPAARSAAAREGSPALPPPPVSSSSGLGLLLPLSPPGSHAANPALSPRAPHSHYRPRPRCGPRRRPR

SEQ ID NO: 3903 - protein, 111 aa, Homo sapiens
  misc_feature (1)...(111): Xaa = any amino acid or nothing
NNMRNPHLSSNHYLNLARTETVFARMESVKQRILAPGKEGLKNFAGKSLGQIYRVLEKKQDTGETIELTEDGKPLXVPERKAPLCDCTCFGLPRRYIIAIMSGLGFCISFG

SEQ ID NO: 3904 - protein, 104 aa, Homo sapiens
  misc_feature (1)...(104): Xaa = any amino acid or nothing
AMSECPLILYIHKHIDTYSQSYLFNDLFYPVYSGGRMVTYEHLREVVFGKSEDEHYPLWXVLFGKXYAVAPNALMFIRFMXNCTFVPKLPXVMDLKXXLQYKSR

SEQ ID NO: 3905 - protein, 288 aa, Homo sapiens
QPPPPPPPPPSPPPPPFPPARALSHLRLHPDACLFPSPFPLPCSTMPGMMEKGPELLGKNRSANGSAKSPAGGGGSGASSTNGGLHYSEPESGCSSDDEHDVGMRVGAEYQARIPEFDPGATKYTDKDNGGMLVWSPYHSIPDAKLDEYIAIAKEKHGYNVEQALGMLFWHKHNIEKSLADLPNFTPFPDEWTVEDKVLFEQAFSFHGKSFHRIQQMLPDKTIASLVKYYYSWKKTRSRTSLMDRQARKLANRHNQGDSDDDVEETHPMDGNDSDYDPKKEAKKEGMS

SEQ ID NO: 3906 - protein, 170 aa, Homo sapiens
KVCNCCSQELETSFTYVDKNINLEQRNRSSPSAKGHNHPGELGWENPNEWSQEAAISLISEEEDDTSSEATSSGKSIDYGFISAILFLVTGILLVIISYIVPREVTVDPNTVAAREMERLEKESARLGAHLDRCVIAGLCLLTLGGVILSCLLMMSMWKGELYRRNRFAS

SEQ ID NO: 3907 - protein, 114 aa, Homo sapiens
ILIMSNCLQNFLKITSTRLLCSRLCQQLRSKRKFFGTVPISRLHRRVVITGIGLVTPLGVGTHLVWDRLIGGESGIVSLVGEEYKSIPCSVAAYVPRGSDEGQFNEQNFVSKSD

SEQ ID NO: 3908 - protein, 223 aa, Homo sapiens
LGTLLGWRAPLFSRCLAFHSPFILLNTPKLVKTAELPPDRNYVLGAHPHGIMCTGFLCNFSTESNGFSQLFPGLRPWLAVLAGLFYLPVYRDYIMSFGLCPVSRQSLDFILSQPQLGQAVVIMVGGAHEALYSVPGEHCLTLQKRKGFVRLALRHGASLVPVYSFGENDIFRLKAFATGSWQHWCQLTFKKLMGFSPCIFWGRGLFSATSWGLLPFAVPITTV

SEQ ID NO: 3909 - protein, 264 aa, Homo sapiens
FRAAGRPAAAMGDIPVVGLSSWKASPGKVTEAVKEAIDAGYRHFDCAYFYHNEREVGAGIRCKIKEGAVRREDLLIATKLWCTCHKKSLVETACRKSLKALKLNYLDLYLIHWPMGFKPPHPEWIMSCSELSFCLSHPRVQDLPLDESNMVIPSDTDFLDTWEAMEDLVITGLVKNIGVSNFNHEQLERLLNKPGLRFKPLTNQIECHPYLTQKNLISFCQSRDVSVTAYRPLGGSCEGVDLIDNPVIKRIAKEHGKSPAQILI

SEQ ID NO: 3910 - protein, 168 aa, Homo sapiens
FFTMHRKKVDNRIRILIENGVAERQRSLFVVVGDRGKDQVVILHHMLSKATVKARPSVLWCYKKELGFSSHRKKRMRQLQKKIKNGTLNIKQDDPFELFIAATNIRYCYYNETHKILGNTFGMCVLQDFEALTPNLLARTVETVEGGGLVVILLRTMNSLKQLYTVTM
